United States Patent Application Publication US 2022/0290142 A1 - sequence listing, part 5

SEQ ID NO: 1280 - DNA, 58360 bp, Homo sapiens
gtttctttcggagcggcggtgaaggtcctgggtgaggtagggttggatggtgcttgccgcgtatcatggctgcctccggaaaactcagcacttgccgtctccctccgttgcccacgattcgagaaatcattaagttgttaagactgcaagcagcgaagcagctatcacagaatttcctcctggacttgaggctgacaggtggatggcttagcagtgctccccggatgtctccccagtgtccgtgggggcgtgggccggggggtcttgcacgtccccgcgggcgggtgtccaggcactggcgtgcgacgggcttttggtcaggtccttcgacctctttgtatcagaactccggtcccaccgcccaggagacacgtgaagtgcgttgattgctcacaaaactccgcgttcgggggggtgtagcctgccggcaggctgcataaatgccaagctccctaggggaggaagggttcatgggtcgtgaaaggcgctagtgaatattggaatctgggtcactgtgaaatcaatcattctgaaatagtacagcacatgctgactgcagttgctttacatgcagtttaaagttaccagaatttaaattgatgcgaggattttatcaataacttggtgaaaagagtatccctcgtatgattcgttttttaaacgtttacctgttcagtctaagcctcgggggcgctaatattcattcataagtacatattacacaagcaacattgtgctagtgccgggggtaggatatgggcgtgaacaaggcggtgtttcctcgaggagcttacttttagcaagtttacattcccacacctaattgtttaaagttactttttatgagatataatttatgtgcaataaaattaataagtttgaagtgctcaatttgatgagttttgacgaatgtatttatatattggtttaaccaccatcaccattgcttagtgatgttctatgagatgaggttgcaaaaatatattacaaatacgtctactaagtcacggctggagtacttaggttttgagattttcatatttcattctatttagtcccacttcagaagttgaaaagagcagtaaatcacacccaaaaagttcattttcacttaaatgaagcacactccagaaaacataaaatgttttatttcttggacatgtagtctttattctgcctgtaccaatatgactttggataaaataatttaactcaagttttctcttttttttttttttctttttttaagatggagtttcactcttgttgcccaagctggagtgcaatggcatgatctcagctcactgcaacctccgcctccccggttcaagtgattctcgtgcctcagcctcccaggtagctaggattacaggcgtgagccaccgtgcctagctaattttgtgtttttagtaaagacagggtttcactatgttgctcaggctggtctcaaactcctgatctcaagtgatccactcgcctcggccttccaaagtgttgggattacaggtgtgagccaccatgtccagtagtttcctcatcttttaattggaagaagggcctactactttaaaagattgcccactctaaaattctttggttctagtaatagctagtaccagccttttctgcttgttattagccacattctaaatataaatcaccattctcagggcagaagttataggtctgtgtattttttaaaatccttcaaatacattttctcatgagcctttatcttcaggagtaagtttcaaattctagatattatccactctttctatgggaaccagagttaacggagatgagggtacttagctgaggttagaagctcaggcagaagagagcaagattgaaatccaagctcattgatttgatagcgcttctttaatattcatttgtatttcaatgtgcctgaaaagtttgagagcagagacctgcctactgttgtagctctccattttaaagaaggagagtattaaatttattccataatgtatcattcctgttccctctgagaggcattggctttaggatttatacctatgttgaagtccatgaccttgtacaaataaaacaatagacaaggaaactgaaaagttaagagaaatgaaattgggataggagtccttggttaacatgtaaggattaggtgagaatgtgtgtaaatccatcataatagataagatggtcagtggatgctaattccctccctgttaaaagactaaaccatttttggatggctgagaaactagtttccgcattttagctgacaaagttatgttgttgaaaacaagcaaaaataggactgtgaacacctacaagaagtgctggtatgtttttagtgactaaatttccactatcctaggaagaccagttccttggatttccatatctcagaatcactaagaccagcccattgcatgtttttccagatgtgatgactggttgcacagagtcagtactctacctttttatgatgtcttaagggctgctaacttgaatttgattaattaaaaaattaatttttctgtattaacatgcatgtgtgcaaagctttaaaaaccctcaactgctcaatttaactttttcctgaaaatgactaagaattcaaatttctgaaaatcttacgatctaagaacttattgccattgccatagtgaccaccaccaagatgtctctagataaaaataagacttcagcactttttgcttttggatttcactagcaatactgaagattctgaatgtgaaactagtattgcttattcagatattcaatgttcaataactatagaaaagtgctgcattcttatccagtctgttcttaggagtcggttggtttcaaatcagtttgaaaggaatttgcatgggacagatggaaactacaatattagctaaatttaagctaagaaactttgtcatgataatcctgtgtgtgttaagggactggtacagttcaatggtgatgtggtagcatattcgattgccacttcatgttaatttaggtagagagttaaatagtcaaataaatattatacataaaggatcaattgattgggtaatggctgaatttttatagaagatttttctctctaaatttcatacgttgaaatttgccaagttaattgagataactaaaactctttttcctctagataagattgtaaggaaagctggcaatctgacaaatgcttatgtttacgaagtgggccctgggccagggggaatcacaagatctattcttaatgccgacgtcgctgaacttctggtggttgaaaaggacactcgatttattcctggattacaggtgagatgcttaaagtgtctgctttaggaggcaaaagctgaatttaaatctttatgccatgatgcttaaaccccaaggtatccaaagattatgtaggtttttcctcaactatagatccccaaggccccattccagagattttgattccatagtctggagaaatctggaaatctccatttttaacaagcactctcagagggtctattgactacaccttgaaaaaaacctgctttaagcatttatgctaaacaaattaattgttttgtgtgatttttttttttaagtctgctaatagctatgcatgtcgtggcccattccttcaaaaataaataaaaataaataatggccagtaatgactcattggtatgacttttgagaacttcatttaggttcaaaaagcatttccacaaacaaaagatgagtaagacatatgcacgtttgtcatcatgagagactaattatgaagcttaagcattcttttataaggtaaattttttaagtgaaggaaggaagttgtacttttatagatttaggatgaggtttaaatgaaatgatacatgcatctttaaaatacaggcactgttattgtataagaaatgagagttgaaggaactgggcatgtttcaactggagaaaagaggccctgggtaagagtgtatatagcagcacatccaaggttgggggtacataggataagcttgttttgatcttttctaagaaagagctaaaacaaatagatggaaattgagggaggcaggattgaggatttgaaataaggaggaacttactttttttaaaacgctggcaaacagtgaaatagattgtatcagggatcttgtaaagggatttcctcataggggaacacttaatgtcttaaaggcctttgattcctccataattctaaaattttaaaagagtcctgaacctttggctcagatgagaagcaatttatcatgtgactataatagaataatgtagttatctacgttattacttccatacaaaaggacaaattgattttaaacgagtatattctcatactaacttgtatatatattaatggaaaaatgttaatttctgtcagaacggtttgagaagttgtttttgaaaacctagaactttgtgtgcatgtatctgatttttttaagaaacctagcagtttttccctaatcttgctttatctagtttttatgctttaaaaaattacataatatttccttttatctagttttaccagtctatactaacagaattggtttcagatactaaactttatgttgagatagtcacatggcacatattccttgatcaaatgtggaatttaatagtgatttttgttttgaactgtgttcttattttaagaattatatataagttggaggtggacgtgggaatattattatttttggtgagatcatgagattataaaaagaaactaaataactgtataatccccttcgggcttattcgtgtagccctttttggacatagggaatactcacctgacttttttgctcttaaaaagacttcttgtccctcatatctcaccattcgttgggtttattctttcttattaggccagggggtgaaccagatttccattcattcccacatattcccctctttgatatgaacaaaagatctttgaaggcagattgttgaaaagagcgactgccacccttctcttctcagtttcccccaaacccataagtcactgcgttcctaattccagccttgttttatctcattcgatttatcatcatctgacatactgtatatatgttcttcccatttgtttgttaattgactcacctgtctggaatgtaagtaccatgagggtagaaatgtgtgtctgttttgttccctgctgtacctctatctcacgtaacagtgcctagcacatagcaggtgttcagtaaatgtctcacatgagaaacaaaaaagttgaccactatttctgcatctgtgtatatatatacacaaatgtatatgtatctctcatattaattaaatgtatcattaaatagtgaaagtaaatatttgtgtagcattgataatgaaaaagttttatgctcttttttctaaatgtgaaggctgatttcaagttaaattactctagaggaaatgtatatttgacttctcatttgtttttagtagaaacaaaattaattcttagtatcttatatgcaggaaaggaatttgccttaaaaagaaatgttgggtactaaaatatcaaataggcctttttttccccagtgaggaatgtttcaatatgtaaaactactttgttttagaggtactaaattaatcataaaactgagtaaaagcagaaagaaggtgatctattttaaggataccattttagtgatttctaagctaatagaattactttttaaagaaattgtaataatttataaaataccttctagctgaaagcctgtcatttgtagcttaattcaattcctacagtattttcatgaggcagtttaggggaaagaaaaactggtgctaacatacaggattcatgctcagcatgttataaaggtaagaaaaacatgtctagtatgtttagtatagtatagttttgtggtaaagacgcagacttcagcatcagactgcctgggtttaacttcagattctactactagttgggtgactttgggtaggtaattttgtcctctgtgcctcagtttgctcttaggactcatatgaggattcagtgtatgcctgatacttagaaagcactgaataatatcttagttataagtaatcagttaaattattatccccatgccttgattacctctggtgattaatgactgatcaggagactgctgatctggaaagaggtataggaggaagtcgtgttattccattggagcactagaaaattctccagtgctatggaaacattggggtgttttccaactcatcaaacttgcattggacacctagggtttcttttcttgatgttgtcacattctgattgtgcatttctaggtttttaagtttttcgttgtttcttgttacatttttatgactgactggattctctgtgctgtggagaggagtgaggagatttcctgaatctcaaggagcttgaggccttgataggtttttcctctttctgaactggaaataacttagatttcctgacatctcagggaatttgaagctttgataggttcttctccatttgtgaactggagataaattcgtaaatcactcgtaccctttcagagaagtagtacagatttcctctcattttttttttttttctgtttattttagagcaaacctgtgcaacacacggcccacgggctgcctgcggcccaacacaaattcttaaactttcttaaaacattatgaaatttgttttgcattttttttaagctcatctgctatcgttagtgtattttatgtgtggcccaggacagttcttcttccagtgtggccgagggaagccaaaagattgcaattgcacagcactgttttaaaggcttcatatattaaaaataataatagctaatatttatggagagtttatcacagtaaatactttgtgatatggtttggctctgtgtcctcacccaaatctcctcttgtagctcccgtaattcccatgtgttgtgggagggactcagtgggagatgattgaatcatgggggtgggtctttcctgtgctgttctcatgatagtggatgggtctcacaagatctgatggttttaaaaatgggagtttacctgcacaagctctctctttgcctgttgccatccacgtaggatgtgacttgctcctacttgccttccgtcatgattgtgaggcctcccccagccatgtggaactgtgagtctaaacctcttttgtaaattgcccagtctcgggaatgtctttatgagcagcagcatgaaaacgagctaatacactttgttttacagctttgttgagatacagttgatgctcagtaaactgcacatacttaaagtgtacaaattactgaggatttgtctgtgtgtatatgtgtgtgtgtgtgtgtgtgtgtgtgtgtgtatgtgtttgagacatggtctcactctgtcacccaggctggagtgcagtgacacaagcacaactcaacagctcactgcagccttgacctcctgggctcaagcaatcctcccacttcagcctcttgagtaggtggaactacaggtgcacaccaccatgcctggctgagttttgtatttttttgtagaaatgggatttcaccatttctacatggtggtctcaaactcccgggcttaagcaatctgcccacctcagtctcccaagatgctgggattacaggcaagagccaccgcgtccagttaactgagttttgacatatatgtgattgcatgaaaccattatcacaatcaagaaaataaacactcatcgtcctcaggattcctcatgtttctttgtaatctgtcccttccttccccctttatctatctcagacaaccactaatctgctgtcactgtagattattttttatttttcagaattttatataaatggaatcatacaatatgtactttttttttggtctggtatcttttacttagcataattattttgcagttcatccatgttgaggtgtttatcagtagtttgctcctttttattgctgaatagcattccattttctgaatataccaaatttgtgaatctattcacctgttgatagactttgggtttttcccttttttggctcttatactgtaataaagcttttatgaacattcatatgcaagtgtttgtgtggatacacacttccatttctcttgagtaaagacctaggagtagaatatccgggtcctgtgtagaatatccgggtcctgtggtagacgtatattatactttttacagaaataccaaattgttttataagatgactgtgccatattacattcccaccagctgtatttcagagctcccattgctccacatgcttgctcagacttggtatggtcagtctttttaattttagccatcctagtgaatatgtaatggtatcctcttgtggtttttatttgcatttccctaatagataataatactggacatacgatgtgcttatttgccatctttgtatcttctttggggaattatttgttcaaatatttttagtacttttactttttttgtcttattgaattttaagagatatttatatggttcagatgtgaggctttgtcagatacagattttacaaatgttttctcagctgtggcttacctttttattttcttaacaatgtctttgaagaacagaagtttcatgtttatgaagtgcaatttatcagttttttcttctagactttatgctttttatgtcttatttttaaaatatttgccaaaccaagatcactaaaaatttgttttatttatatataatttaatatatatttatatatataaatatataatttaatatatatataaatatataatttaatatatatttatatataaatatataatttaatatatatttatatatataaatatataatttaatatatatttatatatataaatatataatttaatatatatatatttatatataaatatataatttaatatatatataaatatataatttaatatatatttatatatataaatatataatttaatatatatataaatatataatttaatatatatttatatatataatttaatatatatttatatatataaatatataatttaatatatatttatatatataaatatataatttaataatatatttatatatataaatatacaatttaatatatatttatatatataaatatacaatttaatatatatttatatatataaatatataatttaatatatgtttatatatataaatatataatttaatatatatatataaatatataatttaatatatatataaatatataatttaatatatatatataaatatataatttaatatatatataaatatataatttaatatatatataaatatataatttaatatatatttatatatataaatatataattatgtatatatataaatatataatatataaataatataaaattattttataattttagcttttacatttaggtctttgatacattttgagctaattcttgcatatagtgtgaggtaaggtttaggttctttttttaacaccattttttgaaaatactgtcttttcctcattgaattgccttagtactattgtcaaaaatcagttggttttatgtgtgtcggtttatttctgaacttccaattctgttctatttatctataggtctattgtttcaccaacagccacctgtatttattactatagactgaagactgaaaaagccttcatttttgccttcatttttggaaaatattgtggcagtattttgttttattactctaaaaaagttgctccgccattttctcacttgcattgtttctgacaaactttttgcattgcaaaaagtttctgacaaatcttttttcatccttacctttgttcttttttctctggctgcttttgatactttctactgtttttgagcaatttcatcatgatgtgcttacagtagctttgttcgtgtttcttgtgtgtagaattcattgagcttcttggatctgtaggttttcctgtgctttttgttgtctaatgtctgaaaattttgtttcatctattttctctgttttttaaattggtttaaggtaggagaatatgcctggtcccttagactccatctttgtcggagtaggaagtttcaggattcttcttaaccattaaattatgtggttgttttgaggaatttttggagagagaaagtaagtcattgtattgttagtattgcctttggttttttgtttgtttgttttttgagacaagagtttcgctcctggtgcccaggctggagtgcagtggcgtgatctcggctcactgcaagctccacctcccaggctcaagcgattctcctgcctcagcctgacgagtagctggaattacaggcgcccgctaccatgcccagctaattttttgtatttttaatagagactgggtttcatcatgttgtccaggctggtctcgaactcctgaactcaggtgattcacctgccttggcctcctaacctttgggttttcttataggtaaacactggttatttccatacttcattggcatagtggaaagttcatgggattgagcatcaaatagtctagtgaccaaatctcagatatgccacctactagctttgtgaccttaagcttgctgttaaaccttttttagcttcaactttctcatctgcagcatgggaataatagttctcttctgtggatattgcaaagatggatagaaatggatgtaaagagcctggcataatcccagtagccagtaatagttgctattttaattattccccttccagtcatcttattaagagacatatgaggtaatttcagcgtccaggcagaaagagctatttttagttagagataatgaagttttgaaattctttaatctctaacaatttttttaaaaaggaagattgccttccttgctattgtgacgtaactatttactttacacatgtaacttacttgatgttaccatagttaatcataacatagacaaaactcaacaagtaagcaaaaagtggcttacagccaaagtgactttttagtccatacaaagtataagtacggagatcagtggtagaagcaggcccactgacaactgtaagaagtaacagttgttacagtaacagaaagctataaaagacaaatataaacgcagaagaaacaataataataatagggtagcaaaaacaccttcgtaactattgaggccattattctaaagacaacagtaaccctaggtcatcaagaaaagggtgaaatttggtttagtgttcttggcctaaggaagaggattgtgccatatagcatccctatacattggcctaaggaagaaggttgtgtcgttggcatacctgtacgttgtgtacaatgtataatgataaaattaggataattagcatatccacctcgaacatttatcatttatttgtggtaagaacacacaattattatgtgtcaattaaaaataaaacaaacaaatagaataaaatctgatatggtttggctatgtccctactcaaatctcatcagtgagctctcacgagatctgatggttttataaggggcatttctcccttttgcttggcacttttccttgctgccaccatatgaagaaggacgtgtttacttccccttccaccatgactgtaagtttcctgaggcctccccagccatgctgaactgtgagtcaattaaacatctctcctttataaattacccagtctcaggtatgtctttattagcagcatgagaacggactaatacaaatctaatgtcaaatttaaaaaagagagtgaaagatttgataatgacattgaaatatccaacaaacttaaaattcctataaaaataattttagatatttgtagtatcatttaagatacgagtggttatgtgatttctgtttgtttttgctctgttcataaatttaaaatactgagaaagtctgaaaacgtacatttttaatacaattcaagttattttacatactaaaaaaaaataaagcaagctaattgacattttgacatcatgctgtaaccttccctctaaaagtctgaaaagtctgctgtaacatcttaattttttaatgaataaatagcagtagtcttttatatgtgttatatataagaatacaaattttatctttcacctactatattttatactatagattctttccttctcatacagtttgcttaacagttttgcccagccctgttacaaatatttatttcaacagcatttgggccctactatgtggcaaatcaggaagaagataattaacgtaactacagtgttggctgccatgaaccccttacatgagaaggtgacataaaatatgcaaaatgggtattcaatgtagtatttcttcttaaggaatcgataattttgtgtaagttctaagaattgcctaaattctttcctcatccagtaaaatcaacaaaaagctgcctagccaaaccacaattacttgccccctgcagaggagctttcactaagactttggttagagaagagatttttttttaaatggccacagaaagaatgcttctacatttgtgttttaacttgtattaaaggcattgtttattacattgtttcatgtaccctttacaaagcataataccagggaaaaaaaaattatctcttggagtcttggtacaactactattgaaaagcaaaaattatatatttcattatgtaaatcacgagagctagctgtcatgattgttaggattgttagctcttgtgttttacatatatgcttcccctcttcatggtttgattttcggtttcttcttttatagccttatgtaatgatgccttttactctaaactggcatacatctcattttggaagaatatagaattgaacactaaaataaaaatgaaagaagagtttgagagtgtctgtaaaaatactcatttggctgtaatctggtgcctgcatttgtgattggctgtgcctttaagcacattctgtgaaaacacctccagggttttgaagtgtaatgctccattgttattctcgaatgcatataatagtgattttcccaccccctccaccataccccatgtatcattatggtagtgaaaacatttctgctactggttggctagaaggtcttcatgtgttattgcctaatatcatttgaagtgtttaaaagggtactgtctataatcataatatcaatttagtctgtctagcactgtttccccataattgctttaaggacttcacataaatctgttaacatgagcgttcattccttctgcagtggggagttgcaaagtagatcaagctacaaattgtcaagaaggaggtgtaccttttaaagtgtggggaggatttggtttgtcattgactgagattgaaaagtgaatgggaatccaaaagaaatgtagttttaaacctaggaaaggagctgggtatggtggctcacacctgtaatcccagcactttgggaggccaaggcgggcagatcacttgaggtcaggtgttagagaccagcctgggcaacatggtgaaacctcgtctctactaaaaatacaaaaattagccaggtgtggtagtgcacacctgtaatcccagctcttagggaagctgaggcaagagaattgcctgaatcccaggagcagaggttgcagtgagccaagattgcaccactgcactccagcctgggcaacagagcgagactccatctcaaaaaacaaacaaaaaacaaaaacaaaaaagaaaacccaggaaaggaaggtaaatttatttatattatattagcttttagatatacagttgtacctgtcagggtgggaaaagttaacacttcaaattaagttaacgtcaaacagccaaatttacattgttctgttgtgttttagtcctaactactaattattaaatactttctatatattgacatcatgagacttaagctattagttctgcctctttgtttttggcgtgctaatttgttttaactttgtgaacataattatagaaaaaattttagcgttttccattgatgataagtactgtgattaaatatgtggttttatacattaagagcatgccgcatagagagctgtctctttttaaatttttagtatattgaaatcgttatattttccaagatttattgcctggaactcaccagatcaagttttactaactagtggtaatttaaaataatctataagtacattagtatcagaggcatgcaattatttttgctaaactaccatggctaaacatatcaaactagatgatttccagacttaaaagtatgtttagcctcttaccaatagaggcgtttcagctatttatttctggaagattatttgtataaatctgcctgattgacttgtgaagtaaatctttgcaagtttctagaccctacaaatttgggaagccaacatctcccaggctaaaagagaaagtttccagctttacagagacctgaatgccatttggtcattcacttattcatgcacttcttaaatatgtattaaacactcaccatgcattgctgtagctacaggggctataaaggtagataggaaatgggtcctgcccttaaggagcatatgtccttgcaggggaaattgagatacagtttgtaagtgctgtaaagaggcagacgcacagtacagtgttgacacaaaggtggactaatccacaagccatgtttcttggtccagtgtctcctctctggcttctgtgatcatcttgtttatcctccctcttggttgtatgagttgggcaaggagaggtgttaggagaaaaaaaatcagctttaatggacctagagaattaggaccaaggtaggctcagggcaaatgttccctttgagcctgttcaccatccctataaagtgctgggcacattctagaatcttggcaactgagttgaagccaaggttctccgagctctgacttaatgtgggaagagagtcacttcttcccttgaaatctaccttagcagtgatgtttcttctcgttgatacattcactcctgccttttaagtaaatttataagctcagagacttttttaatatttaactaaggacttcaagaatcagttttgtgttgggcatggggcacttaacacaatatgaatttatagataacttagctataaagttttttgaattaagtgccaactcttcagtactgtgagagtgtggtggtagagtaggtggaatgaagaagaaaaagactacaagggaaaaagtgctttttttcccctttttgctcacaaagagaaggaaaaggaaagaaagcaaatgattagtacgtggaaataggttgggaagtagctattgttaaacatccagggtaattcattaggtcgataaggggtatggatcaacaaatattaagattagggatgctctggtcagaggagtatctcggagtgccaagtggagactggcatcgacaggtgactttctacttggctaaatctacgcatatattaagttaaagatcttgatgatatatagaatcctttgtatatatatttaggctataaagatttagttaaattaagcttatctttcatatggttgactcctgattaattctctgtatttcatgataatgtccttagtctctaatttaaaaacttattgataggagtgagtttattgctaaatctatatagaaatagaagtcatcctgaaggtcaaaattacactaatatatttgtaaaattgtaagctagtgttgtactgtctgttactatccctaatcattcataggtgttaaaatgaaacgccaccattgtctgttgcaatagacgtgatgcagtatttgttcattaatgatcacccctggtctctgacttttttaactgattttttaaatgcacaggtttaaaaagtttagttttgttactcgcataagtatatgagctcattttactgatctttttataaactagatgctttctgatgcagcacctgggaaactgagaattgttcatggagatgtcttgacatttaaggtagaaaaggctttttcagaaagtcttaaaagaccctgggaagatggtgagtgcttttgggtagttataaaacatttcttttatgattatttatatcacaaatgttcattttatgatacatttattacaaatgtcttatatgtttatattttaaattatctgaacagaattaaataatgtgtattataattttctcttgctacttgcttccaaattataaaatctagttactttttttagttctaattcatttgtctcatttccaaatgttttgtattctgtgcaaataaactaaccattttttgtgataccatataaggatagggtaaactatcaattgttatttgttccaaatagtggaaaaaaagaagtgctttagtaaactaagccatgcccaagccattgttttaactttttctattattcttcacattcaatgaccaaccaaggcagtcttcattcacagacagtgtttattgggtacctgctgtgtgcagcccttcagaatgcatagataaatagggtatgtttcttcctataacagactctcagaacaaacggaggagggcttaggtgcctccacatctggctgcccccatgtctctggcctcccccatgaccagactccttcagttgggccgcacttgcagtctctgccagctgacaggccctcctgttcttagcatgcagtcttcaggtttctgccccagcccagccacactggaaccacaatgccttcctcattacctgtttcaaaccttatctgactgagttctcccaaattcatttaactgtaatccatagtcttccggaggatttctcttgctctttttctccctgataccagcccctcctgtttttccttttacatttgtgaactttttctaactattcttagctggtggttgtttttctacccactttgtacagattgttgtttctggggtttttctttttgggcaaatttgccagattactccattcctatggtttcacttaccacctacgtattgcagacattcacatctttatatgctgcctgtacccccttcctgggcatctgacctctgacagcttcatctaggtgttccataggcactttaacctcatcatgtccaaaatgaattctctttttcctcaagccaactctttttcctgtatttcctaggccagaaattcaaggacttttctctgagtaactgagcagtaattaagtataattttttcctcaataatccaaagcagattgtgagaaaacattgcttttgaataataagtgaaaaaaaaaatttagccatgtctatttatatatttttctttgatgctattaatatccagtctgattttactcgtcactgaaattgtattcagaatatattgatggaatcatttcaggttgttttttcctctgccaccagatcctccaaatgtacatattattggaaatctgccttttagtgtttcaactccactgattatcaagtggcttgaaaatatttcctgtagagatggaccttttgtttatggcagaactcagatgactttgacttttcaaaaggaagtggcagaggtaagttttaacattttgtgactattttatcacatgttcaaattccaaagcaaaataataatactgcatttttaccacagtctgtgttttctaagttaatatcttattacacacacaagaacccagcagcagctcagccaaaagttaaaactttgatgatgatgacagatgtaactgctgtgggcttctgggaaaacatgaatgatgtatgttagccaaggaggtagtgtggtaaacacagggatgcaacagccatcgatgccactggagaaagacaaaagtgatgccctgttggccatacccaggattggcacgtgataccttaaaattgatcctttaggcttaatggcatggcagttaaagaatatgataattggccgggcatggtgactcatgcctgtaattccagcactttgggaggccgaggcaggcggatcacgaggtcaggagtttgaaaccagcctggccaacatggtgaaaccccgtctctactaaaaatacaaaaaaaaaaaaaaaaaaaaaaaaattagctgggtgtggtggggggtgcctgtaatcccagctactcaggaggctgagccaggagaattgcttgaacctgggaggcggaggttgcagtgagcaaagatcgtgccactgcactccagcttgggtaacagagcaagactctgtctcggcggggcatgcgggaagaatgtgataatcaatttggagctgagaaagagaaggggattgagggtctcattattcagtatataaattgtacttcctccctcacctcagtgaagtctgctatgcctgcattcccatggcagaagtgttctgggttcactctagaaagtaaaccctccagggtaagcaggggtggtgcttgagctgcaaaggtataaggacggatgtgcagactcttaagtggttttttaaaaaaattttattatgacatataagtacaagagtatacagccatcccttggtatccataggggattgattccagaacccccacaaataccaaaatctacaagtgctcaagtccctgatgtcaaacagtgtagtatttgcatataacctgtgcatatcatcccatatactttaaatcatctctacattatttgtaatacctaagacagtataaatgttttataaatagttgttacactgtattatttgaggaataatgataagggaaaaatctgtacatgttcagtacagatgcaaccatccttttttattccctgaatatttttgatctgggattggttggatccatggatatggaacccacagatactgacggatgactgtataatgtacatggatgacttaataaagggcactcctgaatccccatgtacatggatgacttaataaagggaactcctgaatccccacccccaacatgggtaattaaatcactagtacctttgagaccccattgtattccttactctgattgcatctcctttccatcccatgctagtaaggtgatcactactgtgaattttggatttattcccttgcatagtcttatcacacagatttatattcctatgatgaatacactttagttttgtccttttttttttttggacagagtctcactctgtcacccaggctggagtgcagtggcacgatcttggctcactgcaagctccgtctcccgggttcacgccattctcctgcctcagcctcccgagtagctgggactacaggcgcccgccaccacgcccggctaattttttgtatttttagtagagacggggtttcaccatgttagccaggatggtctccatctcctgacctcgtgatccacccgcctcagcctcccaaagtgctgggattacaggcgtgagccactgcgcccagcccagttttgtccacttttgacaactgggtttatataatgtgtattcatatagtatgtattgtttttatcctgaacattctttgtaggattcactgacgttgcttatgactgtagtttatttaggtagctatatatactacccactatttgactgtgtaagatccttatctattcattctcatgttggtggaccatgaattagtttcatcgttctgtttttacaaacaaaactgttgtaaacatcccatactgtgtcagttggggcacatgggcaacatttctctagggtatttacctgggagtggaactgcaaatcttcaccactgcatagataatgctaagttgatctctgaaatcatcacgcctgtttatattcccaccagcagtgtgtatgagttcattttgctccatattcttgccagtactcactattgccagacttgtacatttttattaatctcagggtaatggaatgtcattgtgttttcttttgtccttgctggtttgtagcaaaatggggcactattgtgtgtttactggcctttttgagttccttgtttttagtgcatgctttttgctcacctttcttttgggttgcttatctttttcctactgatctggaggagttctcacatactctttaatactcttcatactagtccttagttaaatgtgttgagcatttcttctactctattgcatgttgttattttctttttatggtgtcttttgaagagcaagcattcttaattttaaatttatgtctagtgctttttgtgttttgttgaggaaacacttttatcttgagttcatgaagatattcttctgttatcttctagaagctttatgtttacctttcacatttatatctatagtccactcgggtttgatctctgtgtatagtgaagtagaagcaattttactatttttaacatatgggtcccaactaacctagctccatttactcacaagtcagccctcgttgatccctgtcagcacctctgtcagcattggtctggttagatacatcatataagcattggtctgattagaaacatcaagaaaaaaatgacatgaaatccaggaagcagagggctccctacaggacagagagaaaggagtcctcaggaagaacaaccagtccagattggagccaattaaaaggggaatttgataaaactactgtcaagtttgcatagagtcaaaaaaaagttgcaaaaactcaggagagtttaagattgaattcatgataaataaatagaaaactaaatataacagggagtgaatcaagggaaatataccattattggaatgagaagtacaaaaatattatttggagataaataattattttgaaaacctaagaaaaaatgagagacatatataaaaataactacaaaacctaactgagaatctcaaggtcactgagataaatccagaaaaatatcatagccccagaaggaaaaatgattattttaaagaagctgatttttccaagaattctgtatatctaattataatcctcaaagaacttatcttgaaatacgcagttctaaggatcatctggaggaatagacctgcaacaatacataagaaatgttgaaaagggagagtgatgagaaaagacttccttgtcatatgctaaaatgtatggtgaagctttaataattaaagcagtatgagaagcagcacgtgacagagcaattactagactagaaagcccgatgcagacaccttagcagtatctgataatggtcagatcaaaaatcagcagtgaaggaaagaattaagtaaatgcatggatatttggttaactattatgaaaaaaaattatctctaaattccatttgggtctttggatcttctctttctgtcctcattacattcatgccttccttggcatttttctatgtatgtatgtatgtatgatatttaaagtagatgttttggccaggcgtgctggctcacacctgtaatctcaacactttgggaggctaaggtgggaggattgcttgagcccagagttcgagaccagcctgggtaacatagctccctatgttaccttgtctctacaaaaaataaataaaaaattagccaggtccggtgctgcatgcctgtggtctcgactactcaggaggctgaggtgggaggatcacctgagcccaggagatcaaattacagtgagccgtgatcatgtcactgcactccagcctgggcggcagagcaagaccctgtctcaaaaaattgaacaaataagtagctgttttaagatccttgcctgctaatttcattacctctatcatttctgtactcttttagtgattgatttccccttcttgctataggttgcatttttctgtttctttgaaagcctgataatttctgacaaaacatcaggtattgtgagagttttattttttttaatgctgatgagggctggattttgtggtattgggttgagtgttgggtttgttgtgacacatagataagattgcttgaggcttttattgttctggtggatccagggtagcttttaatttggggctcgttgagccccagtactacatcatgccctttctgaggaaggcacccaacgccctgcatgttacaaggcctcttgagccatgtgagccccagttgctcctgccttcccctggttctagttcaggctcccaagcctcaggcacctgcagatcagtgctcagcaggggacttgggggacccttgggacccttttgctacctcaggagctctgcctcacattctctctccctctcctgttcctgtctcccccacccgctgctcctgcacacgtgtgagcaccgcgtgtgtgcgttttccatgtctctggtagtctgccccacaaattctgcctgccgaggcctcccagatctccaggtctggctccctgagcccaggagacctctaggctcagtttgagctgccccctgcctctgctgcagcctgagaagggcctccagtcctcttcaggccgggcatctaaggctcatctcctttccatttcagtaatgacagtcctgctccacctgttgtcctgtttatgcaaactcttgtttcctatgacttattcagctttatacttgtttcagaacaaaactttttaatgccagaatttgtttgaaatcaatagactctactactacataagcttaattctttaaatgccttcctctcagataatttgagtgtatcataagaatttcatttcttagatctatccctctctttttacccttgtttctgtttaggggaatcatttccaacaagggcacttttgccttatctgctcctcaggggcatttggcaatgtctgacatgtttttggttgtcacaccagggagggggctctggtctctagtggatagaaggttagggatgctgggaagcattcttcagtgcacagcagagcctcccacagcgaagaaccacccaacattaatcagcccaagatgtcagtcatgccaaggttggaaaactttcctttagatgatttggccataaaatctttctctcaggagtcttggaacttcccatcataaaaacgtaggaccgttgcatgtttgttaggaaccctgagatgatatcaccacttttcttaaggtctttgtcatttcctcttcatgaacctgctaattctcttgggttggtttgaattgggcccatgctgagttttctttgttgtttttctcaacctttggatatgttggttctgacagaaaccattcttgtttcctctgcacttatacaacttctgacaccagatgtgtgggttttttccacaccaagcaatctccaattctccgaacaccagctgggtatcctgcagtttcattcaattctgacactgtccacatgtttttagtgttagatcccacaagttaagggccaagtcccacaagactgcgcctcacttcagatgacagtcacaaatctgggcctctaggagttctgagcgaccagctataaaataaatcagagggttccatgtccccctcctcagattgaatcatttttcagaatggctcaaaaactcagggaaacaccttacctacacttgagtaatgggtaatcaattggtctcagtgaccagccccatcttgagctacctagaggcctcatcctaagttatctcattactgtaaactctgggggacttgtgaatttaaagcaagacatgccgattactcaggaaatttcaagggctttaggagccagcgacaaagtccaaatatatttcttattaaaccacatctgtggatttatttttctcagccgacatgattattttggtatttctgctcttgaataacacaatagagatacaaaatactatgtactctatttgtgtggggggaaacacaaagaaacagaggcttaagaagaggtggagtaatattttcggtgactcagcatgtcagttgtggttattaataatagtgttgcttcgacttcaccatatgcaattctttttctttaacaaaaaaagttgattttagttcaattttagcatgaatattgagaagagtttatatagagtctataatttatggaatgccttagaagtctaggtaacactggtcctctgattttcacattttgcaagtgaaagtttcagtgggagaatatatatatactatattagtccattcttttcttttttttttttttttttttttgaggccgagtctcgccgctctgtcacccaggctggagtgcagtggtgccatctcggctcgctgcaagccccgcctcccgggttcatgccattcaactgcctcagcctcccaagtagctgggactacaggcgcccaccaccacgcctggctaattttttgcatttttagtagagacggggtttcaccatgttagccaggatggtctcgatctcctgacctcgtgatccacacgcctcagcctcctaaagtgctgggattacaggcgtgagccaccacgcccagcccctatgttagtccattctatgcactgctataaagagatacctgagactgggtaatttattttaaaaaaaaggtttaattggctcacatttctgcaactctacaggaagcatggctggggaagcctcaggaaacttataatcatggcagaaggcaaaggggaagcaggcatggtttatgtggctggagcagtaggaagagagtggggaggtgctacacactttacaacaagcagttctcatgagaactcactcactgtcgtgcaagagggaaatctgcccccttgatccaatcacctttcaccaggcccctcctccaacattggggattacaatttggcgagatttgggcagggacagtaattcgcaccatttcatatagcagcattttcttatatgccatttactcttgacatggctgtatatgtaattttgtattttagccacaggaagctctttttaacatttactttgattggctttgttaattacaaaacagaaataaatgagcaccgtcgtcttattcctgtctctagcactacaggatctaagtgtaagaattcagctcatatgcattaagggacatatagacaatatgaagttacagttcataaaatataatcagactgttaagcagtaagtgagaactaatcccatctaacctcattttattaatataaatgatgaactgaggctcaaaaggtttaatgccttccagaaggtcatggagtagttacagggaaggctgaacttgagtacaggtagtgtgttttctgctaaagtcatgatgtgcaagttctcgatgctgctggccctgtgttcttttctttctgggtccagcatcagcctctttttctcccaccatctccagaggaccctggctgttgatgagcacatcccaagcagggagggagtcaccctctccattaattaccttacatagttctcattgtccctgatatatggctgtgtagcttctcaagtgtaagcctaatttttctccttgtacttaaaattattttagattaataagaaaaaaaaaaccactgtccttgtaaattctttgaccccttgtttttctcatactccatcaaaatgctttttaaaagctcaagggttagaggtttccttttaaagaaaaattaactagtttggtttcctgaccttttgttgctaaaatcatctatcttgtaatggatgttgaatttttatagctttcccaatagtacatctatcacagaaacagtaatgtatatttgaggttgatagaacatttcagttttatgctagctttgaatgaaatcttttgtagagctttctggtctgtgatttgaatttttccttaatgagttagggacagctatgtgtgctgcttttttctaaattgaaatatatgattcgcatgttttcatctctacagcctggggatatatgctacaaagattgaattgaatgggtcaggttaatggattgggacacatattcccctgacgtttctggatgtgttctaagtgaaatatacttaaatacttaaataagatcttttttgaattgtgccagttggatattaaaatttgcaatgcattttgaatttttgaattttctgccagtagtaagattaagctccttttttactttatgaagaactagaaatatttttgaccacttgatccataagcttattctttaacttaaatctctacttctgtcattttttgtagctgtatgagagtatatgtgtcttggttttacattttagtaagaaagattatattttgtcttacatgctatagtaactcatcacttatcttgagtacggcatcccaataatttcaactctccaaacagacaagagccagacagtttaaaataaaaaggtcatggggaagaggtatgagatgaaaggttggctttgagtacaatctataactttgcccataggaagtttcttccatatctcacacagaacctattttttaatcttccttaaggcaaagctctaataaggtaaattatatggttttcatccacggcaggctacaagcagcaaaggaaaagaagtgattagactatgtgtgtgcattgcagtgaagcgggaaagagcaaacccagcagctgcaaaccagctcagaaagcactgtgtcttttactgttgagcagtggggccccctgcctgcctacctagccccaggattattccagtaatcattggtgtttgtaatgttgcccctgaatcattcagaagagggttagaatgtcctttgagctcttaagaacacagagaggcaagatacattttagaaagataagcatccctaaatttttttacccaccactcagctctgttcaattttaatatattgccatatttttatatcttttttaaagaaataaaatattgttgatatgtttggagccctcttctatcccctttctttcccttctatgagttgtactatcttaaactttcgtcatcattatttccatacatattttatccttacattgcagataaatacaccacacacacatacacacacacacacacacacacactcagagtaaatgataggagtagtcttttcaagattttatacaaatagcattatactgtacaaattttctgtgacttgattattttttattccattttgggattcaatctcgtattccattatcagaattatcacagtttattttttcgttcacatgttgatttttattatttttttcatttcttgacattacacataataccataatgaacatttttatacctatcgcccgtgtaagtatgtatgtacgctgtgctctaggatatgttcttagagacctagagggtcatgaggttttacacagcttcagctctactgtatattgccaaattatgctacaaatgcttgtacagatttcctctctcactagcagtatctgaaagttcctatagctgcagatatcctccaatatcaggttctgttaggttttttttttaattgttcatttcatgtgtatgaaattatatgtaatgttctaatttgcatattcctactttgtactgtggtggagcatagtttatattatggtttatttggatttctcttatgtgagttgccttatatattctattagctatttatcttatgattattgatgtacaggaatttcatctgtattctgaacactataaatttcaaatactttctcttagtctgtgacttacaaacatttataatgttttattatacagaaattaaaaattttaataaagtacagtagtttttgttgttattgttgttgaggagggcgtcttgctctgttgcccaggctgatcttgaactcctggcctctggcagtccacctgttttggcttcccaaagcactggaattacaggcatgagccactgttcccagccaagatcaaaaaaatatatatatatgtatatatacatatatatatacacacacacacatatatgcacacatatatacacatatatatacacacatatatacacacatatacatatacacatgtatatatatacatatatatacacacatatatacacatgtatatatatacatatatatacacacatatatatacacacatatatatacacacacatatatatatattttgtccccaaagcaaagctatataagaaaagacatacatagatacatatattttagaaagatgtatatacatacatatatacatatatgtgtgtgtgtctgtctgtctgtcttttcttatatagctctgcttttacatctttaggaaattcttccctaccatggaagtcatagatatttgcttataaaaattttaaaattttgcttttcacttattgttaatttgcttagagtttttttggttatggcatgagataaggacctactgttttctcctatggatatctaattacaccggtgtcacttaccgaatgatccttccttttctgttagcagttgctacatcgcatctatcgtgtgttaaatatctaatgtgcttgggtctgtttctgaggcatttgttttattgatctgtctgggcctgcatcaatttgatgtctggtagggtgagctcccctatcattgttggtattcttcaggagcgtcctggccattcttggccttatataaattttacatggaatttaaatatatatataatacatatggaaattaatttttaaaatcttgttggacttttaattgaaattgcattgcatttatgaattaattgaaatatacctaattaattgcaaaacaaaaatgtttgagtgtttaaaagaataaattactaggttttacaaaaattatttgtcaagaacagccaatttcccaagggttctgaatactcaaggttttactatattaagtgaatttgaaaagcacaccatttaaaatgttcattcatatattggggtgattcagaaaattaagtgtttaagcatctttcatttttcattatgcttgctaatttcttcatcaagtatttattgattgcttgttttatgtaggaccttctgctatagaatataacagtggttcaaaaatcccaacagccattggtagagcaaatgttcttatttttgtagtgcattatatatgacataattcacatttcttaggtgtacctcagttgatgttggaggaaaatattccccatgtttgctgtgtgtcatgtgtcagatagcccattcttttcaaatttgcctcaaaaagtccacctagtgttcagaaataatggaatgttgactctttttcatctaatcaggctggactaattatttgctaaaattcatttttgtctctctctagagacttgcagccaatacaggaagcaaacagcgtagtcgcctctctgttatggctcagtacctctgcaatgttcgacacatctttacgattccaggacaagcttttgtccccaaaccagaggtaagtttctgcttatttgttgtagtatatcggaattaggacgtttgttcccctgaggatgtgtcataggaaataacctctaggatctaacctttgtttatgtgcaaactgacactgtactttacttctgaataagaaccacaaaaatcgtaatatgaatagctagttcttactataattgttctccttaggtagggtgactaaatgtttaggttcatgcatgttatcctggtggcagtatcattcatcatcttcatcttcatgatgttactcttaaagtatccctgtatggaagataagttacacggtcacccaatatttgagaaaagaaataaaatacttttgtgttttctgttagagacctctaactaaagctacatcaaacattatttacttaacacttttttgggagaccttattatggtagtgttatttgtggtaaatcatctgtggaagaaacagttggatattaaactaggctttgatattatatgctagttatgtgagtaagtgctagttacagaaacagagtttctctgccaaaaattaaaattaaaaaaaccgttgtctgttttagcaaaaccactgcttggtgagttattacaagatgtgtactattaaaaactcatctttttcttcagtgaatgtatattgagcatttactgtttgaaaatgcgttgggtagcaaggggagtctacagggatatgagcctaatccgatacagagtctgccttcagggagttcacagcctcatgaggaatagaaatttctcactggtccctaaaactctcaaatataaggtcttgcagagtgtcccttgcatcatgtatccttcataaataacaagagatagcatggaaaaaaatgcattatgtgactatagatttagatatagattctagatttagaatggagaccctaaccaatagtgttagatctacttgtctgtcttgaagacgcctaagtgatctccatgctctttgctgccaccttcatacttctttgccatttggccagttagctgagcgttcaggtgactaggaagtcaggccatcttccccttacgtaacagacataattgtcagctttttctaaatcgagctcagggagcttgctatcggtgccacctcccttcagcatctcagacttcagagacattgcgaatgacttctcctagaataattagatccaagacagaatttgatgactggaggtatcttataggttatcttcaaatttaaaacatttgtgctttcagggactttctctcctagtacaggtggccattataatgaaaaaaataaaaataaaaaaccagtgaccatgtagcttgatttcttcttgtcatgcacatgtgtgtgcatataacattttaaatagtgtaagactcattatatcaaaaaccaagatccttactcataggcctctatagttatggttatgaccattatccagaatctccaggctatttaagttttactaacgggttcttaggatagatattcgaatatttttagtggaagctttctaactctgttttagttacctagttgagattatttgatggagtttcgaagttattatccactttatctttgatttagtggtaaggtacatatgtagtttatcaattaaaatttaccttctctgggattaaggccacaagaaaatatttattatttggaaaaaagctagctatgtctttgattcctttttttattgagggatgtttacgttttggcaaattaaacattttcatagcaatttacttcactttttttattatattgtaactattacatacaggggatttatttgtaatccagaaaagcacttatcaaggacttgtaggtgtgcaccaccacaccggctattttttgtagtttttcatagagacaggattttgccatattggccaggctggtcttgaactcatggcctccagtgacctacccgctttggcctcccaaagtgccgggattacaggctaaattttagttctaaaagaattctctgctgctttgaagtagttttaccatattagggcaaagcagaaatgttctgaagaaagccagaaaatattttgctgacagttacattgagcaaatgttttaaaaattcattttcttgggccgggcacagtgactcatgcctgtaatcccagcactttgggaggccgaggtgggcggatcacgaggtcaggagatcgagaccatcctggctaacatggtgaaaccccgtctctactaaaaatacaaaaaattagccgggcatggtggtgggcgcctcaagtcccagctactcaggaggctgaggcaggagaatggcatgaacccgggaggcggagcttgcagcgaggcgagatggcaccactgcactccagcctgggtgacagagcgagactccatctcaaaaaaaaaaaaaattcattttctcaaataagaaagaggaagagtttttacagagatgataaactaattcaaggctagtactctaactaaaccttctgcatacaagaagagaaagtcctagacgcacataattgcaacacaaggtaagataagctaagcgctaaaaatagaggttgggcagattcctgggtggttgagagagggagattaatgctcagaagaaatttactaacattcattacttattctcaatcaaaactctaagaatcagatatagagaatttcttttgtgatacaatgaggggcttacttacaaccactttcgggattttttcctgtgagagtctgctgtcccttctgtttctcaatcttttaactaactcaatcaagctttaatggcagaactttcactaccattgaactattacaatcctgttctgactagttgaactgaattactgctgaactttactcttattaagctctctagtgtagttcccaaaatttgaacccaaaatactttgtgtctgcaaaacagacaacctctgaggttcttaaaattagactaattaattggtctactttagtgtctcttaaactattagagtctgtagtatgtagcttttaagttagaatttttttaattttgtgttttcatttcactgttaatgaaattatttacatttacaagacaatgtcttttgcaatgcaaattcagaactaaaattgttttcatgacagaatacaacctgtttcttaagtttctcaagctagcttttctctattagcctctgtagatccctgagaatccacatatttctggggttccacgcttaatcttttttttcagctactctgcacatttctcaagtttgggaaatactgagctattagctagatcctcaaaattctgtctttttttttatgaattatggtgataggcttcataatctaacatagttcgtaaagagtggaaaggctttttagttctcaacactatttttttttttttttttttttttttgagacagagtctcactctgccgcccaggctggagtgcagtggcacaatctcggctcactgcaacctccaccttctgggttcaaatgattctcctgcctcagccttccgagtagctgggattacaggcgcccgccatcatgccccgctaagttttgtatttttagtagagacgaggtttcaccatgttggccaagctggtctcgaactcctggcctcaggtgatccatccgcctcggcctcccaaagtgctgggattacaggcatgagccaccacgcccagccagttctcaacactattctctactctgacttagtagaaaaatcatttagttatattatgagagttgtaacgggttctttttaattgacactggtagaggcagtagacttccaagtaagctagacctgctggaattccagtactgctagttttgagagcttggtcgggttaataggctgagtttactacatccagatttgaccaataataccacccttgaaggacatttgtgaggaatagaaataatcaatgcagagtgcctaatatgagtatctggcagtgaatgctgccagtcaaagtagttgttattgttatgatataaacaaatatttatggactaagttgtagtattctgatataaaaataaggattataatttttaagctatatatagaatttatatttaatttttcctatttggaagtgtggtatatagaacaagttaccttcaaacatggtacacatttaaagcataaatagtgtccattaaattgtagatgaattaatgatatatccatgacatataaagaaaagattggaacttgagacatccactcttgacttttgaagagcgttttagaggcttccaaccctgcttgttcacagctattgaggccttgacctctgtgggagatagtcttgagtttggtgggtggatgggtccacagaagagacaactgtttttcatgcttttgtgttttttgaaatctgacattgaggatgttatttctgctgtatatttaccttgtattcaagaatcattttggtatgaggtcagaacactagtgttttcctacttaactaagactcttctgtctttggtttgtattctcctcctagaatcagattgagatgggattttcataaaggtgatgtattgacaagggccctcaggagaaggggcatgagggtagcaggaaagggcaggggaagagctaagtaaacatattgttcctcctggaggagcttcagcctagaaccacggcgggaggagaagctgtgtagcacaaattgccccacgcgtctgtgttcccttgaggcaagggaccagcttattggaacctgtgccagccagtctttgcagggagcagtggggcagtcacttcccagtagaggcagctccatctctgggagccattagcacccatcagtgccagcagctgggggtggctgccctggcccagtggaaggagcttggccaagacacagcatcctgtctagcttcctaccagtagacaaagctgtcagattacttacatggccacctctctgccgcagttgcttggaagttctaaactaagtttcatgtttaattgctttagcatgcttcaaccaggaacatttaatagcattttttctctcttctttttgtttgtaactttagtctttcatctttatcagttgtttttatacttattatacctgcaattttataagttgcctcaaattcttttttaaagcccttgagtccaaaataaaaataaatataaaccaaaagccatttttataattaaagtagtaccagagtcatcctccttaaaaatcaggtaaaatacgtgttgaatagagataagagtatttgctattacaattttaattcagtactaggcatgcttccataaactgctcaagaataaatggtaagtattctaaatccaaggagggaaaaaacaaaattgcatttttgcagacagtacttttatgtatgtataaaatgcaatgaaattaatacaaaagtaactggagataatgataataatgtgatagtgttctgcagaattataggctaggctaaaaatctcaaaagtcaagtaagttagtatttgctaaagtcatgtagctgacaatatagtgatgaaagacatatgagaaaacattgtccacatccaaaactgaacttctgtctaactaccctagtgggcctgccctccctgcacctcttattcactatgctgactaatggcatcatccacccaggtcatccaagcctaaaccttggaggtcatcttaagcaccacctccccagacctttacaactgctgaccctcagaactagtcagtcgttaaccagcttctgacattacctaaatttctcccaaacccatcccaattttgtacccaattcttctgacttaatttaagtctatcatttttgtcagaattactagatgaattcttcagtcatatgtatagatatacacgtgctccacaggttaaaaaaaaaaaaagtatgatatttttggtcttttgggttttgttttggtaactttttatcaaagaagaatgaataagtatattcgataaattagactatgatttctcaaactcagaactgttgacatttggggccagataattctttgttgccagagtctgtcctgtgcattgtaagatacataaaggcatccctggcctcttcctactagattccagtagcactacctcagttaagataaccaaaaaagtgtcccagcattgccgaatgtcccctgcaggctaaactcaccccagggagagccactggattagactaagaaccattgagtaacactagtcatatgctttctgtgcaccaactgctttctgtgtatcatctcatttaatccccacgagaactctgagggtagatgccattcttaagcaaaccaagaccttagttaagtaatgcatgctgtgtaaccatgcacccacaccagggcttgcacccgggtagtttgactccagaacctggttccctcaggttggaaccatctccccacttactagctgtgtgaacttgggcaagttagggaacttatgtcacctctgtcgccctcagtgtcctgtaagatcctgagaatagtgcctacctggtagagttgttaggtttaagccaggactggcatgtgttaggttttagaccaggactggcatgtgttaggaagcacttgccatgacatgtcactgagaatgcagagctaaaaatgacaccacacctcccagtctagttggagatgcaatcatgtaaactcataatttcatgacttcttaaatagagcgtttttacacagtacacattacttaagtcttggtgtgctcatgtgagctattgtgaggattaaatgagagcatttattaaattcatagtttgttaaatagagcattttctgcgagtgcagatgcgggcttgaacttctaggctgtcaggattgagtttacaggagaggtccgtgtgaatcctgaagggtgagcaggagctttggtagtgagggagtgaggctgggaggagtgcaggtggaggaatgaacacagcgggataggaattcctgtaggaatagagagactccacatcatttattgcaggattgccacttccaaacaatacactgggccattatttcatataaaatggctggttttctgagagtttgaaacattcgtgtttctacttaggaagaaaatactccagagctaaataaaaattatttttgaagtatatatagaatgatatagcagatataaagataacttttactgtaggactaaaggctacatagactatgtaaacccagccacattcagcaaagtgagagaagaactattaatgggatcaaagcagttctagcacattaatttgcatgaaatcattctttgcatcagaattctttttagtatgacacttgtgtataaaataacattttgaccactcaaaaggaatacatactttaaacaatcatttaaccttctacaaaatgatccccttcctaattcccgtttgtgataataccttttcgttttagctattccagtaatagctaatgacattgttgcagaagagaatgtctacccagtaaaataggtataggatatgttagtctatttctgtatgcacaaatgaaagttatttacttacgtaaaatatattcttcccacttcctgagttattaatgtacaaagaaataatcttttttcccctttaccattgaatcattgacaatgactaagcttcaattaacaaataaattgttagaaacaatagtgggcagtgtttcctagatttttatttacttgctaaaatatttgaatcacatatcataatttatattttaaaagcattctttaaaatatattttgacattcattaattgaaacagcttatttgtaagaatgtttttgttaacatgaatgaaatttgagagaaaaagtgacaaaggtaacttttatcatccaaatatgaataaatgagagaggaagtgggatggtagtaaatccagaatgtgataggataaatgaacttaatctgtggagaatcctcttgctagaagcagaagaagggagttcttaaacattttaaaacaaacttttgttcttatcacttagcttgtacttaatgctttaagagtcctagagattttagtttggtttggctttctttactgtggtagcatttaccaatttcttcagttctgcctaatcttagtttgcatataatattgtcagctcttacaaatatatgtagatagttttctaaaatgaaaaagaaatgggctggtcacaggaggtggggacttgggatggatggttttagcagcatctgaatggagtaggcagctcttgtattcctaatgtactttcacacactgtagctttaaaacagaagcaagttgctgtgttgttgccaaccagatagcaaagtggataatattcttggttaacaccagggcaaggtactttttatacttggcagtttagttcttttataaaatccagtttgaaaggtgtatcagcaaattatcttgaaaaagctatcaaataattgccttatgaatgtaatcagaacctctttcaattataaatctttaagtaaaacatggaaacaataatggaaaaaataaagaactcttcagacagatgtaattgtatatgatagttttattggcattttaaactactttgtagttgttaaagtattttacattctactttctttgtagggaaagttaagcataattctgatttttttttaatctaaaagtcccatttggcacccaaaagttccatttcatatgcattactcagttatttacacataatccttcagattgtgtgtggaattgttctcgagctgtgtgttagagataggctgctgtgtgggtgggtcgagtctagcttctggattcctttttatacaggaggtgcagaaaatcatgccagagataaacaacagcattgcagaaatgaatccgatatagatagctcctccaggttcatgtttgttgctttctggaactgtcagatccagaaagtttgctatgatctcctttgtgtaccacactgtcgagattaaactagagattcctgcagacatgaaacagactcctccagcaaaggaagcatggctcttggtttctctgtcccctcctaagcgagtacatttcattcctactgtggaagtgcagatccccaaagcagacagaacacacgccaggaccatggtggctctcgcagcctgcacgtggatggggagggacagaatggagtgtttcagggcacagctgaacatcccagtgctgtaccacgtacagtccatccagagcccgtgcagctgtacaatggctgttatgatgttggagtccacatccacattcaccttccagttgggcagcagagtggctgtgagcactccagagaccccagataaggccaggatgaaagcaaggagctggagtcctgctgaggccatgatgttactgttaagtctgtcctcttagaaaatcctgatgtttaacaatgatggctgtcagaattctatctatttctgtgcagtagagaaccaaataacaaagcctaaggaaaaaaggcaaaaccaggattgagcgaaagaaagtaagtaaacaaaaggcttccctttagagtaggagccaagaacacatctgagtatcccccttctccagcccccaagcagatgaggatgctgtaggctggaggagaaaagctcccaccaggccttgaagactggtctgagtgatatgcatgggtggtgttgatacagggcataaagaaagcagttgcccacttaattctttttaaaactcaacatatgctgaaactgtagcgtggacatgtacgttgttaggagatttagacatttgaaattccagctatagtatctgataaagaattttaatagcattataggtttttcaaatgattttattttttatttttattttttttgagatggagtctcactctgtcacccaggctggagtgcagtggagcgatcttggctcactgcaagctccacctcctgggttcacaccattctcctgcctcagcctcccgagtagctgggactacaggcgcccgccaccatgcccggctaattttttttttttttgtatttttagtagagatggggtttcaccctgttagccaggatggtctcgatctcctgacctcgtgatccgcccacctcggcctcccgaagtgctgggattacaggcgtgagccaccacgcctcgcccaaatgattttatttttaatgaaaatactcaatacataataaggaagaaaataaattaaggccaccttttaaagatggtttataaatacattttagaaaagtatttaggaagtggctttcataaacagatctttatgacacacccacagtgccaggcacatagcccaagtgaaccatttgaggaggaaggacagcagtggaaagaagtctgagtcactggcatggttatccctaagttctagttaatacctgtttgcaaaatcctgactgaggttagtacttgttttacttcaggtgcctggtactcaaaacaattaagccactgttttttgtatataagaacatgaggtcctttctaattgggaccagaatcatttcctggcccaaatgaagccggctattctgaacaattcagaagtagtgatggcagatctcaaaaatacataccagaaataaccacatcattagttgtatgtgaaaggataccagaaataaattaaccctttattttctttgtttatttttaagaggaaggaaaagaccacctactttgtggcttggctgtgttttaagaaacaaaaaggctttcgattccatctttctattcctgttcccctatctagcccatctggcactgcttactgccttatttgagaaaaatgtaatggtttctgaaatactgcagtactgactttctttgtcattctgagttaattttgaatggtatgctaaagtggctctgtcgtgattcatatgtattttacaaaaggtgatacaggctcttgagtcaaagacacttgggccagttcttagctttatacctctctgtgcctcagtatcctcttctggaaaatggggaggattgaaatacttcgttcatagggttaaataagttaatacattttaagggcttagaccaatatttaagccacagaaagtcctcagtaatttaaaattgacatcattattagtatttttatttcttatgtattgtgacaattgatgtttaaaattatttggatcttttccctttttctcttccttccttgggctgatttattttcatagaatcttggagctgaaagaaacctcagacagacaatctcaagcatccttgttttttcagatcagaatgttcagataggatatcaccccatgtcatacagtcttcagcagccaacctgcagcgtccagatctctctccacccctcctacctcacagggtcatcccgcatcctttccccttttaccacaacacttcctgctgaaattctttctccccctgtgtgtttcccttgggaaccagggaaaacactgtatctggaggcaaaaagcaccattaactgtctacttcacccactcccctccccaccaaggaaaaaaaggactgtagaggatgttaataggccacatggctcagcttcagatgactcggcaaggagattgatgcctggctttggttaaatatttgaaatagtactaatccattgcctatatttaaagtataaactttgcatagctacaaacattgattctctaagacattagatcctagactatctggattgtgctgttctgtttttgttcataatctgaaaatgtaaatcttaccattttagaaaaggatttccctaggattttaagttcttaagagtcagacttatctgtagacatcagtgtgcctaggattcacctgctatcatacagtttcttttctgttttccaaacttagaccaaaatagaacaaaagttaaagtttctagaaaaaaaatcaagcacatgtttacagttttgtaatagctgctttcaagtttaggttttagcatttcggactccagccagcttgctaaattactgcctctggaccattttcagcttagggattcttcaagtgtggggttgctggaacattttctaacagcatctgcttgctcacttttctctctccctctctctttctttctactttgactgaataacctttgttgtcaatctatgttcagcttaccaattataatccttttcttcccattaactgatatattttataactttcagtatatttcagacatgaagacagtttgttcatcatgattaacaagtactggcagtgatcaattacagacagccaaaatcagtgtaaacaatatgacgtgtcatttaattagcatagtgcttgcttactgttgaatattggattcaaatgcttttttttctgcatagagaacttatgtagaaagaatttgttctccaaatgaaggtcactttctgctcatacaaatatactggcattttagctgcattgcgctttaccctccagccacgagtataataccgtttgtggcctgttctctcaaaatttctatctcgtagagaataaaggcacactttgttccagcagctgtggtggtggtggtagagaaatactgtgaaggcaagcagaagcagaggggaggggtcgcatgtaaacacttacatggtctacagtgaaaactctctcatggtcccaaaacacagtgcacacagaacagaacccaggcaccttcagtttatgaactactcgccaacagaaagtctgttgtagatttcactaaaatgtaaagtcagctttccagacaaggtttatttatatcaaaaataatatttaaaagcagatttactgcttataattcgaactaaataataccgaaagacctattcttagatctctaagcattaagacaggttttatttaccataccttttgtcagtagccttcactgtcttaactccttcggtcagttgtcttcaaattaacctcagttagttatggtgaagaaaaaccatatacgtgaggcttatttcagaaattctggatatgtttataaagctccaataagttaacttgaaaaaagcaaataaaggacaacgtagaaatctgagaggtaaaaactgctgatggtgttagaagataaataccaggttctccatctcattttttgagatgtgggagaattaagaaaggagaggcggggaagggagggaattgttgttacaacaggatttgttgaaacctgaaagctaaaaatgcttttgtgtcactgtgtacagaggaggaattatttgggtgctcacaaaaaggccttcttttcttttaatataatgttttagtcacatagttataacttatttttgaaattttctctatgttgaaagatataatgtattattttatgtcctcagttcaagaatgtggtctgaaatatttttaacaatgtcgtgccttgcaaatgagagttgagactcccttttttccctggtattcttgacttgtctggaacctgaattcataaaattgttaattttcaaaataatcattcagaagaaagttttttaacatatgtatttttttcaataaaagaaaaaagaaaacccagcaacaacttttgactagaatctgatcactaaacctacaggtatttttgtgtgtgtggtgccctgagttttcttgttattgcttccacttagatttgtggagtataactatagagattcaggaaatgttatgaataaattacccaaaatgatgtgatgagacacatcagataagactgtgatcagatactgaggttgtagcccatgaataatggtacagatggatttcactgccatccttttgggttctcatttttttcttcctcagtaagttttattctacaagctataaattcatagccattatacagaaagaagataattttattattggatttttaaatttaacaactgttaataaccatgttagactttaatcatttctttaaaagtagtaaataaacaaacacatgtttcggttatctggattttttgttttggtttgttttaatcctaagttttgcattgagcaagatactctttttcctcttttctaagtctaacatctgtgggtttgcttttcagccatagtattgattacatgttaagtcttagctctctaagtcgttgtaagctttatgtgtactggctttgttctttgattttatttcatgggaaatacaaacaattcagtgcataaataaatactggaagaagttgagttgaattgcagacactaatagtcgcagcagtgtcattagtgctgcatccgaagacacctcaccagggccctccagcgtcctggcttgtttcgctggtcgccatggttgttagtgcagacataagctttgtgaggctgactgatggcagatggagggacccggctgctccccactctaacctctagcataaggaagctggctggaggataaatgggttaagcatgctttaatgtacatttaatgtacatttctattctcaaaacatgttgattatttttttgccttgatgaaaacaataatcctataaaatattaattgcctgctttagaaggaaaacttctgaactggaagcaactttcgttagctatagacctttaatgaaggcagaatttcttatataaaaaaggagctaggaaagtagaagtgtaaatagaaatatagtttatcaacattactatccacttctgatgtggacattaaagggatattaatcttttaagtccagagactctcctaggtaagtcttatgacccctcagcttaaatctcttgcccagccctctcccctgaactcccaagttgtgtttctgtctgctgacttggcgtcactgatggatagctcagacctgtcatggcacaaaactgaattcctgaccattcccaaactgttctccccacggtcttcccaggttcattagtggcaaatccttccttccatttggccgcctgagatcttaaaagtaatccctgattccatacccaacatcccttgagtcaacaagttgttttgtttctgacttcagactagaacaagaaccttccacctctgagctcctcttctgcttccactgtagcgcaagacctctgaggtagaagttcagccccacagggcaagcacttctctctgtttcgttcatcactgattctcctgtgccaggatcagtgcctggcacatagtagggatacaataaatatttgcccaatgaatgaattcagaaactgactttaagtatataatgttaaactataaattgcacttgaatgattaaaaatacaattttatttctaagcaggactagaattttaagtaattttggaactctagtttgtcatcttgctaataacattatctaccatttataacctgctttccatatgccaggtactgtttaaggtgctataatacttaattctcaagacaaacctagcagataagaagaattttatagacaagaaaactggccgggcgtggtggctcacacctgtaatcccaacactttgggaggctgaggcaggcggatcgcctgaggtcaggaattcaagagcagcctggccaacatggtgaaaccttgcctctactaaaaatacaaaaattagccaggcgtagtggcacatgccattagccccagcttctcgggaggctgaggcaagagaatcgcttgaacccagcagacggaagttgcattgagccaagatcgtgtcatagcactccagcctgggtgacagagcgagactccatctcaaaaaaaaaaaaaaagaaaagaaaagaaaagaaaactaagctacagagaagtaacttttgactaaggccataaaatgagtaaattgcaggaatggggttgagtcccaaaacaatgatttttgaaaccctgacatactacatagcattgccccacctctaattagaaaagagcatatttgtaagtcctacctctcttggtagtttataagctatggaaacaaattaacccagaaatctctgtagctttacatatcagcatttacttctcagtcctgcaaagtccactgtgggttgagtgattgcagtccatctttcttctttagaatgttttcatttatcttttttttttttttaattttttaattttttttcttttttcttttttttttttttaattgatcattcttgggtgtttctcgcagagggggatttggcagggtcataggacaatagtggagggaaggtcagcagataaacaagtgaacaaaggtctctggttttcctaggcagaggaccctgcggccttccgcagtgtttgtgtccctgggtacttgagattagggagtggtgatgactcttagcaagcatgctgccttcaagcatctgtttaacaaagcacatcttgcaccgcccttaatccacttaaccctgagtggacacagcacatgtttcagagagcaccgggttgggggtaaggtcacagatcatgttttcatttatctttaagcagaaattactttagcttcccttagtgtgtggtgttgcttagtgatgttaatctggatgttcaggtaggcttttattgtctttctgaaagaatcagtaatttaactgagtattttggaaataacaataccacaccttttcatagagcttaacagtttataaagcattgcactccatcttctcatcactggatcacagtaacaggcttatgagagagacctctaccctaatcaaagaagcctggggatcagggttaaggggaaacactttggtggctgacattttcttcaagaaggagtttgaaggccaccactagaggcagtgtgaaccatcagagtgtttttttgtggtggaatttgtggtttaagagcacttggctatggtgtggaggatttaaagagatcagaattggagacagacagactctgggaggctgtggtaatgggagcgattaaatggaaataactagatgagtagagatattgcataggaaatggattcaagataaagggtgttcataaattctggaaatataattaaatatatataatgtagtcaagggcatcttcggtctgtaaaaagaacccaaaatttcctgtctacattttgaaaacaaatttgtagaaggggctttgggcttgtattggtttcagatgtttcagtggacaaattacagaaaaatctaacagtagactaaactataaggactcattgtttgaaagtcagtactgttcaaggttagttctgcaatttaaaactcttcttaagtattccagctcattctgtttttctgttccttcaaactgaacttttcttggctgtgtgaaggttgattatacaaattaggtcattcttgtcttacccaactaaatcagagtcaaggggccaggaggaaaaagcactcagggcacatagcactgtcgcacctgctccaaaatttacactttctataagcctagctgctgaaatggcctgctgtaacaccaagaccagttttagctagtagctgctgggaccacctactgtgactctaagactggttttacctgctgtcgtcactcaccaatcagagcttgtccacacccaaaagcttctctagtgccaatgagctttctttcaaaacaacacataacatttctctaataaaactcccaaccttccttttgttctttggacatactgaagaccacctggtctgtgtgtaggccctaatttacaattcttgcttcccaaataaaacattgaatttggagatttgtctctatattttaggtttacttcaacagctatgagatggctgcctcagctgaccctttcatcaagaagcaccatattctacggccaggtgtggtggctcatgcccataatcccaacactttgggaggccaaggcaggtggattgcttgcggccagaagtttgagaccagcctggccaacatggtgaaacccagtctctattaaaaatacaaaaattggccgggtgtggtgccacccacctgtatttccagctactcaggaggctgagacacgagaattgcttgaacccaggaggtggaggttgcagtgagccgagatcatgccactgcactgcactccagcctgggcgatagagtgagactctgtctcaaaaaaaaaaaaaaaaaggcagcaaagtattctagagttctcttcccctctcccaccaccaccccagactatgctttaatgtctcactttccagaactggctcatttggtcattcttttttttttttttttttttttttttgagacggagtctcgctctgtcgcccaccctggagtgcagtggcacgatctcagctcactgcaagctccgcctcccaggctcacgccattctcctgcctcagcctcccaagtagcggggactacaggcggccgccaccacgcctggctaattttttgtattttttagtagagacggggtttcaccgtgttagccaggatggtctcgatctcctgacctcatgattcgcccgctttggccttccaaagtgctgggattacaggtgtgagccacagcgcccagcctcatttggtcattcttaactgtgagcgagactggggaagtttgtatctggcttttcatcccccctggtgagctgtatccagcagggactcaggctggctttgtgggtgtcacagggctctagctgcacttctagtgaatttaatctccaggatttgagttgactgtgtgatactttcccaagcaactaggattgttccccaaacctgtgattctcatttctgcccacacgagggctttggaaaagccccaagaggctcaggcccaacccagtggcttttatttaattttctgggatggagccccatccttgtatttttcaaatgctgtccatttaattctaatgaaaagttggggttctgaattttaaaaaaaatgttgtgatggttaacactgagtgtcaacttgattggattgaaggatacaaagtattgatcctgggtgtatctgtgagggtgttgtcaaaggagattaacatttgagtcagtgaggtggggaaggtagacccgccctcaatctgggtgggcaccatctaatcagctgccggctcagctagaatataagtgggcagaaaaatgtgaaaagagagactggcttagcctcccagcccacatcttttctcacgtgctggatgcttcctatcctcaaacattggactcccaagttcttcagttttggaacttggactggctctccttgcttctcagcctgcagatggcctattgtgggaccttgtgatcatgtgagttaatacttaataaactcttctttatatatatatttaatatttacatattatatattaaatatatattatatattatatataatatatatttatattatatataaatatatttaatatttatatttaataaactcatatatatatattccattagttctgtccctctagagaaccctaatacaaatgttttttcttctttgctttccattcaatcttgaaaataatgacagttcagagtaagataaaatagttacctgttccagccctacaaatttaaagtgatttgacctaatcctaaaataatgttcttcttctgtcccagccttaggaaattaacagtatcagctatgaatatacgaatgtactgaccaagcatcttcagtgtgatgtctagtccgtttgataattatggtttattatgaattactatatttgtatgcatgttctatttctcagtcttttaataatattactagcagcatttatcaagtgccttctgagtttgtttagattgagagcctctctgaggtcctgtcttctctctgagggacgggagttgctcaggacctgcagcgctggggtccagaccctggcagttgccaatgtgctgccacacccatggcccggctgggcagcctcgaagctgcctcaggcagctcctgccacatccacaaacccaagcgggagcacagcccgggacaggaaacacagggcacgtccagatgctgctgcttcacagacaccaagggcgtggtttgtggaaaaggcctagttttaggaaggtcttttccctctgatcatccaggaactccagattaaatgtaacagaaaacctttatacaacaattgtcagttcttgttccatttgtgctttcttgaggattacacgtgcatctccctgaaattgtttaatctcttgggaccaagagacactgactcatcttgttgttgttattactaataggtgtaatttacatacatacatatgtacatttacataatttacacagtaaaaaaactcttcatccccctcaccacatttcttagtcttatttctcttgtgatctgagtttgctgtcattctcttggcctcagttcttcctaccacatctgctctgagaggaaacactatgtgactgtttaaaatctgttctttttttatgatcccaagaagaaagagaaaaaaacaaagatctgtaggaagaaaaaagggtgaggacagaacttctgcagaaataaatattgttacaataacacaaattgtaaactttaggataggtactgaccgtgtagttgatctttattgaaccagttggtttgaaatacttagaatgctgtcagctttaaggttttacagtggaaattctttccttaaattggcttttggacatggatcacaggtagagtgaaccaattccagaaaatgtgatctacattcacatttgtcagtattttctttttctatgacatgcataattatcatatcacaggcatcagtgacttgctgcctctacctgggattctccttacctgggaaagttgtaacctcgaggcccgtgatgtcctaaagtggactgtcattagcttggtggaggtacttgaagagcaagcagacactggagggtggggaaaccaagcatccggaggcactcatcttgctccgttgttttacccgacagtgaagtggctctcccaagcccctgtcctcctgcgttccattttgtggtgcctatagcctgcaagatgccatatgcttcctgttcccaaccacccaggtctgcccgtgatcatcccacttcgaactttgaatccttcttatatgttgttctttaaagtcttactgattattccctgtggtcttttttttttttttcactagcccttctgttgtcttaagttatggctgtgtcttggctatttacatagtaacttcctcatcattttttcatctccactatcttgtcctctaatggtcttgaacaccgtgagagtgttgaatgaagacccttttgtagacagtggccagcattgtttctgtgtctgtgcatgtggtcgtgacttagcttttgggcatatgataatcatcaggaactgagttgtacgtctcttcagtgtcctctgtatatcatgttgattacagttctcagttgtaatatctaatatctaagatttaagatttaatatctccttagcccgggtcccttgtgagttccaagtgctgctctgagctgataaccagtcacgtcctagacaccctggcctggaaactaggacatctgcctcgggcctgttatggccaaggctgctaacactgagaaacagtcttagcttgttacagcgttgacgtatagggttagaaaggcaaatatttaaattcattttaaatcctttcatttgaaattttagtaggtcattttggtatactgatggactgagtttggaaaaggctggcggcattaaactagaatattttaagtacttctgatgcctttgtactgatttcttttttgtaatcaaacccattaatagacttaaaactcaaggaagaaaaaataatacttgtaattttaaataagcattcaattataagtaaaaaacatttttgtattcgttaccatagttaccaagcagctttcctatagttctagaaaaaaatgggctccatcattcagagtaattctgaaaggtgcctttgggggaaagggagaggaaggggtggtacaggagaggtcctggccgtcccagaagcaggagacataactggaagagctttgttgacgctgagttttacagaatctcccactaaatagtaactgcatttgtgaggggaattctcttttagccgtgacataatataagccaacttaacagagtattggaattgtattcaaactttagaagtcgacgctatagtttacatggggtactactatatttgttcagggttttaaaactttatttaaatcaagcaaaagttagacacttcctgtatttgcaaataccaactatatctcaaaggaatgaaatcaggcaaataaagatgaggccaaaatttaaaatctaaggaagctgaaagtggcagtttctgtactggaagagagtgcatctatctctgtatttgtgcttttggtcttaatagtttgtaagccttatgtagagttttgataatatttcatggttttaggcctaggcagggattagattttatctcagattttgctaagagtatttcttctggagactagcaggctgctagtaagaattgatagaattggctctttgtcactgggagaactggagttgaagggttacaggagatgagtcctggagaacgggaggcagggacaagggtgccaggaagctcaggggatgaaagggaaatggagagtccagtgagagaaggctggcgaggtgtagagagtggccagacacatgcctgacagttgggaccacttctctatacaaatcaggaggaggcgaggtaggcaggatagttcagagtttgtgggaaggaacctgacatctgaagtcagtggagtgtgtcttgggctgctgcctgcactctgccattcatagatcaggtcttctttttccttccccagaactgccctgagctgaaaccacctttcttctctccctatagcagtacatctaccccacctacaccctgcatccactccacagccccttgtcttcttcagtccctctttccctgatgaccacagacctctccaagctgggcactgttctatggtgcgttttgttaaagtctaagggaagtcctgtaggaagaggtagttgttactaaacttgaggaaacatgaaacaacatatagcacacaattcaaaaaacttactaaaatttattaagagcatttgacatcttagttaagtcactgttcataactactgttccaccatagaatcttcacaagaacagcctgctggacttcacaagaaggctgatggatgttgggggtgggcatttggggtgtggaaaggccgcttggcacattctcagcatgcgccagcccacaccgccccttaccaccaaagccttctatttcccattccatccagtaggagcagctgtagctgacctgaaaccttcggggacaggctcattgattgtttaaatagggaggtgcaagctctcaggggtccggggccttgatgacacagctcaggcaccacaggcacctcccacaagcgcgtcaggctgtgtgaggctgagcacagcttattttcactttcttgtccataaagtctcacatcatattcagttgttttccttctaccctaaaagaaacacaaccagaaaagccagtctcccattttcatctgtttaaggaattatgtagccacaaggatctttagaagcaagtcctcttaggagaaaatgacaacctctatgggatttcaacaatggagttccttttgaaaagcagtggtgcagcccacacctcctaaattgccgtactttcttcgccttttgttgagtctgtatgagatcctcattaacaagtttaacaattcctggagactgaggcttttgtcaattatgacgagacttcccatttcctagaccatggtctccgttagcatttttgtgtgtgtagttactgttttgaatccatttccctctgtctttaaatgtttttcctttggtatttgaatttgtccttgtgaatcaccatgagtccatttttggaacaaatcagggtataaatctcttataagatatgcctgaaaagttttatcttctgacaattaaagaatctccacagctggcagtagcttaaacactatcaaacagtgacattttttgatggtttccattttcaatttcagtcctgcctatgcctttcggggcatttaaaattgctactagaaagttctgtggcttttcagactacactcatgaattcagtccagctgattaatcagtgtctaccgaaaataagtggtgtctctatctgggaagtttagcactgagtggtccctgggggcctgtctgccatctctctgtgtcttgaagctgctgctgcggcttatttttttcctcattcaaaaactaaaatattctaatgccatctattatctgctgactgactttaatgatttggattgatttttaagccattgtgaaactgtgttttaaaattaagtgaccatcaagcacaggtctggtggatgtcattagagaacaggtgcagccggctgatttctccatgtcatttgcgaatccagaatgtaccatcttccatgcctagagatgaaaccgaagtacgtggaaaggtctgtttatgaaaacaggctgttgacagcccatcctcctgttttacaaggatgagttgattgatcacactatgccacatatcatgccacagaatgataatatgtttgcttacaacgaaggtggacgtgggcgtggtgcacttcactcccttgatacagcccaagatagagcagccattcaagctggtggaaaaagtggttcagaatgtatttcagttccgaaggaaatactgccatcgagggctcaggtaagaatgccttttcttctcttcagttgcagtctttataaaatcctcaggcactttttaagagtgagaaccttgtttgctctattcttaaagctctgagtattacacttagttcaggcctgtgacggacaagacttcactgccaatgaggagagagcaaagacttgctagacctcaggtggcctctctcagggtggcttaaacataagcgcagcctggagttggtgactgcacagctcacagaggctctgtaccagggagctcgtggttccccagtgaggactcaagacagataataatgggttttttaaatgcttgctttctaccgagttgccctatctcttctttaaggacacacttgagaactaggaagcaaatatgacttctgagcagccaaaatcatatcacgaagtcctcacgtaagcacgtttccatctcacagaaagctgctgctgccaagaggctctcaggaatcactgggaaaacctgacagggcctggtggtctagaggtcgcccacctcgatgggctctgaaggaccacagccttgttgcagatccagaaagagccaagaagctgtttagttaagcccagtgatagtctgcttaagaaggcaggaaagtgtatttgtaaaagatttccatctacgataatctatccatagtccgctgtttaaagaggctcggcgtgagaggcacatatttctcattttctaaaacctcctcacatggcttcattgtaattctctctttcacaaggtccgaagtgtccctttagcatatgaaatgacagcagattattttaggggccagctgggcatcagctcctaagagtgctgcagtccacaaagcccattgctgaggatgccagatggcagaagctggagcctcagcctgccacttgttgcctctaattaagccagaattcccaccttaccagatagttcctgcttctctagcagagacttaaggtgcagagctggtgacagagatgccactggccagccattttggctgcagcccccagctactgtgcactgctggtgagtgaaacagaagctggattttggctcacacttacccctcacgcagagcaggacccacacagctgtacctgatagccctgattcatgggggaggagggagcacaaaactatgtccttttatgtgcttttggaaatcctggaattggtctgagcctagagctggcactagcgtttccaaggcaaccccccagctaagtgaagggccctattcatttcagatacaccatcctcaggacagacatggaccagatactgtgccacccagggtaacaggtcaaaggactttgacttattggtgttcttcagatattagaaactgccatcatcaggccctctttgccatgaaactgaactcaaagatctgtcacctcaccctgaaagtgtgggggacatgcaattccttgttgaaaggaccatcagcctataagcaacatgctatctatctcccctggccatgacaccttccaagccccttgggatgagctctgtaagagccctgagacttgaagaaaaatgcaatccaggcctaactccgcagcatttcaagcagttctgctattcattttaaaacaatggttcaatttggatagatgaaatttaaaatatatcctctacttcaaatcagttttaaagatgcttgaaaaataacaagaggaataattatattttcctatcagctattttcaaacttttagcaaaaaaaagtaactcttttagcgtgaagagttctaaaggctgatacattcaaattctagagaatcaaaactgatgatttgtcacacaagaaataatacaactttcacattgaaacatgaggcacatcaagcttatgtttctacaagaatgcagctgagcagatgttactttaaacttacttacttacctttaaaaagtacatgtactgatttagctttggagaatgctttcccattgtgtgcttgcctcgcgcctcaggttagagctgcctcagtggcgggccgtgcctcttatctggtgctatataatccaagaggctcctgccactctctccagctgtcagtagccagcaactgtgttgtgttgttttcaaatgagggttaaaaagtgtcatgatttgcagaatttaagtaaaattcttatttttctgtctgtctgtcttcccctcagaatgttattccctgaagcgcagcgcttggaaagcacgggcaggctgttagagttggcagacatagaccctactcttcggccccgccagctctccatctcacactttaagagcctctgtgatgtatacagaaaaatgtgtgatgaagacccacaactctttgcatataatttcagagaagaactcaagcgaagaaaaagcaaaaatgaagaaaaagaagaggatgacgcagagaattacagactctagctgctgcctgggggcgagcagcctaccagatgtcgatttgcactacgtggagcttcttatataggtactcttttgtctttacagaatgacgatacaaatgccaatgaccagatgtgacttattttccttttactatacagcttggcagagaaaataaatatcatcaaataagatacagtacaagctttcttttaatatatactgtatagatagttatgacatgtttagtataaacagcatctattacaatctatcttacaaaaatgaagtatctgcacattttgcccctaaaccacattaaaataacttaaatatgctttaaataaagcaaaaactaacaaacagctgaaagaaaatgcccagaggattttaaaaaatggccctttgaaaactattaatcacgacttccccagccttactttttccacataacttaattattagaatgtaattttaaggatcctaaatcatttgatacctgctcaaagtggatataaactaagtaatttacagattctgaccagtttcatctaggtttctgatccacaataaattaaaataacttaaatctttacaaccattttgtgggaaaatgtatactgcacaaaacccaggaatgaacagtttttttttttttttttttttgcaatttccactttaccaccagtttaaaagtaaaatgaggaatttaacccatatctggattgaatcatactatgattttccgtggctctctgtttcataaaaacactcctcactgacaacagatgttaaactctggacactgaattctcgctctagaacagaatttaggtcgatggtggcattttcagactgactgtcaagggactggtgacggatctgcgccttgagcaaagttcctctgtccctcttggtgctgttggcttttcgtttaatggggcagaagtgcccccggaccagtttgggctgctctcctcctttctgaccctcacccgactccgggccaggctgctgctcagcctcggggtgaacgtctgggtcctcggaaatcctcagtctctggaactgaatttcgatgtctttagtagggctgccctgcttcacagtctgacggtggtcatcatcttcatcgctcaggatgtcactctctttgatgagattgtcggcaaaatctgccaagccggggtgtgggtatttcccgggagaagtgctcttggagtcctgcctgccctcagccgtggggcagccgctgctctgggtgccgctgctcaagctgccctcgtcagagtccagcaaggttcccttgccagtctcaccggtccactcgttgctggaggaattcttcaggacttttaaagacctggatgaagctacagtgagaaaaacacatttcgctgtgatacagaaacaggttacacaatgtgtaatgtttgcctcaaagcttgtgtaagatttaacattaagattttattttatgatatgacttcagttagcaactatcctggtaattaggcaaaaatgtagctactgaaaacatggacatttttgacttaggtttacagttgtaagttaggcaattcagcatttttagattaccagagctcaattatgtaaatagaactagacactagaaactactacatgggctaagattcttattttgccaaggagtaagttgaaaagttaattggtaataataaatctaggctcctttctttca

SEQ ID NO: 1281 - DNA, 37283 bp, Homo sapiens
cggctgaggcgcctcgaagggcaagcgccaagggggcgcgggcgccgccggaagctggggcggggcgcccagcgggatgcggtgaagggcgagcggcgcggcggctgcgatgagtgcctctgcggccaccggggtcttcgtgctgtccctctcggccatcccggtcacctatgtcttcaaccacctggcggcccagcatgagtgagtgagccggcgcggcgggggtcgcgccgaggggcggcgggagttggctcgccgcgacgggagcctcgcaacttttccgagggggctgggaccgtccgccgcgggacagaggttcgtggccgcaggggctccccgcgcctggccagactaggggggcgccccaggggtcgcacgggccgggtcttggagccgggccctgaggtgcccaggctggcgcatttcgggatgttggtgccagcaccgcgccaggtgcccggggtcacaggcgtcaatacggccatgcccctgccctggaggggcccaggggccggtggggagcggaacaaacacggacactacgaacctggccgtgtcagctcgtttgtgccttgttctttttgcatctcacgggaacgtttccatgtatggactttcgcatacttatcatttcttattaattttagaaactgttgtgaatgactagcagaaatagcccggaaccaacaggcagagacgtgggttctaggcctggctttggcactgacggtgtctggcctgacggtgtttggcactgacggtgtggtctggcctcggttttccggtcaagtggactttgtgtgcgtcctattgtaaggttccaccgagacctctttgtgaaggggcgttgtgaatggagaagtgcttcccagtgcctgcgctggggtaggatggggacaggcagcagaggcagaacacttcaatgtgaaggaaatgggtggggctgatggagggggacagggcttgggttcgaagccctgcctcccactccactgcagggatcacggactaacctgcagccggcagctgaaggcctgagggtcgccgggtgttgggacaggcgccagcctctgttcctgctgatgttggttgctgtctggagggaggaggaagtaacctgctatgtctctcagctgttggtgctaaggaaattgcatcagtctgtaggctgcaaacccccttcagctggtcaggccgtggagtgtctgtacatagggtggtaacttcctcctctccagctgcctggccgcctgatacaggcagcacccacactgagtgctcaccaggcaccagcagtgtctacccttggtctggcccagtctctggaggcatcccctggaggcagctgctctgggccaccgaatattacatgcctgtcaatatagtgcatgggggaccctgtgctccaaaaaatggcattacgggtagttcagtgaagatatactgagtgcctactgtgtgtttggcactgttccaagtgttggtgacatagctatgaacaagccagaagaggctgtggaggcaggtaatgagatagacatcaacaaacattaatacatcgatagtgacatgctatgaagataataaaatagggtgactggggagggggctggtggccagggaaggcttctaggaggaggtaacacttgagctatgggaagatctgggaatggagcctgtcgggcaggaaaatggagcagtgcaggggaaggaattggatgggcgtagtaggtattttggaaggtgaacagatggggcttactgaagagggttgcatggcagcagaggatttgaggatgagccctaggttttggcctcagccactgggaagatggtgatggcatttactgaatacagactgaactatgtattgctgtgcatgatggagcgcactggcaagcactacagcattttgaataattagtgtcagccattcttcctgtcctcttgcaggttaaaacccccgtggcctttgattcctctcttctttctccactcccttcctcctactgtctgcttccccataagtcctggggctctagtgtctgttccctcctttcagttctccctggcactggccctttctgacctggactgtggcaaaggctccggtgcaagtctcgctgcccagccccgctgcgtgtttctcggcctcggccccccagtcccagcccacgcactagtgctcctgccgcaccagcctgcctttgctccttgaccattcctcctcctctccagcctctagcccggactcctgctgctccctgacagggatgctgccttcctcctatcgcagactgttgaagccgcacctggactttatggccacttctaccttctgcagaccctccctctctctcctttgagctccctcagtcccttgtttgcacctttctcccgagagttactttcctgtggtaagaacttacctgccccggctatagctcacccctctgtactgtcctgcccaggccagcgccgtgtgcatcgtaggcactcaggtatgtttgactttgttgaatcgagtttccttcccaccaaaccttttatgcaactctgaaaaccagaaaaagaaaattagattgagaggtcaggaaaggattgagcgtgttctgtctccctctctcactgagagagacacactgctcacactcatccttgcatgtcccctctcagtaggtgtctgttcatagaagggcatcagcagcccttcccaccccccaagactagcaactttctcatcctggggttagtcgcagcccttacctgtccctgagtccctgcaggacctgtttcttcctgtggtgagcaggtcctgcacttggctgttgtaggagggtctctggggacagtgccaagagtcagagacaatctgctgccctagtttcccttcattcttccctcctctcctggagctaagagcatgagaggacgctgtgaaccagttcacactgctctgtcctgctccagaagagcaccaaccacgcgatcctgctggcagtgagtgcaggcccttggtaggagtgaagactggagttgtcacctgaccaccacctgcctcaggctgttcaccattaaaatgcctgtcagctgacccagcacacccacctcttccctcatgggattcttcagcccagcatcatactcttgacccacactggcttcctccttcttcagctcatccccacaggaggagcctggagcaaccactgaagtgcaatcaccagaaacctcctatttttcagtttctcacctggacattgaaacagccaccctcattcttttttaaaaaatgtaattaattgttattattttttgagacggactcttgctctgtcatccaagcgggactgcagtggtgcaatcttggctcactgcagcctccaacccccaggttcaagcaattctactgcctcagcctcccaagtagcggggattacaggcatccgccacctcgcctggctaattttttgtatttttagtagagacggggtttcaccatgttggccaggctggtctccaactcctgacctcgggtgatccacccgcctcgacctcccaaagtgcttggattacaggtgtgagccactgcgcccggcctcattcttatcatagaattgatccatctatcatttatccatccatcctccatacattcacccatactccatccatccactcatcatcatctatccatccatttatccatcatcctccatcatccatcaattcatccatcatccatccatccatttatccatcatcctccatcatccatcaattcatccatcatccatccatctattcacccatcatccacccattcacccatcatccatccatccattcatccatcatctatccattcatccatcatctatccatcctttcatccatcatccatccaaccattcacccatcatccatccatctatccatccactcatcgtctatttgttccccccttccctccctccttctattcttatctttctctctcctaggggacggtgatagttatccaaaggtcccgatgttgggctgtggtggtgtggaggggtctcagttgaggagtggtgcttgtagctgctccaatctgaagaggtcctggtgtagcaggccattggagtgggccaggtagtattttgtctagaattggaagccctgtcagtgctggaggtgtgagagggagagtattgctgttggactgcaggagaactcctagtgggtagagctcagagtccattgagataggttcctccatgtaggcagggacttctcttatttatccagtctcctagggcctgcaacaatggctaccacataggggtgcagaatacatttttttgcttgctatgtttttgaattaattaataaacagatagatgcaatgatgtgactttcctagggtgacacagttagcaacagaatgggtaccaggatcccggtttcctgactgataactctaccaagcctcgtgccctatcgctgccccactgagtagcggctttggcccctgctgtccttggtgccactccctttcctgtagaacatccaggggatgtactcaactaagcttcaccttggtttctatggtttggggttggatgctggtctgttggccctggttctggggtgttgggctatcttcattctggcctcaggtctagtccagactccttctccatggatttcctggcctcattctctggcccatttgactatacacataacataaggtctttcttgtcccctggaaggcatgtttagttgtaatgcctatatattccttggagctcagtctgagggtttctgactggccctgagggaggtggcagagtcagtggtgaggcctgtcagctgctagggagcaggggttagaggaacgtgtaagtggaggcagtggggcagtggccataggtgcagcagggtggggtgaggcagagggagctccagacgtgtcatctgtgcacatgagacaggataagaggagaatgaggaggacctgatggcttcggtccctgaaagtcatgggctgcagcccagatgggccaaagagctgcagataaacttcactaactctacagtgctgggagctgcaggcagaggcagaattatggatgaattatgcagcactaggagggaatgcattcaatagtcaggaaattccaggcaccaatgtgtttattttgatagtgaccacctccctgttctggtcgttgcagttcctggactattgtaggggttgctgccctcatcctgttcctggtagcactgctggctcgtgtcctcgtcaaaagaaaaccaccccgggacccactgttctatggtacgtctccacaaagggaaatcttttgtatctgattaataacacaatactttcagcctcagtcacatattcctccttggttgtgaatactctgagccctttggtaacagtggctgcaagtgtaggggtgtttcaggacaatctggccctcgcctctggctattgcctctcaggcagtggactccaccctctcccaggtggcatcccggtggagagttactgccaggccaggcagggcaccctgccaaccccagcatgctttgacctctgacctctgacctcgactctcatgctagctccttcctgggcttcctgtcttcagcctgctactagcagtcccccccacttagtgcagaacttaactgtgtggtgtctgggtctgcacatatgcatgaagaggaaaataatggaacctgccatagagacaagcacctatagtgcaccttgtatgaccctgagcactttagcagcaggctttcacctaatcctcaccatccctccacttgaaagtgaagcagctggcttggagatgctaagaaatgtggcaaaggtcgtgtggctgttgacccctaaagcccatgcccttccatcatgcatgctgccccagccaagctgctaccggcctttgagcacttcctgtgccaggtaccttgctgggcattttgttctgtagtttctgcttcagtaatgctgcatatcaaatgcaccccaagtcctacagcaacaaacatttatttttcttgctcacaggtctgtgggttggggccactctgcatcaggctgtgggttgatttcagggctgttctctgactccttgttcttggaccagcagctcccaggcatgcccttctcatggcagatacagaggcacagtggggctagaaggaagaaagtggtggctcttaaggccttggcttggagctgccccatcttactcccacccatattccaatggctgagatgaggcatagggccaagcccatcagcaacagcatagggagcattctctgcctacagtgggccttgggaaaggtggggtgggaaggaagaattgtgagtaactagtttctcccaatccacatataagaagctctgaagcttcagaaatgatgtaatttgcctaaggttttacagccagtcattagatgagctgggtccgtctgctttcaaggcccacatgccttttcctggctctctccactagcctgtgctctgacccttgcacacctttccagatgagtttcctgctgctgtctgtccctcctgttcctccccactccatggagcctgtattaactgtactgatgtctctcctgactcttcaaggctgggcaccctttctcctgtaccctcagccctctgtcctggtctgttacaactttgagtacactgcagcctcagggtgaggctcaaggccagactcctcacgtactagaaggcagagaccatgtccttgtcattgctaacacagtgtctgacacttgtgttgtcatcagcaatcattggcagattatgtgccgaacacttcctttcttggagacatatgatggctaatcacctgggaggcttctggaaaatgagtatcaggaagtgacactgccaatgagaactgggccaaaggcccccatggaggcgtggggaaggcacatctgcaaaacagggcacatgtggccttttgttccttctggggagaatgtgaatgctggactcctggctgctgactccaggcaaggccggcttcccttctctgtgaattaaccatccccacactcctctccatttcttttttcacagcttttcttatattcaccatcagatttttcttctgtccatgtccatcccatagtctaaggcaccaatctgttacaacttgaaaatgcagctttgacaaactaacatgcactaaatttgatcacctgctgtttaaaaagtattatttcttagttatttgtgctagtagttttaagcccatttaggagatgctcacaactctggtaagattctctgacaggtatagctttccttctgtcatattcaattataccctcttgtattcatttttaacatcactagtcttttttctgaaagccattgtcacttgcacatcagccacctgtctgtctctaggatacgccatgtggaatagggtaaccacactggacacgctgtgaggtggcctgcttgggaatcattgagatgaatcacttcgtcaagtcattgtctttttttttttttgagacagagtcttgttctgtcgcccaggctggagtgcagtggtgtgatctcggctcactgcaacctccgcctcctgggttcaagcaattcacttgtctcagcctctggagtagctgggattacaggcgtgcaccaccacacccagaaaatttttgtatttttagtagagacggggtttcaatatgttggccaggctggtcttgaactcctgacctcaggtgatctgcctgcttcagcctcccaaagtgctgggattacagacttgagccaccatgcccagcctgaatcattgtcttaaacttagtggtcacttctatgcttccttggccactcagttactggctttgctcccactgcccatgtgggatgtgggtttgattctgggcagccacttgtaggggagtggaggatgggtggagttggcctgctagaatcttctgtgactgagccggcagtgaccatcattctccactcctgtgatgagtgttcccttgatgagagtacttaggcagggatggggagagctgcgaacacaggtggaggtccagctgggtgtgtagaaggggtattctgttagtctatctcgataattgtccacagcatcttctggaaaacatgaaaaacattccattattattagctgatgccaagcttgtagtaattgtctcctgagctattgctttttaaactgctgctttctttgctctagtgtatgcagtttttggatttaccagcgtggtgaacctcatcataggactggagcaagatggaatcattgacgggttcatgacacactacttgagagaggtatgggatcacttagtgattatgaggtttcaaccaaaaggccacaacccagatcacattactcagagacagaaatcctctcatttagtgtgaacaggtacgctacgcaggctttcatttcctataatagccttaggtcgcttagtcacatggaaagtggagcagaaaggacggttagatcacgagaggcaattctctccaacattcagctctcacggcttctctcactcatgaccgcacacatgacctgcttttcccctttatctgtatttaatataaataaggtaccttaaatggatttagtatttatgtgtctgttaatacatgactatctcagaaaccccaagtcagtcttaaatttgtaaagtacccaacacagaggcacttgatgaagtcatttgattgtgatggcttgcactctccaccatgctgcccaaatcatagctttgatactacctggtactcgagagagctagtcctattttcttattttatggtgggctgaacccagccccagagaggttaagtgacttattcaaggtgacacaggaaatgaggaaaagggctcaaagcagattcttcatccatgttcagataatggggagctttgtatgtacgctgtgggagtttgggttttatcctgtctgtgagggaagattttaagtcagtgaagaatacaggcagctctgggaaggatgggcttgcagggaagggtccgtgccatgagctggggcaccagtcaggaggcttcctcgggaccagcaggggcataaacgtggctggatggaggcagcgcatgggaagtagagagagggatgaactttagagaatcggagtggctggaatgaataagacttggggacaaattgggagtgatgggaaggatgaggcctaagacagtgtcctgattcctgctttggaatttggaagaatgctgctgtttttacaccagagagggatgacaggaggaatttatttctgcagacatttgttgaaggggactctgtggtcagaagacctgctccctgccccctgggagctccctgcctgaaagggtggggagatggaattgtcccaggcacagtgagagactcactccaggcacagaagtactcagaggaggaattaagtctgggtgcagtcggggaaggcttattgagttggtgacactgctgtagcattttaaaaatggtcatggcagtggaagatggacatttccagatggaccagggaggtagggggaattccggagagaagggacagcttgggcaaaggcttggagaggagaaagagcatgtgcctctccctggggcaccaatctgcaaggatgaggctgagtttctatggggaggtggagtttcagatgctggcagggctttgcaggtcttgagctctgaggagcagtcctggaagagagagtcacgggccatcggagtgcagttggtacctgaatgtctgagaggagaagggcttgcctatgagaaggtagagagagaaaagggctgagcttgggactttagagaccatggccagaagaagagaagcccctgaagtggaccatggggggcaggccaagaggcagaaggaaaacctggagagtgggggccatggagcccagaggagggaggttttaggaaggaggcggctgacgagagggctggaggctgagttggcaagggtggtaagcattggggcagacggggtatcagaagggggactggggtgtaactgtggtggcaaggtctgcagggccaggctctggggacccagctgtgatagagaggagatggggcttggtccagcaggctgtgacaagttttggggagttttagagtagaggaacaacatgccaagagccaggccttgagaatctttatctggcaggaggagtgtcatgggttggaaggaggggacaaaggtagggagaccatttgggaacatagctgtggtccagtgagggacactgagggctagacctaatgctgtgaagaagagggagaattgccggggtgacatcgtagcaataaagttgatagatttgctgagagactgcataggagaatgaggaatgaaaaaatgaccatgtggttttgaccttggtaagccgaatggtttcaccattaatatagagaggccatggctggcctggtggctcatgcctgtaatctcagtgctttggaagacaaaggcgggaggatcgcttgacgccaggagttgagactgcagtgagcaatgatcaccactgcactctagaccgggtgacagagtgagaccctgtctctgtacgtacacacacacacacacacacacacacacacacacatacagagagagcaagagagagagaggcaagatggaaggctggttgaggggagaagctgatgaattaagagttcaggcgagttgaaaggacctgtggcctgtgcaccatgcagttaaagatgctcatcaagctaccaggagaggccagcactggctcagagagccaggtgtgttagcaatggaagtctgaaaccataaatcggatgtattcttcagtcagagcaagtccaagagaagggacgtgggcctggcatgggtgtagaagcagaaccttgattctgtttcctgcttctctgattttaatttgatttgatctgtgggagagatgacagagcagtccttgccccaggggagcatgaagcttaagagaaagccctgcttgcttggctgattgatgggctggttgatctgcactcttccttgttgtagaaaggacttaaggcatcttacagcgtgaaacaagccaggacagcatgaacgtgggagaaagaggaaaggaaaacaaggtggggccaaaacaacagtaaaaatgcacggaaaattgatgacagtgattttctagaagccacctggaaatgtaaccacctagaaaagggaaatgtagttcgtcatataatcttgtgttcataacattaacatttgcccaggagaagtatggctcttcttggtctctgctaggtatactagctacgtgaccttaggaaagtcttgtaatctcagagcatctgtttcctcatctgtaaaatggactcaatcctgtccatcccactgggttgttgggaaggtagaaggaggggttgggtgtgaagctccgagttcggtgcctgcctgcctatgtgtcagtatgtggggaatgagtgttgtgccatgcccagcccagcaagccacgggatcagcatgaattattaaggccagccactggttctggaaagcagggtcatccctggccacctctctggtcactgccaagcaccttgtgtcaaagatttggcttggtctccatgagtttgccatacagccaggattgcctatcatgccatctgccttcgcatcacagtacaaacctatgttgatgcatcatgggccaattggccaggcattctctaattccatcctctgtggccagaccctggttttggcagctccagcgtaaagttgtattttcatgttcctaccaattttgaagaaatagtttcatcttagcagatgaacacaagttagttctgctgttttattttacttgcaatacaggtctgatgttctgcatttacaggtcttatttaaagtggacttctttttaatgctttctttagggtgaaccgtatctgaacaccgcatatgggcacatgatctgctactgggatggctctgctcattatctgatgtacctggtgatggtggcagccatagcatgggagtaagtcagttcacctggtgtgtgcctttgccaccttagcaaccgataagcgggtatgtaaggaaacgttatgcatagaggcaaatacacaagcaggtatactggacatgaatataagttccatgggtgcacgtcagacgtggctttatcctccttgtaccactgccttttgaatatgtccttctgaattgctccctagcatggtgacagctcgggcagaccctttaagctttctgattatgttgtcttacaagaataatttttattttcagcaattaaagctaagcacatcttaaacttcatttcaaaacttcaaaatttccaaacagcaatctcatttcggttcaaagcttctgtccttccccagatcaggcacagctctgcggcttggctcgcactaaggcttggctacatggcttgtccgttcactcctcctgtctcactctgcggctggccccttggcagtggatgtgtatgtacaagggattaaaggaacaggagccgagtctgatgtgaaaggtgctggtttttgggtattggtacccccatcatgatatgctagcttggtcttgggaggcacacatgtgagttctttagagaccccaaccacaggagcttctgcattgcactaatccctgaagtgaacgacgtgctcttgggctgaatttctgcccatggtggcacacccacagctttttttctgctggggcccctgtaacccagaaggtacaccctttggggaggggtcttttcaaaacatttcaagtccggccatcttctcaggcctccacttgcttctgggttacagaaagtcatgcattcttgccccatacaaggttgaaatgtagtttacccaagtatctccctcactcccaacatgcactcaaggtcagctccagctaattctttttttttttttttttttttgagacaggctggagtgcaatggcacaatctcagctcactgcaatctccgcctcccaggttcaagcgattctcaggcctcagctgggactacaggcgtgtgtcactatacccgcaaattttgtatttttagtacacaaatctaaacatttttttcaccatgttggccaggctggtctcaaactcctgacctctggtgatctgcccgcctcagcctcccaaagtgctgggattacaggcgtgaaccaccgtgcccggctccagctcattcttatctgttctcctgcttataatcccagtcattatgaatgggcctcttggggtctggttacatttggcttgagggcgggggtggggcaggacgcacacagtattctcgtttcccttcagagaatttccttttgaatttctcatagcctgttacatagtgtggagtttgggttattggggttatcaattgaaggaactttttttttttattttgagacggagtctcgctctgtcacccaggctggagtgcagtggtgcgatcttggctcgctgtaacctctgcctcccaggttcaaccatttctcctgcctcagcctcccaagtagctggaattacaggtgcatgccaccatgcccagctaattttttttttttttttgtacttttagtagagatggcgtttcaccatgttggccaggctggtttcaaactcctgacctcaagtgatctgcccacctcagcttctcaaagtgctgggattacaggcatgagccaccatgctcggcctgaaggaagtttttgtcagcattgaagatttggggtatatgtctagcagctcctttgcaacatggggtacatgtcacttgtcttcacctttggggctttggccaaaattctgtgaccccagaaaaagtccatttaacattatcattgtaagtataactcatacttataatgattaaaaatatggatccaatttcatttcttctttcaactttctttttcctttcatgctgttgagtttcacacacaatagggaaatgcaggagtcctgtggcagggatgatcatgttgtagtttaacagaagacatagcaggcgtaatttcctatttaaaaggacacgaagaaggttctatagtatatcacatggcaatgaagttacataaccagggctccttgtgtttgatttattcctctcaattcaatatgttttgattgatgtactttactagtttgaatacaaaataatattgaagatcattttttgcttagtattctaagacaaacataccaagtcaagatttttttgttgttgttgttacagggaaacttatagaaccattggcctatattgggttggatctattattatgagtgttgttgtttttgtgccaggaaacattgtaggtaagaaactttatcttaaagttcactttccttttctaaaacaatggggcttgtttttaaatagagaagctcttttagttataatagaaccaagtgattccaagcttactaaaaacctgttttgcagaataattcctttttctcacctttaaaaaaagtactttttaagaagtgctttgagcaattttcagatgtgtgcattgaacaatttggcagtcaagttatcagggattcctgtttttttagaaggatcttgagggagtgagtatggtgtttatggctatatttagtgtgcaaatatgttaactcctgacacactatgagaactccaaaaatgtacttggaaattacaagtacattattaatgtatgcaggaaatcaggatatataggtagatagatagatagatagatatagatatagggagatagatatatacaaacatatatagatacctatctagatgtattttttgagacaggatctcactctgttgcccaggctggcttgcagtggtacagccatagctcactgcagccttgatctcctgggctcaagcagattactgtagataggacatgcctgttaatacacatctagtattttaaattgacctttttaatttggcctcattaaaaatattgtctggcccatagcaaaattttagatgacctgagatggggaggtatcctaaatattacttgtgttagatatgcttttggtaacttctttctctttctctcttttaaatagggaagtatggaacacgaatttgccctgcttttttcttaagcataccatatacttgtcttcctgtctgggctggtttcagaatctataatcagccatcagaaaattataattacccctcaaaggtgattttattaagctttgatgtaccctgttctcaaactcatagggttctttcgcatccactggccactgaattgaaccatgcctctgtggactggagcatttggggcatccaaacagtgcgactgttttgattatgtagcattagcttacgtattaattaatgtaggcaagaaggtctgtttctgtctgaatacatctgcttctgttggcaaggccatactttggggagcttcctgtgccagtggtcacactggctctaactatcagattctgcattagtgtgtcaagtgaagtccatagtgtgtggttcatctaggattgttaatggcctggacgttgaacacctgggttcctctgtgacacctatgcatttactaccccaagaggacactggagggatactgctcctcaaggtagtctacacagccatacaatcttgactccagagatccaggcccatagagactggctacaggacatctgagacacctcccttccattcacagccaaggtagtcaaggtgaaacagcactggcctggcagatactctgttaaggccttcatttctaagctagtttctctctgtttcttttacttttctaggtattagatcatttagcaagatcttttaagcaaaactgatatatgaaaatatgaattactagagataatcagaatacgactattcattttacaaaagattttcagtataattcattaaaatacattttaattgacaaatacttcatttgtaaacatttagacaccttctatgtaaactcaggctggcacactgacagctggtactaacttccctctgaggaaagaggtggctgttaaaaagaaaaagcaaatagtcagtccacccttagtcccagctccactgcttttaaaggttccatgtcagtgtgtcaacagagtaggtatgccatgaggcatgcagaattacttatcattatttttaatgtgaaaacacagtgacagccagggccaagcaggcattgtcatacagtgctgacagaaacataaattcagaattgctctgcaaagcaatttggcaatgttatcaaccttaataattctggaacccaataattctgctcctagagccctatcttcaggaaatcatcacacagataccaccaaagatttacaaagttgttcatcattacattaagtataacagtgaaaaatgcctaaatatccaacagtgggagaatggctaaagtgtggtgtttccatatggtattcagtttgagaaaatttttaaacatgtgggaaagtgcttataatataggcagatgttgagagcaaaaagaacaaatacagaattgtttatatacaggaataattttatatataaaattgttcctaattttgtgaaaaatgtagatatatgtgtgtgtatatatgtatgttgtgtgtatgtaactatatctatttacatgtattactggaaaagtataccaacggttaatagtggtgtggcaggtttatggtttacctttaaaatttattatcattaaaatgtcatttcaagaaaaaaagtggactcatagagctacaagagcccttcgagagatcatttagcccaaattcttcatttcacagataaggaaattgagacttgaggaaggaaatgattttcctaaagttccatggccagtgatttatgatataaattgtgcatcttcaaaattctcttatccatcatcatgacatttaatgtttcagatttcagattcttctttggcactttgggcctgctctttaggtacaaactctattttaggttattcaagaagcccaagcgaaagacctgctgagaagaccatttgatttaatgttggttgtgtgtctcctcctggcaactggattttgcctgttcagaggtttggtaagcataacagatcataataacgtaacattgtgatactactcacatttccaaatggaaaaaaacttagaaatatgtttttgtttttccatcagacttcttagcaaactaacaaaccattcctcccatcaaagcctggagccctggacctgcttcctgctgctcccaaccccagcctcctgctgtcacctcctcctgtccttagatcaagctctactcagaagcatcttcctccccgttttagggcatctaaaaaatcagccatcagagtctctcttttttattcttttgatgtttctgatttaaatgtaaatatctttggtaaggatggcaccctaggactgcaacacaactgtggcacagagcatccctgtgttctcaggagtaggggcaatggggttgaggaaggcgtaccagttcaacaattcacgtgtatgtagggtcatgggaatgtctcactggtaagagtagtgttgagtaaattcatctcacgcctggagtctttgtattgatgtgactgaaatacattaagggcacatgggcatttcatgttttctattttctctttattaatattttactgcagaggttaggaaaaagactcacaggctttgtagttagaatcctggccacttactagctgtgtggccttggaaaaactacttaacctcttggactctgttttcctctctgtaaaataacactacctaccttaacagtattgttttggagattaaataatgtacatcaaacacttggtagaggctcttatacatagtaaatgattactgttaggatttttattgatcagtgatccttcacaatgccccaatttgatgatttcttcttagtagaaatgaatttgggaagtttagaattatattgttaattatattcagcttcagtgacaatttctattcgaagcctgttggcgcgcgtaacagttggacagtagagtggcaagtgtaagcccatgcaggtgacttttatcatttcagggtcttgggctactgggggcctgtgcagcaggctgggttcagggtgagaagctgttttaagagttatctttatctgtgaaatgtcaagaaactttctggaggagagctggctaacaggaggaggggcatggggaagagaagtaaagaaggcaaggccatagctttgcttagaccacagggccactgaaactgttctttggttagtttgttgtaattcttaaagttcaaacaacaaaaaatagtgggccccacctgtattcttgcacggccatatccccttccctgtgcacgagaaaaatgtgtgcatgtgtgggggtgcatgcaaggtgggtagggcttttggattggggccatttttaccaactctgtcattggcctgtgttcatatatgccatctaggtgggacaacatttatggccaaagacatgaggaatggtgcctgaggggaggaaggtgactcagaggggacctagtaaagtgccaaaaagactttccagcaagaggaccctgctttcaaatcatcttttactgcctccaaaggccatatacgctatgatgcactggagacaggaaggtgctattttcaaatcttgcaatgcatagtaagatgaatttggtgtagaaatatacttttcttcctgtagggaatagggggctagttatttccaagaaaagtgaaactcataatttaaagcaagctgtgctttggctagccaaacctagatacttaaactctgaatatctgaaaaatacccaagaatagggcattagtttccatttcctgcaccataattaacctttgcttagtctccttagaacaaatctgcaaaatatttccatcattgatgagcctctacaatgcatacgttttgttaaacagcaaagcagcttgtgactaaacctggcacatttagccttatcagcaaacctaagaaccagatgtgattgtatttttataatgagtttatttttgtccttagattgctttggattgcccatctgagctctgccgattatatacgcaatttcaagagccctatctaaaggatcctgctgcttatcctaaaattcaggtcaagtagttatgaagcctaagatttttctaaaattaattttctttttaaaaaatgggtcccagctgggtgcggtggctcacgcctgtaatcccagcactttgggaggccgaggcaggttgatcacgaggtcaggagtttgaaaccagcctggccagcatggtgaaaccccatctctactgaaaaaatacaaaaaactagccgggcatggtggcacatgcctgtaatcccagctactcaggaggctgaggcaggagaattgcttgaacccgggaggtggaggttgcagtgagccgagattgcgccactgcactccagcctgagtgacagagtgagactccacctaaaaaaataaataaataaaaataaaagtaaaaaaaaaaaaagagtcccatataggaaataggaattaatattttcaaagatgaaaatgtttacttttttgtactttttagtcaggccaagttaactgccaatttgctgatgatgttatttctctgttcaatacagatgctggcatatatgttctattctgttccttactttgtgactgcactgtatggcttagtggttcctggatgttcctggatgcctgacatcacattgatacatgctggaggtctggctcaggtactaagaatattctgttgagaaggtttacttgtggtctaggtgtcaattgttgaatatatgaaaaacttctctgctcagtgttttagactaggagatagctattagacatgtcaccttttgttttgcagttcttcagaagacatttctgcaagtacattttatttcaatctcacaataactatatggtagatgtgccatccagttacacagatgaggaagttatctgtggtccagtgaagttaaatgatttgcccaaggttacacacccagcatgtggcattgttgttttattggactgtttcacaatctctgaataccatggctactaaaaaaggattgagagctgtcaccttcaaaatgtccatccaaatttaagacttcagaattccactacgctatgctatacagaaccagggaaactggtttaaaaaatgttctgggcctgtcatttcattccttttccgctggcaccttgccaaatatttggcctagagtaggtgttcagtgaatgcttactgcgtttaactgaaaatgaaattatctatggagaacttcacacataacataaagcacatttttacaagataattagcaaaacaaatcaatcttctgaacaaggaagaaaattaatttttcttactagaaataaaacaaatgaacttatcatttaaaaacattagcttcatcttgttcttttcaagcagttataagaatgaggttcatctagaaactgtaggcttgtacagtcaattatatgcatggtataataatcatgatcgtaagacatactagaattcacacggttgaaaaatatagtatttaaggggtcaatgcattaaatcctttcagtttgaggtaattcttaattataaaattagcatagtagtatcgaaaaagttgatgtagcatccagaagtaatggttcctgtcctttccttgaggggcttaagaaggaagagaactaacatttattgctctttgctggttgtttttcctttgcagacctctaaatacctgattcctcagtccttggggtttatttctgtattttaggtctttatctttgtatctttcaataccaactataagctgataacttccagttttctaccttcggcccacaccgttcccagactcctgtatttcattccaaactcagtctttttacttgcatgcctcactagcacctcagatttaatatataaaataggacctgatcctccccacaacctctcttccattttttcattatctgtttaaatagtccaattgcatccagcaactcaagccagaaacttggagtaattatttacactcctcatcctctacatctagaccaccactaagtccttttttttttcttttaaagagacagggtcttgctccatctcccaggctggagtgtgatggcacagtcatagctcaccgcagcctcggactcctaggctcaagcaatcctcctgcctctgtctccagagtagctgggactacagacatacaccaccgcacacagctaatttttaaattttttaaagagatgggatcttattttgttgcccagcttattctcaaatgcctgcttcaagtaatcctcctgcctcagcctcccaaagtggtaggattacaggtgtgagccaccacacccaaccaggtccagttagttttactccagtgattctccaacccattttttttttccagctccgctgcccctacactagtctgagctctcattaccttacttcatgccaggcaaaccacgttaaaagttttacttacctatttgtctaaggataggctatgtgctctgctgctgtaacaaatactcagagtagcttaacacaattaaaattttaattcttttttatgcaaagatcatgtgggatattttcaaggtccaggcctggcaccaggtcaactgaggggaggctggtgactgtggtcttcctgcctgcctcagaataaacagcacaatggacacataataatatcttttgtaatagctctgggaaaaaaaccccaatttaaagatgaggaggctgaggctcagtccacctgaaattatttgcctaagattacagttattaaatggcagaataggtttatgaaatcctgtctgactccaaagctcatattcttctccattgtgttatctcacccaccccatgcaaacaatgaactatggcacagagtcctacagcacaaaagactgtatgtagtacgaggtgctggagaaccttgtgggtggaaggcagtgacattccgagttggactctgagggccaagtggggctttattaggctgagcctctccagggaataacccagggaaacactgaggtgtgggcatatgcagcaggtctgagggcagagtaagccttgcctttttttttggcctggttcctctgccttattctcctgtatccttcagaacagatggccgcatacccacttcactcttgccagccctttctttagaggattagactgttcagtttgacagctgttcagtttgacacctattacctgtgtcaattgtgctttgcctgcacaatcaggcctcctctgcctgccatgtgcctggtcggcctggtaccagtccctgatgcaggaatgctaagtgtcatcagccagcaggctggttaaagagaccagatgttggacctggtcaagtctcaggagacaaatggaaacagcaggaaaacctaggcaaaagcctagtcacatggccagggtcaacagtcaggaagcttaggaaggtcatagcttagaggaaaatgggtgtggtaagcctgtagcaataagacaaaccctaatctgttggtgaagctaagcttgcaggtgggcacttattactccagccaagtggttctgagaagggcagtgtggactacagagcagctggcagccgcaggggcattacctcattcatgtcagacgtcaggcatcctggggcttatccatcactgcccagttgataaggcagcctgaagcccctctcttgatggtgaatgcccagatccagagcctaaggctaaggaccagatcctgtaaatgtcagaaggatgtttctcccagcccagcaggtgaagacagactgagtaaagaattatgggtctgattcccacagctcttggctgagctttaatatctacccacttatagtgtgtaggctaaggaaaagttagaagccatgccgcaacaaaacaatagatatgaccagaatactgaattacgttatttgttttgtacttagcaaatactcgcttatgaaatggagtctcatcttatgggagtatctgacacattcatcacagaaagcactctccagcaaggcacggtggctcacacctgtaatcccagcactttgggagcccgaggtgggtggactgcttgaagtcaggagtttgaaaccagcctgggcaacatggtaaaaccccatctctacaaaaaatacaaaaattaggctggcgtgatggcatatgcctgcagtcccagctactaggaaggctgaggtgggaggatcacttgaaccaggaggcagaggttgcagtgagccgagactgtgtcactgcactctccagcccaggtgacagagagagaccctgtctctcccaccaccacaaaaaaacaaaacaaaacaaaaataggcatttttctgtaactttaatcagcatctttgcttgctaaaattgccattcttatttagaaaccttatgcattcatgatcccactaactttactaaaacttacttttactgaaacatctagtaaactctcaagaatctatgcaacttagtaagggaaaaaaaaaccacctttgaaaagttctagatcagtataggccaatggaagaaatattgagtagtggccaggcgcagtggctcacacatgtaaccctagcactttgggaggaccaggcaggtggatcacctgaggtcaggagtttgagaccagcctggccaacatgacgaaaccccgtctctactaaaaatacaaaaaattagctgggtgtggtggtgggcatctataatcccagctacttgggaggctgaggcaggagaatcgcttgaacctgggaggcagaggctgcagtgtgccaagatcacgcccactacactgcagcctgggtgacagagcaagactgtctcaaaaaaaagaaagaaaaaagagtgagtagttattggggccttgatttcagaccatgtaggagtctgccaaatctgctgccttcagaaatcaaaagatcaaggaaagagtaaaagaagattgaataaaatgaaaccaggacacattttagaccaaagagttccactggggacttactcataacccaggtatcttttcatataaaatgctaaccataggattaaagctgcaagtgtaatctgaaaggcattataggctgcttagatccacttattagcatttcctatcaattgaagcattttctctgctaaaatatcaatgaaaatgaaaaaaagccaaagccagtagagttcatatagttaggaacataagctctggaggtgaactggttcagattctagcctgttgctgatgagcacaatgaccttggctactttacctctctgatcctcagtttcctcttctgtaaagtgaggataataacagtagctttctcatggaattgctgttagggttggatgaggtaatacatgtaaagggcttaaaacagtgtctggcacataacagctatgtaaccctttgttgctactattactggtagaagattcccagtaagaatttggagatatgccttatgttgttccgaagattaacctgaagacaaactaattaaattaagtgtattgtatataattaccaagaaaacaaagaaactgggtgaaagctttgggacagactcaccatgggcttggtaaggagcctgccatcccacagccagcgaaggaggttcagttacttcagtcaggtgctgccctcagactctctaactccctggctatgtaggtgctatgtcatgtctttttctcacaaagagatatggaaacttacgtgtgaataatttggttgtgaagagtttactgaagtaaatttatcattttttttttaacttgagacagggtcttgctatgttgcccaggctggtctcaaactcctggactcaagtgaccctcccgccttggcatcccaaagtgctgggattataggtatgagccaccacgctcagcctggaagtaaatttcatacggtttttccctcatggagacgttaagaaaaatctgaaagtaacagtttaggaagaacacggatagttgggatactaatgcaaatcttgttttcttcatttgcttctggtgtgattcattgctaaacatctttatttagtattaaattatactgatttaacatcttttatgtacttatcctttcatggagacactcacagtaaaaaggtcaaaaggtcaagagaatctaaaaacaaagggcccagattttctacagtcgagcaccagatcatgaatgggtatttcagttttgtacttgtgtctacagaatagccccaagtgcttgacactgtctaagcatgtcacaaacatcacctcactgaaccctcataacaacctatgaggtgggttccacacctcacccgaggccatacggctggtttgtggtggagctgtgatttgactctggatgtctagttccaaagtcagtgttctgaaccaatgaactatgttgctcagaaaactctaagaaaagataacacagttctagattagctatttatactgtattagcaaaagaccctggctatcatcccaatggtcacctaagttttctgcctataacattcacatggacatataacactctttcagttcctccttgtggaaccacgattaacttttttagttatcctttacagattgtctctatacatgtaagaaaacagctcttaaaatttaacctttgttcaccttattgtctcatttgccattccaatcatccattcttaaaaaaaaatcagagtatatctcttaattatttctgtaaggtgaaaatgatttagaatgaagtggaagaaaaattattagggactcaacctcacattgctaaattctggagaaatttctaggatcaacaactcatatctgtaatcctgggcctcctgttaattcagcagcattgagttcactgagccacctgaccccagcacaggctcaggctgagctcttcaggtcctgccatgagaggccttgtgctgctgggaacatcacccaggagaaaacctgcagccctttattagctatgtgcttgggaagagaaacctcctcaggtgagactgtttttctgaacttcagaaccctgaacacttaacatcctatgccttaggagaaagctatggtcaggtgctcactcagctggaagtgtggccaccataagtacatccattaggactatgagcagtactgggagctgcacaccactggccttagagttcttctctcacatacaaatgcctcttttgattatgaatgttaaaatttttgtgccttgtttaataattctgaataaagaggcctactaaaatacatacaaaactagagaaatgctttgtagaccctttttgtattttgacagtcacaagtccattgttgttgaacgtttattgagctctaacaatgtgacaggtgccacacaaaacattagacacagtacctgcccagtgggcttacaatctaatctaaggacatgaatctttttttttttttaaagacagagtctcactctgtcacccaggctggagtgcagtggcacaatcttggctcactgcaacctccactccccgggttcaagcaattctcctgcctcagcctcccgagcagctgagattacaggcgtctgccaccacgcccggctaattttttgtattttttagtagagatggggtttcactatgttggccaggctcgtcttgaactcctgacctcaggtgatccacccgccttggcctcccaaagtactgggattacaggcgtgagccactgcgcccggccatgattcacttaatgttgccatgagtttgctgttcatgaaagtgaggtattaactgcactggttagtgcaggaaaagagcctacggaatcactgactttttacacaggctcccctatgcaagtaggcacaactgctcatatttattctctcaaagtatggttggcatttccccaaatttggtgattttgtgatgtgtacaagtatctataaagacagaaccaccaaacccagatttctgagaaccagggatcaaatgtggcttccagtccagagaaaatgcttggttatatattcagaaaaacactattattcaaaacaggccctaaggaaaaacagtatgggagccatgctcctgctcagagttcctagaatgtccagaaagcacctcctcagggcagccctgaaagtgccctttactctcaaggcattttgtcctcagagcccagagatgcatatacatttgctgggttctgcctgggcatctacccaggggagttgtatctgagggccgagtcctctcagtgcctcatggatcacaatgtagacaatccacgtgctggtccttggcaatacatcatgctaatttaatttatatctccagagtagcaaaaatgtaccacaggtctccagaatatatcaggaatttgtaaaaatgcagcccattaaaatatctgccactgataaaaaattcataaagatgctgcttaaaaaaacttgtccttttcttgtcatggtgaagtcaagtaagtaacacctttatctgtgaaatcactcagcagaataaattggtttcatatggaagaaatgtaaaataacttatatgtatttaaagcaaattatctagttcttcattcttgttacttctatgccttctctatagtgcagtcttttgtctctttgatcctgatgaactgataatttactacttattacatttagattcccaatcctttattcatgtgtatcttgaatttcagcaagatatgaaaatgcagactccaggggtacattttgtaatgatacaagccttctgaggaaattttctgacaggagcttttaatcctgctgtggtctgttttaccctttccaatacggttttcctctgtgcttgcgaaaaatatcaaaaaagaccaattggcacattctgaatgtgttttctgaataagtatataagtagagagggaggccattttgcaaatgcggataatgctgacatgtcgtacttctaaataaattataatttgatttaaaaaggttgcctgcatgtacatttgccattttacaaagagcaaccgtactcctacctccacccaagttggtaacaaccttatcttacaaacaacccttaatattttaaaagctgcagaaaaaacaaatacatgaataaatgaataaacaaaaaacacatagggaaagggtatgagctcttgctgcaaggagtagatgaaagactgataaatgaagctgaggtccccccagtgcttccctttcaatagtttatgctaaaaatatttgttttttaaaactctgcgctttcttcatttttattggaacgcaatttgtgaaccacaactgagtctgtatgcaggatctccagaacgcaaatcagaaaaaaatttgagattttattcagatttttctattagattgagccactaatgttcggtaaggggcacttgatggttaaaaaacacaactggcatgataaaactacactaaataatatctactttatttgaacagtcatatcaagaatggccctaaatttaatcaaggactaaatttaatgaaagactctgacattaaagactctggattgtttgaaggtattttgcctgcaggtgagactggttttgagggcacagaaacgtagcctgaatgaaccattcagaactcatcatgcatccaactgaacacgtttcatgcttactcaattttttttttttaaatgcaacaggctcagttttctcacattggtgcatctcttcatgctagaactgcttatgtctacagagtccctgaagaagcaaaaatcctttttttagcattaaacatagcatatggagttcttcctcagctcttggcctatcgttgtatctacaaaccagagttcttcataaaaacaaaggcagaagaaaaagtggaataaaaatattacttcatgttcctcctttctaaattactaacttttgttatactggtactgatattttgtcccatttcactctcttctcatacgtgagtacttaagaatatgtacattcttgctctgcactgtatgtgtgagctatatggtattgtgtaaattttttttgaaggaaaatggaaattcttgagaaacagtttgtttaaagaaatatattcaaaatcatttgtgaataaacttgatcatccatctcaatattgtttgacatataaaataattataagtgtaaaaaattacaatttagtgccaacagtagtgagcatgaaatgaaactattcaaaagagaatatggcctgtgcatattaaaaaattcaaaacagtgaatgcagactggaggagtaacttttgcaaataagatgaatatgcttcattattaaactcaatataaaaggcaaatcatcagaatatttttaaatgttgtttgaaaaatgttttcccaaggaaagtttattatttgctgctgtttcaagaaaattacttttactaaatttttttgtgtgaatttaaacagctaaatagggatcagtaactttatctctatccttaatgaacatttgttttattggtggctggaaatatttctattgtatttctgtgtatatttttaataaaattatttttggcctcttataaagacaaatcttattaaatttgaaacatttcatatatacacataaaacgcttttaaagaaaatttgtgagttgtatattccaattcaaaatgccatctacattccccttatgtttcagtgtgagcaatgaagaggtcttttgatgaattaaatttcattaattaaaaaatacattcaaatattcaaaattaaaaaggaccttttaaggaagaagtattagatcgacatccctactatctttttatgaacttttcatgtttgggattgtatgttgagtatactagagaaaatcagtattcactaaatgaaagaaacacaccaaaaatacaaacagccacctcctcactgtgccctggaatgataaatggactggtgctttcatacccttagctgccatcatcaccatcatcattattaacggccctaggcttttaggtctgctcacattttctcatgtttttattagctctcatcaagaaaaccaaaagaaaatgggatacaaatcaatgcatggataatatcaaattacaaaatctagggtccactgggctggtaaatatgtaagtgtaagcaaatcatgtagtcatctccccatcatcccctacagtgttttcaaataatctaaaacccagagagtgtttaaaaaaaaaaaaagaaagaaaaagaaaaaccctcacctgcacttgattctattgtcagcttgctgtgaacaatttttgctttaatatatgaattacattaatacctcacgttacatatatgaagccaaattacactaacttagtttgcttacaacctcaaatcttactcccagtacacattccaataaatttattctgtaaaaacaatacatttttttgtttttgatttttttacagtaaacttttcaactacaaaccgtgaatacgcgaaagatgttccaaggacaagcattaacaggattgataaaacccaaactgactaaatgtgttctcacaatataagctggcataaaaataaataaaattctctattatcacaatagcaacaataatgtacacataataatggtttaaggatgaatattaactattctaattgtagttccaaaagaaaacagtttattttaaaagtctacatttaaaagtcaatgctttgtctggtttcccatagggctgttgctgattccagctttaaaatgtaaagtatccaccttgagtgcttagctcaaaattgtattggcactgggaaaaaaataaatcattgcctttattttggagtaacacaaaaagactcactaacttcacatatagaaacttagtttgtgtacataacaatatgaattttgagaagtataagctgtcaactagctatttctaatacggaatagatattttacaatatggttaaactttacacatggcctcaaaactgaaggacaattttaatttcgtcttcaatataccaacgttatgtatttaggaattaattcctgggttctgtcacagagaggaaattccattcttaagcattatgttgagtggtcatctaaaaaatgttaatttatatttaactgagtgtttgatgatggtggggtcaaggcaggaaaacgatgatcataactgccttgataaaaggatcctagacatgtataagtctgcgcaaaaatcttgataatccttagtggttaagggcaacttcatgcaaccaaataacatgaaattaaatcagtaacttttaaaaaaggctaaaatgtcttttccccccgaaacacaacagagaggaatatgaataatgtacatacaaactggggttctgtcaatgacaacaaggactatgtgttggttcatatcaaatccaagaatattagacaaccaaacatataaccttcttgtggtttctcttaatatgcagcattcattatggtagttaggtctgtaaaaaaaaaaaaaagaaagaaaacaagcctttagatgatttaggatactaacaatgagagctatccacacctagatagtacataattgggttttctgaaattttaatatgcactgcagcattaacaatacttactgagcaagagcagcttctgtggctttgctttagacctgtcagtgcaaaaagttaaaggaaatcctagggtatttttagtgtcccatagaaaaaaattataaaccttgtctactgtctgttaggacagagtgcagcagtgcacattctacaattctaggactatgtttattgctggaatacatcatcagtggagaaattgatataatctatctttgtgaggacattcttcagaaagaaaggtaagctgtgtaaaatttaaaaagcacttagagtgtgcaccaattaatcttcagaatatttataacttaattacttgtgacacatagctcaaacaaatgtagaagttaatcatgatgtacaaagtctctgacttcttgcttttaaaaaaaacataaagaataagaggaagcctagatttcttttaaaatttagatggcatccgtgtgacaaacagaaaataaaacatttgtttcataaaagaattatgtttctatttgggtcccactttaaattgtgtctggttctatttccccaaaaggatgctattttttccccctcatcattaacccaaatatattaaaccccctagtaataccctcatgggatgaatgaaagagggaactcagccctcaaatattttttctgaaaacagcctgcttccactcttaatttcactaaatgaatgaacatgtttgtaagcacatgtgcacactgatgggtatgttctcattcagacagcccaacatgtatactaaatggtatatattataataaacgattccaggaccttcaaaggagagagagttaccaaaacttccatccccctaagatggcagaaatatactttttatccttctgtccctattaaaatgaggaagtaaatctttaaaaaaaaagtttgaaatttgtgaacttaaaaaatggagtgcctggtgactcctaattatttcttaacaaaaacaccagttataagattatactcacagatactttggaggatcttcctcccttgtgaaggaggaagacacccattagaacaatgaaaaattgttagtcaaccaaagaaagttttttttttttttttttgagacagagtctcgctctgtcacctaggctggagtacagtggcgtgatgtgagctcactgcaacctccacctccccggttcaagtgattctcctgcctcagcctcctgagtagctgggattacaggtgtgtgctaccatgcccggctaatttttgtatttttagtagagatgggatttcaccacgttggtcaggctggtctcaaactcctgaccttgtgatctgcctggctcggcggcctcccaaagtgctgggattacaggcgtgagccaccgtgcctggccgaaaccttctttaacaatgttttcttattattactgtgaaaggcaataaattctatgtttatcttggtagaataatcacagtaaaaactactcaatccacatcaaagaatatttttggaacaggtggtcccatggcagcctcagagtagtattaataccccaaacaaagtgaagggagcaccaagaatgtgactatagttttaaggacatgctttttgtggtctttaaacaaggtgctgtcaaatgggtgctttgtaaaagcaaattacaaaatctgagattaaaaaattctcataccataatcactttgcatctatgtattgaaaactgcatcttgctaattcatcatggtatatattctggacatggtactctgactgtctcctagatctgaagtctcctctgagtaagtagccacaagtggttccttatgcactggttgccatgcacccctatattagataatggctgaagaatccaatcggattctctctggaggtatctaaatgtgaggcacactgagaggctatagggtggtagcaaaactgaaggatacccagaacactgtaagcagaagctatgaaacaacagaagccgtaaggatcttttcaaggagtaccattttgatatgaaggaatgataatattcaatatggctatgcagactgggcaatttggcacgttataacaaataagtaacttattacttgcagaaaaacaactgttttttgccaatgataaaatttgagtgttcagtgaaaactagaatttcaaatcctccatgactgacagttttccaatatttaaagactttttttttagagacagggtcttgctcttgtgcccatgctaagtgtagcggtgtgatcacagctcactgcagccttgaactcctggcctcaagctatcctcctgcctcagcctatcaaagtgctggggttacaggtgtgagccaccaaacttggccccaatacttaaagacttttctgatgagataggtagtgatattaaaaatgtgattaaaaacattttgtactgaaatgagtgaatatttggaagacccaagtaattcagaaaacctatattttctaactgggggaaagctattcagagcgctagacaaacaggcatatgaagaaaagctcagtatcgctgatcattagagaaatgcaaatcaaaactgcagtgacataccatttcacacaactcaatggctattactaaaaagtcaaaaaataacagatgctggcaaggttgcagagaaaagggaacgcttatatgctgttggtgggagtgtaaattagttcaaccattgtggaaatcagtagggcaattcctcaaagagctaaaaatagaactaccattcaacccagcaatcccattactgcttatatacccaaagtaatataaatcattctaccataaagacacatgcatgagaatgttcactgcagcactcgctatatacaatagtaaagaaatggaatcaacctaaatgcccatcaatgacagattggataaagaaaatgtggtacatatataccatggaatactatgcagccattaaaaagagtgagagcatgtcttttgtgggaacatgcatagagctagaggccattatccttaacaaactaacacaggaacagaaaaccagataccgcgtgttcttgcttataagtggaagctaaataatgagaactcatggacacaaagaggggaacaatggacactagggcctactggagggtaaaggagaggaggaagaggatcagaaaaagtaactattggatactaggcttagaacccagggtaacaacaaacacctgtgacatgagttaacctttaataataaatctgcacatgtactccctgaagtttaaaaaaaaagcaagacgattaagatactcatatcaccatttttcaattaaatatctgtataataccagattttcttcatataccttcaaccacaattacatattacaataaagagaatgcagaaatagatatgaggatctagttgtcttctatcaaatcagacattaaaaagatttgcaaaaatgtaaaaatgtctttctgcaaacttttctgtgaaatgttattttcataaaaatgctatttaagtaatggatttattatattaaatgaattaagtatttttaaaatttgtttttatttctaattaaataaatatcattaacgatcacatatataaacaaagctctttggggcccttaataacttttttttttgagacggagtcttgctctgtcacccaggctggagtacagtggcacaatctcagctcactgcaatctccgcctcccaggtttaatcaattctgcctcagcttcctgagtagctgggattacgggcacatgccaccacgcccagctaattttgtattttttgtagagatggggtttcaccatgttggccaggctggtgttgaactcctgacctcaggtgacccacccaccttggcctcccaaagtgttgagattacaggccccttaaagggggccaggtgcagtgactcacgcctgtaatcgaagcactttgggaggttgaggcgggcgaatcacttgaggtctggagttcgagaccagcctggccaacgtggtgaaatcctaactacgaaaaacacaaaattggccaggcgtggtggcacgtgcctgcaatcccagctactcaggaggctgaggcaggaggatcgcttgaacccaggaggcggaggttgcagtgagctaagatcgtgccactgcactccagcctgggcgacagagcgaaactccatctcaaacaaacaaacttttaatggtattaaggaggtcctgagaccaagaataaatgagagtaaacggtgagaggtaagactgcaaagataaactggggtcagctgtgaaaggcattgtatgacggaataaggaacgcagacttaatcttgtggggcactggggagatataaggcagcagccactatactgtagaaagaacgggttcagggtcagaagaataaaggcatggccacatggtaaatcgttacagtaaacattgtagctatcattccaatgtttatcctctgtccctccctccagttgtgtggtagccttgtgttttttttgtttgtttgtttttaatgatataagactttattgtcatttgagggtctgttttccaaataatctctagtaaatatattggaataattacaaattttaagtcccaacttaccgatacggcacgattctcagaccttcccctccactgactgccaggcaatcgtcagcaccagacaaggctgcccaccactagtatctttcactgcagccctcctggactcaagcaattctcccgcctcagccccccaggtagttgggactacaggcggatgccatagctgtgtggtaaccttgtgatttagcgacctgaatccagctccaggggtgtggagaacctgaatggtgtgagccagttctaatcctcttgtatcagtagttggtttagggataggtagccttctgatatagtctccaatgattcctgcctccggtatctctacatcacattcttgtgtaatcaccgcccctttagtgtgggctggacctagtgacttgcttgtaataaacagaatgaagcaaaagtgatgggatgtcacttctgagattaggttacaaaagactgacttctgtttgccagcactctctcttactgacactttactgcttactctgatgaagccagctgccatgctgtgagctgcctcatggtgagatccatggggcaaggcatcagaggaggcctctgggaaacaactcatgaggaactgaggcctccagtccaacaaccgtgaggagctgaatcctgccaggaacaatttgagtgatcttagaagaggatccatccccagttgagccttaagatgatctgagttcctgctgacacctggactgcattttggtatctcagttccttttgcaagagacccagagccagaggatttagcaagttgcacctgaatggactgttgatgagtcttgaaaagatgagataataaatgctgctttaagtca

SEQ ID NO: 1282 - DNA, 48582 bp, Homo sapiens
atgtttttagtctggggctccttcctcatgtcagctccctagtggcagagcagtctccctcggtgtctctctggccaccatgatcagtgtcacggacacatcccagcatagccccagttctcaaccgcatggcagggaccgtccaggagttggtgaggaacagggtgggagggaggaagggagcaggagacctcactctttcctttgaacctaaagctccagataatcctacactagaggtgcatatggggcatggctctggcttcttgagggaaactggagagatggggggctggggaaatggggggctgtgctgccctaggagcaggaccaaccagcgtggaggcgctttgacctctagctttgtttgatttggagcttgatttactggaggggaagtttgctctaaatcagttgtttgcatctattgaccaataaaatctagttagtcctgatgcttcctgaagcagggcccctggatttggcgttgcttttttgtgcctcagattttttttttttttgaggcaaggtctggctctattgcccaggcaggagtgcagtggtgtggtctctactcagtgcaacctccacctcccaggctcaagcgatcctcccccctcggcctcccgagtagctgggattacaggtgcgtgccaccatgctctgctaatttttctattttttttgtagagacagggttttgccgtgttgcccaggctggtcctgaacttgggagctcaaatgatttgccctcctcagcctccaaagtgctgtgattacaggcatgagtcaccacactcggtctgtgccttagactttagagtcggaaagctggatttgaatcctggcttcactactaccagctgtatggcactgaacaagtcacttggccatgtagaacctcagttctgccacgtgtaaaatggggatattatgtgtctccttgggttgtcatggggttggatgagaagaatgcgaagtgcagggccttgcacagttgggctctgtgagtcttagcaatggccatgactgaggcagcgtgagggagactgggagaaaacctcctcagtttccttctcccaaatctgttgtcttccccactttctttcctgaagccaggcgacaggggggtggtcctggcccagcctcctggctccctggggaagggctgccattactggcagtgttagataatttagtagaaagttgccctgcccacctcgcaggcaagggaccgccacccaaatccacccagactgggcctcgtgtaggtttccagaagccacccctttctcattgccctactgcgctctggccaagtccctggggcccattgctggacagtgtgagcgcagaaagagccagccctacacagtttccgatgtgtctgatcttgccacctaccgtgaactgttttgttattacatccattttctagatgagggacagtaacaagggctgagtggccctgagcccttgggctccacgcgcccgctgcccagggctgcctccgtttgggctgggacatgggtctgtgggctgggaacagggcctgcaggctgccccgccgctgggaatccgagcgctgggttttctccttctggggtgggggcagggaggagacggctcaagtgcaggaatgaaggtccgcttgcctggggctgtttctgcccaagtcctcatcaggaatcgtcaggcctgagacaaaccctccctccttcaggagtgctccgttggccccggggaaagagaggtgatggtccgggtttctgggcctttggggtgccacggtgagattgggactagaaccccagcctcactggagtgaccccagaaaccttccagtccaacctcctcacttcaactgaggttggaacaactgagaccgggtggaagtgacttttacactcgcacagtgcaacggtagctactcggaatgagagacctgttccggcgctcctccattgcgcccctcgactcggcgggacttcttcacccagggcgccaccgctcctcggcaccgcaggaaggcgcaggccgggcccgggggagtcggggagagcggggtagggccccggaggctgggggaggagccgggggaggagcgatgaggccgggccctttaagagggcgggccgactcccccccaccccccaccccggggcggcgcaggcgcaggcgcaggcgggctcggggcgctcggcaggagggacggcgggcgggcgctcacctgcgggggccggcgcggggcgggcgcccggcgggccgacgttgacgcccggaggcgagggcggggaggcgggcgcgggactcgggggcggcccggggcgggaggggagggccggggcgggcgggcggtgtgagcgggcgccgagggcagcaccatctggaggggtgggagcgcgcggcctctggggggcaagcgagtgcgctgggccgagccggtcgggggcccccggcgggtcgcgcaggaggagcgcggcgggctgagccctgcgctgccggagcagcagccgcagcgcgtaggggttctcagctggggcccgcagcagctccgcgggctgaagctcggcgtggaggagcggggcggggtgggcccggcggtgcaggaggagggcggggtgggcccggggctgcaggagcgcggcggccgcggccacgagcccagccggggggtggtgtgggggccgccggacggcgcgggctgggggcgcccgccgtggtggacgggctcggcgggctggcctgtggcgcaggaggaggggctggggccccgcgggcagcaccaggagaagggcggaggcagccccgcagtgcaggagcgcggcgaggcccgggccggggtgcaggagcgcggggaggggagcccgcggaggctgctgcagcagcccgaaccggcgtccgagtccggggaaggcccccgcgagcgcagggaggggccggaaagttccggcgaactgggggagcggcagtgggagagcgtcgggcgggaggcggtggtcctgggagcggccccggcgccccgaagccgccccgagctggtggggagggcccggccggtggggccccgggggcctgcgggggaggggcgcctgggggtgcaagaggcgaattggctgcccggggtgcaggagggacaggtggtgcgggctgtccaggaaacctacctgaacgggaaggagccccaggagggagagggacccggcgaggggctcaggacccggaggcgccggcggaggaggaggtggtgactggcaggcccgggccccacggtacctccggggctgaaggggacgcaggatgtaggggcatggggagtcgggcgcagaagagtgcggggaaccgctgagctctgggagccactgcctgagggcaggccgcggccggcgggaacctcttctgccgtctcagcctgggcgtcgctgaagctgtgtctgcggggaggcagcggaaggcggcaggtaaggaagcccagtcctgttagctggagttggtgtgcttggaagtgagaggctgcaggtccctggcgagagcgtagactccacactgccctcgttcttttggcctttcatccctggagggaggaagcagtgcagttttcagcggcaaggcaggacctctcccccgccagtactgtgtatggtaattggagtgatagggcatcttcttagagtctaggcagcaggcgggacgtctgggtggctgccaggtctgtgcagagggaagagaggggtagccccagggaggagctgcaggacggtcccccctccacctgccccccgatggcagtaggggtgcctccatgctatatgctctgcatggtgcagtcaacacacaagtcctcaaaacacgtcccacagaagggaagagggcagcgtgggattaacagaaccttatcttgtaaccctgttggtcacgtgagctgagatgagtgtgacagctagtggcttgggtacggcacgagcctggcccgcttctgccacgccgtcctgtcacagctgatttaccctgagggcccagagccaaggatgattagtgggcggaaggagggagagcaactggtgagccctctcgtctctgggtgggacgacccagcgttagaggggcgggagaggagggtgcacttgcaccccagggctctgggctgcctctgtggccccaccctggggaggtttgcagatgggccgctgtggtatcatgggctctgcacctgtcaggacaggagctcccagcccagtctagaggtagggcttgtaggggccaagggtgggggctgtatttggcttgttgactccctcgtggcctgagtgccagacctactcattccgcctcgtgcccccagggggcttggcgggctgcttgtgggccttactctcctagagctgttcgcctcttacctggcactgtcaggtgcttgcttcccctgcccctgggtggggatgggtgcagggttgctgcttgcccagggccttagctagaggaccctcctctgccccagcccgaggtgtggctgtgagtcagatggacccagacccctgtcccgaaccagactgggtgctctcctctgggggcagagggagtggtgctggaggtagcagctgctggaggagccggttagcccgctcctcagacaaactcaaacccgcctgtcagcttcatcccatgcctgtcgcgctgccacccaaacactcatgcaccggaagttcagctgctgtgcccacggtgcctgacgcttctggaatggccagagtggctctcactgtctggcttcagtggagagaacggtctgttttaaacacatacacacaatcttcacctacttatttcaggtcggcgtttttgaacttgtggtagatgaatgggagaaaggccttggcatcacacagattgcttttgatctggttatatcgcttacaagctgtgtaacttccttgggcaacataatgtctttaggtttcagtttcttggtgtctgcggtgggccaggacttcccctgcagtgtcgtgagtaaagaaacctcaggccctttggagcctggtgcccacctccccggagccccggcagatgttagggaggaagggtcagactgttccctctggcccctgagcccgggattagcccccaccttgtgcttcgtctagaagatgcagtgtttctttttgtttgttttaaataacagttttattgagatataatgacatatggtaaactgagcatatttaaaacacacaatttaataagttgtggcctgtgtatatacccgtgaaaccacccccaccttcaagatagtgaacatcccccttattcccctgtccccagaagttttcttgtggaacccctccatcccccgctcctctgccatcccctaccccaggtaacaggctggtctactttctgtcactgtgtctgagtttgcagcatttactgtaaacggaatcgcgtctttcattcaacagaagtattttggagtttgtccaggtggttgcgcgtatcaacagtcattgtacacgtgtgccaaagtctgtttatccattgacctgttgatgggttttcagagaaagctgctgtgaacgtgtttgttagtctttgtgtggatgtacacttttatttatcttaggtaaatccctaggaccggaatggctgggtcatgtggtaggtacacatttaacctttaagaaactgccagactgttttccaaagtggttgtacattttatatactcatccactgtgtatgagagttctggtttgtccatgtctttgatatgtccacatctcgatgtggtcagtctctaattttagacactctcatgtctgtagtggtatctcattacaattttaatttgtatttccttaatgactcatgttgtcgggcatcttctcatgtgctcatttgccatacgtatgtctttggtgctgtgtctgttcagatcgtttgcccatttttaattgtgtagggtttttcgtgttgagttctgaagagttcttgatatattctggatataagccttttatcaggtatgtgatttacaaatcttttttccagcttgtggctttgtattttgatcctcttaacaatgtcttctaaaaaattctcatgatcagtagtgcaaaatgctgtgtttttgaagagaagttgtaaattttgattaatttactaatttgttactttgtggattgcatttttggtgtcatgtccaagaaatctttgcctgacccaaagtcccaacagttttcccctgtattttcttgtagacattttatagttttgggctttacattgagatctaggattcgtttggggttaatttttgttacgtggtgcaaggtatgaatcaatgtccagttttttgcatgtagagatctaattgatctagtagcaccatttattaaaaagatgtatctctccactgaattgcctttgaatctttgtcaaaaatcaattgctggctgggcacggtggctcactcctctaatcccagtgctttgggaggctgaggcgggcggatcatgaggtcaggagttcaaggccaagctggtgaacgtagtggaaccctgtctctactaaaaatacaaaaaattagccaggcgtggtggcgggcacctgtaatcccagctactcaggaggctgagtcaggagaatcgcatgaacccgggaggcggaggttgcagtgagccaagattgcgccactgcattccagcccgggcgacagtgtgagactccatctcaaaaagaaaaagaaaaaaatcaattgtttgtgtgtgtctaattctggattctgttttgttccattgatctatttgtctgtctttatcccagtatcacactatcttgattactgtgggtttataaactatagtaagtcttgaaatcagggtaagatctcaaacttggttttgtcttttcaaaattgctttagctattctgggttctttgcacttccatatacattttagaattagttagtcaatttctacaaaaaagcctgctgggattttgattgggattatgatcaatttggggagaattgatcggttagcagtattgagccttctgaccatgaacagtgtatatctctgtatttgtctaggttttgtttactatctctcagcagtgttttgtagtttttggtatatcagtcttttccatcttttattgaacatatccttaaatagtacctatttttatgctattgtaaatgatactggtttttcctggtagtattggttttttatttttaaaaacttttaattgtggtaaaatatacataatatactgccattgtaaccatctgcagtggtggtaaatacattcatactgttgcacagccgtcaccagcatccatctccaggacttttctcatcttgtgaaactgaaaccgcacctattaaacagtaacttcccattccctcctctctcagcccctgagaaccaccattttaccttctgactctatgaatttggctcctgtaggtgcctcatagaagtagaattttacagtgtttgtgcttttgtgcctggcttatttcacctcggcctagcgtattcaaggttcatttacattgcagcatatgtcagaattttcttctttttaaagggtaaataatattctattgtatgaatataccactttttgtttatccatttacttggattgctttcaccttttttttttttttttttaaagacaaggtctcactcactctgtctcccaggccggagagcagtggtgtgatcatggctcactgcaacctcgacttcctgggctcaggtgatcgtcccacctcagcctcctgggtagctgggactacaggtgtgtaccaccatgcctggctaatttttttttggaattttctgtagagacgggagtttggcatgttgcccaggctggtttccaactcctggcctcaagcggctttcaccttttggctgttgtcagtaatgctgttatgagatggtaccgttgtttaaactttactttccagttgtttgttgctagtatatgtaaataccattgattttgtattttgagcttgaatcctgcagtcttgctaaattgacttattctagcaagcttttttgtaacttcctttggattttctacatagggcgccgtgtcatctgctaataaagttttacttcctcctttctgatctttatgcctgttgcttctttttcttgcctgattgccctggctggatcctctggtataatgttattgtttttttgagatggagtttcatgcttgtcgcccaggctggagtgcagtggcacaatcttggcacactgcaacctctgcctcctgggttcaagcgattctcctgcctcagcctcctgagcagctgggattacaggcacccaccaccacacccggctaatttttgtatccttagtagagatggggtttcactatgttggccaggctggtctcaaactcctgacctcaggtgacctgcccgcctcggcctgccaaagtcctgggattatgggggtgggccaccaagcccagcctcatctaatataatgttgaatagaagggtagataccttgtttctgatcttccaggggatgcatttagtctctcaccattaagagtggtgttagctggccgggcgcggtggctcacgcctgtaatcccaatactttgggaggccgagatgtgcagatcacgaggtcaggagattgagaccatcctggctaacatggtgaaaccccgcctccactaaaaatacaaaaaattagctgggtgtggtggcacatgcctgtagtcccagctacttgggaggctgaggtgggagaattgcttgaacctgggaggtggaggttgcagtaagccgagatggcgccactgcattccgactctgtcacaaaagaaaaaaaaaaagtggtgttagctggccgggtgcggtggctcacgcctgtaatcccagtactttgggaggccgaggtgggtggatcacctgaggtcacgagttcaagaccagcctgggcaacatggtgaaaccttgtctctacccagaatacaaaaattagccgggtgtgatggtatgctcatgtaattccagctacttgggaggccgaggcacaagaatcgcttgaacccaggaggtggaggttgcagcgagccgagattgcgccactgcactccagtctgggtgacagagcaaaactgtctcacaagacaaaacaaaacaaaaaaaagtggtattagctataggtttttcatatctgacctttaccaggttgcaaaaagctctcttttattcctactttgctgagaggtgtttttttttttttttatgtttgtttttttttgttttttttttttgagacggagtcttgctctgttgcccaggctggagtgcagtggtgcaatctcggctcactgcaacttctgcctcctgggttcaagcaattgtcctgcctcagcctcctgagtagctggggttacaggcacatgccaccacgcctggctaacttttgtatttttagtagagatggggtttcaccatgttggccaggctggtcatgaactcctgacctcaagtgattcgcccacctcggcctcccacagtgctgggattacaggcgtgagcccccgcgcccggcccttactgtctcttaaataacttttcagtaatcccctgtattttagcattgcccttctgacactcacctcttcttccagaggtttccggggctgccagttcctgggcttttgaggattgcaggcggtcagtcaagtgtctctcacgctgggatttgtgattttcttgggtcagctctcaactgccaccagcccatctgctttccagcttccaaagttctgtggtggtttttcctctaccattctccccctccctaggggcctatggcattcagaacatccttttttaattgttgttctggtgaggtttcaggaaggagtgacactgtgtggaatctactgttttttcctggaacccctgtcccttcttcagacttcctcacagaatccatgcattcactcagcgtcagtgaatgacatggtatccactcagcgagtccaatgtgggtcataagacttccgcggggacctccatgggcccgcatccttgtgccaagcagtacagtcgtgaatgggctgaatgctggctttaccttttactctctgggtgctcttggccacctctccagagctggtttccatatttgtaaagtggggataatctggggtagtaaggcaggtttttggtcagccagtgaaggtacactctcagtgaagagctggcgcatagtgtcttcctgaggacccaggctatgacttctgccccttcatattctcccagaaaccagcatcgggtgggcatgtggggtgcatggtgggtgtctaaggaaggtgagaggggagggaggttttcctggtccctctcttcctcctcagcagctgtacctcctgggccccccagctggatgtaacaacattggactcttctgtttccctctgtcccctgtatactgtgtctgccaacattggactcctctgtttctctctgtcccctgtacactgtgtctgccaatgaagcagggcctcttctctggtaccctgaccttggcagggctctccccctaccctgtggccagaagagagtcacccttccgctaacatttgccctcccccagatcctgagcctccatgagcctccattcccgatgacagcttcctggtaccttggaccaggcacgccccttcccctttgagggtcccgggctcttcaaggtcagatggtgagcagggtccagtgggatttaaggtgtatgtcttgaagcaccggacatttctctggctcccaggctctcctgggccctgcggcctgctctaggtgacatgttcccagctcctgggtcttggtgtagacatggtcctgagggaatgagcagtgtatcttgtagactgaatgttcacttcccagctctggcatctcctctccactccttctttccacactccacctccagggccaacaataggccccttcagctctggactcttgcgtagggcttgggggtggggtatggcctgagctggcagcaggcaggatgacgagccgggcagcctctgcccagccctggaagagctctctctgggagtggctagctgctgggagctagaccacatccttccctctgggcccccgtgccgtgacagtgcatgggcaggacaggcaacgagaggcagctctctgcggcactcgtgtcctggcctcggcacctgggcatgtgtggcgtgcatgggagtgagacccagacagctgcagcaatgtgtcctctgccacccactgctgctggtgtctgtgttggggagcgatggtccaggagcacattagggccctcagtgtactgtctctttgtgtcggcgttgacactccggtcttcagctggcggagcatgaaacggtttcacagtactttcaagacttgatacagatggatgctcttgtctccacgtgtcagccccaccaagtccagtcagcctcaggttcagtgtggactgggtcacgctgtttagtcagatcctcacccctcctctctcaagtgacattcccttctccactggagttggaggggacgaggcatagcagggccctgcctggtgtgtctgcctctgcctctgtgctctgccctcccaccctggcacctgcctgttcccctcctctctctcggtgagctgggatcctgacagacccaggcccccttcccatcaccctgtgtggcagcccgcgccccagcaccccttcgcagtccgatgagaaggcaccttccttaagaccaatgtcaggctctccctctgcctgagggactggctgagttgttctggttctgagatggctttgggggactgagttgcttagtgggtctggggtcggagtggttgtgatgacatggacagcccctcttcccagaaaggtgctggcgtctctggattagaaatcatggggggaggcaaagccggggctgggagagggcaaccaggcttgttcctggcacccactgggaaagcaacctggcagcagctcacgggggaagaagcagccaccgttctccagtgttcctcacaaagactgagtccttctcagcagacacacccagggcccctgccaggttctcccttcagggcgacagatgtggacagatggttcccttacgatgtacagaccacagcagaggtatacagaccgctccttcagcacaattatgtgctgatacaaagagttacaggaatagtgaccctttaaggataggaacgtgatggataatttaaactttttaaaattcttggccgggcgcagtggctcacgcctataatctcagccctgtgggcggctgaggtgggcggatcatgaggtcaggagatcgagaccatcctggccaacagggtgaaaccccgtctcaactctactaaaaatataaaaattagctgggcgtggtggcgcacacttgtaatctcagctacttgggaggctgaggcaggagaatcgcttaaacccgggaggcagaggttgcagtcagccgagatcgcgccatggcactccagcctggcaacagagcaagactccatctcaaaaaaaaaaaattattttggctatttttcacatgtattattgtgtagttttactactcatgttttcaagcatccctccaacaaaacagcagagataaccatttgtggctaggaaatgggaatttacagaagagatggcatttgacttggatcttgaggagtgtgtgggagtttatcatgtagacacagtagaagtgtcacagacaaaaaatagctcagacattaaaattatttttttattatttatttattgagacggagtctctctgtcgcccaggctggagtgcagtggtacgatcttggctcactgcaacctccgcctcccgggttcacgccattctcctgcctcagcctcccgagtagctgggactgcaggtgcccgccaccacgcccggctaatttttatattttttagtagagatggggtttcaccatattggccaggctggtctcgaactcctgacctcaggtgatccgcctgccttggcctcccaaagtgctgggattacagacgtgagccaccgggcccagccgcagacattaaaattaaagggcatccggacatggtggctggtgcttgtcatcccagctactcaggaggctgaggtgggagggtcacttgagcccaggagttcaaaattaaaatgagccatggtcacaccactgcactccagcctgggcaacagagcaagacccagtctcttaaaaacaaaaaacaagaagaaccccagagtatgtctagggaagggcaaacacttggcttggctgggacatagagacatttgaagggaatgctaagagagagaggtggggaactaggtgaggagtgcagcccagagggcgtgcgtgccagccaggattgggccctcgaggactgagggaagggcccatagtaacagcaggcagccaggtgccgtggtggactcttcatgacagttttatgatggggattccatttttcccctctttacagatgaggaaattgaggcttagaggttgtttgctcaaaagttgcccagctggagcgtgatggagtcaggatttcagcccccatctgcctgactcctgatctcattgtcaccgttgggaggaagtctgaggcggttgaagcagcccgaccggtgtgtctggtggagaaggtggaggacggaggaggagtcttggttgggggtccgtggtggggtgtggtttctacctcgggtggctagtgttggcttgtgatgttttcagcgggatacaggagcgcagaagcagagtttaaggggtgatgctgagcccagtttggatatgcaatgtgtggtacctgtgcagcctcctggtggagctgccctgtaaatgtctggaaatgcgggtctggagccacaggaattcaggaatggagatagcacaaggtggtaataggagtccctggaggcataggtgaccccagggagcacagcatcagtggagaatagaaggaaacatgagttcaaaagtcttaggaaataccaacagttaagaagctgggggcggggggtggggggggggtgggggggtgagggggtgggcaggcgcagtggctcatgcctgtaatcccagcactttgagagagcaaggctggtagaatgcttgagcccaggagtttgagaccaacctgggcaacatgacgaaacctcatctctacaaaaaatacaaaaattagctgggtgtgatagtgcacgcctgtaatcccagctactcaggagatggaggcaggaggattgcttgagcctgcgaggcagaggttgcagtgagccaagatcgcaccactgcactccagtctagggcacagtgagatcctatctcaaacaaacaaacaaaaaacatgtggggtgaagaggcttcagggctggaccatgggcctagcactgccagcagacacagccttgcctgccctcaggacctcagctgccaggcccccctgggagggagtgggcccccgtgtcctggagatggagagactatggacagtcatggcgtgtgtctgaatcactcccttttctttcttgggccctggccagcctcctccccagaccagtgtgatgtcaggcccagccgacctgaaggtgcagggttgcctggtgcaggttcctctgggatgaggttctgagggcacccagcctggccttgctccagaagcctgggctctgcgcacagaggggtgagttaaggctgactaaacttggtggggctgacatgtggaagcaagataatcctctggctgggggaggagctgtaagcccccctctcctcatcagtatgttcttttttccttcagggcttggagaagaggtaggtggaggtgggagagggcgggctgggaggtagggttggcatatattcctgagaatacggtagattgttttggaaaaatcctcttggccggaaattgcctgtcatgtctgcgccttggtgtggatttgtcacttcgcatgcagttggagaggctggagaggggaatggacagcagagctgggctggtttccagcctcttgtttcctttagctctgcagagtggagatataaagagacaagtgaagagcagagggggtgtacacgtggggtggattctcgaactcctagaggtagtttagatcctgtggatgtcttacgataggatggtactaggacgccagagatttacagggggaggtgaggcagggagaaagcaggaaagggcactggtttggatcagatcctttatccagccagggcaagaagggaggggcctggtattttctgccttgccttctacagtctcccggctttgcagctactcccaagactagtatgtgcctttagctgcagtaagatgccgaggagcttctgtacagcatagaagcaggcgttcgggggcctcgccggcagtcatccacctaccctggtgtgcttggggtgtggaaggggctgtgtgaggagagtgggccgtagagggagcctcacctagtgaccttccagggtctggctcagccttgacgctgcgtggggaggagaggtcacagcatctgtctctcctctgccccaacccagggaaggtgccctgagctcagccctaaatacctggtactaaagagtcagtggctgcttcagatgccaccagaatgagaagcggtgccttggggccccgggggagaggaagagcctctgccctgggacttcctgtgccggcgatggcctcgcgccagtgctgggcgcggcacccccgcgtgggcctgtgttgggcggcttttgagcaggagtccgggccctcgtgtcaccgctctgaagtcaaggaggtcagtgcgtgcccagcgcacagcgcgtgcggcgttgcgggagtggcgcgcggggaaccggccgcgggggcctcggggcgggggcgtggcctgcgcgggaggcgggcgctgggaggcggcgcggagccggctgagcgcagggccgagctgcggggcaggtgggcgcccggcgttctgggagcagagtggccgccggggcaggctgggggcggggtgggctgcagccccgggatgcctcggaggagggggtctcagatggagtcggacggaggcccctctgctgtgggcttctcggatggccccttaccgtgaatacgggggactcgtgaatccccaaggccccagttggtggctctggggccctggaggcgggctgagggctgagtggagcccggttccgcggccggcgaaggcagagccccggctctcggtgggggtcagcccggggctggcacagctggctcactgggagagggtgggagccgcgccccggagaggaggaacggagctgggacgggctgcaggagggaatggccgcaggccggcaggaggaggggcgcgaccacccggccgccggccgatggcggatgaggctatgggggctgagacgcagtagcggccctgcacttctggaggatgctcgaggcccggccccccaggacgcagggcagtgacgctgccggtgccgctgcggggcgggggctgcgggcgctgcttctctccctgaccgcagccgctgggatttggggctccatgggggagagatctgcttaccagcgcctggctgggggcgaggagggaccgcaggtaatggggaaggctaggggatagccagatacctgggccccagaccccttcgtctgctgtgagccgggctcagccctgccccctgcggcggcctcaggagtgagagtgtctgctcctgggccaggggacagagagcggtgtgtttatgtgggtgtggcggtggtgacttagtgatgctggcatctgcctgtgtgtgcatggatcccctgggaccccaaaaagctgcccgttgggctttcttccatgccccaagggagtccaggaagtactgctaggattggggttcagtcttttaggagaactgagtctgtatgtcctgggcattcccgtttactaggcttctgaatatgaatatcaagccagatgtccttgtttgcttttgaaaatatggtcacggtgttgatggatggggtagcttcccttccccttggagagaacgcacttcctctcccgaccggcagagggcagtagctgacaggagaaagggggactcggtaggagcgttggggcttaaggtcgggctgttttcctgggcgaggagaaagggggccgggccgggccgggcgcggtggctcacgcctgtcatctcagcactttgggaggccgaggcgggcagatcacctgagacgaggacgctgaggtcaggaattcgggaccagcctggccaacatggcggaaaaaaaaaaaatagctgggcacggtggcgggggcctgtaatcccagctactcgggaggctgaggcaggagaatcacttgaacccgggatcgcgccactgcactcaagcctgggcgatagagcaagactctcaaaaaaaaaaagggggtgggggttccaggagccggcctggcgctgacccacacatactttgcttcttcccgcagctggattactgggccagttacaggtcttgttcttactggacatccaaggtcaggcatggggttctggtgactttgagacacatatttctggggacgctagagtttttaatctggccattctgatccagcagacccattttgaaatagagggaataaccctgcttaaattgttccccggcccccggtccctgggtctccttccaggtgtgcttggtgccagggtaaggctgtaggcttctctgatgcaagggcacagtcagccaaggtttggggaaaagtcagctccagtgtaacgcaggcctgatcttgtccacctgacctcagcccccactccatccacacctgccatctccacaagctttgtgggctggatggcagggggatgaggaagagggactgaagttgggggtgtccttctccccacctcctggagttagaccaggaaatggctgtcccttttggcatcatcagggaggtcaagtgctgggagaggccctgggaagggagcctgggatgctgagtccccaaagccctgctccccagctgcccacccctccagccagctgaggctccctgagctggtggccagctggacagggacaagagagcagtgtgcaagaaacaggggctccctaggcatggctcagcagggaggggggtgcctggggagctggagagggcttcctgcagctgtcaggtgtgtctgggggccgtagcgaggggggtgtaagagcagctggcaccctttgaggagggccagagagatcatttgtcagttctagaaacatgagggccccacgggggcttgatggagtgtctctaggccccttaatctgaggccgtggtctgtgtcaggggttatacaggagacatcctacagctttggggtgggggcgtcccagcaggagtctcagggcatatttgtttgttttgagcgggtttgggaacttggccacctggtctgagtaggaggcaccctgggtgtttgggcagcagacagggccaccccaggggagggggtgaggatcctcaccccaccctacccttgctcttggctggactgccccactctggcaggctgccggccgcctatttccgtcgggcaccagggtaacagggccacatcagggtctgagccaggagacacccagccaaggctgggactcgggggtgggggagggtctctgaggagtcatcgcagggcccagcggagcctctggggtccaagcctcccactcaggctgtgtgttagtccccacgtccccacacaggtccatgagggagtccacagccctgcttcatacgtgctgtttgagtcacatagccgccaccctaaagtcccaggagttgtctgcaactgtgagggctggggtagaagccagagacaggagctttgtgtatggggaggcaggggggccagcgcgggtggctgggaggaagagtcccccccattcctgccgccctcttggcagtgattcagaaaggtcctttttcagccagtgtcagagctgctcagctggggagggagggagagagggagagagagaggcaggcaagagggagggcggccgggcgggcagttgggtggggaagccggggagtagggctggactgtgaccactgccctggagagaagacagaaacaggacagaggatcccggctgcagccagcgtgaggaaagctctgctccctgccagaccggccagctgtggaaacccagcggggcttgcagcagagcggaggggcccaccccgttcttcctcatttcccacccctggtgtgggatttggggggctcctgggcagagtgcgaagctccggagccgaggccactggatccccagtgactgctcgggggggtcccgctgcgtggagatgccggcagcacgtcggttccctggcctggagctctccttccctctcctggccagactgcggcgacgcctgtacacagtgagtggggggcaggggctggactgctggggactggttgggctcctcagcaccagcacttgactgagaggcagaaagcaagactgggagcggctgagggaccccgccagtgagggcttgacggggagtccgggccaagtggcctctcctgcggctgctgcattccttcttcttggcctgtgtgtttgcacgccggccacagagtagtgacggacacaggtgtgcagactccatgaggtgcgggggccaggaccatgcagaattggagagtgtttgaactctggaggagctgcagccatgccctgtgctgcacaaagaaccttgggctggagggggacttagaggggaggcggacccctgcggagtcaccctggactgagaccctgaccgcttgcctcaccagcatcccggagttccttcccgtcctcccacatgcatcccctgtgcagagctgcgctgttgctgggtcagggagcatggagtgcacagctgaacagaggtgcattagctggtgtttcagggagagggaacaggccgggctgtgctttctgaagagcttcaggggaggggcctctgggtctcccccagccctgaccaccccgggcatggctttgagctgttttcaggagcctagaggagggggcctggatccttgggagttggtggtgggaaaaagaagaggagccctggagactgctctccctgcgggagactaggagcctccatcctgaggctgagccctggagggggggggtcactttgctccagggacagggcagcggtggccgtggccgggtggagaggagacgctgcctaggcccgtgactcctagtgtgcctctgggcttgcttccggaaagccacgacgcctggtcctcttaaaccccacgcctcttgttttgtaaacagatgattttgttgaggataaatgaatacagcttaatacttagaactgttcctcgcatatagtaagtgcagttgaagtgttagattttattttattttgagatggagttttgctcttgttgcccaggctggagtgcaatggcacgatcttggctcaccacagcctccgcctcccgggttcaagtgattctcctgcctcagcctcctgagtagctgagattacaggcatgtgccaccaggcccggctaattttctattttcagtagagatggggtttctccatgttggtcaggctggtctcgaactcaggtgatccgcccacctcagcctaagtgctgggattacagctgtgagccactgtgcttggcctagatgttatttttattgttacttgtcttaaataaagttaatagaaatatataacctgttatattaacatgttaacctgtgtacagtgaaacaagcaacacagtgggaactctaatataaagagacataagaggaaggtaataatattttatgtatcctaatacgttagtaacctagacaatgtagtgaggagtcagatcttgagacctcaggtggaaacaccgtgaaggcagcatctgcaagtgctgaccgagaggggagttttgaaataatgagagggggttgccttcactgacatttttgcaaatagtggacttctgctatgttctgaataaagcaaagtccattttcccttaagtttacacagtagtttcattccaggaaaatttattttatattaaaactgtaaggccaggagcagtggctccccagcactttgggaggccagggcaggtggatcacttgagctcaggagttcgagaccagcctggccaacatggaggaaccctgtctccactaaaaatacaaaaattagccgggcgcctgtgatcccagcttcttgggaggctgaggcgggagaattgcctgaacccgggaggctgagtttgcaatgagccaagatcataccattgtactccagcctgggagtctcactctgtctcaaaaaaaaaaaaaaaaaaaaccaaaaaactataaaagtactttcttatttatatataaagtgggatcatattctaggtttgcatgatcataaacaccttcatgaattgagttgtgtgggatttgggacagtgcgagaatgtcctacgcattgcaggctagctcacgctcttgtcccccaaccacccactgaatgtcactaaggcccccccaaatgttgtggcaaccagaactgtcccatagggggctgtgcagcctcatgagaaccattccagtaaagggttacagctttaagtttggaaaccacccggctggcccagctgcctggcccggtcgccgaggtggaagagccaggatttgaactgagagtttctcattcccctttgttactctttgtacttccctgagctgcctgaaaaagtcggaactggcactgtgttggcagggccactgggaactgtgggggcaggaggctcacgctgggcccaggctgtgtgtgcctgcttctcagtgctgctcactgtgatgggagctggggaggaggccaccgctgagtgggggagggggatggcttggtccccagccgggcagctggccttttttctctcgcctgttcctctttggggattgagcatgggtccggggctagcctggccacgccctcagctctgacacaccttacgcagacagggatgggtttgctgtgcggtgggtccgcttgcttagctttgaaggtgccaccagcttctttatctgggcccaggatagtgtaggtcagaggtcactctccggtaccactggctgattgcggcctgcagtgtgctttggccagcacgctgtgtgtgcgtgtgcatgcttttcagatctgaactattcagcattgttaaaaagtcaggagaaagacgaatattaagtgaaatcagggaacagaatggtatggttaatgcgtgaatattcgtgtagggacaacagagtctgaagcgtccgcagaagacatcactggcaactcctggggagccgggtggctgtgcagctggggagggaatgagattcgtggctcagtgtgccttctgaatattttaccacgtgcatatattaccttttccaaactttaatggtgagatttcacatgtaaattgggatttatttcttgaaaaaatggaaagctttgacaacactgggccacagtttcttctgacaaccattgatgggatctgagctccctgttgacaggggtgtctgcgagcccaccgcaggccccacccctccctcctgtcttccgcttgctgtggccctgtaggcacttgagtggtggcccgtggagtggtctttggattgttaggagaggctggggtggtcaggcgctgggaggaacttagcttagagctcatctgaccctgagagttttctccgtcacatctaaggagcccatagatgggtctcggggcacattgcaccctagagatttttatcaaatattaggagtaagaacacgtcggtgttcccggagagaccactgttagtttttaaaagattttcaaggactttcgacccctagaaacttagagcaggaatgtgagcacaggttgatcttgggtcactcagtcacagatcacatttcgggagcaagaccctgactcctgactccagggccagggctgtatctccgccgccctaattgtgccctgtggctggcaggaataggggacgtgggtccaggcggttctcggtagcttccctcgggagtcagaaggtggtgtgagcccttccgggtggccgtgtagtgggatgaaggtgagcccaggtcactcgggcaggcccctgttgtccccccacaacccttgtccctgagccactcctccccccacagaggctgggaggcggcagaatgcagccagaggagggcacaggctggctgctggagctgctgtccgaggtgcagctgcaacagtacttcctgcggctccgagatgacctcaacgtcacccgcctgtcccactttgagtacgtcaagaatgaggacctggagaagatcggcatgggtcggcctggtaggtgggatgttggcctggcttgtcttgcccctgaccctttccgtcctctgtcctcaggaccactcggtgcacgggtggcagctgagaactctgtcccagagccctgagggagcaggagggacatcagtaggtgctgatgtgtgatgagaacagttggcagttataaaggtgaattggagtttgaggagagtgaggccttccctaaagctggctacacaggagtcactccatgccccgttgtgattgttctcacgtagagtgtatgtcctccattgcccctccttcataagcatcgaattgagtctgttctcatcattctgactaccggggggtccatgtgcagagatctgtagggagaacgctaactctcagatggtttgctgattcgtgctcacgctctctttcttgctctctcacacgcacacacgcatgcacacgcacaggcatacacacacacacacacacacgcaggcacacacgcacatgcgcacacacgtgcacgcacgcatgcacgtgcacacacgcatgcacgtgcgtacgcacgcgctcacacgcctgcgcacacagacacgcacacacacacacacgtgtgtgcgcacacccgcatgcacacgcacggcatacacacatgtacacacacgcgcgcagacgcacacacgtgcgcacacgcgtgtgcacacacacgcacatacacacaggtttgctctgatttgagttcaacccttatcttcatatttttcctaaaagtgggggttgtagcatctaaaagtcatgatgttcttcatagaacattagaaacgtattagggctttcaagttaaaatagctaaataggtaataatgtgtcaagttagacactgacttagttaaaatagctaaataggtaataatgtgtcaagttagacactgacttagttaaaatagctaaataggtaataacgtgtcaagttagacactgacttagttaaaatagctaaataggtagtaatgtgctaagttagacattgatttatgctactttaggcctggatagttggtgtctgatgccagtagcataaaaaaattttacggagggaaaaaaacctcaacattgagaaaattctgttcattaccttgatttttcctgagaactgggagaagcccatcgcttcaagtttttggttaaacaccttcacccagtttgagagccagtgccaggaagtggagtgcagagaccgtcggtcagttgaggctccgggttagttggggttgatttcattgctatcatcgggtgggcggtgtctagtgacaggctcacccccaaggggaccacaggcagcagcctctctcgggctacggcggccttcacagcacgcggttccccgctctccctgcaggccagcggcggctgtgggaggctgtgaagaggaggaaggccttgtgcaaacgcaagtcgtggatgagtaaggtgggtgaggaggtgggtgaggaggtgggaggggggcagcctcgaacgcccccctccgcttctggtcctgggaaccttccccagctccccggcaggtcgaatctcgccgttctgccggcactttgtacaggaccccctcgtccagggtcttatcgggcagggcacttgtagagctgctgggctaagtgtctgtctccgccagatacggacacgtgagcagcctgtgtgcggtgaggccttcacagcccctctcggcacgcctggaacaggacctcattgacaagtgtgccttaacttagccctgctgtgtctgagcgttggggccagtgtccagcgtggggtggtggacctgtctggacccagaacgtctttgcttggcttccctcctccctgaccctctctaatctctgggtttctctggtcatctgtccctgctgacagcttccttccccacagcctgtccccacctctccccacaccttgtcctaatttgggtctgtggtgtagtgagtccctggtctgactcagtggaactttgcccattgtctggaagacaatgagagaggaagtgagccagccgtggtctttcctccccacttctggcttcagggctgggttggggggtgggcagggccgaacagctgcagtgggattgggcagcagagattttcctggctgcaatccggcaaaggggctgtctcttgggatcctttggcttttcctggaaacactgtcctggtcctttgcccgggttttagggaaggatgagtagtgtcgggatggtggaggcaggagaagagagcagcgtggtttgctgagatttaggggtcttggatctgccactggctcctgataggtccctgggcggtcagtggcctccagatttttgttgtgtcttcagtgaaatgataccggtccccactgcccagctcacctcccggggctgcaggaggcaccggagataatggctgtagagggtcttgtaacctgaacattgcttgcaaacataaggaattctagttactgggaggaagcacagggcagaggccagaagaggccctcagatttgaggcaccctagcccagacggataaggatccaccagctctgggggcgtgagacccaagctggcaagaatctgcaatctggagccaaggctgtgggtgcctcagtggaggccgagtcagaccgacgtggccagctttgaccctcatggcctcctttcttctgtcccttgaccttcggctcctccctgtccaccctggcctccgagtctcctccacttttccttccgtctcagccctcagctctaggcgcccctccagagacccagctgtcttcccaggccccttcccagcaaggactagcttcatctgaaccacacacacactcacggttcaacctcagactaaaattatcctctcccctgggcaggatgaagggcagccgactccctggtgagggtggagacagacagcaccaaatggtcaggccagagaaggggccagggctaaaaatggacaaggaggtgtctgtggagggcccctgcggctccatcgatgcgggttagggctggagtctgcggggtggcgggtgcaggaagggagggtggggcaggactgggaggagactccgaccttggctgggcggtgccctccctctccacacagctgggtgtggggccgctcagccacaggctgcatgcctgtcggtctctttctggcaccctccttgaggccagcatcaggctttgggttcatgtttgggggtgtgccctggacggagtgtgggcctccagccaggctgccccactgacagtttggcaaaaccaggacctatctggaagccgaagccggggatcaccaggtggacccagcggggtgggactgagtgactgaccctggggtgttggattccatctggcccccggctgccttcaaacaggtgttcagtggaaagcgactggaggctgagttcccacctcatcactctcagagcaccttccggaagacctcgcccgcccctgggggcccagcaggggaggggcccctgcagagcctcacctgcctcattggggagaaggacctgcgcctcctggagaagctgggtgatggttcctttggcgtggtgcgcaggggcgagtgggacgcgccctcagggaagacggtgagctctctgtgtcctgccagcgcagcagaggcatgggacccggggctggtagtggctcttctgcccccaaccagggtgtggatgggactggggatgcgtcacagtgtggctcatcccagagtccgtgctcaggatttttggggttttatttatttatttatttttgagatggagtctcgctctgtcgcccaggctggagtgcagtaggcacgatctcggcttcctgcaacctccactttccgggttcaagcaatcctcctgcctcagcctcctgagtagctgggattacaggcatgcaccaccacactcagttaatttttgtatttttagtagagacggggtttcaccatgttggccaggctggtctcgaactcctgacctcagatgatctgcccactttagcctcccaaagtgcttggattacaggtgtgagccaccacgtccagcccatgctcaggtttaactaagcacatttattatttcaactataaaaataatttattataaaagtttggaaagtatttgaaaaacaagaaaaaaaaaatcgcctgtaatcccaccactcagaggaagccgagcctcttcctcccactttaggtattttgttggatttagttaagatacaaattctggatacagcttttaaaatcttgttctttcttctcggcgttgcatttaacattttcccctcagggataacgtgtcaccacagcatacagttctggtgtgactgtttcctgtgcagcagccgtgtccttactgctcagatcacgtgcggtgcattcccagcacctcagagggctcctcattctccgtccactcagtgcgtccttctcccggggaagccgctgtcactcagtgcatccttctcccggggaagccgctgtgcagacttccagctccacagctttgtttttggcattacatttacagcattttccttctacagcaaaacaccttttaatattccattttatgaccagcctgagcaatatggagaaaccccatctctactaaaaatacaaaattagccaggcgtggtggcacctgcctgtaatcccagctactcaggaggctgaggcaggagaatcacttgaacccgggaggcagaggttgcagtgagctgagatcacgtcactgcattccagcctgggcgacaagagcgagactgtctcaaaaaaaaaaattccattttataacatttgaatattctctcatcatactggttatctcttactttttggttggtatttaagcccggcattcccccaggaaggggaggtgtggccgacgatggctcctgagggccagccgtctgcccttctccagccaggcctcacgcagagcacgtaagcccaggcactggtgacatgcttacccacccagatgaggagctcacaggcagggatcgttgagccgagttggagggtggagcaggttggctccgcgtgtctgggacctggcaagtcctgagtccttgcaaatcccgctctgggcaggtgagtgtggctgtgaagtgcctgaagcccgatgtcctgagccagccagaagccatggacgacttcatccgggaggtcaatgccatgcactcgctcgaccaccgaaacctcatccgcctctacggggtggtgctcacgccgcccatgaagatggtgagtactgcgggcgggagggggcgggcagggagagggctccggtcccatatgtgtggttcggttcctctctccatcctaaggtcagaggcgccctagatcctactttggtcccccaacctgatggagtaaaggggtccacaggggcccagcctggtacgggctgtgtctgctgcggtccagtccgggtctgtctctggattttgctggtgctcagtgtcaagagagttactcccatgggaggggctggccactgagtttaatttggggaatttatgttttatttatctatttattttgagatggagtctcactttgtcgcccaggctggagtgcaatggcatgatctaggctcactgcaacctcggcctcctgggttcacgcgatattcctgcctcaggcttccaagtagctgggattacagccgtgcgctaccatgcctggctaatttttgtatttttagtagagacggggtttcaccatgttggccaggctggtctcaaactcctgacctcaaatgatccacccacctcggcctcccaaagtgctgggattacaggcgtgagccaccacgtccagctgagttttggaatttctagccactgcctctttgggctccttctctctaggcatcagtttcccaaattgcctcgagggagaggcctgagaaactgcaggactcctagaggtccccagacagcaggccaggaaggtgcgtgcagcctggctctggaaagccttcaggaaggggactgggggcccagcgtgggctgctgagaaggggcagggtcctccagctcattcctcctgcctcctccgtggcctcaggtgacagagctggcacctctgggatcgttgttggaccggctacgtaagcaccagggccacttcctcctggggactctgagccgctacgctgtgcaggtggctgagggcatgggctacctggagtccaagcgctttattcaccgtgacctggctgcccgcaatctgctgttggctacccgcgacctggtcaagatcggggactttgggctgatgcgagcactacctcagaatgacgaccattacgtcatgcaggaacatcgcaaggtgcccttcgcctggtgaggggcaggtgctgccagctcacagagtccctgcagacccaggcctcaaagcttctggggctttctggacccaccacagcccctggttttgcttgggcctgcccttgtctgttctaagcctggggtgccctcctttgcacccattcgctcaccatccatctaggaattcttgagggcccacgtgccagggtctgggtgctggaaatcacagggatacatgctgtgggactctccaaggggctttgctgggtggggtgatacggggatagatgctgtgtcctctccaaggggcattgttgggggtcgtgtttcagggatagatcctgtgtcctctccaaggggcattgctggcgggggggtgttatagggataaatgctgtgtcctctccaaagggcgttgctggggggggggtgttacaaggatagatgctgtgtcctcttcaaggggcatcgctgggggggtgttacagggatagatgctgtgtcctcttcaaggggcattgctggggggggtgttacagggatagatgccgtgtcctctccaaggggcgttgctggggggggtgttagagggacagatcctgtgtcctctccaaggggcatcgctgggggcgggtgttacagggatagatgctgtgtcctctccaaggggcactgctgggggggtgttacagggatagatgctgtgtcctctccaaggggcactgctgggggggtgttagagggacagatcctgtgtcctcttcaaggggcattgctggcgggtggtgttagagggatagacactgtgtcctctccaaggggcatcgctgggggcgggtgttacagggatagacgctgtgtcctctccaaggggcattgctgggggggtgttacagggatagatgctgtgtcctctccaaggggcactgctgggggggtgttacagggatagatgctgtgtcctctccaaggggcactgctgggggggtgttagagggacagatcctgtgtcctcttcaaggggcattgctggcgggtggtgttagagggatagacactgtgtcctctccaaggggcatcgctgggggcgggtgttacagggatagacgctgtgtcctctccaaggggcattgctgggggggtgttacagggatagatgctgtgtcctctccaaggggcattgctggggggcgggtgttacagggttagatgctgtgtcctctccaaggggcattgctggggggggtgttacagggatagatgctgtgtcctctccaaggggcattgctggggggggtgttacagggatagatgctgtgtcctctccaaggggcattgctgggggggtgttacagggatagatgctgtgtcctctccgagggtcattgctgagttaggtgatacagggatatatgctgtgtcctcttcaaggggcattgctgggggggtgttacagggatagatgctgtgtcctctccgaggggcattgctggggggcgggtgttacagggttagatgctgtgtcctctccaaggggcattgctgggggggggggtgttacagggatagatgctgtgtcctctccgagggtcactgctgagttaggtgatacagggatatatgctgtgtcctcttcaaggggcattgctgggggggtgttacagggatagatgctgtgtcctctccaaggggcatttctgtggggaggtattcaaaggtttcctaaaacatcagggaagttcgccagggaaagactcgttggtaagcatgttctagggagagctagtggtagacaggcccaggccacagcaggccttgtagatgggccagggctgcttacctgtgcactaggggtggtacttggccctgccctggcccctgtgtgggcttatcctctgctgagaccattgtggttctctggtgccagaggcacccagaggtctgtgatctgcctgctttgaggcgggaagggttgttccagttctgctttcccaagcggtggctgtgggcaacccttatgatccaggacgcatggtcatcttaacgagcagctggctttacacccagggcgagcagaggtcttaaattatgcccgttgtcctggagtaatttagagcagcctcttttgtattcaggcatcctggtttgcatggtaaggtatgaatatagttgcctttaaacagcacgatgaagtgggcgggttattgttctcatttcaccaaggaggataatgaaccttagcgatctcgagtgactttcccggccccatcccctttgaggggcagggctcgctctgcttccctgtctgggcaccaccctcctctctgcacctcagtccacgccgggatgtcctttctgacctcactgcagtggcacttccccctcaaccgggggtgcccagaacgaatgggtgtatttgggtgaagccagtatgactgtttctacccattttggttcttccccaggccctacccgaatttcccacccactgcttcctgccaaaggacccaaatccgaggatcccgccccaaatctgggaattgtcattctcccaccacagtcagaaaacagcctgtgatcttctctccctgccccatcccagagcctctgacctccttcctttccatgcttctctggctgggaaacttcctttcctcttcccccaccaggctgcaagtgaataagaggcctgggcttagacgatttccccaagtccctgcatcgtgtcgtcaaggggtcctgcccgcttcacacggcgcccctgagacccactgttgaacctggcacagggggtcacaacaagtgtttgctgcatgagtgttttaagtccctggggcggacgcaggtagggtgtttgagagggcttctctttgacccctgcctctgccaggtgtgcccccgagagcctgaagacacgcaccttctcccatgccagcgacacctggatgttcggggtgacactgtgggaaatgttcacctacggccaggagccctggatcggcctcaacggcagtcaggtgagggctgggagacgggcccccatagggctggtggggtgaattccattccctgcttgcagcctggccctgctggaactgcctctcaccaatggactccctcctcccacgccccgtgcctccccccacttcccgtgcctcccaccacgccccgtgtctcctctcacgccccgtatctgtatggcctcagggagagcccagcaaagagacggggagggaaaagctggggcctgccctccttctctagcccttgccacatccacttgttccgaggctccagacctgggaagaagggactggggctctggagagggcccctcccaggcaggcagatcccttctttggaggccaggcatggcagcagccgctgcagctgtggatgggctggagggaaggcgggaagtgaagggctgggcgctctgtttgtcgtcaaactctgcacctcctcaccttcagatcctgcataagatcgacaaggagggggagcggctgccccggcccgaggactgtccccaggacatctacaacgtcatggtccagtgctgggctcacaagccagaggacagacccacgtttgtggccctgcgggacttcctgctggaggtgagggacaggtcagcccaggagagctggggtgttcaagctgaggggctacccaggcgtcagtcccagagttggccacgaccttcctcttcctccaggcccagcccacagacatgcgggcccttcaggactttgaggaaccggacaagctgcacatccagatgaatgatgtcatcaccgtcatcgagggaaggtagggagtgcagggctgggccccgccctgggatcgcttgaagggcacaggtcggagggacctgtggacagatctgtttggcctccaagattcccttggccacatacaggctggcggttgggcctgaaccctgcagtgtgaggggaggacaggcctgcctccgtcttcctagtgcctttccctgcccagcttccctccaccaccctttcccactgggctgcagccctggctgtgtggttgggccaggctgcctttatggaggggtagggagtggcctggcctcggtggcagcagagttctggactcccgtgcttcctcctctgctcctccccgcttctctccctgcttcttcctggcacagggactcagccatccacctgggtgcgtttcagtagctgaagcagcccagcctgccctcttgcagctttccatccttcctgctgagcccaccaccccctcccaggcctgcctccagcctctggtcctctcttcccatctccccttgggaggaccctctctatacctaaccctcctcccacagcctctcgggagtccctgtcttccacctgagcccccgcagttctagcgcctgccctgaggccccaccactgctggccctgccttgtgctggctgatccccagggtgtctgagcaactggctggggcagggcaggtttcaggtacctttgaggcaggggcagtattgaggaccaggaagaagagtgaagtggaggaaatcccctgtgctcgcagctcctgactcaggccaggcaaggatggggctagggctgcttcccagggagcctcttccacctgcactgcagcttttggagtctgcggccttcggtgcaatcctgtgcctcttgggggtgggtggaggagacctggggggctgtgtggagtgtgacctgcaccgctgtggccccgacaccccgagccttcccaggcccggctccctcacccttgggcccagggtctgggaataggaatgacatactgagactgcagggcctgtggttaggggtgttatgctggggaagaatgcagaaggttctagaaagagaggcctggggacaggaggcaaacagtctgcaggtttggagctgaggggccagggatgggattgcaagcgtggcgctccggggagcattctggaaataggaagattaagggtgggggggtcccctggaagtacctggcagggcctccagcccgaagtccagcctcatgaccgtgtccacctccacgagctggaaagccgtgggcctggcccctcttgtgctgctgccggagccccagatctttaccacctgcttcccttgctctcagcaggagcctgtgtgcctgccagtgtccccaggggtgactcagagtggcctgtgtttggggcgtgtgtctctggagctggtgttttaggtcaccgcccgggcaaggcgggcagtgggaggggccgggagcggctgctcctgggagggttgtgggtgtgccccgccccgcccttccgtcgaaggcccccgttggccccagccgctggttccctgtggctgctgctggtggggctctgggggctccttccccctgggccaccagccctggcttggaaccacagcacctgccctccgtgcctggagctgctcaggaggtgggaggtgaggggcaggaggccacaacagccggtgaggcttgggagcgggcctgggtgtcggtggtggcagagcttgactctgcccccttgtttcttcagtccctgaatatctccatgtttgtttggctgcctccgtctccatgtctccaggcggatggctctgtgtgagtctttgggcctgggtgtgcatctgtgggtctgtgtttggagttccctcctagcctggccttctcttcgccgtggcttcccacttgcgaagctgtgtccagtatttgtttcctggtgcggagtctgggaggccacctgccgcagctctgactgagtctaggctcagtccttctcagggtaccaggctgtgggcagaggggagacacctagatgtttcgtgctgtgtctagatttggagacacaaatgatgactggtctttcccaggggctcgtttggaggaaggggtggctggcagcacttttgttccgcatacagagcgggtgttggaatccattgcgggtccttggcctggtctggccctggagcctcggcttcctgtggtgggtgggagccaggcatccgggttatccctccaggcctgggcgcctgggacccctagggagaagagcgggcgggcgttttgaacagaatgtccggcattagttgagccatttctggactaccttcggcccggacgggaacgtggtgctgagatttccagagctggggcagccttaggcagttctcagcaccggcctctgttttccatcttgtctaccccagagatgttgaccagaggcccgggggcagcaggaggtagaaggttcatgcggaggtgttgggcccttttcctgctcccccaggaagtcctcatccgcccctgcttcagtcacggccgggtagcagccctggccctcccatggccacggggactccggcctgttcatggcgggagagagagggcgcggacagggcgggcctggaaggaagggctggcctcagtcccctctggactgctggtgcctcggccacactgagcctcacacgggtgcgtgtgggctgcgagaagtgacacggtcctcttggaagtcccactggagccttgggatgaagctgccttggagtgtgcgtgggcgccatcccgagggggagcttcctgtgcctccgagcgtgcgtgggcgccatcccgagggggagcttcttgtgcctcggagcgtgcgtgggcgccatcccgagggggagtttcttgtgcctcggagcgtgcgtgggcgccatcccgagggggagtttcttgtgcctcggagcgtgcgtgggcgccatcccgaggggagcttcgtgtgcctcggagcgtgcgtgggcgccatcccgaggggagcttcctgtgcctcggagcgtgcgtgggcgccatcccgagggggagtttcttgtgcctcggagcgtgcgtgggcgccatcccgaggggagcttcttgtgcctcggagtgtgcgtgggcgccatcccgaggggagcttcttgtgcctcggagtgtgcgtgggcgccatcccgagggggagcttcctgtgcctccgagcgtgcgtgggcgccatcccgagggggagtttcttgtgcctcggagcgtgcgtgggcgccatcccgaggggagcttcttgtgcctcggagtgtgcgtgggcgccatcccgaggggagcttcttgtgcctcggagcgtgcgtgggcgccatcccgagggggagtttcttgtgcctcggagcgtgcgtgggcgccatcccgaggggagcttcttgtgcctcggagtgtgcgtgggcgccatcccgaggggagcttcctgtgcctcggagcgtgcgtgggcgccatcccgaggggagcttcctgtgcctcggagcgtgcgtgggcgccatcccgagggagagtttcttgtgcctcggagcgtgcgtgggcgccatcccgaggggagcttcttgtgcctcggagtgtgcgtgggcgccatcccgaggggagcttcttgtgcctcggagtgtgcgtgggcgccatcccgagggggagcttcttgtgcctcggagcgtgcgtgggcgccatcccgagggggagtttcttgtgcctcggagtgtgcgtgggcgccatcccgaggggagcttcttgcacacgtcctccgcactcttactctccttcccccaggagcaagcatgttttctcgagtggtgtcaggactcccagcagccatgggggctcttgcctcggccatacctgcactaagggaggtgggcttgatgtctcctttccctctcagaagtgggtcccaaaggaggcttctgtgcctggagctgggcagtgttggcggaagggagaggccagacggagtgacctgccttgggcacgagtcacgctgctctgagcaaggtctcggcctcagcggcattctcacccagttactgagcgcctctgaagaggtgtggagagcagagtccggcgtctggcccgcggcagccaccggggagcccgtgggtgtagcgggagagccgcagcccagccggtgccggggttcctcctctacgggccgccgtgggaggctgtgtgcgtgctggggagccggggctctgctccttcgagtggccctgctatttttcagatgggactcgtctcgtctcggggtactgtcctctctccttccttccctccctgcaggcagggtgggaatcacagggtggctgtgtgtggtggggccaggccagtggccctgtgtatgaggaggctgggcagggggagcacagccccgtctccccgcgccccgcgccccccgcctccccgccgaccgtggtgctctcgggtttgactttggtctctgggatgggctgttccggagtcaccccgctccagccaggcctcgtcaccttacaaggctgtgggtctgggtgcccaggcgtcgccacctcctccgtcctctctccccggcctggctgggtttcagaggagcccttcttcacgctttggccctgggacaggagaagtgggggttggtggggagggcgtgcagtgtggtgccacacgtgtccaccctagcagctctgggctgtcaccgcccccgcgtgcccagactctgcccacggggctgtcaccgcccccgcctgcccagacactgcccacggggctctcaccgcccccgcctgcccagacactgcccacggggctctcaccgcccccgcctgcccagactctgctcacggcatcacgtatgacaagtccagcagcagacgcgggagcctcacaacctgtgagagccttcgggagtcaggagtgtcttgcgggagccctgtgcttcctggcctgcctgcccctgcccctgcccctgcccctgcccaggccccggcttaggccacatcagcagaggtttcgtgtctgaggtcagagggggactggcagccctactgtctggtcactgtgggagagctgagttcccttttggacacaggtagagcccctcctgaggagacggggaggctcccgcaggccttccgggaggtggtggaaagctccggaagcaggtgaagcggtggagggagggactgagttgcccgagtgctcctagactctcccgcgtctgcattcgggaggcaggttgtagctggaggcctggcccccagcctagtgcaaggccctaggtgtcccccggcacccccgcacctctcagaactcctggaacccagccgaggagtgaaatcaagtggccagaagaggactggggccccggccttgccagggaactgaggggtgaggaggaggtgtgggcggggcgctggccccacagacctgaaagctggcgttgggtcccaggtctgctgggatctttctggtaaccgtggacaggtcatgttgcctgctgcagcagcttccagcgtgcctccttatttgcaaaccatagggaaagctgcctgacccacctagagagttgtgggtaaggccgtgtgcaaacaggcctgtacggggcatggtgggtcacgggggctgttggggaggagggccggtggcacacagcctggtcctgaggcctgagctccatcccccttctgccacagtggccagggtgtgaggagggtcccagtgccggggctgccccgccacgcctggcgttcaccgtgccatctctgtcgcgcagggccgagaactactggtggcgtggccagaacacacggacgctgtgtgtggggcccttccctcgcaacgtggtgacctccgtggccggcctgtcggcccaggacatcagccagcccctgcagaacagcttcatccacacagggcatggcgacagtgacccccgccactgctggggcttcccggacaggattgacgagtgagtactgggcggggatggatgctgacctggccccgctcgggactccagggccctcagcacggcacgcgtgggcggaatctgctcttcaccctttcgcccgggcttcagcccccgacccgccactctcccctcctcaccctggccttactctcgggaagctgtggaaccctaggaagcccagcctggtgggggttctccaggggaatgttctccaggggagtgttctccaggggagggttctccaggggagggttctccaggggaatgttctccaggggagggttctccaggggagggttctccaggggagggttctccaggggaatgttctccaggggagggttctccaggggagggttctccggggagcgttctccaggggaatgctgtccctgccattttcaagctttggggggccgatctcctaactctgagacacttcatctgtgaaacaggttcacccccccaataaggggaaggctgtaaatgcactctgaattagcacttgctgctcagatgcaggggtcctgagagaagctttcccactcactgtagatgaaagtagggtcaggagcttctgaggatggactcctgtttggtggaaaggtccccggagccacagctgtaacccctcttggtactcgggccttaggaaaatgaacttgggaggaacccggtgggagctgctgaggaggagagcttctcccatgacccccctgtggccccctgtgaccctgtgaccctgtgacccctgcacacgagcagtggttttccttctcctgctggtggtgccagagtcctggagacgtgaacctgctggctcaggccctggggatgtatgcaggtccacatgggagtgagcctgctttccagaaccagagtgggactggggaccttggggactgcagagggaacgttaggtggcagctccgcctccccaccacacagtactctacggagctcactccatacctgggagaggccctgtctcctatgtaagaggataaggccaccgaggggcatctgggaaggacacgcagaatcagtcacttccgggatgccaccccccaccccccgaagcttcttgcgccaggcctccaagcctctctgctggccgcagggggattccaggcccctggcctctgcagcccttctcctgctgacttctgatactctggtctgccctgagaggcgtggaaagcaggggccttcacccaccgggccccacacaccagaaccccacacagcgggcccccacacaccagaacccacacagcgggcccccacacaccagaaccccacacagcgagtccccccacaccagaacccacacagcgggcccccacacaccagaacccacacagcgggcccacacacactggaaccccaagctcacagggctcagcccatgtgttttgcctaaaaagaacccagcaagggcctgagagttggggtgaaagactgcagacacctccaggagaggctggtgccctctgccccactcctggcatgctgtggccagcccagccccattcctccaggctttaatcagccccagtgactaagtctcagatactgacagttggtgcagggacggagggtggatccggagcaggacaggtggcccagcctctcccgcacctcctggccatgtggcagaagggtgcctcctgcccaccctggctgggcaccatagctgggatgccccgttcttaggccctccatcgtggcctgcgggacaggagtgtctgccctctggccgctgcctggtgtgggctgggggcctggggggttgtggaggaccacctctgcccttgtagggtgtagttggagtccctgaggtcctaggctttccatcctggggtcaggtgtcctttctctgccttctctccaggacaccccccagctgagacgtgcggtcaggttctgtggactgggaggcgggaggcctgtgcttcagacccaagactacacccggtttcctccaggacgaaggggctctgatgagattctgccacccctccacacgcttcccctgctctcttgacccagctctctcccccacagactgtatctgggaaaccccatggacccccccgacctcctgagcgtggaactgagcacctcccggcccccccagcatctaggaggggtgaaaagtaagagcccctctgctccctggtgtccctaactcatcggctactcaggaaggggcactgtcttcacaggccaccctaaggctgctgttctgtttttggggacagtggggtcagggcagcaggcgggacagctgtgtccctggctccggctgggcgtggggtggaagacaggcagctgtatccgccgaggtgggcctcctcgggctgggtctgcagcaggcccgtccgccccggcgtccctcctccctccttccacggccgagctcagatcctggctttcctcacttccccctaatcctgctctcctgtcccaagccaaaaccaccccacggctccggctctgcctggggcctcctccatctcccggtcctctgcctatcatactggaccgccgtgttcctcatcctgccgcctgcggcctcccgtttgctgggggcttgtacattcactcgcccccattcacttctctcccttcgtctctctacactctgccctctcgtccggccgtctccctcctttgtcctctgtcctgctccgtctctctccccctgtccgcatggcctttcttgcaggggagcctccacctcgcccacctcagcctgccttcttcactcagagtaagtggggctgcttccgatgccttggcccccgcccccgccccctctctctcactcctctcctggaaggtacagagcctgggcggctgggccggaggggaggtgggtgggtgtgtgctgtgagcttccgcggctgccctggcctagcatgcctgccccccctcgagcccgccccccggagcctgggcttctgctcacgagtgtggccctggcttccgcctcggcctcactccctcccagacctgtctgagcttctggagcacgagtgtggccctggcttctgccttggcctcgctgcctcccagacctgcaggcgctgtctgggctttgtggccgttggtcaggagtactgtcctctccaaggatagtccttatagcccctgatggcaggaggcggctccgtgcctgcactaatggtgtgccgtgacaggggcggggatgagggctcactaactcgccagggcgcaggagcagggccgccggggtcttgtgctggtggaggcagcgtcaggcaggagccagtgttgcttgctgcagcttagacggagcgaggcggggctcaccggcccacatggggctgccgggcagagcaggttccgccctcctgatggagtggtcggaggtgcgctgagaacctggccgccggtggctgacctcagacctcggggggagttgggagtggagggttgctgggggacacttggctttctctcccacgtgccacctcccctcgtgtcccagaccctgcctgactgccttcctgttgggctctccctttccatcacagaaccaacctatgaccctgtgagcgaggaccaagaccccttgtccagcgacttcaagaggctgggcctgcggaagccaggcctgccccgagggctgtggctggcgaagccctcggcgcgggtgccgggcaccaaggccagccgaggcagcggggctgaggtcacgctcatcgacttcggtgaggagcccgtggtcccggccctacggccctgcgcgccctccctggcgcagctggccatggacgcctgctccctgctggacgagaccccgcctcagagccccacgcgggcactgccccggcccctgcaccccacgcctgtggtggactgggacgcacgcccgctgccccccccgcccgcctatgacgacgtggcccaggatgaggatgactttgagatctgctccatcaacagcaccctcgtgggcgcgggggtccctgccgggcccagccagggccagaccaactacgcctttgtgcctgagcaggcgcggccgccccctcccctggaggacaacctgttcctcccgccccagggtgggggcaagccgcccagctccgcacagaccgcagagatcttccaggcgctacagcaggagtgcatgaggcaactgcaggctccggccggctccccggccccctctcccagcccggggggtgacgacaagccccaggtgcctcctcgggtacccatcccccctcggcccacgcgcccacacgtccagctgtctccagcccccccgggcgaggaggagaccagccagtggcctggacctgcttcccctccccgggtgcctccgcgggagcccctgtcccctcaaggctcgaggacacccagccccctggtaccacctggcagctccccgctgccaccccggctctcaagctcacctgggaagaccatgcccaccacccagagctttgcctcagaccccaagtacgccaccccccaggtgatccaggcccctggcccgcgggctggtccctgcatcctgcccatcgtccgggatggcaagaaggtcagcagcacccactattacttgctgcccgagcgaccatcctacctggagcgctaccagcgcttcctgcgtgaggcccagagccccgaggagcctacccccctgcctgtgcctctgctgctgcccccacccagcaccccagcccccgccgcccccacggccaccgtgcggccgatgccccaggctgccttggaccccaaggccaacttctccaccaacaacagcaacccaggggcccggccaccacccccgagggccactgctcggctgccacagaggggctgccctggcgatgggccagaggcgggccggccagcagacaagatccagatggtgagcacccagcctggctgtgggcgaagcggggcagggcccaaggggcctggagcagtgggccctagtggtgctgacaggggtgggtgtgcccagctgcaggccatggtgcatggggtgaccacagaggagtgccaggcggccctgcagtgccacggctggagcgtgcagagggctgcccagtatctgaaggtaccgccacctcctgctcactctggctctcagggaccctgaagcctggttctgctgcccccagccccacgccccctggctccgactcccctcttccccaccctagtcggtgccctgggcccgcgtgtccatggcgccacccttacccccaggtggagcagctcttcgggctgggtctgcggcccagaggggagtgccacaaagtgctggagatgttcgactggaacctggagcaggccggctgccaccttctgggctcctggggccctgcccaccacaagtgagtgagccccacagtctgccccgctccgtgccccaggagggctgtcccagagcctgccacactgggaggaagcccaacacctcgcaggccgctcccggccagggagacacagctctccagctgcgggagggaggcgctcacagggcccagcaaatcgtttttcctaaatgtgtttatttggacattttagccacttggttttcaaatgagtacaagagggaattggagcctctctggttgaaggaggcttgcttccctagcacctgcagtgaccctgagcggctccaggaatggcactttttaggaccccatgatttgcacacctctttctcacctctgtgtttccatatttctgtttaaagtaacatttaaaatttcagtgttggctgggcaccgtggctcatggctgtaatccccagcactgtgggaggccaaggagggaggatcacctgaggtcaggagttcgagaccagcctggccaacatggcgagaccaggtctctactaaaaatacaaaaattaaccgggtatggtggtgggcacctgtaatcccacctgctggggaggctgaggcaggagaatcgcttcaacctgggaggcggaggttgctgtgagctgagattgcaccactgcactccatcctgggcgacagagggagactgtctccaaaaaaaaaaattttctctaaaaagaaaatatattgtctttcctgtaaaaggtttatattatagtttaacaaaatatatagacatttaaaatatatacatatataaacacactttatatattatgtaaatatatatatgagagcgctgtcaagtcaaaaagaagtgaactgaggtcacatggctggagccagcaccatggcaggaggcactggcgggaggaggggctgacacgggccaggccctggagatacctgctgcccttgtcccagcagcgtggccctgtgcacggtgcggagtttctccacatataaagcgtgtagataatagtgctcaccccgtggaagggactggcgcgatggatgggggacatgtctgtcttattgcgcccagcacgcctggcgccaggatgcaggcactccgtgtcacctgtctgtcccatactgtctcgggtggttcttactgatttgcagctgggatgcaggcactccctgtcacctgtctgtcccatactgtctcgggtcgttcttaactgatttgcacctgggacgcaggcactctgtgtcacctgtctgtcattgtctcgggtggttcttactgatttgcacctgggacgcaggcattcgctgtcacctgtctgtcactgtctcgggtggttcttactgatttgcacctgggatgcaggcactccgtgtcacttgtctgtcccagtctcgggtggttcttactgatttgcacctgggatgcaggcactcggtgtcacctgtctgtcccatcctgtctcgggtcattcttaactgatttgcacccgggacgcaggcactctgtgtcacctgtctgtcactgtctcgggtggttcttactgatttgcacccgggacgcaggcactcgctgtcacctgtctgtcactgtctcgggtggttcttactgatttgcacctgggacgcaggcactcgctgtcacctgtctgtcactgtctcgggtggttcttactgatttgcatctgggacgcaggcactcgctgtcacctgtctgtcactgtctcgggtggttcttactgatttgcatctgggacgcaggcactcgctgtcacctgtctgtcactgtctcgggtggttcttactgatttgcacctgggacgcaggcactccgtgtcacctgtctgtcactgtctcgggtggttcttactgatttgcacccgggacgcaggcactcgctgtcacctgtctgtcgctgtctcgggtggttcttactgatttgcatctgggatgcaggcactccgtgtcacctgtctgtcgctgtctcgggtggttcttactgatttgcacccgggacgcaggcacttgctgtcacctgtctgtcactgtctcgggtgtttcttactgatttgcacctgggacgcaggcactccgtgtcacctgtctgtcactgtctcgggtggttcttactgatttgcacctgggacgcaggcactcgctgtcacctgtctgtcactgtctcgggtggttcttactgatttgcatctgggacgcaggcactcgctgtcacctgtctgtcactgtctcaggtggttcttactgatttgcatctgggatgcaggcactccgtgtcacctgtctgtcactgtctcgggtggttcttactgatttgcatctaggatgcaggcactccgtgtcacctgtctgtcgctgtctggggtggttcttactgatttgcagctgggatgcaggcactccgtgtcacctgtctgtcgctgtctcgggtggttcttactgatttgcatccacataggctttgggctctatcccacctgtcgtcttcggattctctaatacgcaggagtgctcttctgttagtttactcatagtttattaaagtacagagaaaagacatccaggatgataaattttacagtccttgccggggactgccagcttccagtggtgttgcctggcaccagtgtgacccccggtgcctgccccgctgaaccttctgtaaactgtttaactgtgctggtggtttcccattctctaggcgctgagatgcgtctggagagccagagggcctgcctgaaggaatcacctgagcctgtccgtccaccaggagtggggagatgcccccatccagtcctggaggacccgctgctcctgctgctcccggggatggagcaaggccaaggctgcgggaggctgggagccctgccctgcccatccctcctgcaccagcgctgtccctgcacactttggttcagtcccggtgcccctgccaagatgtggaaggggccgggtgaagacaggcttgagggctgccccagcaggctctgggtatgacctgcctctggccctggtcctgggcggggcctgtgggtggagtagtacccccaggccctgccctgggtgacagactgggaggaaaccaggctggacctgggcaggcgggatgtgttggccacagggagaggcggaccggcacccggtgggacctcctaggactgggccttcttccagggggcccctggcagcagctggggtgtcgggcagaatgtgacttgtggccttaccatggacttgaatgggacttggctggcctcaggatcttgtgcctggaaatagcctgaggtggctcaggaagcggagaaagggtgccagaccattctctggcggggaccagggcccaaggccccagggctggaaggagaccaaggggcagccgccctggagggacatcagtgcttcctcttccacccaattcccccacgcggttccatgttttcccaccagcctgttggcgaagttgctgctccggcattcagtacctgcttcttccagagaaataaagttagtttctattttatgtta

SEQ ID NO: 1283 - DNA, 3922 bp, Homo sapiens
cggcagcacaggccaataggcaattagcgcgcgccaggctgccttccccgcgccggacccgggacgtctgaacggaagttcgacccatcggcgacccgacggcgagaccccgccccatccccgactgcctgaaccgcgccaggagacggaccgcaagtccagcgtacccacagacgactcaggcgggagacgagcggtgtcatggccgccgacagtgacgatggcgcagtttcagctcccgcagcttccgacggtgagcggcttcccagaggtagccttcaaagcctctgcgctctgggagaggggaaggcctcgggctcatagttctagaggctcctcaagcttcagaggactgctccttccgcctgaactagccacgaggagactacaagttccgttgtacaccgcggctccggctgcaaaagcctggagcgttgggagcatggggctgatggaggcatggcgggagatgtagtctggagctcataacggttagtagtaatagttgtgattcagttcagtggagtggattgagcgttgtgatccaaaggaaggtaggacgtattgggagctctggtgtggggcactgccaggctctggggcttactgggagctgttgcttgtggcgctggggcaccatgagaacagtagtatggatccctgtgggatattaagggagctgagatcctcaagccctacaaaatgtttcctgcaggacatgggaaaaaagaatcaaaggtcgtctagtccaactttctcctctacagattgtgaaagcgaggtgggaagtaatttacccaggctcatacaagccagtagaagactcaggcttcctctccccaaattcagggcattctccactccaaggcctgtgtgtagaacacgtgggttacaaaggcttgtgggaaaagctaccaatggaaactaccccccttaccaccatcaccgtggcctagcttggtgtctgttcccctgggctctttccttaagcatgaacatccatcaccctcctaacccccaggtggtgtcagcaaaagcacaacatctggggaggagctagtagtccaggttcccgtagtggatgtgcaaagcaacaacttcaaggagatgtggccatccctcctgctagccataaagacagctaatttcgtggctgtggacacggtgagagttgggaaacaaggagggcaggtggttgtgaaggggctggtgctagaggcctgtcacaactctccctttacctacccacaggagctgagtgggcttggggacaggaagagtttgctgaaccagtaagtataagcccttttctctttagtgccagccctcaactgtggagtgggggggtcacagacctgggtggtttgggtccttcataaggctaactcctagccacagcaacccccatacccaaccccaaggtgcattgaggaacgttacaaggccgtgtgtcatgctgccaggacccgttctatcctttccctgggcctcgcctgcttcaagcggcagccagacaaggtatgagctgatctcaccccaatcctaggtgtggctgtggggtggagggtagagagattctagggaacatcagataggaagcatttctctcccaaatctttttttttgacttgatagtttttttttttttatttgaataggtttatggggaacaggtggtgtttggttaaatgagtaagttctttagtggcaatttctgagattttggtgcacctatcacccagtgtacactgtgcccaatgcgtagtcttttatccctcacctgcctccatcctttcccccctgagtccccagagtccattgtatcattcttaagcttttgcatcctcctagcttggctctctgaaatcttgatatagcagacttctctttctcccagggtgaacattcctatctggctcaagtgttcaatctcactctgctgtgcatggaggagtatgtcatagaaccaaagtctgtgcagttcctgatacagcatggcttcaacttcaaccagcagtatgcccaaggcatcccctaccataagggcaatgacaaggtaggcctctagcctccctagccttgagtctgccctttctgtgactttatttcttcctaccctaggctggatgtctggggagaatctgcttcttagggagtatggggaatcactagtgacagggcttgggaaacaagactggtatgaggagggtgggcagcattgggtaaggtagagagagagcgttccaagtggggaagtctgggataagtgcccagcagaagaggctccctgggggactctgtcctcctcattgacccctttactttcatctagggtgatgagagccagagccagtcagtacggaccctattcctggagctaatccgagcccgccggcccctggtgctacacaatggccttatagacttggtgttcctgtaccagaacttctatgcacacctccctgagagtctgggaaccttcaccgctgacctgtgtgagatgttcccagcaggcatttatgacaccaaatatgctgctgagtttcatgcccgtttcgtggcctcctacttagaatatgccttccggaaatggtgaggaaatggttgagggaaaggggtggggcctgatacgagtttatttcattcacttaagatatttattgagctcctaccatgtgcccaggcagtgttttaggtgctgaggattcagcagtgaacaaaacagaccacaaaaccctgctcttatggagcttatatgctagtggaccattaccctcttgcgctgttgcagtgaacgggaaaatgggaagcagcgggcagctggcagcccacaccttaccctggagttctgcaactatccttccagcatgagggaccatattgattaccgctgctgcctgcccccagcaacccaccgtcctcatcccaccagcatctgtgacaacttctcggtgagagcacccacctgtttcttgggagggaaggttctgatgcctggagcctctttctaagcctctttcccacccctaggcttatggctggtgccccctgggaccacagtgtcctcagtctcacgatattgaccttatcattgacactgatgaggctgcggcagaggacaagcggcgacggcgacgacgtagggaaaaacggaagagggctttattgaacctaccggggacacagacctctggggaagctaaggatggtcctcccaagaagcaggtctgtggggatagcatcaagcctgaagaaaccgagcaggaggtggctgccgatgaaactaggaacctgcctcactccaagcaaggcaacaaaaatgacttagagatggggattaaggcagcaaggcctgaaatagctgatagagctacctcagaagtgccagggagccaagccagtcctaacccagtgcctggggatggattgcaccgggctggttttgatgcctttatgacaggttatgtgatggcctatgtggaagtgagccagggaccgcagccctgcagctctggaccctggctccctgaatgccacaataaggtatatttgagtggcaaagctgtacccctcacagtggccaagagccagttctctcgttcctccaaagcccacaatcagaagatgaagctcacttggggcagtagctgatgcaacttccaccttgctctcaggtggaacagaggtattttgggtctctctagcctgaaatgtcatcctcaactgctactgagtttaggggagggggaatgtcttgacagacatcactgcattgccctggaccgcctcctttatcccagtgtttgaggtacaagtaagaaggctgaccagcacctgtaacactgactttatttttaagtctgaaaatgtcttgggaaagttttacaaaaaaaaaaatcaacagaagcaagttatgaaaata

SEQ ID NO: 1284 - DNA, 8125 bp, Homo sapiens
gccgcttggccgcggggcgcctggctcagtggcttctgcgggcttcgaggagcgggatgttgcgggctgggtggctccggggcgcggcggcgctggcgctgctgctggcggcccgagtggtggcggcgttcgagcccatcaccgtgggcctagccatcggggccgcgtcggccatcaccggctacctgtcctacaatgacatctactgccgcttcgccgagtgctgccgcgaggagcggccgctcaacgcttcgggtacggcgcgcgcgcgagctgtgggtcggcgctgcggggggcgcgggggcgcgggggcgcggagggacggcctcgtgggcgcctggcacggaccgggcccgtggcatctagacggcggtggtcccagctggggtgggcggggagcggatggggcggccccggaaccgttcgcgggaacgcagaagcggtgccttcgcaaacagtctccagatcgtggggctgccccagcgcctttctaaagctcccgttccttgggatcacaggtggaagaaacggaaagtaggcgggcggcccttctgcgccctgccaaccctattaagtagttttcagacgtgctgcgtcgcccagaaagcccacatttggcccctggttttcctgcaggtcagcaagggtggctgggattagcaagcgctcagtcaagcgatggttcatctctgaatgaatgaacatttagcttccttatcagaccccgaagcgttaaggacctccacataatcttgaaagtggcatcgtttgactgcctcggccctagggtgtggcagacaccctgctgtgtccctggataatctgtgcttcttgctttggccagctaagaaagtgctgcgttgctgatgcatttttaaggtctgtttctctctttgttctggggctgttcttgcagctctcaagctggatttggaggagaagctgtttggacagcatctagccacggaagtgattttcaaggcgctgactggcttcaggaacaacaaaaatcccaagaaaccactgaccctttccttacacggctgggctggcacaggcaagaattttgtcagtcaaattgtggctgaaaatcttcacccaaaaggtctgaagagtaactttgtccacctgtttgtatcgactctgcacttccctcatgagcagaagataaaactgtaccaggcaagagaacccgctattatctcgtctgcaggccagtcggactggtccgggtgacctgctcactaactctggcctctgcttctctttcctttgtgttgctgtagcccccggctccactgagttaaggcacacttagtccaggtagttacaaagctctcctacaacatttctcttacttggttccaaaacagtccagtggggtaggggatgttatttccattaaaagatggggagccaagggcctggcgccgtggctcacgcctgtaatcccagcattttggggaagccgaggcgggcggatcatttgaggccaggagtttgagaccagcctggccaacatggtgaaaccccatctctacctaaaagtaccaaaattacctgagcacggtggcacgcacctgtaatcccagctacttgggaggctgaggcaggagaatcgcttgaacctgggtggcagaggttgcagtgagctgagatcgcgccaccgtactcggtctcaaaaaaaaaaaaaaaaaaaaggcctggcacagtggctcacgcctgtaatcccagcactttcggaggccgaggggggcggatcacgaggtcaggagatggagaccatcctggctaacacggtgagaccccgtctctactaaaaatacaaaaaattagccggggatggtggcgggcacctgttgtcccagctactcgggaggctgaggcaggagaatggcctgaacccgggaggcggagcttgcactgagccgagatcgcgccactgcactccagcctgggcgacacagtgagactctgtctcagaaaaaaaaaaaaaaaagagagatgtagtcagggccaggtgcagtggctcacgcctgtaatcccagcactttgggatccgccaaggcgggcggatcacctgaggtcgggagttcgagaccagcctgaccaacatggagaaaccccgtctctactgaaaatacaaaattagccgggcgtgatggcgtgcgcctgtaattcaagctacttgggaggctgaggttgcagtcagctgagaatgggccactgcaccccagcctgggcaacagaatgagactctgtctcaaaaaaaaagaaaaaaaaaaaagatggagcctggagcccagaggcaaggtgacttactcctacaatctttgtagcagaacaggacctttgtagcagaaccaaaacctcccaactcccagttgacatggtagccaccttctctggtgagtgaagggattccacatccccagcagtgcagttggtgagaaggggcagtcagtcttcaaggatttgctccggtgtggcttcattcaatgctgcccacctctggtgcagcctcagctttgcctctgctctttgcaatgtagcctagaggtcttttttctccttaacaggttttattccctttgttcctcccatccttcatgtccttggcattgctttcttcaaaggaagcctcaaagaactgaaccttgagactgtttctccttttgagatattgtttccacattcattttatattaagttgtctaggagggttagttctcatttaaatgaatgttgtccttgtcaaggttaacattcccactggcaacatagcaagactccatctctacaaaaaataaaaaaattagccaggtgtagtggcatgcacctgtagtcccagctacttgggaggctgagatgggaggatcgcttgagcccgggaggctgagcctacaatgaaccatggtcatgtcactgcattccagtctgggcgacagagtaagactctatctcaaaaaaaaaaaaaaaaaattcctcctgttaggtggggactgaagaaagaaatagaaacttaactgaacaaggaagtagaagtgtttgcccaacaaactgacgtgagacagggaagactgctaaaaaggaaggaaggaaggattttcttgttctttacattcttcataaatctccggaaacagagtaatataaatggttgagggcatgtctgggggagtttcctggtatagcctttcacgctttggggttgagggcttgttgcttgagtgtctttatgtttgtttgaagaaaacatctggaacagatgcttttcatgaaatgtcattgagtcagctctgttggtctggggcactgtgtactgtgcaggtcttgatctagttccttattcctcagtatgtctgatagtactaacttgagattgtagtccaagagagatgaaaactatggctacgttagcagtgaatgatattcacggatcttgccgggtggctcattcctgtaatctcagcactttgggagggtgaggtgggtggatcacctgaggtcaggagtttgagacgagcctggccaacatggcacaaccctgtctctactaaaaatacaaaaattagccaggcatggtgcaggggatcggggcgcctgtagtcccaactacacggggggctgaggccggggaatcgcttgaacccaagaggcagaggttgcagtgagctgagatcacgccactacacaccagcctgggggatagagtgagaccctgtttccaaagacaaaaaagagaagaaaagaatcacggatcttgtacctcttatacctttaaaaagtcagatttaatagtcatttgagttaggaaaaaacttctctgcattttagcatctatctctgccaatttccactttttagagataaggttttagaaaagctgctacctagcgagtgggggtgagggtgccattctaagagctctgacctcgtccttcagtgcatgaggagcagatggagcctgcgcgcctcttggtgcaccctttgagcttcgcatcctgtttcttctttcatggttggtccaggaccagttacagaagtggatccgcggtaatgtgagtgcatgtgcgaactctgttttcatatttgacgagatggataaattgcaccccgggatcattgacgcaatcaagccgtttctagactactacgagcaggttgacggagtgtcttaccgcaaagccatcttcatctttctcaggtcagcgggaggcggttttttggggcacacaagcccttcattctctcaatgataaaatgaggtcctgaggaccatcagcactttgtttaccaggacgaaagtgcctgcttggcacaaggcacttacctactgctttacttttcctttgccagtctcagcatggcacacagtgtgggttgtggaaatgaactaaagaaataatcactgggccaggcgcggtggctcacacctgtaatcccagcactttgggaggccatggcgggcggatcaccaggagatcgagaccatcctggctaacatggtgaaaccctgtctctactaaaaatacaaaaattagccgggcgtggtggcgggcgcctgtagtcccatctactcgggagactgaggcaagagaatggcgtgaacccgggaggcggagcttgcagtgagccgggatcacaccactgcactccagcctgggtgacagagtgagactctgtctcaaaaaaaaaaaaaaaagaaataatcactgatagcaggcaattttagctgggcatcgtggcatgtgcctggagtcccagctcctggggaagtcgaggcaggaggattggttgagcccaggagttcaaggttttattgagctatgatcataccactgcactcctgcctgggtgacaatcaagaccccgaccctaaaaatgaaacagaaatgaaaacagttaattttattaactgtgcatgttggtttttagggttataaagggccatagcattatcccagctagttgtgaataaacactttaagttccatgagagcacacttttttgtctagtagcactcagtaaatattccttgatgaaaaatagatcttcggccgggtgtggtggctcacacctgtaatcctagcactttgggaggccaaggtgggcagatcacttgaggtcaggatttcaagaccaggctggccaacatggtgaaaccccgtgtctactaaaaatacaaaaattagaaggggcgtcgtggcaggcgcctgtaatcccagctactcaggaggttgaggcagaagaatcacttgaacccggaaggtggaggttgcagtgagctgatattgcgccactgcactccagcctgcgtgacagagtgtctcaaaaggaaaaatagacttagagcagattcatttcttggtaagacacagaagtctttttttttttttttttttttttgagaccgagtttcatttttgttgcccaggctggagtgcaatggcatgatctcggctcgctgcaacctccacctcccggattcaaacgattctcccacctcagcctcccatgtagctgggattacaggcatgcaccaccattagcctggctaatttttgtgtttttagtagagatggggttactctatgttggtcaggctggccttgaactcccgacctcaggtgatctacctgcctcggcctcccaaagtgctgggattacaggcatgagccaccacacccagcagacacagaagtcttaatatgtgattttaatctttatttctctggcaaactcagcaatgcaggcggggaccttataactaagacggctcttgacttttggcgggccggaagaaagagggaagacattcagctgaaggacctggaacctgtactgtctgtcggagtcttcaataataaacacagtgagtccaccagggtaaaggagccccttaactgtccagcagtgagccgtctgctctttcattgagtgtttcacaaagccacaggatcccactggatttcctcactttgctaaagtcaggaattttcttagggcatactgtgctagaaaccagtgagtgagtgtccagctgagtcctgcatgggcttgttgcacactgacaagagactctctcaaggggtacggacatgaggaatgtgctgagggtcgggactggagcttggccaggtggcggtggtggcaggaaacccagctgtgtcttgttctgcaggtggcctgtggcacagtggactgatcgacaaaaacctcattgattactttatccccttcctgcctttggagtacagacatgtgaaaatgtgtgtgagggccgagatgagggcccgtggttctgccatagatgaagacattgtcacaagagtggcagaggaaatgacgtttttccccagagacgagaaaatctactcagacaagggctgcaagactgtgcagtcgcggctggatttccactgagctcctatccagatggggtaggagacagctgggaggctccgcacgccagaggccttgcctttcagaagaaccctgaagaccgctttggggttttgcctgtttgcaccttagacttttgggtatagaatcttttttttgagaagaggtctcactccgtcatccaagctggagtgcagtggtgcaatcctcaactcactgcaacctccgctcccggtttgagtgattctcatgcctcagcctcccgagtagctgggattacaggcatgagccactgtgcccagctgggatatagaatctaagagttgattgtggaaaacacgtgaatctattgcgcgcatttgtcatttagcaagatggcagcagtccagctgttctttgcagctggagatgaacttttaaaaatccccttcacacttaatgtactgaccgagacagaagtacctgaaaacagctgtgcatggcaggcccggcaatagcttctgacccacagcacccgcgcctcagaagctacggtcacaactaaaggagtccagggacttgctgcaggctggggggcactgggtggttctcaccagcaggctgcggggcactgtgttctcattggccaaaaacatccttttgctctgtctcgttctttacacagagttcactgacttgaagtatactcagttaaaatcggggctggaggtgcagacggtgtctgaccggaggatgtggccgtgcccgccgagcactcttgatctgagctgacctgtgtgtgtgtgtgtgggggggtggggccttcacctaagacctctgcagcagacctggacagacaggcccctcccgcctgtccatcgctctagctgctaatacagccctggctgtggaatccttcaccgtctcagctggtatcagccccagcctgccttgtgccatatctcagcttggatctctgctagagtccccccaaccatatatcatagagttgaatcacaatgagaccgttggctttgaatttgagtcgttggttcccatggtgagatgcttgttaagactttatacttgggtcaatctctcactttattttgtagaaccatttgaaatcctaggatgtgcttgttctggaaggatgacatgggcccagactgaacaagtcagcttgatgatcttaaatgatggaagtataggacgttgcttattttaaaacaagggaaggacacaaaatggaatgactgcttagtcctttctcagatactcttaaaacaattttttattgttaaatttgtggtaatacatggtcacaaccgtggatcaaacaaggtcagtctaaagtggcaggtcctaggtgtgacctgataccaccaccctttgtggcagcaccgggctggactgccctgatccctgggacgtgagacttagcttccagccagtgtgaatcattgtatctgtctcataatcacagcacagctgcagacacaacaacgtgcagcattttttacataaaaatatggtagaattaatttatgacatggaaatgccttacgtggtatcacacttagtcttgaaaaaaacaccaaggtgacgtttaaaatttttagtacatatcctcaaattggagctaagttatacttcttttataaccttttgggcatctggtcgagagaagacaagattttctctatttacagtgaggcaataaatatgtttgccaccttt

SEQ ID NO: 1285 - DNA, 22722 bp, Homo sapiens
gctctgcccccgacatcgtggtgagaggggaaccttcctcatatctgggcgctggcctctccgggcttgggagagaggaactcagtgatcatagagctggccgaatgccggggtagaggggaccggaagttgtttttttcgcccccgcccagcggccggatcgcatctcagctggttggctttggttagagctcccgtcagactttagttcggccctaggatttggtagccccgaagtgtgggctctctccagtaccagactcatttcagtaccagcctttgggaagtcgtgtgaatacctcggtctcttagccacagggatagaatggcggcctgacggagccgcggcgccggcgaagtcgctgaggcgcgagctggaacccccagaccagctcaaacgggagccaaaactcgaagcttggaagaattagcaggaaatggcggatgaggcgttgtttttgcttctccataacgagatggtgtctggagtgtacaagtccgcggagcagggggaggtggtgagtgctgccacacaaccttgaggtccttttgcggtgacacaccttgtttcccctcagtgctttccttcaacccctgtcccatcgccacccgacgcctcccgaggtgtacacaaaatggtccacctccaggtgtcctaaaccctagaacctgtcagttgtctcctttgaaccgtcatctttcatcgttttctctttcgtatcttcttctatttgattctcttttgtctattcccgtacgtttgtcttgcacgccacagattttggtacttttagtgttgtccctgccattatttacgagagggttaactgcagagcctacttagttttgctggcacttccagcacttgagccatgcactggacagacctgtgccaacctgagaagcctgtccctccttcctcattcctaatgctcagtacaactccacacaacttgagacctgaagcctaatgaaggttgagtttgcaaaggaaagtttgcaggcgttaggataattagggaacataatttaaattaattatttcagaaagtatttatttagtgcccttatgtcagagcgatttctaggtgccagggatatagtagtgaatgaaacaatggccccatccttgtagagatttttttttaatctaatttaatccgaaatgtgatagtatgtagcggttacttctaatatgtgggagtccttattcaatcattgtgggcctgtcactgctgacactgctagataaattaaataaaataatactcctgcctcacagtatttagggaatagtgatttaatgaatagttaacactgagtattggctggtagaatcatggagttgtaacggattttagaaatactccaaagtcatgctcaagtcaggagccctttctttaatgctattgataaaaaatgagtggagagtggggataggaaatgtatcctaggcaaagataaagtggtagaggtatgaaagagtggtggatttaaatacacttaagcatttctttggactagactgaatagagagtgagaagaattgagaggtgaagttagaaagctttgtgtaattaaagaattcggatcttttcgagggaatatttttaaggaagggaatgatgtggaccatttgcattttagaaaagtaatccagtgtttgggctagagagggaagatccttgtagggggaaaatcctttattacgggagtcactgcaggaggagatgaagatctggattaagacagggatagtgagaaaaggagataacagatttgaaagttagaaagtggaattctgtaggccttgtttaaggatgggagtgggagttgaaaattatcgtcaggttttcagcttgagcagctgggttggatggtggtactattaatcagaaaaggaaataaaggagaagaaaaaaataaggaggtaagataatgagttatttcggggcaggttgaacttttgaggtgcctgtatgacatccaaaaaaaggtactgccagtttgcacaagaaggataggcaggatacatttggaaggttattggaaatgaagcgaattctattcttattcaaatgacccatctataatagagatttttttcaagtcacaaacttctgactttattattgacctcaaggtttactgtttgtgcaaagctagccttccttttccctctagaacagttaacacaccccttttacttttttgtcataacccccgatccccccaaaccacttgcgtattcagttctcttcattctcccctcccttcttacctttcctcttctctctctctctttttttttttttttagatggagttttgttcttgtctcccaggctggagtgcagtggtgtgatctcagctcactgcagcctccgcctcttgggttcaagcgattctcctgcttcagcctcctgagtatctggaattacaggtgccggccaccatgcctgactaatttttttgtatttttagtagagacggagtttcaccctgttgaccaggctgttcttgaacttctgacctcaggtgatctgcccgccttggcctcccaaagtgctgggattacaagcgtaagccactgcgcctggcccttttctgactcttgtctagaataatattttttcttctttttaaaatatcttttttttttcccgtgggttaatcctaaataaaatgaacagagctgttctactcaggcctgataattttaagagatggactaacatacaagagaaaggaagttcatagttttgaatcatttaagctaaaaataactttctttttctactgcagtgtatttatgatgggggggaaaattgaaagtacataataagcaaaaattatataaataacagttatgtggtagtcttcataatcagaacccatactgaaatacgggtatataagggttcacattagtgtccatactttgagtgtgcttgaaatttttcatcatgaaaaatgtaaaagatacataatcctgtcatccagaggtgatttttagagatttttttcagacataaaaagatctgtaaaaactatgttgtttatgtctgaaaagacctataaaatccatttctcgctgacaggattatgtgtctttttttttgtttttgttatggaaagtttttttaaatgaaataaagttttataaattttcagtatagcaaaataaacttccataagacttgaggtgagataaaagaaagaaacagtgttctaaccctccaaatcaaggtttttcaaactatgcttaaagaggaattctcttaaaatggactaattgggcatttctcaatttatggtgaatggattttgaaaggctaatggataaaatgttctcaagttgaatttttcttaaaaatttggtgcctactcaaaagtgcatgaacaagtagcaaaattaagtagtagggcttaattcaaaagctcatgtgatcataggatttgaaagtgtctgcatataagcatattgtaactgcccagtgggttcttcttccccactgcccaggtagagctgatctatcaagacaggagaattgcaataaggagtttatgtagagctgctaaatgggagagcagagttttattattgctcaaatcagcctccccaaacatgcagagtctagggtttatcaaggatagtttggtaggctgggggctggggaatgggtgctcctggttggttggggatgcagttacagaggtgggggccagaggaccagttggagtcatccgaaatgcaaaagtctgaaaagacatctcaaaaggccttttttaggttctacaatagtgatattatttacaggagtaattggggaagttacaaatctgtgacttccagaataatgtctgattatcatttaactacctacattttagcagaattcagacccctctcataagcctaaccttatagtctttcattagttttgcaaaggtgatttagtttcgggaagggctattatcattcttgctttaagcttacactataaactaaatttctcccaaagttagcttgggctgcatccagaaatgaccaagggcagcttggaggttaaaggcaagatggagttgattaggtgagatctcttttacagtcatgattttcttactgttacaatctttgcaaaggtggtttcaatagttcctgctaataaatatgttcctaggtgattctacagagagcagattattccaaaaagagcatcatgatttacagacacttattctagctgaacttgtttttttgttttttttttttttaagagacaagtctctgggttagtgtggtggctcacacctgtaaatcccagcactttggaaggctgaggtgggagaattacttgagcccaggagttggagaccaacctgggcaacatagtgaaacagtgtctctatttaaataaaaaaaaaaagaggctggacacggtggctcaggcctgtaatcctagcactttgggaggccaaggcaggcaggtcacaaggacaggagttccaggccagcctggccaacatggtgaaactccgtctctactaaaaatacaaaaaatagctgggtgtggtggtgcacgcatgtagtcccagctactcgggaggctgaggcagaagaatcacttgaacccaggaggcggaggttgcattgagccgagattgtgtcactgcactccaacctgggtgacagagcaagactcagtctcaaaaaaaaacagagagagagagagagagacaatgtcttgctctgtcatgcaggctgaaatgcagtgttgggactttggctcactgcagccttgacctcctgggcttaagtgatcctcccacatcagcctctcgaatagctagggctatgggcatgctaccatgtccagctaattaaaaaaatttttttttgtagaaacagagtcttgctatgttgctcaggctggtctcagactcctagtctcaagtgaccctcctgcctcagcctcctacggtgctgggattataggcatgagcactgcgcctggcctcatcctaagcatgtttgagaagtgtggagaatagcagaaaaactgaagatagtgatacgtacagtaatagatgtatgtacagaattttacgacagcatagggcctaaggaagtttcagggaagccatctgggagaatgtaatacttgagcagaatttaaagaatgtgaatgccaggcgcggtggctcacgcttgtaacccagcactttgggaggccgaggcgggcggatcacaaggtcaggagatcgagaccgtcctggctaacatggtgaaaccccatctctactaaaaatacaaaaaattagccgggcgtggtggcggtcgcctgtagtcccagctactcaggaggctgaggcaggagaatggcgtgaacctgggaggcagagcttgcagtgagccgagatcacgccactacactccagcctgggcaactgagcgagactccgtctcaaaaaaaaaaaaaaaagaatgtgaagtctagggaatagcacataaaaaggcagggagacagaagagaacatggcactctggagttgctgcagaaatttcagagtggtaaaagggaaggatgtttgtgaatttggttaactagccaggagtctttaaggaaaggacataccatgatgccatgctaaggagtttggactttattttttgtttgtttgttggtttgttttgagacaggatctcactctgttgcccggtctagagtgcagtggctagatattggctcactgaaacctctgcctcctgcactcaagccatcctcctacctcagcctcccaagtagctgggactataggtgcatgccaccatgttcacctaatttttgtaatttttttaaagatgaggtttcactatgttgcccaggctgccctcgaactcctaagctcaagcaatccttggcctcccaatgtactgggatttacaggcatgagtcactacatcaggcctggactttattttgaagaaaggggagcaggtgctgaaattccagtagagaataacatgattttttttttagacagagtttcactgttattgcccaggctggaatgcaatggggtgaccttggctcactgcaacctccgcctcctgggttcaagcaattctcctgcctcagcctcccgagtagctgggattacaggcatgcgccaccatgcccagctaatgttttatgtttttagtagagatggggtttttccgtgtcggtaaagctggtctcgaactcctgacctcaggtaatccgcctgcctcggcctcccaaaatgctaggaggcgtgagccatcatgcccggccgagaataacatgattttttttagaaatttactttagtagaagttacactaccagaaatatagaagatgacacaaagtaggaaaaaatgagacaagaccagttggaaagctatagctaaaaaccaggagagaaatgataaggctttacttaagaagtaagggtagagagagacgatgaattttgaaaagcttgtaaaagataggctccaccggactacagtgtatggggggttgggagcacaggggtgaagaaaatggaagttttctggttggagtaactaggtgaatggtggtgccattaatgaagttaggaaattttggaggcagagcaggctgaagacattaataaaatgaatatcatttgaatatgcatacttcgaaggtcctgtgggaccactagatgtctatgcccaataaagtctgtactagaaacgcagatttaatagtcacagcaccataagcagagtgcatggttccttagaagaaagtttagcaaataataagccctatggtttccttagtgggagacaaacagccttcagaatatacaaaaatccctgcctttttggagctttattttagcagagaggggaacaaggggcacatgggcaatataaaatagtaaaatgtatggtatattaaatggtgaaagaagttctgtggagacagattaagcaaggaagtgggactgagtatcaaaatcaatttttagaaggtttgttaaagctgattagcggccccatacccagagtttctgattaagtaaattgggagtgggactagagaatttgcaagttcccatgtgatgctgatgttgctggtcttttttttttttttttttctggtgatgaagtctcgccctgtcacccagactggagtgcagtggcatgatctcggctcgctgcaatctctgcctcctgggttcaagcgtttctcctgcctcagcctcttgagtagctgggactacaggtatgtgccaccatgcccggctaattttttgtatttttagtagagatgaggtttcactgtgttagccaggatgatctcgatctcctgacttcgtgatccgcccacctcagccttccaaatgctgggattacagatgtgagccaccacacccagccaacacatttttaaaatcactaggatagagagttgccaaaggggtatgatgttgcacttttaaagaagatggttaaaatgggcctaagatggtgacatgagagtagactcaaaggaagtgagggagttggttgtgtgactatctggaggaagagttgatgcaaaagcccctggaatgtgcctggcatgtttaagggacggggcagagtgcatctgcagaaggttgaagccagagaggtatggggtctggattgtagaggacagtccatcagtcatccataggatttggatgtgttcagcatagaggtactatttcaagccttaagattgaatgagattgtcaaagaaagagcaaagcaatctcatgatttaaggcaaagtgtgataatcagctaagacactgagaactgggaagcctggatgattctgagacattttgaagcaaggaacaatagaacttagagcagaaagcaaatgactcagggaaaaacatcaaaggtgataccaggttttataacctaggagagaagaatgattgaaattgggataaaagggagacgaggagtaattaggaagaggatttgatttctgaaaatcaattataagcagtagttccctgtttatcctgttgccttgtgccaggtgcagtggctcacacctgtagtcccacagctttgggaggccaagccaggaggatatcttgaggtcaggactttgagaccagcctgggtaacagagtgagatcccatctcttaaaaaaaaaaaaaatagccaggcatggtgatgtgcctgtagtcctagctacttgggagactgaggtgggaggattgcttgaacccaggaatttaaagcttcaatgaaccatgatctcgccagtgcactgcagcctgggcgacagagcaagacttgtcaaataaataagtaaatagcagtttggtcttttgttggaggaacgtctattcttagcttggacactgcggtttttccttgggcagcagaagcaatgtggcgattgaagaagtgacctaaaactttgatgttaggtagaagcagatggcccaagccaagacaagtgcttgtaaatccactggtgggagcccctcctcctaacagcaggttattaacgctgccagaaaaaaagtgtcccctctaccggtctggtgaagaaacctcatcgctacgggcctgggactgtggcacttctagagattctcgttaccagaaattgacctagcttctcatctggaagctgcctttctagaggttggtgagagagatcacccaggatttcaaaaccaactttaggtttcagagcacagtcattggggtgctgcaggaggctagtgaagtgtacctggaggctagtgaagtgtacctggtgggttggtttgaagatgctaatttgtgtgccatctacggtaagagagttggctctcatgcccaaagacatccagttggctcgccagacacggagtgagcgagcttaagtgaaggcagattttaaggcattttatatgaattctgtaaaatactttggtttaatttgtgactttttggggagaaattatttataatatgttgcatttgtgcttaagtcattccgtcttttgggatgaatgtgaaaagtgactgttcatagacctcagtgacgtaagcactgttgctcaggagtgacaagttgctaatacgcagaagggatgggtgacattttttcattctcatgacgcatgtttctgtaagttaatgacttgttaggtagctattaaggaactagagttgataaataaatgtgtataggttccttttgcaatataactggttattacttgatccaagtgtttaacatttggagctaagtctgaccatacattactgtgatagaatgtgggccttttcaagggtgaagatacaagccttaaccacagtataacttgcagtttccttaaacaaacaaagaaataaaaacctagcatggagtacattatgtgcatttataatagctattttaaatattgtagtgtcaacattcaaaaattaattcttttacattcgcaaatggtggggagtcttgtcattaaggtgtgtataacttagaatccacttggttttctcctaactggactgcatttgttttcatagtagtaaaatgttatgtgtattacaccttgcataagtcctcattctactacgtgttaactaaccctctagatgataatgcagatgctaactgtgggattttatttataagaactctagaataaataccagttattcctaccaacatcggctgttactaatattctgaagtagttagtgcaacttttcattgtgttgtggttggtctcctaagtaggttggatttttctcctcttctaagagaaaacaatagtgaaattattttctttctcttttctctctgtttctgtctctttctctctctctttctcccttcccttcccttccctcccctcccctcccctcttcttttcttttctttctcttctcttctcttttctttctttcatggggtcccttgctcaacctgttgcccaggctggagtgcaatgacatgatcatggctcagtgcagcctcaacttcctggactcaagcaatccacctgcatcagcctccaaaatggcacatgctaccatgcccagctattttatttttacttttagtacagatgtggtcttgctatgttgcccaggctggtcttgagccattgagctcaagtgatcctcctgctttggcctcctaaagtgctgggattacaggcatgagccaccgtgtcttgaggggtttgtttctattaaaagacttggtgtcagggaggagcacaaagctttaacccattgaacctctgacagttaagatggtgttgggttaggttacatctggttactatcctgggaaaatcacttctatagagatggccttccaagtggttttaaaatgtatctttctgtctgggcgcggtggctcacgcctgtaatccctgcactttgggaggccaaggcaggtggattgcttgaggtcaggagtttgagaccagcatggccaacattttgtatttttgtattttctctactaaaaatacaaaaattaaccaggcatggtggtgggtgcttataattccagctacttaggaacctgaggcaggagaatcacttgaaccctgtagatggaggttgcagtgagccgagatggccccactgtactgcagcctggatgacagagcgagactccatctcaaaataaattaaaaaaatgtatccttctattgaagtttttaggttaatcatgtatatgttgactaaattatgaattaacttgtttatcaaaaaaaaagtaaaaagtaaagtaagtaaaagtaaagtaaaataaataaaatcaaccttataattcactttttcttaaactgtttcagggaaaaaagtataaatgtttacattaatatttttaaccaatcttgtaaaacaatttctgaatactaacatcctagcattctaaaagtatttaaaactattgttttttaaaataggaaaacggacgatgtattactaagctggaaaacatggggtttcgagtgggacaaggattgatagaaaggtgagcaggttggatttgaaaattttcttgcaggtaggttataaacaaaggtgatctatttcaaaagattgcataaaacttgggatattttaattttaattcctgaatgttattctctttacttcaaaaattaaaatttctttttagatccaatgccatttaactcatttattcaaattttattttaatgtttaaagaaaatatatattttatatattttagactttcttcctgaagctattttagactttattcctgaagctattgaagcaactatctaaaatcttactgcattttcaacttaagatctgctaggttctttaacctgcatagaatttttaagtacataggtttgaaataactatagtctatgtttatgcgtgtaattatctttgaacttataaatcagttctttttagtatttctttctcactacctgaatagttaaactcggagtatattttatataacaatgtcatgataatgctcagctctttgttcttttgtggttttttgatgtgctagaatgcattgcacctgaaattttggctataatgttagactaatttgaggcctcataatttatataacataatgtgaatccattgagataggatcatgttacctggtgcttatgactttattagtgttaataaatgttcagccaggtgtggtggctcatgcctgtaatcccagcactttgtgaggccaaggtgggagaatctcttgagctcaggagtttgagaccagccagggtaacaaagtggaaccctgtctctacaaagatatacagattagctgagcatggtgacatgtgcctgtggtctcagctgctagggaggctgaggtgggaggatagcttgagcctgggagggaggtagacgttgcaatgagccgagattatgctattgcactctaacctgggcgacagagccagaatctgtctcaaaaaaaaaattaaaattaaaaaacccaataaatgttcagtgctgttctggcatttggaaattagttaataattagtccctcttgctttttttggaggagaaatactgtattacttctagttgatctttttaggtttacaaaagatactgcaaggttcaaggatgagttagatatcatgaagttcatttgtaaagatttttggactacggtattcaagaaacaaatcgacaatctaaggacaaatcatcaggtaattaaattaattaaggcctatattttaaagtcctttaacttgatataaatatcgtattttagtgacttatttaaaacctaaaataatttctggttaactttggaatatgtttatgttattaatgagttattagtttttttcttctaatagtgtgaactgagtaaagacaaagggacagttatcagtaatgatagctgttcctttcacccaattatatgctatgttaagttttttaaagtagcataagtcaggatgagaatagcttttactatttggttccttagttactgttaattagtggtaataatatgcagaaccacaaatatatcacctttatgtctttagagtcatttcttttttttgaagaagaagaatttggattattttaattatttttatatacagaaaactcaacagtgtatgtttaacccagtttggtgtcaagttctttagcctttgccttttcctgcttgacaattcaagccacagacttgagacccaggacattgcctccccagtgacagtggatttcgttttgtctgtcgtaattggttctgatagcttccaccagctgaacctaagctccattgtcctctgagttaatctgtgtaaaggcgacagtggtgcgggtcttcttgtggattagacatcccagtcttgccttccccttgataatgcggtaagggacccccattttatgacacaaggcaggcaggaagacagccacctcgatgggatccacatagtgtgcagtcaccaccagctgagccttcttgttctcctccaaggtggagatggtgttaactcctgctcggaggacaagtggtctcttagtggggacatcccctttgcctgcagctttcttttcagcccgggccaatagcctctgcttattttcttgctttgtctttggtctgtacttgtgggccagcttaagcagctaagtagctatttggcggtgcagggcctgggtgaactggttaattgtaggaggcactttcagctgcttacagaggatggctttgtgccactgcaacctgatatagcggggccatttcacaaagtgagtgaggtccatattgggtggatgtcctgtccaatgccagaattcttaggccttttctcaaacaggggattcaccactttctttctttcttttttttttttttttttttgagatggagtcttgctgtgttgcccaggctagagtgcaatggtgcgatctcggctcaccacaacctccgcctcctgggttcaagccattctgcctcaggctcccaggtagctgggactacaggcatgtgccaccactccggctaatttttgtatttttagtagaggtggggtttcaccatgctggccaggctggtctcgaactcctgacctcaagtgatccgcttgtctcggcctcccaatgtgctgggagtacagacgtgagccaccacgcccaaccaggattcaccactttcttggcctcctgtttcttcatgacaccaagggccagagccacctccttcctcttggcctttccttttggcatcttgggtggcaggaagagattctttatagtcatttctaaagtctaatttatagagcattttactcttaaataactcctggattattactgctgtcatattttctactcttaaaagattttcttactacaaaattaatagattacatagaaaactatgtatttattaaaattttaaaagggagacagagtctcgctttgttgcccagactagtcttgagctcctggactcaagtaattctttggcctcagcctcttgcatagctgggattataggcatgcaccaccactcccagcttcattagattttattttatgaacttcaaggaaatacttagagtagatttggaattttgattaagtaaaaaattaaatgtatctggtactctcaataggataattcatttatttatttatttttaattagagacagtgtctcactatgttttccagactggtctcaaactcttgggctcaatggatcctcccgccttggcctcccagagttctgggattacaggtgtgagccactgtgcctggcctggaattcattttgtaccaactttagcttggaattactggaaatgctaataggaagaaatgactatgatttttttactctctagacatgatttactaatatatatcagctggctggacatggtggctcatgcttagaattgcagcattttgggaggctgaggcagaaggattgcttgagctcaggagttggagaccagcctgagcaacatacttagaacctatttctacaaaaaacttgaaaaaaatttcaccaggcatattggtatgtgcctgaggtttcagctacatgggaggagttcaaggatacagtgaaatactacacttttgcctggataacagcaaaattctgtctcttaaaaaaataaagctgggcgcggtggctcacccctgtaatcccagcactttgggaggccgaggtgggcagatcacctgaggtcaggagttcgagaccagcctggccaacgtggtgaaaccctgtctctactaaaaatacaaaaattagccaggcatattggcgcacgcttatagtcccagccactcaggaggctgaggaaggagaattgcttgaacccgggaggcagaggttgcagtgagcctagatcacaccactgcactccagcctgggcgacagagcaagactctgtctcaaataaacaaataaatccgggtgcggtggctcacgcctataatcccagcacttcaggaggccaaggcgggtggatcacctgaggttgggagttcaagaccagccctgccaacatggagaaaccccgtctctactaaaaatacaaaattagctgggcgtagtggcgcatgcctgtaatcccagctacttgggaggctgaggcaggagaatcacttgaacccaggaggcggaggttgtggtgagctgagatcgagccattgcactccagcctgggcaacaagagtgaaactctgtctcaaaaaaataaataaataaaaataaaaattaggtcgggtgtggtgatcatacatgtaatttcagcactttgggaggctgaggcaggaggattacttgagccctggagttccagaccagcctaggcaacatagggagaccccctttctacaaaaaattaataaaactagccgggtgtggtggcatgtgtctgtggtcccagctactcggaaggctgaggcaagagaattgctaaacacccaggtgtttgagggtgcagtgagctgtgattgcaccaccacactccagcctagacaacagagtgagagctcatgtctaaataaataactatacaaacaaacagcttatttcatgtggacatgtattaatgattccatcgtactagactatgagtttttaaggatagggactatgtctcagacagtgtttttatcttcagtgtataaaaccgttcggtatacattagtgttgtgaaaatactgaactcgcaactcttcagcttgaacattgcaaaactccttcatttaaacaaaatttgaccaggctgggcacgtgggcttatgcctgtaatcccagcacttcgggaggtcaaggtgggcagattgcttgagcccaggagtttgagaccagcctgggcaacatggcgaaaccccatctgtacaagaaatataaaaattagcagggcatggtgatgcacgcctgtagtcccagctacttgggagcctgcggtgggaggattgattgagtctgggagttggaggctgcagtgaggcgtaattgtgccactgcattctaccctgggcgacagaggagaccccgtctcaaagaacagaaaaagaaaacttggccaatgggaaggagacttttaataactttaaaaaacacttaaattgtttcataagaataaaataattttaaggactgctaggtacattgactttggattttttttctatttttggaacagggcatctatgtacttcaggacaacaaatttcgcctgcttactcagatgtctgcaggaaaacagtatttagaacatgcatctaaggtatttaatggaatagaagttggggtttttgttaatagtaggactacagggaaaagtacagtgctaatcataacaaactattgaattaaaaatatgttttaaggtgttcttttttgtttaaagagttttctatgaaatgagagacatgttacaataacactaaactgtagctaaatagtcatagagtgaccaattaaagaaacactggccgggcgctatggctcacgcctgtaatcccagcactttgggaggccaaggcaggtggattacctgaggtcaagagttcaagaccagcttggccagcatggggaaaccctttctctactaaaaatatgaaaaatagctggacgttctggcgagcgcctgcaatcccagctattcgggaggctgaggcaggagaatcacttgaacccgggaggcagaagttgcagtgagctgagatcgtgctatcattgcactccagcctggggtataagagcaaaactccatctcaaaaaaaaaaaaaaagaaaaaaaagaaacactataactaaatgacagtgaaatgtagatgtatggtagatcactttttttttttttttaagacaaggtcttgctctgtcatctaggctggagtgtagtggtacaatcatggcctatcttgaccttgacccccccgggctcaagtgatcctcccacttcagtcacccaaggaggtaggactgcaggtgtgggccaccatgcctggctaatttttaaaaaaattttttagagatgggatcccacgatgttgcccaggctcgtcttgaactcctgggctcaagtgatcacctcacctcggcctcccagtgtgttgggattacaggtgtgagccactgcatccggcctgattgcctattttctatatttttggggtatccaggctctaattacatttttatggttaatgtgtatattttctctcttttttttttttttcggacagagtgtgagactcactgcaacctctgcctcctgggttcaagtgattctcctgcctcagcctcctgagtagctgggattacaggtgtgcgccaccatgcctggctaattttttgtatctttagtagagacagggtttcaccatgttggcgaggctagtctcaaactcctgacctcgtgatccacccacctcagcctcccaaagtgctcggattacagacgtgattacaaaagccacccaaaatgctgggattacagcctcccaaagtgctgggattacagacgtgattacaaaagccacccaaaatgctgggattacagcctcccaaagtgctgggattataggccatgcctggcatattttctcttttttactaacttcttagtttaatatttctggttctcacttaactttttgggatcttggtttcttcagctgtgaaaagagtaagttggaccaattcagtgatttctaactattttgagttatggacatctttgagaactggaacacctttccccataaatacgcacatatacatggtttttattttcataggggtcacaaattccccgattaagaactcttgggatgaacaatctctaaggcctcttccagcttaaaatttcatgactcagatctagttacttattagtgcccatttatgtatattatttataagataatattttatattattcgtagataatgtagtatgttgaacatcatgcagtatagatgtgggtaatcaaaaattccctgaattgctaatttttcaatccagttcttgtcatgacttttggttttgtagctcagccctattccctttctttgtttctatatgacagggtttctcaacgtccaaactgttgatactttcaaccagataattctttgttgtggcaagctataagtcttgaacaagtcaagattcttggttgtaaataggggaaagaaattctgcttgtaagctaacaaaattgataagctcaaagaataggcaataaccaggggaggttaaggcagccagtaagatagccaagtcactctgcagactgtatctacttagaatcctgcaggcagcagggactgtagacacaaactacctttactgcctccagaactaattctgatcagtttctggcttgtttttgtcactgagtctagattcacagtcctggactggagtacttaattggctgagcttaagtcttaagtcctacgtccatgctttagtttccagggagctgggaaatatatcaatatttttcagtaatttgaacagttcttcaaaatcctttttttaaacaggaatgacttactgatgataaatcatgtaatgttgtatttatcaatagctttactattttagtaaatccttactatttttaatgattttttttccttttagtatttagcatttacgtgtggcttaatcagaggtggcttatcaaacttgggaataaaaagtattgtaacagctgaagtgtcttcaatgcctgcttgtaagttgaattcgcctttcttacaaatgttttagtaatttgttttcaggtctgtttttttttttaatttaactgagaggaaatttaaaatgctgaaactttcattttagttttatcaatgtaacactttagtgtagtaatatgtagcatactacattcattttcagtaatttttgaataatggactaaaatccaaatttataagacaatttaagggatgatttttaacttttctaaagttattcaaactgtaacttttttaaagatattcttctgaatatctcctgcagtgttttaagatagcaaatttccctagaacattgaaaatgctattttttttttttttttttttttttgagacggagtctcgctctgttgcccaggctggagtgcagtggcacaatctcggctcactgcaagctccacctcccgggttcacgccattctcctgcctcaacctcccgagtagctgggactacagttgcctgccaccacgcccagctaattttttgtatttttagtagagatgggtttcaccgtgttagccaggatggtctccatctcctgaccttgtgatccgtctgcctcggcctcccaaagtgctgggattacaggcatgaaccaccgcgcccggcccgaaaatgctatttttaaacaattgtttaggatatgtctattatatcaagctaagtaaaaccaaatattcttttatcactaaatgtctccctaaagatcttttcaccagagctaccaaccaagaaaaaatggacttgagctttattgtatttcttttcaatttacaatgatcattagccatgaaatactgtacccaaatgtaggattcataaagagaaacaaaagtgcttactcaacaaaccatataatcatcccataaaaatagaattgactggccgggtgtggtgcctcacacctgtaagctcagcactttgggaggccgaggtgggcgtatcatgaggtcaggagtttgagaccagcctggccaataaggtgaaaccctgtctctactaaaaatacaaaaattagctgggcgtggtgacagacgcctgtagtcccagctactcaggaggctgaggcaggagaatcacttgaacccaggaggtggaggttgcagtgagcagagatcgtgccactgcactccagcctgggcaacagagcaagactccatctcaaaaaaaaagaaaaaatagaattgactttattgaatattatgaagaatgcgaaaaagtttttgacatagcagatttcttgactgaaactatttcctatatggaacagaaaattgatgtttagacttgttttctttgtatctaaaatcaaagaattatttgtatttttttttttaggcaaatttcaggtgatgatacagaagctgtagaacatactgaaatgcaaggcttcaacagtgtaaagagataaattattcatgtaaaagtatttcaagtagtgatgatttaattacattgttcgatgtttgtacaggagtaagcatgtatttttatcaatttaacacagatcaaaggagatgaagggacattctgccatgacatacacttaaccaaaactattcaaaatgaaaaccggatttcaaataaccagacaccaagatgcagggcccttattttaaacctttttatttggttagagtgatatgtatttagccatagatggagaaacaaagctcagggtttgttgaattagcatgagagaaaattatgtaccaacagaattatttgtgagaagaatgaacaaattttgataaagtatgaatttgttttattttaaaaagcaaacatactaaattttttttattttattgcttataatttattaagaatgtttacacctgtataaggatttcatatatacattgtatgtgtgtatatataaatacatatatgactgcctaaattgtttataaatttaatttttctttaataggtttcattccttcagagctccattaatgtaatcaaaatgaaatatagattagtttaaatgtgaattcagtgactctagggccaaagaatattaggtatgtttggaaagaatttttgtatttattcctgttacagttttgactttcaacttctctccccgtgcatggaagtcctggtaaaggatctaacatctttattcccttctttcctcttccagctgagcagagttggataattgaattagtcattctgacattctttggaccatatcatcttagtggtttggggtcagtgctcatctgatatatctttcttaccacctcttctacttactttctcttacttaaattatctggcataagcagttatctccagcttttgttagaatcttgcatgttgattactaaaactatactttgtttcccatttatttattacccttttgcatgtatttgtgtgacagggaactctgcagcagggggtgactgacacaccaaacaagatgtttcactgggtactctgccatagaaatggcagattaagaagattgactataccaaacattatattaaaaacacaaaataaaaactataaaaatgtactttaggacattaaagaaaactcaagttagaagcataccattttcctttcatggaagggtacagtattacaaagataatttgtttaacttgatttattaaattctagttatgtgccctataatgatgtttcagtcagtgacagacctcatatatggcagtggttccataagattacaatactgtatttttactgtaccttctttatgtttagatatgcaagtacttaccattgtgttacagtgtcctacagtattcactacaataatatgctgtacaggtttgtagcctaggagcaataggccatagcttaggtgtatagtagatcataccatctaggtttgtgtaagtacactctgtgattgtacaattttaaaatctcctaatgatgatgcatttctcagaatgtatcccctttgctaagcaatgcatgactgcaatcctaattctcacatgttttggggaaaaaattttaattttgaaaaaatttaggaaagttcctaccaaatatacatgtataaagtttattaaaagtcataatgacccaggaatagctaatgacacagaagtagatcaaaatagaacacaatagagaacttcaaaataaaacaggtgtgagaattgtgtgtgtgaaaaagctgggttcaaataagttggtttgttagacattcatatgcctacccatcagccatttcgttctcccttccttgctgacaaagccccattttttttttctttttttttggcctaaaactctgtatggctgccttgtgctatagaatagggtgcttccctagcctagagagggtgagtgttgattagattctgtgccaatcatggtaattggcttacttgatcatttgatggaatctaggctaacgagacaaaggaagtctgaaggctttgaataagaaattttctgttgctcttaacaattgatacaagttagggatttgccagcatccctcttctgcttctcagtgaagatatgtgatatggatgtttgaagctaatctgcaacagccttctgatggccatgaaaggacaagtatggagatgaaagctatcacactgagaatagtgggatgtagatagaaagcacctgaattgtgcttctgaattaaccaatccaggaactgctttacctttggactttttgttatgtgagatattctttatattgttccatttgctttgggtatatgtatattgttacttgtagccaaaaagaaacctctcttagtagaaacaaagggagagttaggttattcaaaaattagtatgggacaattgaatatgcctttttctgcgggagtaggtggggagaaacttaaaggttcacttgtaaaacaataaagtactaaagaaaatgtgataa

SEQ ID NO: 1286 - DNA, 67556 bp, Homo sapiens
cttgcggggcggtgcaagctggcggaacccgcgtgagagaggttggtgttgcgaagggaactagtccggtgcaggacgtggggcttttgcagctcagctggttccggctggggaagatggcggtggctggggcggtgtccggggagccgctggtgcactggtgcacccagcagttgcggaagactttcggcctggatgtcagcgaggagatcattcagtgagaacagttcgggtccaagcggggaaggagctctgggatgtgcactgcctgagcgaaccgggaagcggggaggactgaaaagttaagagagaaatgtgataaaggggctgcagtctgtagtctgtaggcgtcgaattttggcctccacctttgtagtttagtttctggaatagggtgtccggctccacagtctgccggtcgggcttttttcctgggaagacgcccaatctgtaataattagaaatgcaaggctgtcccaggagccagtttcctttctagagagaaggggcaggtcaaactgtatttcctaactttgaaccccttactcttttatttatttattattattgttgttattattgagacggagtctctgtcgcccaggctggcgtgcggtggcgcgatcttggctcactgcaacctccgccttccgggttcaggtgattcacctgcctgagcctcccaagtagctgggattacaggcacgcaccaccacacccggctaatttttaaaaatttttagtagagtcagtgtttcaccatgttggccaggctagtctccagctcctgatctcaagtgatccgcccgcctcgacctcccaaagtgctgggattacaggcatgagccaccgcacccagatatactctgaacattttagtcggcccaatctgagttgtgtcagtagagccaacagggtcagctgtgtcaataggacctagaatttaagtggaagcagcgtggtagagtacaaatagcttctgactctggagtctcaggttctatattctgttgtcgtttacctgttttagaacccaggacaacttaatttttctctctgtaccctggtttcttcatttataagattaatcattagtagagcttatcatgctttatgactcctatgaaatggagatggtgtacatgacttaatatctactttcaactgattgaagaacatttgttgcgctgctgttacacgccaggtgctggggtaacaaagacaagacagttgggttccccttcgttgatgagtgctgaggttggggaaatgaaggggcttgttggagcacaaaataaaggattctcattaagatttgaaaaactcggaaggtttattggaaaggataactttcacccgagaactaaggaatagacagaggtggcggtccaaagtgttcaggcaggggagaaaactacaaaaatgggacttgatcgaagaactgaaagtgttccttcatttgattccttggtcactgatgttgaaacctaaattgctgttctagggcttttgtaggaagtaagatgagtttctgagtttcggagaaaatagacttttggcaaggagacagttcaagtaggttattttaatggatttttttgaggccctaggagatggctcaagcccttattcccagcactttgggaggtagaggtgggaggattgcttgagactgggagttggagaccaccctgggcaacatagtgagaccctgtctctacagaaataaaaaaagtaaacaacaagataaaggattttttttaacactagaatagacaacaaaacaaaacagcgaaatcttatggtttggctttacccttgcttgaacgcagtcagattaagtatttagtagttttcaaacattttttaaagcagtggaatgctatcaaatgaaataatgaaactttgcaatatataaaacagaaaagtgttttttacgaatataagttcaaaattttcacttttttttttttttttttttgagacagattctgttgcccaggctggagtgcagtggtgcgatctcagctcgctgcaacctccgcctcccacgttcaagcgattctctttcctcagcccgagcagctgggattacaggcgcgcaccaccatgcctggctaatttttgtattcttactagagatggggtttcaccatgttgaccagggtggtctcgaactcctgacctcagatgatccaaccgcctcagcctcccaaagtgctgggattacaggcatgagccaccacgcctggcccaattttcacatatttattgtaaatatgtgtaatatattaaatatcaaatatattaaatattaaatatatcaaatattatattaaatatattaaatattaaatatatcaaatattatattaaatatattaaatatgtgtattatattaaatacagtattaaaaaaaaaagattgaggtggccaggcgcagtggttcatgtgtgtaatctaagcactttgggaggccgaggcagatggatcatttgaggtcaggaatttcagaccagcctggccaacatggcgaaacccccactctactaaaaatacaaaacttagtcgggtgtggtggagcgtgcaggtcatctcagttactcggaaggctgaggcaggagaatcccttgaaccgcggggcagaggttgcagtgagctgataccgcaccactgcactccatcctgggtgacagagtgagacctcgtctcaaaaaaaaaaaggaaaaaagaaagattgaggctatttttgataaattaacaatttgaaatagggtaagaatgatagatgtagtcttctcagtctagaatccagttgtattttgtttggattacacagtatcaagaaaatgcgttctcaggccaggcgtggtggctcacgcctgtaatcctagcactttaggaggccaaggcaggtggaccacctgaggtcaggagttcgagaccagcctggccaacatggtgaaaccccgtctctactaaaaatacaaaaaaaaattagccaggtatggtgacgggcacctgtaatcccagctactcgggaggctgaggcaggagaatcgcttgaacccaggaggcagaggttgcagtgagccaatatctcaccactgcactccagcctgggcgacagagcgagactccgtctcaaaaaaaaaaaaaaattatattccgcctgggaaggaggtcagtgcccgtcggcatgtattacgctaagatactatttgaagcatttgttaggtattcactagtattccacaacaggctattatgccatgatgaaagcatttgctgtgccttgcctggcatttaattgagaattacccaggtgtatgtactacagtaatgtactaacttgaacaattttatatgagtggactgaatttttgaaatagcacagagctattaacttttttttttttcttttttgagacggagtctcactctgtcgcccaggctggagtgcagtggcaggatctcggctcactgcaacctccacctcccaggttcaagcaattctcctgcctcagcctccccagtagcttggactacaggcgcgtgacaccatgcccagctaatttttgtatttttagtggagatgggattccaccaggttggccaggatggtctcggtctcctgacctcgtggtctgcccgcctcagcctcccaaagtgctgggattacaggtgtgagccactgcacccggccttaactttctaattagtgatacatttataagacataaatagctatccacagagttaacaaaataaactttggtccacaatctggatgagttcatattattttgataagatttggtatataacatatttggatgaatgttgttctttattataccttgttaagtagttaaaatgacatttattcaaatggttctgaaactctcttccctggttgtttgaaaaatactccagggttggccaggtgcagtggctcaacctgtaatcccagcactttgggaggctgaggtgggttgatcacttgaggtcaggagttcaagaccagcctgcccaacatggcaaaaccttgtctctactaaaaattcaaaaaattagccgggcgcagtggtgcacgcctgcaatcccagctactcaggaggctgaggcaggagaatttcttgaacctaggagccagaggttgcagtgagccaagatagcaccactgcactccagcctgggtgacagagtgagactctgtctcaaaaaaaaaaaaaaaaaaaaaaaagccaggtgcagcggctcagcctgtaattccagcactttggaaggctgaggcgggcaaatcacttgaggtcaggacttcgagaccagcctggccaacatagtgaaaccccgtctctactaaaaaaaagcaaaaacaaaacaaaacaaaacaaaaattagccgggtgtggttgtgcacgcctgtaatcccagctactcaggaggctgaggtaggagaatcgcttgaacctgggagatggagtttgcagtgagctgagatcgcaccactgcactccagcctgggagactaaatgagactctgtctgaaaaaacaaaaaaaccctccagggttaaatgatcccttgggattccttacagttttgcaagtctttgatagcagttaatcttttggtggggactggtaagtttggggatcaagatgattaaaatgtgtaagtcctgaaaaaccattgtcttttctaatccatagtaattagaagatgcctgtttttggggggtgtgtgtatgtgtgtgtgtatttttagtagagacggtttcaccatgttggccaagctggtctctaactcctgacctcaggtgatccacccgcctcagcctcccaaagtgctgggagccatcatgccccaccgtttttgcttgtttgagacagagtctcattctgttgctcaggctggaatgtagtggtgcaatcatggctctgcagccttcacctctgagactcaaaggatccttccacctcagcctcccaagtagctaggactacaggaacatgcctccatgcctggctaattttaatttttcttctagagacaaggtctccctatgttgcccaggctggtctcaaactcctgggcccaagtgatcctccagcttcagcctcccaaattgttgggattacaggcatgggctcccgaacccagacagaatattctcttagtgaggcccaaaggcacaaatttgtttacctctagagcataattctgcaattccaccattacactgtgaaaagaatgcagtacatacgataccaatcataggacaatttcataatttttaaaaagttaaaggatatagcactatggtaataatttttcttgcattccatatcattgtgtctgaattacagtttctgtgctgttttcagtgtcttgtatgttaattttttttttttttttttttgagaggaagtctcacttgcccaggctggagtgcagtggcacgatctcagctcactgcaagctctgtctcctgggttcacaccattctcctgcctcagcctcccgagtagctgggactacaggcgcctgctaccatacccgcctaatttttttttgttttttttttttagtagagacagggtttcaccgtgttagccaggatggtctcgatctcctgacctggtgatccgcccgcctcggcctcccaaagtgctgggattacaggtgtgagccaccgcgcccggccgcttatgtgttaatttataagtaatttttatcacttctttctcttgtaatgataagatgttcactgtagaaaactaaaaaaatcagaaaaggataaaaaagtaaactaaaattaccataatactacaacccagaaataagcactgtttctttctcttttttcccatatatattataatgtaatacattttaaaaacgtatttattgtaggaaaaaagaaaataaaaataaaactacctttaattccatcactcactagtaatcgttttggtgtataacgttgtttttttcctacacataagtgtatgtatgtatacattcataccagttaggatcgtatcgtatttctagcacctagcatagtacttggctcaaagtaaacactctaatagattaatgaatggtttttactacctagatctctgttaagattactgagaaacagtgtaagttagtcttgtttcaacaacttatatctttgcctcctgaggtacgttttgtcaattgagagtgctgaagagatacgagaatatgttactgatctcctccagggaaatgaaggcaaaaaaggtcaattcatagaagaacttataaccaaatggcaaaagaatgatcaggagttgatttcggatcctttgcagcagtgcttcaaaaaagatggtaagttaatgtaattatgcaaatgttgaaatattggtaagtgggcaggcttaaagaattattattattatttttttttttgccatcttgtgtttcttcacagctaacttaaacagagtcatatgtatacatatttttagttcggttctactcaatccgtaatgaatattgctctagttctttttcaacttagaaaatatcacaaaaaggccgggcgtggtggctcacgcctgtaatcccagcactttgggaggctgaggtgggcggatcacgtggtcaggagatcgagaccatcgtggctaacacggtgaaaccccatctctactaaaaatacaaaaagttagccaggcatggaggcaggcgcctgtagtcccagctactcaggaggctgaggcaggagaatggcgtgaacctgggaggtggagcttgcagtgagctgagatagcaccactgcactccagcctgggcgacagagcgagactccatctcaaaaaaaaaaaaaaaaaaggaaaatatcacaaaaaaatgtgtgtttacagacacaaatgtggcttcagaataatttgaaaaatttatacataaagaaacatttttcagtcgtgcatacctggatgtaagtaaagtgttgattgactatagtatgaatagcatttagagataactgcttaaatagtacaaaagataagcaccaaactaaataatctaagttattatgcaatctacaatatcagaattttgtttgttttgagacatggtctcactttcattgcccaggctggagtgatgtggcttgatcctagctcactgcagcctctgcttcctgggctcagatgattctcccacctcagcctcctgagtagctgggactacaggcgtgtgttaccacacctggctaatttttgtatttttttctagagatagggtctcactctgttgtccagggtgctctcaaactccttggttcaaacggtccacctgtctcggcctctcaaagtgctgggattatgcatgtgagccactaagcctgattttagaatatcagattttaatttaacttcttagtcccagccacttgtttgacttctttttcattgactgcactcttggaaatgatgatttaaatttaattctggtttgacaggaaaagataattaaaaatcttcctgatgatatcttgactctaaatattaagcatcaccttagtttattagctatattagttcaccaggaatcctcttatcaatctgtgtgtgtgtgtatttttttttttctatctttaaagaaattttagatgggcagaaatcaggcgaccatctaaagcggggtaggaagaaagggagaaacagacaggaagttcctgcatttactgaacctgacacgactgcagaggttaaaacaccttttgatttggccaaggtgagtgcttatagattgaagctttttctgactattggagaagaggaagtgactaatacatttcagagagcaaagtgtacaaattggtctagaatggcaatttttcaacaaatgcatgaattttaggtagaaaaagttacatatactcctttctatatggtagattttttgtttggcaacctgattagtattataaagacatctttgcttttttttttttttttccccaagacagagtcttgctctgtttccagtctggagtgcagtggtgcgatctctgctcattgcaacctccgcttcctgggttcaagtgattctcctgcatcagtctcccgaatagctgggactacaggcatgcgccaccatacccagctaattttcttttttttttttttgagacagagtctcgctctgtcgcccaggctggaatgcagtggtgtaatctcagctcaccacaacctctgcctcctgggttcaagcgattctcctgcctcagcctcccaagtagctgggactgcatgcgcacactgccacgcccagctaatttttcgtattttagtagagatggggtttcaccgagttgcccaagctggtcttgagctgctgagctcaggcaatccacccaccttggcctcccaaagtgctaggattacaggcgtgagccaccgcgcccagccctgtttttgaactttaaattaatggagctaaatagtgtgtactcttgtatctagctgcttttttttttttttttttttttttttttgagacggagtcttgctctgtcacccaggctggagtgcagtggcgcaatcttggcccactgcaacctctgcctccctggttcaaacgattctcctgcctcagtctcccaagtagctgtgattacaggcacacatgctaccacacccagctaatttttgtatttttagtagagatggggtttcaccatgttggccaggctggtcttgaactcctgacctcaagcaatctgcctgccttggcttctcaaagtgctgggattacaggcatgagcaactgtgcccagccagtgtctagcttctttcaatttatgagattcatctctactctgggcagctatactttctcattctcattgctacacagaattgtattaagtgaacacatcacaatttatccattctattatttggatagtttccaattccaatgcaacagtgaacattcttgtatgtatttttggtgaacatatttacacatttctgtttagtatatatctaggagttgaattgctgtgtcatagaacatgcatatgttcaacttcagttgatatgagtttgcagtcctgccagcagtgtatgagaggtctaattcttttgtatctttgctaacacttcatattttctctttttcagtttagccattctggttggtatttagtggtattgcattttgttttcgtttttgcattattttgacgactaatgaaattgagcactttttcatatgcctgttagtcattaggatatcttttgttatgaagttcttattaggttttttttgccctttttttgtttgagataggatctcgctctgttgcccagtggcgtcaactcgactaactgcaacctccaccttctgtttttctattgtattatctgtccttttcttagtggtttctgattaagtcaactttatatttatttttcctattttattgatggcccatatttccaaatctgtgaatatcatctgcttttagaggcattcttgtttcttatgatctccaatttagctgtgcttaaagatgtcatataaacagatttaactgctacatttaccctccactagctatagtaatgggctgaaagctactagcagaaaagacaaggtaattatcagctagtttttctagagtataacctttcctcagaaccttgattataactaatttgtatttcttcctttcactgccttctttcttggttcttggatagtatataagttgttactgaacagaacggagcattttctcccttgactttttacattgtcattaattatttgatgttattttgatgtctttgtacgataggcacaagagaacagcaactccgtaaagaagaagacaaagtttgtcaatttatacacaagagagggacaggacaggcttgcagtcctgctccctggtcgtcacccttgtgattgcctgggccagaagcacaagctcatcaataactgtctgatctgtgggcgcattgtctgtgaacaagaaggctcaggcccttgcttattctgtggcactctggtaaattatttcttttctattttattttactgtgctttgtgttaatacgcagagccagtcagatctcaagtaatttctctttttttgtttttttttggttgagacggagtctcactttgtcgcccaggctggagtgcagtggcacgatctcggctcgctgcaggctctgcctcccgggttcatgccattctcctgcctcagcctcccgagcagctggaactacaggtgcctgccaccacgcccagctaatttttttgtatttttattagagacgggattttacagtgttagccaggatggtctcgatctcctgaccttgtgatccgcccacctcggcctctcaaagttctgggattacaggcgtcagccaccgtgcctggctttctctttttcttagtaaatttcttccctaaaatatccagtgaactcgagtgtcagggatatgattagttagaaacccaaggttaggccaggcacagtggcacacgcctgtagtcccaacactttgggaagccaaggtgggttttgggaggctgaggtgggaggatcacctgagcccaggagtttgagaccagcctgggcaatgtaggaagaccctgtctctacaaaaaaaaaaaaaaaaaaaaaaaaaagtttttaattagctgggctgggtatggtggtgcacacctgtggtagcatttacatgaggggctgaaatgggagcttcacttgatcccaggacgtccaggctgcagtgagacagcgagtccttatctcagaagaaagaaagaaccccaggttatatcctagtactgaggccattaatgagaagggtttgagaacatacattgttgagagatccaagggctaggagccactgtgacagaatcctcagatcattatagcttctatttccaggattccaccttgtcatagctctgctttgtctgagagaatgacctcaagaatgcagtgataatgactcacagaaacccttaatgagctatctagaaagctaattttaccaagttgagctggctgtcagaagcaatgacatttggtgttggtaaaggcatccgttttatattacttcattttctcctcttttctgatggggcccttaattttttcttttttccttttttttttttttttttttttttttttgagacggagtctcactctgtcgcccaggctggagagcagtggcacaatctcggctcactgcaacctctgcctcctgggttcaagcaattctcctgtctcagcctccctagtagctgggacaacagggacacaccaccacgcccagctaattttttgtatttttagtagagacagggtttcaccatattggtcaagctggtctcagaactcctgacctcaggtgatccaaccatctcagcctcccaaagtgctgggattacaggtgtgagccaccgtgcctggtgggacccttaattttttcatatgctcagaataagctgatagacaatggatgacctgaaaaatgtagtgtctaccaataaaaatgtccattaaatggcagtaaatctcctcccatatggagctttctctttagagcaagctcttatagctgctggcaggaactctgtgtgtcattgaggcaactgctaggaagtattgtacagtgttttctcctaggtcccttgaagtaatgtaaagcagattggccttgaagtttgtttgtttgtttgttttttgagatggagtctcactctcttgcccagcctggagtgcagtggctcactgcaacttccgcctcctgggttcaagttcaagtgattctcctgccttagcctcttgagtagctgggattacaggtgcccactaccacgcccagctaatttttgtatttttagtagagacagggtttctctatattgaccacgctcaattgaactcctgacctcaggtgatctacctgcctcggcctcccaaagtgctgggattacaggcatgagccactgcgcctggcccttgtttgttttttagacagagtctcaggccaggcatgctggcttatgtctgtaatcccagcactttggaaggctgagttgggaggatgacttgagcccgggaggtggaggttgcagtgagcagagatggtgccaccgcactccagtctgggtgacaaagccacaccctgctcaaaaaaaaaaaaagaaagaaaaaaagaaaaaataacgtactctcaaagataaatatttctcactgttgagaatactagataaaacatatgtgactttaccataaaaagcaacccagttctaatcatgaagcccaaatctgacaagagaagttaattataagaagatgtcttattagaaagaaccagaagccaggtatggtggctgatgcctataatcccattgctttcggaggctgaggagggaagactgcttgagcccaggagttcaggaccagcctgggcaacatggcaaaaccccatatctacaaagaagtcccagctcctaagtagctggaactataggcacacaccaccacgccaggctaatttttgcatttttttgttgaaatggggtttggccatgttgcccaggctggtctcgaattcctgcactcaagcaatctgcccacctcagcctcccaaagtgctgggattacagtcataagccactgtgcccagccttttttttttttttttctaaaccattaagtcattcagggacatgtgcagtgatataagttttttgtttgggtcataaaaaagaaatggaaagagatctggagaaaactcatttgcatttttatattttggtgtgtttggattaaaaaacaccaatagtctcattattttatcatcatctaatgtgtaatttcaggttacttttagatatatcaagaaagcaatataatttaactgttggatcacatgtcttactcttactattttacaggtgtgtactcatgaggaacaagatattttacagcgtgactcaaacaagagccagaaactgctaaagaaactcatgtcaggtagacagcagtcttgtaattggatcactgggatgatgggtaccttgttgcgtctgtggttgtttctcttttctgtatcctggagtgcaagatgcagtttattcactcattctcagtttttttggggggttttttttgttttgttttgttttgttttgatgtggagtctcactcttatcacccaggctggagagcagtgacgcgatcttggcttactgcaacctccgcctcctgggttcaagtgattctcctgcctcaaactccctagtagctgggattgcaggcgtgtgccaccacgcgtagctaatatttacttttttttttttttttgagatggagtctcgctctgtcacccaggctggagtgtagtggcgctgatctcggctcactacaacctctgccttctgggttcaagcaattctcctgcctcagcctgccaagtagctgggactacaggcacatgccaccatgcctggctaatgttttgtattttttagtagagatggggtttcaccatgttagccaggatggtcttgatctcctgacctcatgatctgcccaccttggcctcccaaagtgctgagattacaggcataagccaccacgcccagccaatatttacatttttttagtaggggtggggttttgccatgttggccaggctggtcttgaactcatgacctcaagtgatctgcctgcctcggcctcccaaagcactgggattacagatgtgacccactgtgcctggcctattcactcattctataagcatctattttttagaaaaattattaagactacataacattgaacagcaaaataaataatagtattacattataatctaaataaaattaatatccatgtgaccatacttgtataaataactgaataagttaataaaatggagaaaggacaacttcttataaaagaattccagttaataaagtacaagaaatgaaaatactagaaaatcacaattagaacactacagtagtaactgccacaagcacgatccaccaatggatactgaaattattggttgaaagtttaagaacaagagatttacaatgtcatgaaagacaagaaaagattgaagaaacgtcacagatcagagtagattaaggatatatatgacgactaattgcagtatagatccagtattagatcctagaatagaaaaatgacattaatgggaaaaaaatgttaaaatccaaatagtctgtctatagtattataccaatattaatttcttagttttgataattgtactatggttttgtaagataagatggtaacattaaaggaagctatgtgaaggttatataggaactctacttattttctaattattttgcatgccttttatgcttgaaacacacctgacaaaaatggttaaggacattttttttttttttgagacggagtttcactctttttgcccaggctggagtgcaatggtgtgatctcggctcaccgcagccttcgcctcccaggttcaagcgattcttctgcctcagcctccccagtaggtgggattacaggcatgcgtcaccaccctgactaattttgtatttttagtagagacagggtttctccatgttggtcaggctggtcttgagctcccgacctcaggtgttccacccacctcagcctcccaaagtgctgggattaaggtgtgagccaccgcgcccggccaacatttttttttttttttctgagacggagttttgctcttgttgcccaggctggagtgcaatggcgcgatctcagctcactgcaacctccgccacttgggttcaagtgattctcctgcttcagcctctcaagtagctgggattacaagcgcatgccaccttgtccagctaatttttttgtatttttagtagagatggggttctcccatgttgactaggctggtctcgaactcctgacctcagatgatctgcccacctcaacctcccaaagtgctgagattacaggcgtgagccaccgcacttggtcagttaaggacattatttttatttatttattatttatttagttagttagttttgagatggagtctcgctctgtcgcccaggctggagtgtggtggcgtgatctcggctcgctgcaagctccatctcccaggttcatgccattctcctgcctcagcctcctgagtagttgagactggcgacgcccgccaccatgcccggctaatttttttgtatttttttagtatagacggtgtttcactgtgttagccaagatggtctcgatctcctgaccttgtgatccacctgccttggcctcccaaagtgctgggattacaggcgcgagccaccgcacccctatttttaattttttttagacggagtctcgctctttcgcccgggctggagtgcagtggcgcaatcttggctgactgcaacctctgcctcctgggttcaagcgattctcctgcctcagcctgccacgtagctgggactacaggcgtgcaccactatgcccagttaaattttgtatttttagtagagatggggtttcaccatgttggttggccatggtggtcttgatctcttgacctcgtgttccacccgcctcggcctcccaaagtgctggaattacaggcatgagccaccgcgcccagcagttaaggacactattaaaaagaaaaacaatatactcattactcactacttacgcaaatatttcattttgttcctaccttggttcatagtagtttttgttttatatcgacagatttgttgggattataatgtagtcatctgtgtaaaaacatttgtttttccattttccaactaattcataattagctgccatcttgctatatattcataattgtttttagtagctaaaaatagtcttttaacttggtttattatagtatgattatttcctaattactggatatttgtttccaaattttaaataatattacaaattgtcacctttattaacatagcttttgatttacttccttgtgataaattgctaagaataatgttactatgtcaaataatgtgtctttttttgacacttgagatgtatttgccagattattttgtcaaaatatataaatagccgggcatggtggctcatgcctgtaatcctagcactttgagaggccgagacgggcggatcacctgaggttgggagtttgagaccagcctgaccaatgtggagaaaccccgtctctaccaaaaacacaaaattagccgtgcatggtggcacatgcctgtaatcccagctactcaggagactgaggctgggaattgcttgaaccccggaggcggaggttgcagtgagccgagattgcaccattgcactccagcctgggcaacgagagtgaaactccatctcaaaaaaaaaaaatcatattaatctatagcaatattagcattgtacccagaatcctgttcactcttgagttttgacatttcaaatttgttttagttgtaaaaggctgtaattttattattttttatttttatttttatttatttatttgttttgagacagagtctctgtcacctaggctggagtgcagtggcgtgatcttggctcactgcaacttctgcctctcaggttcaagcaattctcctgcctcagcctcccaagtagctgggattgcgggcgcctgccaccacacccagctaatttttgcatttatagtagagacagggttttgccatgttggccaggcctcctgacctcaggtgatccacccaccttggcctcccaaaatgctgggattacaggcatgaaccaccgcgctcggcctgtaattttattattaatgaggttgcacatgcctctatgtttttttcaattagattttaaggtaatcattctgagaaaaaatagttctgattgtacgtactgtccttgtttgtttgtttgtttttagacggtctctgtcaggctggagtacattggtatgaacacattttactgcagcaattctcctgcctcagcctcccaagtagctggatctacaggcttgtaccaccgtgtctggctaatttttaaattgtttgtacagatgggctctcaccatgttgcccaggctagtcttgaactcctaggctcaagtgatcctcccacctcagcctcccaaagtgctgcaattacaggagtgagccactgcacacagccacctaacccattttggatcttgggtgtatcataatctatggctctcttttctgggatatacaaatttacaatatgctgtcaaagaagaaaacacaaccatggaatcaatgttggctttagagttatactcgagctcagattttgtttctatggtctaatttctttttcttttcttttttttttttttgagatggagtcttgctctgtcgcccaagctggagtgcagtggcacggtctcggctcactgtaagctcagcgtcccaggttcatgccattgtcctgcctcagcctcccaagtagctgggactacaggtgcctgccaccatgcctggctaattttttgtatttttagtggagacagggtttcaccatgttagccaggatggtctcgatctcctgacctcatgatccgcccgcctcagcctcccaaagtgctgggattacaggcgtgagccactgcacccggccactggtctaatttctaactgtgtgaactcagtaaatttatagtcatctctgaacttcagttactttatctgtaaaataaagataatacaaactgtcttacagggttattgcgaaaattaaataacatgtatactaagtgactcagcatttagcaggttctcattaaactgaaactgttcattttttctgccccttttgtgaaattttcttttttcttccattatttagtgtttagttttgataatataaacgtatatttaggctggcatagtggatcatgtctggaatcccagtactttgaggtgctgagttgggaggattgcttgaagccaggactttgaaaccagcctgagcaacatagtgagacccgcctctctacaaaaatttaaaaattcagacacaatggcatgtgcctgttgtctcagctattcaggaagctgaggtggaaggatcgcctgagcctaagagtttgagactgcagtgagctatgatcacactactgcactccagactgggcaacagcattagatcctgtcttgaaaaaacgtatatttaaaggtaatattgagcaaatgtcttcttcactgagaaggcatttttatgtcacattcttaaatactttggtgcccttagtgaaccaaatttttataaaggaagaaaagatccctgccatttattgaaaacctgtcatgtgtcaagcactgcttactgctgtacaggtaaggcctggactgtgtacttgttttctgttgaaatgaaggctccaggccatcaggccagaaccagatcttctgatgttttgttctttgttgcacactggtacaactaatttgtatttagaggctgacaccatttgacttccttattgaatttcaggagtggagaattctggaaaggtggacatctctaccaaggaccttcttcctcatcaagaattgcgaattaagtctggtctggagaaggctatcaagcataaagacaaactgttagagtttgacagaactaggtatgaaagggttagaataacaaatgctaagaaataaactagtccacagattctggccattattttggtacttgataccttctcaaagtggagtgtgaaagagtttatagcaaaagaagagccagatgctctacataggaggcctacatcttgttttttaatccacggttgaataatataggctcctatgaaaagaatcctgtcctgtagcattttttgattcctgacaaatgttagtatatcccctggacagttatgtgagttgacagaattcaccacttgttttacttgtagccattcattcagtcacctgtattagagtacgtgttatttgcaaactgttaggctgggctctggagaatctgtaaggaattgcctctgggagaacacaggttatgccctatcataggagggcatgatttacccttctcctttactttgactaaatttgttttttgattcaataatcggtatattaaaatacaactaaattagctttatactactgcattattattgtttagcccattgacttctgtttaggagatagatttatgataattctgtttttgacttcctccttacttacatttttttttcttttgaaaaaaatacttgttgaaaaccagttagtggtaaaaaatgtttggataggatttatatgctcccttctcaaatgactctgagggtcctcagagagaccctgaatctcttgtaacctgagagtctgttgctgacagtgtaatcttttgatgggacattcctgctacttccaaaccatttgctatgaatacatgagataagatttagaaaactattccttaaataaacccatcacaaggtgtataactcatattcactcttcatcctttcagtatcacatttcaccctactcagtagaacgtattattagaaatagaaatggaagccgggcacggtggctcacacctgtaatcccggcacttggggaggccgaggcaggtggatcacgagatcaggagatccagaccatcctggctaacacagtgaaaccccatctcactaaaaatacaaaaaaattagccaagcgtggtggcaggtgcctgtagtcccaggtactcgggaggctgaggcaggagaatggcatgaacccaggaggcggagcttgcagtgagccaagattgtgccactgcactccagcctgggcaacagagtgagactctgtctcaaaaaaaaaataataataatagaaatagaatgcacttactttttgataaacagaaagtggaaaagggtctctccctattgttgctgttttgctggtgtattcatggataccagtttcattatctaggtttttgtataagaccaatttccaccaggcacagtggctcacgcctgtaatcctagcactttgggaggccaaggcagacggattgcttgagcctgtaagtttgagagcagcctgggcagcatagcaaaaccctgtctgtacaaaaaatacagaaattagccaggagtaatgttacatgcctgtaatcccagctacttgggaggctgaggtgggagtattgattgagactgggaggtggaggttacagtgaggcgagattaatccagtgcactccagcctgggtgtcacagcgagattgtctcaaaaaaaaaaaaaaaattcctccagagtactgttaaaaaagtttctactctaagtctgctttatttttgttttttttttttgatccgccagcctcggcctcccaaagtgctggaattacaggtgtgagccaccgtgcctggcctaagaagacaaatttttttttttttttttttttttttttgagatggagtcttgctctgtcgcctgggctgcagtgcagtggcgccatctcggcttactgcaagctccgccccctggactcacgccattctcccgcctcagcctcctgagtagctgggactacaggcgcccgccactacgcccagctaatttttttgtatttttagtagagacggggtttcaccgtgttagccaggatggtctcgatctcctgaccttgtgatccgtccgcctcagcctcccaaagtgttgggattacaggtgttgagccactgtgcccggctgacaaaatttttttataattctagctgagtatgaaaatttgaagccaatatatgaatctaacttcagtatttcccttatgtctatttatgtcactatttgtaattatggggaaacgtaatcttaactggatttatgacattggagtaatcactcaacttctatgagccccaggtttataatatgtagaattagagagttagaccatcaagattccttccaggttttagtgtctctgtcagtatgatcttagagataggcctaattgtcatattttggaacttggccccagtgcattagtgagagcctgcaaagtggggtataggtaatgacatatagtagtagggtaatagaatgtcttaagagtaaatagttggccaggcacagtggctcacacctgtaatcctagcactttgggaggccaaggtgggtggatcacgaggtcaggagttcaagaccagccaagccaagatggtgaaaccccatccctactaaaaatacaaaaattagccaggcatggtgttgcgcctataatcccagctactcaggtggctgaggcagagaactgcttgaactgaggaggcagtcacaccactgcactccagcctgagcgacagaacgagactctgtctcaaaaaaaaaaaaaaggtaaatagttaagctacagaactgagacttaagcatagaactccagtaagcaaataagcctagcaagaataggctggatcccagttacagagggactaggatatttagtaagctgtcaaacttgaactcagatgcagcaaaaccaggctgaagcccagctttcagaaggtagaggctggactaatatgaaaggtagaaggaaaatgtattatggtgctgtgtcttttcttgcctgaggttgagataagttctaggagctgagcctacactggagataaaacatatgcagagcttgacctgattttggaacatatttgagatattaagttaccttgaaactgttttccaataatcggtccttatttgtcaacagatgacctaattaccatgtgttccctttttctcagtattcgaaggacccaagtcattgatgatgagtcagattactttgccagtgattctaaccaatggttgtccaaacttgagcgggaaaccttgcagaagcgagaggaggagctgagagaacttcgacacgcctctcgactttctaagaaggtcaccattgactttgcaggaaggaagatcctggaagaagaaaattcactagcagagtatcatagcaggtaagtgagcagcactagaaagggtctcaaagaaggaacaggttgaccataaaggattttccctttctagtggatcttttatttttgttgatttaaaaaatgtgtttatttggaacagaaaacatgttaagaatagctaagaaaaaatgtttaaatgagcactcctaccagataattactgatttttgtggtttggtttttttttttttttttttgagatggagtctcgctttgttgcccaggctggagtgcagtggcctgatcttggctcactgcaacctccgcctcccaggttcaagccattctcctgcctcagccccttgagtagctgggattacaggtgcccaccaccatgcccagctaatttttgtatttttagtagagacaggttttcaccatgttggccaggctggtctcaaactactgacctcaagtgatccgcctacctcagcctctgaaagtgctgggattataggcatgagtcaccatgctcagcaaaaaaaagtttttaaaacaatgagatatagtatgggcacagaaatagatcaatgaaacagaatccagaaagagattggtatgtttacattgtgtttgtatgtgtgcatgggtgtgtgtatatatgtatgtgagtttagtaatcaataaagctaacatttttaattgctaaagcaataattaaatatgttattttgggataattgcctgtttagaaaaaaatctaggtaatgtctttatctcagaccattctatgatgctgtaataagtttcactaaagagttaaatataaacaatataaagggatcagaaagaaatacagaattataggagaatataattatagtcttggtgtgataaagctcttcctaagcaagatacaaaatcctgaagtcatgaagatataagatattttaaataaaaaagacagtaccaagttggaagaaaatattttaagtggttttaacagtcaaaggaacaatatccatactatataagtaagaactcttgcaaattaaaagaaaatgaccaaaaactccagcagaaaaatggacaaaaactaaaaacaatttacaagtggggaagtacaaatagccagtaacatttgaaaagatgtttaactagcaatcaggaaatacagattttaaaacaatatatcaattttctttggctcatcaaatttggcttaaattttttttaaaggataatattgcatattgtgtgggtataggaaaatggggatattctgttactgtgaatgggagtattaaaatgatgcagcctacatactgtatgattttaactattcagtagttccagggattagaagagagggaggaataaatagaaggagcacagagaagatttttaaagcagtgaaactactctgtatgtagttataatggtaaatacatgtcattataaatttgtccaaacccataaattgtacaataccaggagtgaacgctaatgtaaactatggcttttgggtgataatgatgtgtcaatgtaggttgatcagttgtaacaaatgtaccactctggtgagggatgctaataatgggggaggctatgtatttgggaggtctcagggaatgtggataacctctgtatattcctctcaattttgctctgaacctaaaactgctctaaaaaataaagcctaaggctgggtgcggtggctcacacctgtaatttcagcactttgggaggccaaggtgggaggatcacttgaggccaggagttcaagaccagcctgggcaacatattgagaccccaccttaaaaaaaagtctattaacataaatacataaacaaaaaagttacaactttttagaagagaatatttaaattgtgcatactgttttttttttttgagacaaagtctcgctctgttgcccaggctggagtgcagtggcgcgatcttggctcactgcaagctccgcctcccagattcacgccattctcctgactcagcctcccaagtagctgggactaccaacgcccgccaccacgcctggctaattttttttgtagttttagtagagacagggtttcaccgtgttagccaggatggtctcaatctcctgacctcgtgatccacccgcctcggcctcccaaagtgctgggatacaggcgtgaaccactgcgcccggcactaaattgtgcatacttttgacttatcagctacacaccacatatcaagataacaatttccttttcccttgtcaaagattttttaaaaaaattgccattttcagacatgaaaaatagtatttcattctaatttttattcacattcctttgctttagttgtatgttagtaagtttgagtgttctgaaaatgtattcatttgcttttttactatttcttttatagagattctagagttctggatatacttatcattttactgtgtcaaatttattcctctctttcagacctcactctccccacgctattttagacttacctcatcatacaaattcttatactttttaaaagcttcaggcctttgtttctgatttttccttggtttggaaattcctcctccattctttgcatttcacatacctacctctcccttgaacctacatgatacaacatgttggatgatggaataataaccactaaatggattgtgcctgtttcatagtaattattacatcccctcatgtatgattcatcatctatacggctttcttaaatctgccacttggattgaaagcctctttaaaaaaaaaaaaaaagcctcttgaaggcaggaacaatgtcttccccaccttttaagctgccttatatatgaggtattcctaacaaacatatattgaattgaattgaaggtcaagtttagcctttcctgttagttgaagcttttcattatgttgtgcctcacaattattattgttatccacaaacgttttgtcaagcatccaacaggagtattgaatagagtagcaagtactgtagagctatagaatgaattaagatagggttccttcagggcttatgatctcttactaactaaccagtaggtttccacaatctttaaatgaaaatcatcacattcttttataggtttagagccagatatccaatgccaacatcataggcatgggataacaggggatgtatccaatgattgtttagatagtgggtactataggaccttagagaaaggattaagcatttttgttctgggccagtagggtacctctttataacttctgagccttcaagcaaagatagaatgcagactagcaagaaggagtggagaaaggactgctgagcagacagaggaataactgtataggttgtattgcgaagatgagctgccatagaatactcttctgtgggtcagggtattcctaggcaacttttttttttctttttgtgacagggccttattgactattgcccaagctggagggcagtggcgccttgaactcctgggctcaagtgatcctcccatctcatcctcccaagtagctagaactacaggtgtgagccaccatgcccagctaatttattttttgtagaaccagggtctctctatgttgcccaagctggtctcaaactcctggcctcaagtgatccgccctctttggcctatgatagtgttggaattacaggcacgagccaccactcctggcctctaggcagcttttctggtcttggcatgtttaatgatcttgttgagcaggtgaatgactgtagcgtgccctatgtattttcttggtattctggaacttttattttatttatttttatttttttttatttttttgagacagtctcactctattgcccaggctggagtgcagtggcacgatctcggctcattgcaacctcctccgcagtttcaagtgattctcctgcctcagcctcccgagtagctgggactacaggcgtgtgctaccatgctcagctaatttttgtatttttagtagagatggggtttcaccatgttggccaggatggtctcgatcccttgaccttgtgatccgccctccttggcctcccaaagtcctggaattacaggagtgagccactgtgcctggccattctgcaatattcattaactcatattccttagggtttttggtgtgagaaggaagttggagtggggagtagggaaggtcatccatagactcctctttatattccaaattttattactattaaagcattttatgttggtggtaagcattctgagcatagaacattaccaattgttgcatccttttggtttattatcacagactagatgagacaatacaggccattgccaatggaaccttgaaccagccactgaccaaattggatagatcttctgaagagcctttgggagttctggtaaatcccaacatgtaccagtcccctccccaggttagtggacctttgctctaactgttaataagaagtttggccccaattttgccttcttttaagtatgtctatttcatagacttcagataccaatcagctctctcaatacacctgtaccaatcagctctctcaacacacctgccaaccttattctctggcccacattttttccatttttattgcagtacttctgacaaattgacttgttttatcttccaagtacttcccaagaaagggttttgttaagtactatagaaatttagacagaaattccatggttcttttgttaatgctctttctcttttttttttttttttttttttgagatggagtctcactctgttgcccaggctggagtgcagtggcatgatctcgggtcactgcaacctccgcctcccaggttcaagctattctcctgcttcagcctcctgagtagctgggactacaggtgcccgctaccacgcccagcgaattttttgtattttttaatagagacagggtttcaccgtgttagccaggatggtctagatctcctgacctcgtgatctacctgcctcaacctcccaaagtgcccagctatcaatgggttttatagggaagctggcattcattaaaagtaaatattcaccaggcgcactttgggaggctgaggtgggcagattgcttgagcctgggagttctagaccagcctgagcaacatggcaaaaccccgtctctactaaaaatacaaaaattagctggccatggtggcgtggtgcctgtagtcccagctacttaggaggctgagtcgggagaatcacctgagcccaggaggcagaggttgcagtgagctatgatcatgccactgcactccagcctgggtgacagagtgagaccctgtctcaaaaaaaaaaaagcaaatatttttgaaaaatatatgtttgggaatggtggagaaaaaaattccaggcagaatgaattgtaggaacaaaggcatgtgtacacaaaaacatgggatatagatataggaatttccaagcacacaaatctggagagggaatttccaggcagaaggtacaacacatacaaaggctcagcagcgtgagagcattgcaggtttggggaatcacaagtaattaactattgttatggactgataagtgtattagtttcctagggctgctgtaacaaagtaccacaaattaggtgacctaaacaacagaaatttattatcccatacctggaggctaaaagcccgaaatcaaggtgttggaaagactacattccctctgaaggctttacaggagaatgcttacttacctctttaagattctggtggctctaggtgtcttttgccttgtagctcattactctaatctctgcctctgtcttcacatggacttcttccccatgtgtgtctctgtcactgtgtgctctctcctcttacaaggatacaagtcattggatttagggcctactataatctaatataacctcatcttaaactgattacacctgtaaagattatttccaaataaggttgtattcacagattccatgaacgtggacattgattttggggggatactactcaacccagtacagtaagcaacacctgatcatgaaagattttttgtcttatgctaatgagtttaggttttgccctaaagtaggcaaagaagggttctggaagaattttaacagaagattggcatggcttccatgcctacgtagagaatggattggagggaagagtaagtaagattagaagctgagaaattgccaaggtagtcattgcaatagcaccatggaaagatgatgccagcccaaattagtattaaagcactagtggagcagtagagagttatttaaagaccaaaagtgggagccgggcctgagatgtagtgatacacatctatagtcccagatacttgggaagctgaggtgggaggatcacttgagaccaggagttggaggctgcagtgagctatgattaagccaccacactccagcctggatgacacagtgagaccccatctctaaaaaaaaataattatcatcataaagactaaaaatgtagatgaagagacctgctggcagattctttaatagtattatcaaaagataatgaggaattaatttaggaaagtggctgtgtaattagagggaacagctgtagtagaaatagaaaaaataatttgggcctcaagattgttcacataccaacattttatgaaattatttatttccagccaggtgtggtggctcacgtctgtaatcctagcattttgggaggctgaggaaggaggatcacttgaagccaggaggtcaagaccagcctgggcaacagagcaagacagtgtctcaaaaaaaattttttttaaagaaattatttatttaccctataatggatcaattctttttcctctttggtcctctgtaaaaacttctatctcctatttagtatgtagtcaattctgccttatgttttgaatagttatttatgtgtctgtcttccactaggctttaagttccttgcaagcaagaaccgtatctttttcatattttatgtctccctagttaatgtgcttttcacagttaagtactcaataaatgtgtatttaatttgtaaaaatgtgtatttttaagatatgccacaattgacaagaatcataaaattgtatggcagaaagatccttagaaatttatttagtccaacttcatccttttccagtttgaaaaactgaaatctttaggggttaaatgcctagggtttcgactaccactagaagttttttcctataagttattttatgttcatttttatttatttttgagacaggatattgttctgtcatccaggctagagtgcagtggtatgatcatagctcactgcagcctccacctcccaggctcgagagatcctcccatctcagcttctcaagtggctcagactacagtagccacgtgccatcataccttactaatttgtatatttttttgtagagaaggagtttcgccttgttgcccaggttggtcttaaacttctgggctcaagcgatcctcctgccttggcctccttaagtgctgggattacagacatcggccatcatgcctggcccttattattatttttaaagacacaggacctcaccatgttgcccaggctggccttgaacttatgggctcaagtgatcctcctgcctcacctcctgagtaactagtgaagctacaggcatgcttcactgtgttcagctttataaattattaattttttaaaaaagataaccccaaatatcatcatgctaattgcctttatttttaaattttaattttggaggacatggtatcgttgctctggaagaaacattaacctttgccattctctgtctgaactgttgccaagactcttcactctcctgtaattacctgtaccttataattctctattctttttatatgatgggagccctgttttagtagtcctccaccctctctttcaggagacaagttcttcatttcagggtaagagaatatttcatgcatccagtagtcagaactgctgcctctgacctgacaacatctgtttggctttgtcatggtgccagcatgtgacactgcccctaagcacatgcagaattgtggaccaaaatgttgaactttcatttagctcacagaattctattgaaaaattatccagaaccaagtatggatcattaagtataaattggaaataattatagctcttttggtgtgatatttgtgctgttgctggaattagtaagcattgtatggagatttcaacattctaattattctttaagatgggccttgttatcatacctgagacttctactgaatgtatactatctctacccttttggccttattgcagacaaagatgggattatttttcatttgttgttgttgttgttgttgttctgagacagagtctctcttgcccaggctggagtgcagtggcacaatcttggctcattgcaacctccacctcctgggttcaaatgattctcctgcctctgcctcatgagtagctgggattataggcacctgccaccacgcccagctaatttttgtagttttagtagagatggggtttcaccatgttagccagactggcctagaactcctgacctcaagtgatccacccgccttggcctctcaaagtgctgggattacaggcgtgagccacgatgcccggcctgggatatatttttctaagaaaaatgttcccaatatgatttcctcattattagcattcgcatcattttgtctacctaccccagattcttgccttataagatagaactgtatgtttgtttttctgtgtagtgggttgaccacacaggtgcagcctcacagaagaaggctttccgttcttcaggatttggactagagttcaactcatttcagcaccagttgcgaatccaggatcaagaatttcaggaaggctttgatggtggctggtgcctctctgtacatcagccctgggcttctctgcttgtcagagggattaaaaggtaagaataaaaatgaatctgggcagtggaagatcttagagtgacataaatttaatttagaaatatgaattggaattagttttcctcaatctagtgatgatttataatactcttcaataaatagaactttgaacaacatattcatgttactgacttggtagcagtatattttaaaattaatttcaaaacatttaaattgacaaatatagtagtagtttttgtactgaatagcttaaacaaactgagcataaaaaggctaagaaagtcataacaaagatagaagactaattttttcatctttggaaggaaatctattgaaaaatcttctcttggctttgctttggaatatactactaagcaaccttaataatttgatcctatttgaaacatagttttgatgcctatttacttattaagataccagcataactgattttattttcctgtccatatatctaactattaatctggctaataatattgagaaactattttattacaaaatgcttttctacaaaagtaggggaaattgagataagtagaggtattatacagctgagttacacctgttactgataataatatttaatagcttactattccgtggtgtcttgtgtttttttcttttcttttcttttctttttttttaaagaccgagtcttgctctgtcaccaggctggagtgcagtggcgtggtctcggctcactgcaacctccgcctcccaggttcacgccattctcctgcctcagcctcccaggtagctgggactacaggcgcccgccaccacacctggttaattttttgtatttttagtagagacggggtttcaccttgttagccaggctggtctcgatctcctgacctcgtgatccgcccgcctcggcctcccaaagtgctgggattacagacgtgaaccaccgcgcctggtgtgtttgtttcttaattcagtttttaaaaatagtgtttttcttggcttttattatccatgtaaatggaaaactgtaaagcacagaaaagtagctagaaaaagaaagattacctataatcccacaccaagaaaccgctgttattagcattttggagtgtttctatctttcttttttttgagacagagtcttgctctgtcacccaggctagagtgcagtggcctgatctcggctcactgcaacctctgcctcccaggttcaagcaattctacagcctcagcctcccgagtagctgggatcacaggcgcccgccaccacacctggttaatttttgtatttttagtagagatgaggtttcaccatgttggccaggctggtcttgaactcctaacatcgtgattcgcccaccttggcctcccaaactgctgggattataggtgtgagccactgtgcctggcttctttctttctttttttttttttttgagacgaagttttgctcttgtttcccaggctggagtgcaatggtgcgttatcagctcactgcaacctccacctcccgggttcaagccattctcctgcctcagcctcctgagtagctgggttcacacgcatgtgccaccacgcctggctatttttgtatttttagtagagacgaggtttctccatgttggtcaggctggtctcaaactcccgaactcaggtgatctgaccacctcagcctcccaaagtgctgggattacaggtgtgagccaatgcgcccggctgtttctatttttcttgtgtaaattgttaaatggtgagagcatgatatatatgtttgtgtttttcttctttcacttatcattacaacatatgtcttttgcttcttatttcttttttttttttgaaatgaagtcttgctctgtcgccctagctggagtgcagtggcgtgatctcagctcactgcaagctccgcctcccaggttcacacctttctcctgcctcagcctcctgagtagctgggactacgggcgcccgccaccatgcccagctaatttgtgtatgtgtgtgtgtttttactagagatggtgtttcaccgtgttagtcaggatggtctcgatctcctgatcttgtgatctgcccgcctcggcctctcaaagtgctgggattataggcgtgagccaccgtgccaggccatttcttatttttttctattagaattttatatgcctggcaatgtcccaactcataacagtaaaaataccttatatttaaatagaattttagttttcaaggcagtagctctatgaaatacacgcatgtgctgcataacgacttttcaatcagcaatggaacacatgtacaacagtggtcccataagattagaataccggccggtcacggtggctcatgcctgtaatcccagcactttaggaggccgaggtgggcggatcacaaggtcatggtgaaaccctgtttctactaaaaatataaaaattagccaggcgtggtggtgtgtgcctgtaatcccagctactcaagaggctgaggcaggagaatttcttgaacccgggaggtggaggttgcagtgagccaagattgcatcattgcactccagcctgggcgacagagtgagactccatctgaaaaaaaaaaaattataatactatatttttacgctaccttttattttctttctttctttcattttttttttttaagacaggatctcgctctgttgcccaggctggagtgcagtggcatgatctcggcttgctgcaacctccaccttccaggttaaagcattctccagcctcagcctctcgagtagctgggattacagacatgcaccaccatgcccggctaatttttgtatttttagaagagatgaggttttgccctgttggccaggctggtctcaaactcctgacctcaagtgatccacccgcctccacttcccaaagtgctgggattacagacatgagccaccatgctcagcctttactgtaccttttctatgtctagatgtatttacatacgcaaatagttaaccactgtgctccagctgcctacagtattctgtacagtaacatgctgtaccagcttgtaacttaagaataagaggctgccgggcacggtggctcacgcctataatcccagcactttgggaggtcaaggtgggtagatcacctgagttcaggagttcaagaccatcctagccaacatggcgaaaccccatctctactaaaaataacaaaaattagcggagcatggtggtgcatgcctataattctagctactcgggaggctgaggcaggataattgcttgaacccaggagacagaggctggagtgagccgagattgcctgggtgatagagtgagactcagtctcaaaaaaaaaaaaaagagcaagaggctataccatagcctaggtgtgtagtaggttatactatctaggtttgtgtaagttcagccaatgaaattgcctaaagacacatttctcaggacatatccccattgttaagcaagatgtgactgtagattaggccagtattattatagtctttgacaaatgaggatactgaagcaggcaaaggtaaaatggattgccctgaaatatgaagctaggtgatgacagagatggaactagacttctggttttcagagtgctctttcccctctactgttcaggcttcagacgtttctctactttacttaaaagcaaatgattatcagcatttaggcataatcatttctactttggtagtttcactattagctgccatttctctattgtgttaaggtgcactacaccttttctcccctcttgaaggtcaggtttccttgctttggctcctaattgtttcatagttcatgtctgtaaacgccattagaacaagtgcatgggaatccgcttctgctccaggatgatcaaaaccttagatgtctgttcttctcattgagttttctgcaatttaggtgtcttgcttttccaaagtagaaaactaaacaacttgccttctgctaagggaatcagagtgtttacatttctctcatcctatttggatctgttattcaaattttctcacagaagcgaaagaatgagcagcatctagtacacagtcactttattttaatcccacagaaataaagtaggtggttttgccacatttgtgggaccattttcccagtaattcttcaggttatttggcctagagggaagatatacattggttcattccccatatcgtgcacctactgtgtgcctggcactcttccaatttatctatattgggaaaccaaggatatgaaaaattcatgaccccattttccattataagaatgggataagagggatatattatcaaggtactttatttaatttggtgggaggggaaagagaaacatctttttgtaatccttggaaagtagcaattaaattctcctgaatacattctgttattctctttagaggttttttcaaactagtccacaagttgtttaataatcctcaaagaaaaccccaaatacaatttaaaaatgcaaatggagccgggcatggtggctcatgcctgtaatcccagcactttgggaggccgaggtgggcagatcacaaggtcaagagatcgagaccatcctaacatggtgaaaccccatctctactaaaaatacagaaattagctgggtgtggtggcacgtgcgtgtagtcccagctactcaagaggctgaggcaggagaatcgcttgaacccaggaggcggaggttgcagtgagccgaggtcgcgccactgctctccagtctggcaacagagcgagactccgtctcaaaaaaaaaaaaaaaaaaaaaaaaaagcaaatgggtgtggttctaattgaagagtaaagataagcgtttttatttacttaaattattttaaataaataaaaagtaacattcttgggagttgtgtgtagatgaggatttttctgtcaggttggagaacaaatcaactaatcttctagggaaaggttagcctttgactcaagggcaaggatttccatatctctaatatgatttatatgccttgaaaatataggatttgtattggagaagcaccaagactggtcagggttccaaatctgagttgtagggatcaggtgaaaagcagtcaagagttgagagagatgacttgtcgctattctgatggaggagaaattagtggacagagttcatcctcaagtgaaaagtattgtgagagaaaagtgtttttgacaaaagatactgctcttgagaaggcatcatctatagacctcttggttcaactggataatttgctataggatttgttatatattatgggatattccaggaaactagaatttatatccttcccactaaatttctatttgtttaagggtggagggcagatcctggtacaccccccacagaggacgactttggatagcagccacagctaaaaaaccctcccctcaagaagtctcagaactccaggctacatatcgtcttcttcgtgggaaaggtaacagccgcatattctcctttcaattttactttatggagagaagtcattgacgttcatcttctttcacttccttctttctttggctttttctttgttaaaagagacttttaatctttgtatatgtttgtttgtttagtggtaaatcattgacagcgttcaaagcattaatctgtcaaaacagtgcaaataaaaatatcaatttccaacacaagaaatcaactagtcttaatttttttatctgagaaaatcatcttctttactctaaaggtaaaatgactagtgtaaactctgagatccttacattgggaagaacaaccacaaataggaattttcattgagagtggcctaaatagacacctactattggatttgtacaaatcaaagttgattgatttaagcaacgtattttgggaatcaccccaagaatactaactttggatccttaaaaagacttctgacctttgggcatcctgtttttcctttgtgttatccagctcatacagttgttttgagggtagaataaaaggacaactacacaaccatctttaaaggtttttaagaaacaaggcttaaagaatcactaggaataaaaagttcatgcttccttaaaagcacttttcttttttatttttttttgagacagagtctcgttctgtaaccagactggagtgcagtggcgccatttctcctcactgcaacttccgccttccaggttcaagtgattctcctgcctcagccttccgagtagctgggaccacaggcgcatgccaccacacccagctaattttttgtatttttagtagagacagggtttcaccatgttggccaggctggtcttgaactcctgacctcaagtgatctgcctgccttggcctccaaaagtgctggggttataggtgtgagctactgagcccggcctaaaagcacacttctattcctattgatatggactggcttgttttaaagacattcattcttatggttttaaccacattttgatgttttttttttcttgtcacctgtaactgccttactttgcttccaaaactcatcactgccaaactccaatctgatccaatggcgtatagtagaatcgatttgtattaggatgaatttgtggggtccttgaactttgatggtatgagggcaaaggaaaaattttctagcttaacatgtggatagtggactaagccagccactcactagatttttttgctaaaatgcaaacagttgtgccaagtaaatttcactgttttccttatgtctacaaatagataatggaaaaagttattaatgtttgttcagaattgaaaacagattcctgagttccaagatcacaaagaaggaaatttattcaatatttttgttattcctgattcagatgtggaatttcctaatgactatccgtcaggttgtcttctgggctgtgtggacctaattgactgcttgtcccagaagcaatttaaggagcaggtgagtaaagaatactttttttttttagagacagggtttcgccatgttggccaggctggtcttgaaagcactttaagaggctgggcctcttaaaagtgctgggattataggcatgagccaccacacccagcctggtgcatataaatatctgtataaaaagctgtttccaggccgggcgctggtggctcaggcctgtaatcccaacactttgggaggccgaggcaggtggatcacaaggtcaggagatcaagaccatcctggctaacacagtgaaaccccatctctactaaaaatacaaaaaattagccgggtgtggtggcacgtgcctgtagtcccagctgctccaaaggctgaggcaggagaatagcttgaacccgggagatggaggttgcattgagctgaggtcctgccactgcactccagcctgggcaaccgagtgagattccttctgggggaaaaaaaaaagctattgccacaatgcagctagcaagtatatagggtcttcatcccttaccaaaaccttgcttcttttgaagaaacccttgattatcccttgaattattttgattggggggtgggaatactaggatctgttattgctaattctggagcttttggtccaggctattgaactcatgataggcaaatgtatttgactctgattgccaggactgtgccatatttgggaggaggtatgtgtatttatgtatgaatgtacatatgtatgaatgtacatatgtatgcatttatatattttaatttttatcactaaagattgaactgacaggtcgggcgcagtggcttacacctgcagtcccagcactttgggaagccaaagcgggtggatcactttaagtcaggagtttgagaccaacctggccaacatggtgaaaccccgcttctactaaaaatacaaaaattagcctggtatggtggcgcatgcctgtaatcccagctactcaggaggctgaggcaggagaattgcttgaacctaggaggcagaggttgcagtgagctgagatcgtgccactgcactccagcctgggcgacagagtgagactctgtctcaaaaaaaaaaaaaaaaaaaagatgggcatggtggctcacgcctgtaatcccagtgctttgggaggccaaggcgggcagatcatgaggtcaggagatcaagactatcctggctaacacggtcaaaccccatctctataaaaatacaaaaaaaattgctgggtgtgatggcacgcgcttatagtcccaactattcgggaggctgaggcaggagaatttcctgaacccagaaggcagaggttgcagtaagccgagatcatgccactgcgctccagcctgggcaacagagcaaggctctgtctcaaaaaaaagaaaaaaaaaagattgaactgatgtaactaaagtacatttttgagcagcagagggagccgaaatactttaacttaattagaaaattcctgaaatgtaagacctttatgtttagacacagaactagcagaaatccaaaacaggaaaagtccatccttgaagcacaaacagtcttacctatcagtatggttttcctgttctttgaacagttgctttagataatagggcttccaccagtgtgctgaagaaaaagagcttcagtttcatttttcccagcaaattctctttttcagacttacttacctttcattactgttattactgtctactgttttcctttactgttcccagccattttaccctctctattctttactctttatttattttttttggaaactgggtctcactctgtcgtccaggctggagtgccaatcttggctcactgcaacctctgcctcctgggcttaagtgatcctcccacctcagcctcccagtagctgggactacaggcaccacaccaccatgcccagctaatttttgtatttttagtagagacaagatttcaccatgttggcgaagctggtcttgaactcctggcctcaagtgatccacctgcctcagcttcccgaagtgctttgattataggtgtgagccactgtggccagcctactgactgattttaactaacacttgttatccctctagatttatgtctttcatttccttgtgagttacctcctctgcctcctctgattatgtgtgtgagtacaatgcatgcattttggtgtgaattttgagttctagcgttttgttcttcccttagtatctgatccagacctaggcaaaaccatagacacatggaggctatcccccacactcttgtgcctgcactatccctctgagctttttgcccatttttttcaatgtctactttcttcctcccccctctttttttttcccccagtctagaagtaatattataaaaataccttacactggtgtaggctttacagttttagagattcacagtcgttaacagcttagtataacatactgcattatgttttcttcctgggatatgtatttgcgttctaaaagagaacccaggagcatctggcaatgtggatgatggtttttggcaagcggccttgctttattttctcatctattgatcaagcaaactaccacctgatacaaggtcaaatgatttcaatctctagatagccaatcttctttgtgccacaaatttgtgtagagaagggtaggaaactataatcctgatctatggaatactatgaaggttacaggaattagaaatctaattaaaacaagtcttgttgatttctgaaggatacctctttttcatgatacttctcctttaacttatattgtatctcatttcctgaggttgctttgaacagcatgtagaagtgcaggaatcctcccatatgtttccagctagaggtgctggcaactctctttatgaatgtctctgatatataacattaaaatataacagaagccactaggcttcatcagacatgggaatcccatacccattttccctatggttggcttttctgtaactttttcccactgtttcttttttcttttttttgagacggagtctcactctgttgcccaggctggaatgcagtggtgcaatcttggctcactgcaacctctgcctctcaggatcaagcgattctcttgcctcaccctcctgagtagctgggattacaggcacataccaccacacctggccatttttttttgtatttttagtagaagcagggtttcaccatgttggtcaggctggtctcgaactcctgacatcaggtgatacacccgcattgacctcccaaagtgctgggattacaggtgtgagccactgtgcctggcctccactgtttcttttctgtgtttaagggtagcatatgaatttatttagaattgatgttagccctatttttatcttatttattgagtaaagagtttatcagttttaaaagttgtagcttttgggttgggcgtggtggctcatgcctataatcccagcactttgggaggccgaggcgggtggatcacttgaggctaggagttcgagaccagcctggccaacatggtgaaaccccgtctctactaaaaaactacaaaaattagccaggcgtggtggcaggagcctgtaatctcagcttctggggaggctgaggcaggagaattgcttgaacctgggaggcagaggttgcagtgagccgagattgtgccactgcactccagcctgagtgacaagagcaaaattctgtctcaaaaaaaataaaataaaaataaaaaaagaaatgtagttgtctaatctattataccagcctcattcttgttttctgaatgaatgagttgagagtttaggaataatggctcttgactagcatttaccaaactattccatggcataggtgttctctgaaacacaaatttgggaaatacctttggattaaacagatctgtttactgtagaacatctcagagcccttaatatgctagtgtggattatgactctctatgaggtggatataacatgcagtgttctcaaaactttgagcataaattaatcccccacccaaacatgcactacctatttacatactacagaactggtatcatggtatttacagtttaggagtgttagtctaagtatgcttgatttttctgtattctcataggtcaactcactgagagagaaccatctaggaagtagtttcctaactgtgacctgtgccttcccttcagtatctccatattcatttatcacccagttgaattgcattttctttgaaaactaatgtggatctagtaatttttacttcaactgaaactaacttcctgtgtgacttggaccacattttgcctttacatgctgttcctttttcttttccccccaaaattcagtaatttacttctgacctcacattcttggcctttctttgataagttaaaatacactaaaccctcactatttttggcatagtgtgatcatttagtcctcttaaaaaaagaaaatcgaaaaggttttgttagtggttgttttaaaatcaagtgcactacactgttaaatggctttaaaaatatgtgctttctcctgagccatgaactagtcttcctttttatcttctaagattagtatggccaacatgactaatttgtgccagaaaaaattcctctagatcctcaaccctcctgagtaatggcagaggatcagcctagagaaggtagaagtgatatagaaaaggctatgggttcaactcagggtaaaaaggtagatgagagccatctcgttaaagcttctcctgtgattcccctggaaggagcccatgctgtttgccagcattttatctgccagcagcagatgtaagctctcaaaaacagcagggaggatgttgactgcaacaatgcatcaaggctgtggtttgtaacctcaatagtaaggcagttaaaactttttttttttaacaaagacattttgattgccaaatccataaccattagcagctgtggtttgaacagttctctagacctaacaagttttcaaacaaaaagttgagttggtggcttttgtttctacgtgtctgtgttgtgtttgtgctatttatatccctgccttcaatagaaaatctgatttgtctgaaatctccaaggtcattgattattctatttcttctgaactgaatccattcctttcctgccagcttactgaccctttagtctatttgatcttacagcttttacaatagccaagaccctatcttcaaggaattatgctgaagcagttatactgctgggtgcctgtttccaataattgacggcagtagacttgtagtcttccaatagggaagagaatattacttcttcctttttctagaaaagtatcttcaggatctaggagaatttgctggaagaaaagtaagcaatttttaaaactttaaaaaaaaaagagtatccaagcaacatagatcttcaggaagattccaagtatcacttcgtttgtggaaatcatcagcttctatcaccaatgaattgtctgtgagtctgagagatgagaaattagaaaatgaaggatttaatagtcagtattcaaaccaggcactggaattcaaaatgcagtccacaaattctcttttaaaatatgtgaaaatgtcctgtctgttgtactgagaaaatctgccaatatatagacctcaaaatattccgataacagccctcacgatgagggctgttatctgagactcaacaagaagaaaaattgttatgttactaacaactagcttaaccctggacaattcattaaaatcacagctcacttgagtgagatatagggaatgtagttttggaattctcttgaagactggaacattgacaggctgggcacggtggctcacgcctgtaatcccagcactttgggaggcggaggctggtggatcatgaggtcaggagttcaagaccagcctggccaacatggtgaaaccctgtctctactaaaaatacaaaaaaaaattagctgggtgtggtagtgggtgcccgtaatcccagctacttgggaggctgaggcaggagaatcacttgaacccgggaggcagaggttgcagtgagcagagattgcaccactgcactccagcctgggcaacagcgtgagactccatctcaaattaaaaaaaaaaacaaaactggaacattgactagagtttctagatcaaaacagactgtctttagggttatttgcagtctgggtattaagtacccacttaaatggtttcagaaaccatttatattatatatatatatatattttttttatccaaagagcattgtgttttcttttttttttttttttttttttttgagacggagtcgtactctgtcgtccagggtggtggagtgcagtggagtgatcttggctcactgcaacctctgcctcctaggttcgagcaattctcctgcctcagcctcctgagtagctgggattgcaggtacgcaccaccacgcccggctaatttttgtatttttagtagagacagggtttcaccatgttggccaggctagtcttgaactcttgacctcgtgatccgcctgcctcggcctcccaaagtgctgggattacaggcatgagccaccatgcctggctgagcattatgttttctgttgtacttatcctgaagagagatgggaaatattaccacttttccatgtatttagtgttttggttttcatctgaaaataaacatgaaattcttaagattttcatatatatttattcattaataaatacttgagccaggcgcagtggtttacgcctgtaatcccaccgctttgggagaccgatgcaggcggatcactcaaggtcaggctcttgagaccagcttgaccagcttggtgaccatctctactaaaaatacaaaaattagctgggcatggtggcgcacccctgtaatcccagctacttgggtcactgaggcaggagaatcacttgatcctgggaggcagaggttacggtgagccgagattgcgccactgcactccagcctgggtgacagagcaagactctgtctgaaaaataaataaataaatacagccgggcgtggtgactcacacctttaatcccagcagcttgggaggccaagatgggcggatcacaaggtcaggagatcaagactatcctggctaacatggtgaaaccccttctctactaaaaatacaaaaaattagctgggcgtcgtggcatgcgcctgtaatcccagctactcgggaggctgaggcaggagaatctcttgaacccgggaggtggaggttgtagtgagccaagattgcgccactgtactccagcctgggcaacagagcaagactccatctcaaaaataaataaaaataaataaataaataaataaataaacacttgagagcctattataaatcaggcactgttctaaacactaagagaaacaaaaggatgaatcaactgtagattctgtcctcagatgtttgaaagacttctaggtagatatgtatataaaccaaatataaaataaaaagtgaacctaactgtcttaaaagaagtaaagactgtctctgagaaaaataaaggagggaaagcttgcttctagctgggaaggatcccaaaagactttatttaaaaagatggttttgaattagctttgaaggatagtaatgaaatctatcactttttgatcagttattatgtgccacattcatcatgctattttctaatccttataataattccaagcagggtgtcatttcccctcctttagggatgaaatatcatccctaaagtgtcaagagagttcaaataacttgtgtaatgtccagggtgaggagttcgagaccagcctggtcaacataatgaaacctcatctctactaaaaatacaaaaaaaattagccaggcgtggtgatgtgcacctgtaatcccagccacttgggaggctgaggcaggagaatcacatgaacccaggaggcagaggctgcagtcagctgagatcgcaccattgcactccagcccaggcaacagtgcgagactccatctcaaaaaataaataaaaaataacttatgtaatgtcagttaatggtagagttatgattttgctgttcaagtgtttctactgagatggtagaaaagcatattacaaggatgaggagtaatgggagcaaaggcacagaggtgaagttatcggcctctatggagaataatggcaaaccagttcattgaaagaagagtgtgagtatagagcaagcttgtccaagctgtggcccgtgggatgcatgtggtccaggacggctttgaatgagaccaaacacaaatttgtaaactttcttaaaacatgagattttttgtgtgtgatttttttttttaaagctcatcagttatcgttagtgtattttatgtgtggcccaggacaattcttccagcgtggcccagagaagccaaaagattgaatacccctggtatagaggaataagcagcaaacaaaaaatgaaatggggagtctctctgaaactaatctgcttctgggactgcccaattaaaaaaaaattaaaaagggctgggcacagtggctcacacctgtaatcccagcactttggaaggccgaggcaggtggatcacctgaggttaggagttcgagaccagccagaccaacatggaaaaaccccgtctctactagaaatataaaattagctgggcgtggtggcgcatgcctgtaatcccagctactcaggaggctgaggcaggagaatcacttcaacccaggaggcagaggctgcagtgagtcgagattgtgccattgcactccagcctgggcaacaagagtgaaactccgtctcaagaaaaaaaaaaaaaaaatgaaaaggtaggtttgttcagatgatagatagttttgaatgataggcattcaaatctatcaaatgatagacatatcagttgtgggatgggaaagagtgttttgaagtttttttgaggcattaacatgatctgaggcttgcttgagggaaaactaatttggcagaaatgtggaagatggagtggagatattctgaagatgggaagaccagtgagaagacagttgtagtccaggatagagatgtttgaaaaatatgttctaggataatgccaatgaaatgaggcaagacaggaacaatgatgcaaggggctttatgtaggtagaatcaattactggatatgatgccttcattttacctttaagtaaaccaaggcttagagaaagtggtctatttgatctagaaagaatatgctgtagtgtcgctatctacttggaatctgttcaggactccttggtttgtcatctagtctaccatgtaaaccaagtggcaacttatcttctaatttaagatattattggccaggcatggtggctcacgcctgtaatcccagcactttgggtggctcaggtgggcaggtcacttgagcccaggagttcgagatgagcctgggcaacctggtgaaaccccgtctctacaaaaaatacaaaaattagctgggcatggtggcatgcacctgtaaacccaactactaaggaggccgaggtgggaggatcccttgagccggggaggcaagggttgcagtgagcagattgcatcagtgcactccagcctgagtgacagagtgagaccccatctcaaaaaaaaaaaaaaaaaaaaaaaagatgccgggtgcagtggctcacgcctgtaatcccagcactttgggaggccatggcgggcagatcacgaggtcaggagttcaagaccagcctggtcaatgtgatgaaaccccatctctgctaaaaaaaatacaaaaaaaatctgccgggcgtggtggcatgtgcctgtaatcccagctactcggaagggtgaggcaggagaatccttggaacctgggtggcggaggttgcagtgagccgagatcgcgccactgcattccaacctgggcgacagagtgagactctgtctcaaaaaaaaaaaaaaaaatattattattgcttaggatattatataatcatacattcattaagtatttattaactatctgtcatgtgccaggcactgtgttaaatactaaggatccagagttttaacaacattattccatcccctctagatctttaagtatactagatgaaactgagacaagaaaacccaaccataataactatcacatgaatagtggaatacactaaggaagggacccaactgttaactttgcatggctggaagtgggatgggagggggagtgtaaaggaagcttcttaaaaaaaaaaaaaaaaaaaaagacaagtcctgcagaagcaatgcttcctggaataccataatggtagattgaaaaaaaaaaaaaacctgaagaaagtaaaatttatattttcttcaataaaccattctacatcatgtcaccatgcccttgtccactaggacagctcctgctcatcctttaaaacatctcaggctgggcggggtggctcacacctgtaatcccagcattttgggaggccgacgcatttggatcacctgaggtcaggagttcgagaccagcctgaccaacatgatgaaaccctgtctctactaaaaatacaaaaattaaccgggtgtggtgacatatgcctgtgttcccagctactcaggaggctgaggcaggagaatcccttgaatccaggaggcggaggttgcaatgagctgagatcgtactattgcactccagcctgggcaacagaacgacactccgtctcaaaagaaaaaaaaaatcagccaggcacattggcttacgcctgtaattccagcactttgggaggccgaggcgggcagatcacgaggtcaggagttcaagaccagcctgggcagcatggtgaaaccctgtctctactaagaatataaaaattagttgggcatggtggcgggcgcctgtaatcccagctactcaggaggctgaggcagagaatcacttgaaccaaggaggcggaggttgcagtgagctgagatcgcgctactgcactgtagcctgggcaacagagcaagactccatcaacaaaaaaaaaatctcagatgttactctctgaagtcttccctaaccccagcccatttcctccctaacaggattaatttccttctttgggttcctactgtgttcatacttctattactgctttttttttttttttttaatattgacatgtagttctttaggtgaccatctatgcctttttttttttttttttttttttttttttaataaggagtctcactctgttgcctggctggagtgcagtggcgcgatctcggctgcaggttgtgtgccaccacacccagctaatttttgtatttttagtagagacggggttgcaccatgttggccaggatggtctccatctcctgacctcatgatctgcctgcctcagcctcccagagtgctgggattacaggcatgagcctccaggcctggcctaggtgaccgtctatgtcttattcacctttatatcagtgtgctaacatagagcctgccatgtagtaggtgcacagtaagtggtcatgacaataaatagagagggagacaatggtagatatatgaaaaatcttggccgggtgtggtggctcacacctgtaatcccagcactttgggaggctgaggtgggtggatcacgaggttgggagttcaagagtagcctggccaacatggtgaaaccctgtgtctactaaagattaaaaaaaaaattagccaggcgcatacctataatcccagctgctactcaggaggctgaggcaggagaatctcttgaacctgggaggcagagttgcagtgagctgagattgcaccattgcactccaacctgggcgacagggtgagactccatctcaaaaaacaaaaaagaaaaaaatgccatatgaaaggatttgaactgtgttctaaagataatcatatgaagtcgtgttactttgttttttttttttgagacagagtctcactctgtcgtgcaggctagggtgcactggtgcgatctcggctcactgcaacctccacctcccaggttcaagcgattctcctgcctcagcctcctgagtagctggtattacaggcgcacgccaccacgtttagctaatttttttgtattttcagtagagatgggttttgccatgttggccaggctggtctggaactactgtcctcaggtgattcacccgcctggggttccctaagtgctgggattaccggcctgagccaccacacccagccaaagtcatgttttacgattgtcctggcagctgtaggaaggatgtactggatggggcaagcctgaaaacagagatgatttaggaaattatggttgtccaggtgagttatgatgaagatctgcagcaatgctgtgtcagttgagttgaagagaaaggatctgatgattggaatgtttaggaggtaaagtttgtaggacttagtaattttactggatatgaagggtgagagaagtctaggatcaacttgggtttcttttttgttctaaaagatatgttatttgataaaggagtattgttgacattaataacaccagattgcttgacaatgaccttaccttgatatgttaagtgaagtcaaagatctctcagagcactgcctcagaagttttcagttgagtcagactagccattgggaaaataaaatctaaaattggcacagcccttaactcaagagaagtcttcagcattctgaggtaatagtctcagagtggactttgttggttgaagaccttaccatgtactgtcattcattcattcatttatttattttgagtttcgctcttgttgcctaggctggagtgcaatggcacgatctcagctcactgcaacctctgcctcccaggttcaaacgattctcctgcctcagcctcccaagtagctgggattacaggcatgcaccatcacatctggctaattttgtatttttagtagagacagggtttctccatgttggtcaggctggtctcgaactcccaacctcaggtgatgcacttgcctcggcctcccaaaattgtctttaattaaaagcaactttcttctggtgttcactagtttaagttggagtggaagcctattatattaaaatgaagaccaaaaataattgtcatgagtgggtgattcccagttaggccttgaagaatcaggccagaaaagttatgaggttaattttagagaaaatatacttgtttgagttcttttatgtggaggttctagcatacgattccacagggcacaggaaaccacagtggaaatgttactgtcgataaaatgagacctggttgtagctgcttcaaccagattgtcttccacaaatggctataagatctgtaagtttgtgtgtgtcttatcacttatttctttcacctggtacatatatggattgtctctgtagcattgagctggaagcccctgtcttagatactaggcatgtgacttgaattgggttactggtatatgggagttcaactatcccactttgggccaagtggtatgatctttattcaaccctagtcaaatattcagtcgtcatctggtcaaagtattatgatcagtaggtcaccctgaagtaagaaaacgtttatcttccagtagagtggggcctggggtggtagttatcctgtgacaccttgaattgctttgaaggaaaatataaatgagaactgtttatcacagagcacagttgcttgcgggatatgcttccttggatctgttcttgcacctctttatcagactcatttccttctctctttctgcatattatcacctcagtcttcttggagttggttttcagctaacgagatttcagaccctgatttcatgttctatctagttcctcaaaattcagaccaagaatgcctacagcaaatatatgttctttgttaatgaattccctattattgttgctttagttattagttcttcaaataacaacttataaatcttttttttttttttttttttttttttttgagatggagtttcactcttgttgcccaggctggagtgcaatggcgtaatcttggctcactgcaacctccacctcccaggttcaggtgatcctcttgcctcagcctcccgagtggctgggattacaggtgcccgccatcatgccggctaattttttgtatttttagtagaaacggggtttcaccatgttggccaggctggttttgaactcctggcctcaagcaatccacctgtctcggcctcccaaagtgctaggattacaggcatgagccaccatgcctggctaacgtataaatcttatatctggagacagatataagatttacagatcatctgggaatttgttgtgaagagtgacatagtttaggagttattgatcatttcagtacaagaatgaataagaatgaaggggaggcttgaagatttggtgaaaatgcccattttccactgaatcagtggtggttgacaaaaactgctaaccaattttttctcttatgaaaatggcaaaagaaatttatatatatatacatatttatttagtcctctaaaaaaaataaaattagacaggtctggtggtgtgcacctgtagtctccagtacctcctgagtggcttgagccctccaggtcaaggctgtagtgagctacgaacacaccactgcactccggcctgggtcacagagtgaaatctcaaaataataattaattaataataaatataaaataaaatgtgacatccagagcttattcacattcttcacctcccttctcttattctttctctgggtaatctgcattttagttttctgactttcagaccagatatcccttacttgtgaggatacaatgtaagtatatagtggcttgttagtatgtaatgtggtctttagtgtccaggccctggttatggggattgtggttgtctttttttttttttggaggtactgaggctctgccaagctaacttcgttttaatgcatttgataatgaaaaataatctcttcttccaatgcataggctttactttattccttgtaggccactttgcttttcacctctgtttcttgtaagccccttgaagttcagtgctagtagtaggaaaagggatattcacctggaactttaatttgagattcatctgggaaagttgatttttatgtttgtctttattgtgaggcatgatgggtccaaggaacctattgttatttaatttgtccaccatttttccagtttttcccactatttaacattttcttactctgttaatacacatcagggtggtttttcttaaacatagagccatattgactacttgccaagacacaagcttagggataacacattaagagtaatatctacttttacttagagttatagttctaagagtgtacaattcccagcatgtgtgtattcaccatgaataaaataacgttaatgcacaagttggtaaattcattttttttttttttatttttgagaccgagtctcgctctgtcacccagtctggatggagtgcagtggtgcgatctcggctcactgcaagctccgcctcccgggttcacgccattctcctgcctcagcctccggcgtagctgggactactggtgcccgccaccacgcctggctaattttttgtatttttagtagagacggggtttcacagttttagccaggatggtctcaatctcctgacctcgtggtccgcccgctttggcctcccaaagtgctgggattacaggtgtgagccactgcgcccggccaattcattgcgtttttattcaacaagtatttattgattgcctgctgtgaactaggcatggtcctagatgctgatgagtaaacaaaacaaaaatccccgtcctcatggagctttcatcctagtgagtcgagaccaagtaaaagttctaaataagtaaattatattgtatcagacgatggtaaaataaggctggagagggccgggcgtggtggctcacgcctgtaatcccagcactttggaaggccgaggcaggtggatcatgaggtcaggagattgagaccatcctggctaacacggtgaaaccccgtctctactaaaaatacaaaaaattagccgggcatagtgccgggcacttgtagtcccagccactcgggaggctgaggcaggagaatggtgtgaacccgggagatggagcttgcagtgagccaagattgccccactgcactccagcctgggcaacagagcgagactccgtctcaaaaaatatatatatataaataaaaaataaggctggagaggtagtttaagagtgccaagtttgtggggaatttggtgctctgattttaaatagggttatcaagaatattcactaaaagttgacacttcaacaaagttctgaaggaagagagggaagaagccatggaaatatctagggtgaaaagcattccaggaagaaggaaaaggcaagtgcaaaaaacctgaggcaggaacaacaaggaagccagtgtggcaagagtggagtgaaagtgaaggagagaagtaagagaaggtatcagagaggaaatggggggccagattgtctatggacttgtaggtcatggtaagcaaggacttagacttttattctgattgagatgaaaacccgttggagagttttaagcagaagaatggcgtgatctgatacaaaaaaaaaaaaaattagttctggcggctgtgttgagaatagaccaagagggaagttaagggcagaaacagaccacttaagaggttattgcagaagcccagggagacattatgatggcttggaccagggaagtagccattgaagtcttaagaaatggtgagatattggatatactttggcttttctttgagacagggtctcactctgttgcccacgctagagtgtgtgccactatgcttggctaatttttttaacgttttattttttgtagagatggggtcttgctatgttgcccaggctgatcccaaactcctgggctcaagcaatcctcctgcctgggcctcccaaagtgctgggattagaagtgtgagccaccgcacctagccagagaaaagaattctatctttggatggcaagagtgaagataaaaaaaaaaaagaattctatcaagttctactacagatagatcaagttctactacagatagatcaattaagatgagaactgagccaggcacggtggctcacgcctgtaatcccagcactttgggaggctgaggcaggtggattacctgaggtcaggagttcaagaccagcctggctaacatggtgaaaccctgtttctactaaaaatacaaaattagctgggcatggttttggacgcctgtaatcccagctactcgggaggctgaggcaggcaggagaattgcttgaacccaggaggcagaggttgcagtgagccgagatcacgccattgcactccagcctgggtaacagggtaagactccatctcaaaaaaaaaaaaaaaagatgagaactgcgaattgaccgtttgatttagcagcatggaagtcaacagtgacctttacaagaatgattttgatggaatgatgagagtgaaagcctacttatagtgaattcaagaaaaaagtaggagaggaattaaaggcagggagtacagataatcttttgatgaattttgttgtaatgggaatctgagaaatgagtagtagctggaggaggatgtgggatctggataagagattttgtttcatgccagacattacagaatgtttgtgtgttaataggattgatccagtagagaggcaaaaactattgacatggaagaaggaggagagattggctgaaatggtttatggtgttggaaaagcagagctgttgattgtcctttgcctcaatggtctctaagccacagggaaggaaaaacaggaaaattaaagagatagtaattatgaatgctgctgctctggtctctgtagaattaggtttggagatcttgatggcagcctctggttttatttgtgccaaagcacctcagcatggatcttgtgcagagcttatttccttctaatacccagcaataacagctgggccctgtttttctttggcttctgaagataaaagggataagaaagaagagggtttacctttgtatctgtagccttacttttctaccgtgaacatttgaccctgcctattaatatgattgtggctgatagttaatattaagtttgttttattggctgggtgcggtggctctctcctataatcccagaactttgggaggttgaggcaggagaatcatttgggtccaggagtttgagatcagcctgggcaacatagagagaccccatctttaaaaaaaaacaaaacaaaaacaaagtacatgtcccacctcttccacactgaaagccatggtgtatgggcagggccagatgctagtaaaaatcccttctgttttctccacagcatcacttatcatgtaggacaagagtggtcaataaagaagtttaactattcatgcttctagttacagagaaatttgaatttccttactttttaaaatgaaacttttagtggcttagactttagaaggcttatcttagcagtcaaataagggtggaaaatacaggtaatttcatactttttacggtagttactaggagaaagtcttctctggtaatgaagtctgacccagaagcctatgagtcatatttgttgaatgtgctaaacataagacatagtaagataggaaataatgaaattccagctcagccattgctaacccccaattgttcttaaattgtgattgtgtagccagcatagtcttactctaggttctgtgtctgtttttacaaaaaaagtaaaagtcctaactattcacacagatttgtttttatgataagagatccaaaggaggtttctaaataattttcagaattgctctaaccagttaccttttcacccgaagtagatctggaaagcatccagcaaaacagcttttgcatgttcatacctttcagaatgaatcatcttccttccctttagctagagaagggctatgtgtactgtttctggcagaatttccacagatgttttatttttcttaagtcttccagtgcttcacttgagttgaacctagggggtacctgatgttccccaaggagatctctgaatctcctgactcttggttgtttgtgataaaagagcattccgttctgattcttctgggaggatttcaggtatccttttttttttttttttttttaatgaagttgttcccactataggaaatcagagatggcaggcaatagactgtataatgctgtactaaggattgtagaaaggtgaaggtttgttcttgcttgttgagcataatcctctttacctgtgaaatggaaagtagtatcatcagaatgttgaggtgaaatctgggacatcttctgttctccttaaattcaaagcttgtcccaactatcctgaactttttatttttatatttcacagtttccagacatcagtcaagagtctgattctccatttgttttcatctgcaaaaatcctcaggaaatggttgtgaagtttcctattaaaggaaatccaaaaatctgtaagtcatgattttttttctttaagactagtcaagtgcagtagtaaggaatggggaaaaaagtagaacaaggagttcaatctataactgactgtgaacaatcagttgaggtaacccactacctttggatcagcctgtaagtcataatctttgatggtctaattttcttttcttttcttttctttttttttgtcttgcatcttacttgtctagatttttataaaatcttcccttttggccgggcacggtggctcatgcctgtaatcccagcactttgggaggctgaggcaggcggatcacaaggtcaagagatcgagaccatcccggccaacatggtgaaacccccccgtctctactaagattaccaaaaaaaaaaaaaaaaaattagctgggtgtggtggcgtgcgcctgtagcacctgtagtgcctgtagcgcctgtagtctcagctgcttggaaggctgaggcaggagaatcgcttgaacctgggaggcggaggttacagtgagctgagattgtgccattacactccagcctggtaacagagcgacactcagtctcaaaaaaaaaaaaaaaaaaaaaaaatttattgtgttctgtgtgtccctagtgttggaggcttaatataattatacttatcaataactttatgttaggttaactacagtaaagcctttccaaagtataccttgatccacaattaccggcatagtaagtcgctctaaacttcaatttcagatcctattacattaaaatgctatttgtcagccaaaagagtgttttgccccactgtactgctcattaaaggaagtagtaaggcagtgcagtggcaacattgtcatttatccatttattcattgttcagtattcaactcaagaataagggctgggcatggtggctcatgcctataatcccagcactttgggaggctgagacgggtggatcatctgaggtcaggagttcgagaccagcctggccaacatggtaaaaccccgtctctactgaaaatacaaaaaattagcagggcatggtggtgggcacctgtaatcccagctactcgggaggctgaggcagaagtatcgcttgaactcgggaggcagaggttgcagtgagccgagatcacgccactgcactccagcctaggcaacaagagcgaaactccatctcaaaaaaaagacttaacattttaagtatttattattgaacatctattttagagacaccacttcccacatttctcttcattattggttcccagagtacagccttggctctcttgcttttcattcctttttaacattttttttttttttttgagacagagtctcactctgtctccgaggctggagtgcagtggcccaatctcggctcactacaacctccacctcctgggttcaagcgattctcctgcctcaccctcccgagtagctgggactacaggcatctgccaccactcctggctaatttttgtattttagtagagatggggtttcaccatattggccaggctggtctcgaactcctgaccttgtgatccgcctgccttggcctcccaaagtgctgggattacaggcgtgagccactgtacctggcctcattttaaaaatttttattagttaattgattgagacagggtctagctgggacccatcttttcttcctctgtcctagagcagcctcttgtatttcaaagcagtctcaaaacgcatatagtgggccgggcgtggtggctcacgcctgtaatcccaacactttgggaggccgaggcaagtggatcacaaggtcaggagatcgagactaccctggctaacacagtgaaaccccatctctactaaaaatacaaaaaattagccaggcatggtagcgggcacctgtagtcccagctactcgggaggctgaggcaggagaatggcgtgaacctgggaggcggagcttacagtgagtcgagattgcaccactgcactccagcctgggcaacagagcgagactccgtctcaaaacaaaacaaaacaaaaacaaaaacaaacaaaaaaaacacacatatagtagtggtgtcctccctgcctaacatccttggaaaagcaacatcagcaactctcccatttgctcatgtcagttaccattttgtgcctctttgtcattgctttcccattgtgtgaattgcatgattctagggcatgcattgtcctcactggtgcgaaactctccctcatccaataccttggggaccaactagccattttataaatctatgccctagagaagtacttctcaaactataatgtaactaaaaatcacctagcaagctgttaaaacacaggttcctcaatcctgctctcaggtgatactgatgctgttggccagctggctgtactttaagtaacactgctttcaatcacaaaatgaaatgcttagagtaggaatttatattaatgtatatttactgcaaaattcaggcaacatcttgattgataagatcctaagattcctacacattcgaagatctgaaccaagttgcccttaactgacacaaattatttacttcagacggtactccagttggtggcccagtagccctggaaatcctttcttttctccactattaaggatttatttatttttgagatagggccttggcctgtcacccagcctggagtgcagttgtgcaattatggctcattgcagcctccacctcctgggataaagtaatcctcccacctcagcccccaaagtagctgggactacaggtatgtgccaccacgcccagataatttttaaatttttggtagagatgaggtctcactatgttgcccagtttggtctcaagtggatcctcctgccttggcctcctaaagcgttaggattacaggtgtgagccaccacacctggccctgtttaggatttagatctccttttaccctccctctgttttggttctagcagtctaccccttcctcctccatttcattctcaccttcctctaggtactggtggcaacactggtggtaggaggaaacggtggtaaatcctctctctcaaacccactgttaattgatctttagtcctacttcccttttcgtagcttcttcccctggcttggttttcatctgctgcctaaagtcctgtgagaaaatgttctgtgtagagtttagctatttctctgaaatgttttactttagtactttctctacaccttcaggacctatagggccttcatttttctccataaggtttcatgatggtgaggggagtgacattcttaggagaaacctttaataacttcctatctttttcgtattgtttctgttagttaatggtagactagacaaggttaaaaattgcacagaaacaataggtagtgaaaattttattttgagatggggtctcactctgttatccaggttggagtgcagtggcacaatctcaattcactgcaacttccatctcccaggctcaagtgatcctcccacctcagcctcctaagtagctgggaccacaggcacgcgcctccatgcttggctaattttttgtatttttgctagaaacggggtcttgccatgttgcccaggctggtcttgaactcctgagctcaggtgatccatccaccttggcctctctaaaaaccttctactctgccagaactctcttgccttaggtcctaggggataacctccagtagtttaagctggaaaagtctttaatcccagttacattggggaaaatacatacctgcctcttaatttgaaatggttatcacactttcccctagatatattattacatgaagtgattaagtttaatagcaataatattaatacttggtcaggcacagtggctcatgtctataatcccagcactttaggaatctgaggcaggaggatcacttgaagccaggagtttgagaccagcctgagtaacatagcgagaccctgtctctacaaaaaaataaaaaaaattattccagtgtggtggcgtgtgcctatagtgccagctacttgggaggctgaggcagaaatattgcttgagcccaggagttcaaggctgcaatgggctatgattgcaatactgcactccagcctgggtgacacagcaagaccctgtctctaaaaaaaaaaaattaattaatagtctgctttacttataacactgtggcttaaatgtttgttttttttgtttgtttttgttttttttttttgtgggatgtcttaggaacctagccaccctttacagattagttctatgataaatatattcgaaattccaaacttttatttttgagacaggggtctcactgtgttgcctagactggccttgaactctgggctcaagagatcttcctgcctgagcctcccaagtagctggaactactatgtagatatacactactatgatgcccggcttcaggttccaaacttcagacttgcaaataaactttcagaatatgacccatttatgtgttgtatcatatatatatatataaaaaatatatggatgtataaatgccttaaattaaaggtgtatactttgatttgtttgtttttggaagtgtaaatttgagtttgcttgaccttaaggtaattgtgtctcctcaaattgagataattcagaaaagagcaatatacaatagggtatcacctggctctgtgtctgctttatataggttgaatactcagataaaggaaattttttaaatttagcaacatgctctataaactcatgcaccttatatcttttgcaaaccatgtgaaaattcctatgagagttatatcaattaatgacaaatattttttccccttttaacttcttgcccatctgctgcacatgcatttgactttcttttaggcactatgattgaggatgtggtttaacactgaaacgattaggtactaaatgtaaaaatattggggaaatacagaaactaagtgttacaccctaccatgaagaggatgtattgtatgtcactatggttcactatccagatcctgatcttagaagcccagggtgggctgggcgcagtggctcacgcctgtaatcccagcactttgggaggccgaggcggatcacaaggtcaggagatggagaccatcctcgctaacacggtgaaaccccgtctctactaaaaatacaaaacattagccagacgtggtggcaggtgcctgtagtcccagctactcgggaggctgaggcaggagaatggcgtgaacccgggaggcggagcttgcagtgagtcgagatggcgccactgcactccagcctgggcgagagtgtgagactccgtctcaaaagaaaaaaaaaaaaaaaaaaaaagaaagaaaggaaaaaaaagaaaaaagaagcccagggtgaactagaactcagagctttgagttcctgcaatctaaggacagtcatgatgactgctgctttccacaagaagccccggtcccttaccatcattgcccacagctggcccaagagttgcctctattggcaatcactctgttagacgttaaggatacaaaatgtccatgattgtaaggagttcacagattgttggcaaatgtctgattttttttaggcagcctagaggatgaaagaacgtctgaattcctgggaatatcctggaaatccttgttcctcttgtatcttgtttctcctattagctttccattttagacatcatcattgaagccagagattagtctgcctacaattgagtgttttattctgatgggttgatcttacctgagctggtctcacttgagggctttcataatcatactggagtttcctgaaacgtaaaataggaatgttctcattcagtaaagctttaagaatgtgaagaaaatgatatgtctttttttcttatgaagaatctgaaataaataataattaaaagacttgcctggggttatatggtaaatgaaaggtgaaattgaaaccataactaagaaacctaactcccaagcctcagcgtaaataatataaccacccttacttcttcaggagactttgaatttatgaagccccccacttttttttttgagatggggtcttgctctgttgcccaggctggcatgcactggtgagatctcagctcactgcaacctctgcctcctgggttcaagcaattctcctgcctcagcctcccgagtagctgggattacaggcgagcaccatcacacccaactaatttttgtatttttagtagagacggggtttcgccatgttggtcaggctggtcttgaactcctgacctcaagtgatttgcttgccttggcctccgaaagtgctgggattacaggcatgagccacacctggcctgaaacactttaatatatattatttcagttataggctgagcatcccaaatctgatctttttttttttttttttttttttggggagtgggtctcactctgtcacccaggctgaagtgtagtggtgtgaactcggctcactgcaacctctgcctccctggctcaagcaattctcccacctcagcctcccaagtagctgggactataggcctgcaccaccatacccggctaattttttattgcttttatttttattaattttttttttttgagttttactcttgttgcccaggctggagtgcaatggtgcgatcttggctcactggaacctccaactcctgggttcaagtgattctcctgcctcagcctcttgagtagctgggattacagacaccctccaccacgcccaactaatttttgtatttttagtagagacgggtttcaccattttgaccaggctggtcttgaacttctgaccttaggtgatctgcctgtctcggcctcccaaagtgcagggattacaggagtgagccactgtgcccggcccaaaaaaaaaaaaaaattttttttttagacaggtctcactctgttgcccatgctggagtgcaatggcatgagatcttggctcactgcaacctccacctcctgggctcatgccatcctcctgtctcagcctcctgagtagctgggactccaggcttgcaccaccatacccagcaaatttttctgggggttgaggggggtttggtttttttgttagagacagtatttcaccatgttggccagactggtctggaacttctgggctcaagcgatctgcctgccttggcctcccaaagtactgggattgcaggcatgagccaccatgccctgccacaaatctgaaaatctgaaatgcaaaatctaaacctttttgagcttcaacatgatgctcaaaggatatgcctcattggagcatttgggattttggatttctggatttgggatacttaaccagtaaatatatataatgcaaatattccaaaatccaaaaaaatctgaaatttaaaacacttctggtcccaagcattttagataaggaatactgaacctgtagttatttgattaaaggactcagtgtatgtgtaatacacgtagctcagtgactggtctatagaatgcacttcatgttagctataatcttcttaataattctgtgtgttagtaagggctttttcctcctttcattttacaggtttatggaagttgttttactcaaatctttctggcacaaggtttcctgttcttttcactgtatcagattgcctcaggaacaaattattccaatttacatttcatttctagggcacaatatcatagagttggaaggaaccttcagtattgtatagtccagtttcctcttagagttgataaaaattgaggacaagagtgactaggtaacatactcaaggttatacagctaggaagtcttaggattaaaactgagtttttcagccaggtgtggtggctcacgcctgtaatcccagcactttgggaggctgaggtggggtgggggattgcttgaggtcaggagttcaagaccaacttggccaacgtggtgaaaccctatctctaccaaaaaataaaaaaattagctgggcgtgatggcacacacctgtagtcccagctacaggggaggctaaggcagaattgcttgaacctgggtggtgggggttgcagtgagccgagattatgccattgcactccagcctgggcgacagagactctgtctcaataaataaagtctttcaacttatgcaatacagacgactggatgtctggagtcctagatggaattctaaattctgtcccagcttgtcctaaaaagctgaatgggactcacctctgggtaccaccacctttacaatctgtactcttacatttgtctgatatctgctatttgtggttacttagtactgtctataatataaaggttttgaaatttgtagtgtctacctttgtttaattcatttggtgagagcatttattgagcgtctaccatttggcagtcactatggtagtgttagggatacaaaggctgacttgccttgtaacagggctctttgccagatggctggcacatgttcaggttttcagccaggcagcataagggataaaagaactcctaaatccctgggaatgccctatgctctaaagccctaattaaaatcaacagcattgtgattattgttaaatgatattcagggtatcacttagtgatggtttctgaggaagcccagaaaaggacataatgttcttctagaagcaggtgtagcctaaaagaaaagagagagagagataaacagacaaagagagatatacagacagactaatgttgggcaagaggagatttaagtaaacagagaaacttgttaggctgaggctaatttttctcacagtcttactgtgccatggtcagtacatgtattcttaacttaattggacaagtgaaaatactgaaatccagagaaattgaatgactcgcctaggtcacacagctagttaataccagagaagggtggactagaacctgggtcttctgatttttagtccagtgctctgttatgcccaattgctgcaacaaatgaaaatgacaacatattgagaggcagtgattatgggcatgggcctgtggtatactcagctgcctttgaaggggaagactccttgttttttttttttgttttcttttttttttttagtgctgagactgaactgaattatgtttctattttcagcataagcatcactattgacttagatgagactttttgtgggagaaagcaaactgccaaactgttctcaggccagacagacaggaattctcttaagattctcctaatgagatggatggttcctaaggctgctaccactgagccaaactctatcctggtagatctgagaagaggtcagagaccacatcagtaatatacctttcattagggtcacctgggatgggaaggttgcttgttttctaagtttaacacttagagagtcatatagcctatgacctttaaccttcttagctggtgataggggccctttgtcagtaaagcattcatgtggattctattccactgttgcaggtcactccccctattaagtctgaggcagcaaaggggtgttgaactgcttttctcactgtgaaggttcatgcattatgctcagccagttaacaggtcacaggaatggatttcccactgtgaaatgcctgcctttattgcatgtgtatattcttaaaaatttgccgtagcatcaaaccccttaaaaatgtgattatttcttttctagtagctacaaaattagaaataattaacttcttagattcttaggacaaatactcattgtatgcatttgtgtatccttgtacagtgttcccattgcttccttattcttacagaatgaaactctgaagtttggaagtgtctgagtcctgaagtaagataattgaatgtgacaggaacacagtaaccagaagacctgggaggctgcaaaagatttgcattgcaaatacaaaaataaataatgagacttatttttctcccttacagggaaattggattccaagatccatcaaggagcaaagaaggggttaatgaagcagaataaagctgtctgacccaggagaaaaggaactatacagcatagtggagttttgtgtactaaaattgctatctactggtcctttggaattgaagtagtagaaacctaaaggcttggcgtcaggcttgaatatctcagaacttaaactcttaccaaaatctgtatatttttcttaaggagtgggattcctactttatgtaatggggtcgaaatctttgaacacattatttataaaaacctgtttaaaaattctaa

SEQ ID NO: 1287 - DNA, 5518 bp, Homo sapiens
aaaacgcccgcggcgcatgcccggcccgcccgtcagccagaggagcgcgcactcccggcgacacccgcgcgcacttccgtcccggccacgcgcgcctctagagctggctaaagtggttgggggttggatccggcgcgtgacgatgacgttgccagaagccaggatcatagagacgctcggcctccgccgcacgcgctggcggactaagagtggctggcgaagcgagcggccggcgcgggcccctggcgggcgggcggtacagccccaagcctgagacccggacctgagcatcgcaggttcgagtcccgccccgcctggggcgaagccgggggtggcggcgacctcgcggcgttgcaccggctctgtgagcacctcccctctgagcacttcccttgtgacaggccacttcccttgtgacaggcccaggacgaggtggccaggcggcccccatggcgtccctggtctaggcggagaaccgcctgggcgatgagtgagaacctcgacaacgaggtagagtgcggggagacgctgggtagagacggggatggggtgggaggaggcggggtgggtcaggaaacctgccagagaataggtggggacgaggcaggtgcgataggggaggaaaggagacgggaatggggtcgggagggtagactgggggaggggcagggctgagtgcagagtgcaccgacggaggtctgggtgtcccataaggaagcttggggggccaggcccccagggcctagtcctcaccctagcaccccatctgtccccacacagggcccgaagcccatggagagctgtggccaggagagcagcagtgccctgagctgccctaccgtctcggtgccccctgcagccccggcagccctggaggaggtggagaaagagggcgctggggcggctacagggccggggcctcagcccgggctctacagctacatcagggatgacttgtttacctctgagatctttaaactggagctgcagaacgtgcctcgccacgccagcttcagcgacgtccggcgcttcctgggccgctttggtctgcagccccacaaaaccaaactctttgggcaaccaccctgcgcctttgtgacattccgcagcgctgcagagagggacaaggccctgcgcgttttgcatggtgccctctggaaaggccgcccactcagtgtgcgcctggcccggcccaaggccgaccccatggccaggaggaggcgacaggagggtgagagtgagccaccagtaacacgagtggccgacgtggtgacccctctatggacagtgccctatgctgagcagcttgagcggaagcagctggagtgcgagcaggtgctgcagaaacttgccaagtgagtgtgggcgcaagacgcccctcttggccagggctctgcccggcctgtgcttcctcagcctgtccatgcaccagttgggaggcccagcacaggatctggcggcccctttgggagctagccagcaagacacccacgtcacagtgggcacaatgacatcccaaaggaggggtcaggagcctggacatttggggagtggcctggcatgggtcgggggcagtaggtggagtccaaccaccgatctgctcctcttacagggaaatcgggagcaccaaccgtgccttgctgccctggctgctcgagcagaggcacaagcacaacaaggcctgctgcccgctggagggggtcaggccatcaccccagcaggtcagactagacttcggtggccacaaacccctatcctgggttttgaaaaactttgcttttgctcacccttcctgttgatctccctgctttgtgttttcttctggtaacatcacatagttgtcagctgttcctcttgtttgactgccagcccctgtggggaaatcagggtttccaggcccaagcgctgggcagccagggtaaggtgcagctctctctccctgcagactgagtatcgtaataagtgtgagtttctggttggcgtcggggtggatggggaggataacaccgtgggctgtcggctcggcaagtacaagggcgggacgtgtgctgtggcagccccgtttgacaccgtgcacatccccgaagccaccaagcaggtggtgaaggccttccaggagttcatccggtgaggacctgtgacggggctcccgggaagtcctatgcggtgtgggagcagagggtggtgatcctgccccgggaattctggagtgcctgccatttcagccagatgaaggaaggtgtggccagaggagagagcagggggactgcttgcccagttgtgggcacttgggccagctcgtgattcccacaggtccactccatactcggcatacgacccagagacgtacacaggccactggaagcagctgactgtgcgcaccagccgccgccaccaggccatggccattgcctacttccacccccaggtctcaacgggggccctgctgggggagggtgcctagcctaggtgggcctcagcacagcctgatgggaacttttcaccacttactccagaagctgagccctgaggagctggcagagctgaagacctccctagcgcagcacttcacagcagggccaggcagggccagtggagtgacctgcctctacttcgtggaggagggacagcggtaaggagcccgagtggggcggggcaggtccctgcagggactgtgacactgaaggacctgcaccttcgcccacagaaagactcctagccaggagggcctgcccctggagcatgtggctggggaccggtgcatccacgaggacctgctagggctgaccttccggatctctccacacgccttcttccaggtagccatgagtccctggtgggcatggggacatgttgagggaggcctgacgcaccatcaggacgtgatgggaacagtgggctcaggcggtgagatttgggggagtatccaggcaggtgagccacaggggagggtgaagtaagaaagaggttggtcatcactgatttgactcgggataacctagaggtacacacggcagtggcccttgtcacagggaggatgaggagtggccctcagtgcattaccacagggcactgctctgggctcggcaggagggaggccatggtggcctctgggctgggaaatactgtttcactgtttgctcactgctgcaggaaggctgtggggacctggagcggccgtttttggagacaggcctggcaggacctcctggagggctaggtgtgggggtgggagctgcagttgggtgattccaggggccccggtgtgagttgtgggaggcaaagcccccttgctggggcagggaaggtacagcctattggcctgcggggcctcatgagccctcaaccaagtggggcaaggaggaggctgtgcttagcacgggcttggcttttaaagccaggggctggatgagggcatcagcaaggctggtccaaggtggggtcagggaagacgttgggcaccaaggtggggagtgggcgccggaggtcccggcaggatggagggaccaggaatgtgggcgtcggggcaccagtggcaccacaggagaggagccactgacatcctgggcaccgcctgcccccaggtgaacacacccgcagccgaggtgctctacacagtcatccaggactgggcccaattggatgcggggagcatggtgctggacgtgtgctgtggcaccggcaccattggcctggccctggcccgggtgagccctcctgccctgctgagggcaccctctccccaccccaagacccccattgaccccagctcaaagtcaccacagctgactccatcatgccccaggcccagctcctctttgctgcccacagggccccatgtactcccctccctgggtggggcgacaccacgctttcctgtttcagaaggtaaagagggtcattggggtcgagctatgcccagaggctgtggaggacgcccgggtgaacgcccaggacaatggtgagtggcaaggccgtgggtgggggtggggatgggggcagccgccacccctgctgcaagcctcagccacagccagggcttgggggctgcccgacaggtagagcaagtgagcaagctctttggctaggggttccccagggctggccctgctgggagggcatgtggccctctgacaggccacggtgccatctcttcagagttgagtaatgtggagttccactgcgggagggccgaggacctggtgcccaccctggtgagcagactggcctcccagcacctcgtggccatcctggacccaccccgtgctggcttgcgtgagtggcttttgcttaaggaggtggcacgggaacgaggacacatggggtggctcaccatgttatgcactctctggctgtggggacccagctggtgtttgcctcctcagattccaaggtgatcctggccatccggagagctaagaacctcaggcggctgctgtacgtctcatgcaacccccgggcagccatgggcaactttgtggagtgagtgtctgcaggggcctgggtgggggctaggcctgctaccaagcccccagctcccacaggagcccctgattagcctatcggctgaccttagcgccccccttttccccccacagcctctgcagagccccatctaaccgggtgaagggcattcccttccggccggtcaaggctgtggcagtggacctgttcccgcagaccccgcactgtgagatgctcatcctgtttgagagggtggagcaccccaatggcacaggggtcttggggccccacagccctccagctcaacccacaccaggacccccagataacaccctacaagaaactgggaccttcccctcatcctaggcccaggacccattatggggacaggagctgaagggctcccagggccccaggggcggggaaggcatggcttgctggccaggatattcagaggtaggcagccaaagggcacagaaccctgtgccccaccaggattggcctgctgctaggggccaggggccctgaccaggaagacaggtgggttcctgtagcctgttgcccatccccagggcctttgtggactagccaaggctgtgagggccagaataaacaactgctcaacaaagggtgtttctgtgatgagagccaggggtctgaacacagggcctgggtgccagggaaagggccaaactaggcctaggcagctctgcaagcctctctgcatggctgggggagtcagggcagagcttactttaaaaaagaatgttcgatttgatacttaaacttgaggagaggcagagagaggtctgggaactgcaccagctgggggcatggggtggagaacactgggcagagttggcccctctgtggccagcctggccctcagcccagcagagagggcatcaaccaaggaaggggccatgctggggtgctgctcagctgttacaaaggcagggtccagcctgcagggaggccccaggaggggatctggccagtcaagggtccacagggtgccagcctctcaccctcagaataaagacatcagccattc

SEQ ID NO: 1288 - DNA, 26466 bp, Homo sapiens
aaggctactatctagactcgaatgctttcatacaagtgattttcaaaaattagtcaataaaaattgatgtcagtgcaggcccaggcccgcccccagatacactagtttctaggtctggggccagcctagtaattgttactaggcacacaggtgatgctgactcgatggcctgagacacaccccttgagaagaagctgctctggggagacgagggtatgagtggaaagaggatgggcgaggaggccgggcttacctggacactaaggtgatggacggcgtctgctgggcaggcctcggggaggacccctcagctttgctctcagcaggggcccgacaagctcagtgggcagtggcaggaactgagtgccactggaaagcccattccctttatttagaaaacgagctccaggaagccgctactttgtgtccatttctcttgaggaaacttaccaccttggttgagcggcttcatggcagacagcagcgagccagcggccggactctgtatttcggaccccactccagtgctccctgggtcataccaggatctgcctctgtccacaaagatgagggaaaatgatgactgtgctgtgctctctacttcctgcggttactgcgtgattctaaagctgccactcggaacagcgagtcctctgccgtcgagagcagggaggggtagggtggacaggcgatgccgtggaaagacgtctcggtggaaactgccatggtggaaaggtggcgcgcttctcacggctgagttgctgcgcctgcagacggaagctccccacaggcagagctgcttggatgtgtgagtcatgaagccagagaagccccgctccatgagcagtgactccccaggtaagactttcagccagtcctgcgctggccagagtcgccgggcccgtgggaatcacggcggctccacgtctccgggacagcagggaatcccaggggcctggtagtgacaccggagggtcctcagggaacctctggtctggccctcatttcccaggggtagaaaaggaaatctgaaattggattaaaccatgcagcaaatatttactgaggctctgctatgggtcaggctgttttctgctgggtgcagcggggtgcagcgctcaggtaccccttccctcttagggcttcccactgggtagaggagggagatgttcagctcccagctcatctgtaaccaagctgtgcctcagttgtctccattcaggccctgggggtgagcccagcctttggcctgtggccccaatcccgctgctggggctcctcccccctgtgcccttcccctccccggtgcggcttcagtgcagccaggctctccttggtacccaggccagacagagtgatctgactttaactctctacagacagacaggaagagggcccaggagcaggagctggacagagcagagctgctcctgtcctgaggctccaggcccattcctttctgtctgggtttctccactgggctcttcctgccgaagccacccagtctgagctcccccactccctctcctggtacacaggcccttggttcacccctcagagggctccgggtgggaagatgcacagttagttggagactgaagggctccgtggccccaggagggccagcccctttctccataggatggcaccgaacacctcagctgccactggagggccaccctcccaggtccaagacgtccaacttcatgtgattttttaccacatttcattaattttgtggagcaaatgtcttcccattttacatctctgaaatccacgtctctgacattgctgttggcaggcggcacctgggatgtcgtcatcctggccataactagcctgtagtggacctgggtgatacacaggggcctcttggagctacggagtacctaaaataccatatagttaaccaaaaagtagcagaaaatatgtgagcatggatctcagccattttgcgggttggctgcaactgggacttaacctgccataaccttagatcagcctgccacacccaaggagggcctgcccccagacccagactcaagtttagacacagcctaaacgtgtacctctaaatctgcacaaactcagctgcccagatactggatttccttatctcttccgggaaatgcaagatgaaattgccctcctgttgggtattttcctgatcctttattctgaaaaagtggtcatccttttccccacaggccctgtgacctccctcctgtcttgcagctcctcctggcaccagtccccagggctctcctgttggtagttcctgcttttcttcttggaaattcctcgtggacctcgagatctttaccctaaaatagttctgttgaatttcaccctggcaatgtaaattgatagcttatcttcacagatgccagacaatggacaactcaccatcagtcctctgctcacctgagacaaatgcatgtctgattgcttcctctgccctattgtttatgtgaaaatgcagattcactgagccagactaaggcatcagtgactgttcctctacctgcctctcacatggagattgtgtattcagtgaaaggctgatcaaagacccaaaggaatgcaacagtttatctcttatctacctatgacctgcgagctgcccaccacccccagttgttgcgcctttccagacagaaccagtgtacatcttacacgtattaattgatgtcctgtgtctccctaatatgtatcaaagcaagctgtgcctcgaccaccttgggcacatatcctcaggacatcatcctgaggctgtgtcactggcatgtccttaaccttggcaaaataaactttctaaattgaaacctgtctcaggtactttgggttcataccacaagggagggttctcatgcacatgtgcctaataataacaactatcacaaaagactgcaaaaaccacaactttacacaaaggctatcgtaaccttcctcaaaaaaaaaaaaaaaacaaaaaacttctgttgcaaggacatctgcccagcaactgcttgtccaaccctggagtgctgtcacccttgttattgatctttgtagccaaagaattatctcaaaacaatgatgtgatcctcattttccctttaaaaacctttgtcttcctaggccgggcactgtggctcacgcgtgtaatcccagcactttgggaggccgaggcgggcggatcacaaggtcaggagatcaagaccatcctggccaacatggtgaaatgccgtctctactaaaaatacaaaaattagctgggtgtggtggcatgtgcctgtaatcccagctactccggaggctgaggcaggagaatcgcttaaacccgggaggcggaggttgcagtgagctaagatcacgccactgcactccagcctagtgaccaagtgagactgtctcaaaaaaataaataaataaaataaaaacctttgtcttcctttacttccctgaatacccacatagcttattgtggcatgcatattcccattgcaatgccctattcacaaatgaacatctttttcgttcagagtctccctgtgctttaggtagaccttgtctagatgctaactcgtagagaagaactcagcttgaatatcacccctgggggatgacctccattctctcctccttcctttattcagcgaggttatgaagcacctgccctgggccaggggcttttctgggcatggagtaggagtggacagaacacaaaacccctgtccaacacacctcacagacattaaggattgagtgctgagtatgcttggagtcaaactgtaaaagatttgaagatatttattcatgtcatagtcccaggagatcctgagaacacgtgctcaaactggtggtgctacagcttttggtttcgtacgttttagggagacataagccataaatcaatacatgtaagatgtaacattggttccggaaaggtgggacaactcgaaggtggggtggggcttccaggtcataggtggattcaaagattttctgggccgggggcagtgactcacacctgtaatcccgccactttgggaggctgaggtgggcggatcccttgaggtcaggagtgagagaccagcctggcaaatacggtgaaaccccgtctctactaaaaatacaaaaattagctgggcttggtggcgggcgcctgtaatcgcagctactagggaggctgaggcaggagaatcgcttgaatcttggaggtgaaggttgcagtgagccgaggtcgcgcccactacactccagcctgcgacagagcaaaactccatctcaaaaaaatttaattaattaaaaattaaattaaattaaaatactgtaaaatacttcgatatctttcagggcctgccatctgtcatgtcggtatcctattgctacggagagtccgcctagacagtcttaagtctgttttgacgttaatgctggtccgaattccaaagggaggaggagggtctagtgaggcgggtcccacccggcctttcccatcagagcccgaactcgcggttcaggttccctctaggacgcccttggccgagaggaggcctccaatggctggctggggggcttagaattttatttttggtttacagcgcagaagaagagcagtgaggccggggcgcgggtggggagggcaaggcggcggctcaaaaaaaaagccagcccctcgcggcccgacagagtctcggcgccccgcgggtcggtggagcctcaggggtgagcgcaggccggagacaggggaacccgccgcgggacaggggaaggccggacggaacgcgggtaagctgccgcagcttccggccgggccactagcgcggaccctacggccggggcgggacttccggcaaggcgcggaagcggcggtagctgcagctggcgaagttgggcgactggcggatgcaggccttgcggcacgtcgtgtgcgccctgtccggcggcgtggacagcgccgtggccgcgctgctgctgaggcggagaggtgaggcgtccgaggctcccgccccccgccgagcgaatgtgtccccggaaacctgtccccgtccgtcgtggcgttgtgcacgtctcctccctccctgggccgctggttgcgcgcgggtcggcaggaggataccccgtcctctgactttggttcggaggctcctcgccctccacctgtgtagtcggaggtgtgcgcgactgcagctccgactacctgggagcagttccgcgcccctctccacccacgcgcgcccacccacagtgagaagccggcgggccggggtggggtggggagggaagggtttctcacggatctgcggcgtccacattcacctgtgagaccgtggacactggtgaggggagctgggatcgccgggccgggggcctgacctctgcacacgctgtggccgcccggtgggaggtccttgtcctccccactcagcagactggacaactgccgcgcggcgggtctgcttgttcagcgtctcctgtgttctccgctcgctggaggacaaagttttctccaggagcatttgcatttcttccggcatctaaacggagccccacgggtgcttagcattcctcgggcccggcgctgaaatgagcacttgtttaacttcacctgtgtggctccccgcgggaggcctcattcacagagtcacgtttgtggagctctgctttgcgccatctttggctcctgaccttgggcaagtgaattaagccgtcccctgtaaaattcggctaacacctgcctcacggggtgactggagggattagatgacatagtacatactgatgagtacgtgctcagcacatacgaggtacgcagaaaacagtagtggctattagtttatattgttaataaccatagctattatggtaggtacagtaagtgccaaagagaagggtaggcggaccataagcagaaatagttgtgaggaagggagagtggaggaaagcatcctagagatggaggtgctcagctgagtcgaaagaagagtaggatgtcactaagcagagacttggaggtggaggcggccctcccggcacagtcagcagtgcaagcagaatcacagaggcctgcaagtgtgggctggttctggccagatggagatggaaggagaggagcctggagcacgtttagccctgattatggaagatgctataccaggggctttagactgttaggtagacattagtctggttgatctgggataggggtggtctttcgcgtgtggtggtgtagttttgacaaagctttgtcatcaaatttctgttgttttgggtactatatgaagccttcttcagcagtcatttgccctgtctttcattacattcagcctacctaaacgaaccagctttctcatacagggtctgcacctgtgtagtttgctaaggtggtgtagggctaaagttggcctttccaatatttgggtgaatattttgttacaatcgaaaaggtagaaaataggtcataaactaggtggtacagctcttacaaaatatcgaaaattttaattatctttatatctgatcacttagaatctaagtcttagatagtaactagaaataacttttgaaaagagtttccttttttgataactgaatggtgctttgaaaaattttgttgagtttcgactattccttcgtgtattccacacacactggctgatcccctcctgctaggtattgtgctgatacatagatggggacacaaagatgagaaaataccacctcgttaatcttggggactcaggcaccaagatggaaaccggatccctgaagccacatggcaaagcagggactgcccggcaggccaggcacagaggcacaggagcacagcgtgtggggaacttctcagagctcagaaatcactgccgttttaccgaaggttgatttatgtattctctttaattgaccttcccgcccgcaggttaccaggtgacaggggtgtttatgaagaactgggactcactggatgaacatggggtctgtactgccgacaaagactgtgaagatgcttacagagtttgccagatcttagacatccctttccatcaagtgtcctacgtaaaggagtattggaatgatgtgttcaggtgagtgcgggtcacagcacaaaggaagcttcctcacactgtggatccttgcagtggaaggatccggtaaccagccagaccgacgcctgtgctgcagcccagcgctctccctccacggtggtgctgaagactgcaagaggcctcagccaccctcggggctctgtgttagaggcgaggcctggaccccacagcacacccagctctctcactcctgtcattttgccacttgcctgaagtctctttaatgctttcttggaccttgagctgtttctgttgcccagttaggataggggagctaaggctgagggctcccctggaaggtgagcaccaatgcctgtgtgctatgtgggtcagcgattaggggatttctgagaaagaggtgatacatggcctgtgcctctgaaaacaagaaacaaacaaaaacttttctaaaatccaatataatctcaataattaagtgctgtgtgctaggcgtgtgccacatctaggaacattaagatgtcttcactgtgacctggctctgtaggagtttgcggtctagttgggaggacattatcttcacaagaggtgacagtgatgcgtggcacgcaggaagtaccagtgatgctatcagtcactgaacccagaggagggagaaacttgcagtgtggagtaatcaagaaggcttcaccggagaggaggggttgcaaacaaagttgtagagaagggactccaaatggggtaacgagagcagcgtgaaggggagaagaaatgctgattgtgtatttcaggaccgttgtaaagtttggctggacttttgttcctgcagtggaaggagtgtagggctcatcctctggtgagccctgactgtgatgaatgtcgggcagttgtcgaaggcgtctgacacagcaggccatgtgcgcgggacaggctgcccctgcctgagtgggctttaggggcagaagagccttgggttgagtcctgactgtagcttattatatgaccttgggcaatttacttgactttgtttttttaattgaaaaaaattctctttttttcctgccaacaaagacccagaagagatacttgacttttctaagccccaattttctcatctttaaaatgaggataacactgatgcctcacagggttatgaaagaattgagattaggttctagtatgtatgcctggtatattagtaagcagtcaataaacatagctgtttttcttttctatttttttttgagacagagcctcgctctgttgcccaggctggagtgcagtggcgcaatcttggctcactgcaacatctgcctcccaggttcaagcgattctcatgcctcagcctcccaagtagctgggattataggcatgcaccaccacgcccggataatttttgtatttttagtagagacagggtttcgccatgttggccgggctagtctcagactcctgacctcagaagatccactcgtctcagcctcccaaagtgctgggattacaggcgtgagccaccacgccagcctgctatttttattttcattattaaaaagatgagtctggggagctaagctatgaggacgcaaaggcataaaaatgatataatggactctggggtgagggataaaagactacacatcgggtacaatgtccactgcttgggtgacgggtacaccaaaatctcagaagtcaccactgaagaacttatccatgtgaccaaataccagctgttgcccaaaaaaccattgaaataacaataaaacgaaatttagagagattaagtaaattgactatggtcacctaaataatcaacggaagagcttgaatatgaaccctctgtgactctatgctataacatatgggtgtcgtatatattaacaacatggacaaaactgatggctgaattttcctggggaaagttacctgtagaatgcatgataaatgcattaaaaacttatctgtagaatgcatgataaatgcattaaaaacttctgcagttttctcggggacataagaaaaaaaaaagagtgtggcggccaaatacaggataaatctgggggaagaccaaaggcagagagtctcaggaagtgctgttgctggagatttggacttcatggggagggagtgtgggagtggaaggtgagggctggcttgttggacccagaggacaagtccaccgggcagtagatctgaggtgcttgttaaacacagacctggaccgaggtctgggggcggccctggaatctgctttaataagcacttcagctgtgctggtggtgtggggggttgtcagggtctttctttgagaaaaggtgtgatgcggcttagggactgatgtgtgtgggagaccagagaggagaggagtcagcagtagtttcaagatcaaggctgggtggctggggaaagctggtttaggggattcctcatgagtactgtagagtttgaggggacaacagggaatccaagtgagcttacacttcacctgccagcacagctttttcagaacgtacgagtggatgcgatttttgaagtttagctcagctgaggccagataggaagagtgacttgaatagtatggcaaattaggagcggagctgggattaaaccccagaattaggagcggagctgggattaaaacccagaattaggagcggagctgggattaaaccccagaattaggagcggagctgggattaaaccccagaattaggagcggagctgggattaaaccccagaattaggagcggagctgggattaaaccccagaattaggagcggagctgggattaaaccccagaattaggagcggagctgggattaaaccccagaattaggagcggagctgggattaaaacccagctttccaggccagtgcttgctgccgccttctggcgctgcttgatagggactgagagaaggaggcggccgggtagagtcttttcccatctctggggctgcccccgaggtcgcccctggctccagccagcctgccctctgccctcgcccagtaccagctgcccgtggaggcattggtctttccgctgaagactcacttctctagtagggctctctagctcagagatttcttttgcattctttcattcaagacccactggccttcaaggatcagagtccagatacgttttagctgctgagtcttttaaatctgtctccctcccgaggcacatgaaaggcttctcttctttccagttagagaagaggctgggctactccattgtttttgctaatgccaaaacacacgccttcccatctgctgtttacgaaagggttaacagtgtgtcttttcagaaactgattttaatgttcagcctcttcaacatttattgatgactgtgatatagaaagtttgttgggtctaggacacagacacagattgcaccttaagtagtttatagtttaatgagcttcctggtaactttctaataattaaagcaaaatggaaagagtgtaataatatcaagtgttgttgcaaatgtggaaaaacatgagtttttatgaacttctagggggactgagaagtaggaaaacagtttggtgcctgctaaagtggaagatatccaaggaacctctgaccctgtgcagatctgtgatatgtctgcaaaacacaaacctcttgatcagcactggttttttttttaacccttgttgattaatagagagttttaggttaaatgaaaaaaatcacttataccaaaaatacacccatttttaaactcccaaaataggcatcataaccctcttgaagtgaatcctcgaagactatgaaattcttggtaagttttgctggtatcatggcatctttttcccatgttcagtcagtctgttagagcagaagttcactgaattaggatagcctgatccactttaagcacccaagagtttgctagttctcagaagtgtgtgtttgtcacctgaggatagtatttttggtatatttgcccagtgacgcagcattccaggctgagattgcagaatggctcatggagcccttgtgtagggaagcctctgactgtgtttctcctctgttctcatcacggcagtcatcctcacggaagaaggcttctgtgacaaaggtgtggggggttttccccatacagcaagcagtggacaccgactgggtgtcctctgattcagttccgataccatctacttggagatagtgctggatcccaaaggttgggggttcagtcccccagacggactccccccacaacagcagtcgaaagtatgggcctctagaacttatgaccaactggcttccagttgggattcccataacttcctctttgggttcaattattaataatttgctggagtggttcacagaactcagaaaaacacatttaccagtttattataaaggatgttgcaaaggatacagatgaagagacgggttgggtgaggtatggggaaagggtcatggagtgtccacaccctccctggggaccaccctccaggagcctccacaagtgtagctgtgcagaagctctctgaacccagtactcctgggtttttatggaggcttcatgacatcgccattccttcccccaggatatacagtgggactgtgtctggggagggtcttaagacccacagtcagaaaggtagacgcttgtaatcctagcactttaggaggctgaggcaggagacttgcttgaggcctggagttcagtatcagcatgggcaacatggcaagacctcatctctataaaaaaagaaaaggttgcagtgggccaggtgcggtggctcacgcctctaattccagcattttgggaggctgaggcgggcagatcacttgaggccaggagttggagaccagcctggccaacatggtgaaaccccgtctctactaaaaatacaaaaattatctgggcatggtgctgcgcacctgtaatcacagctattcggaaggctgaggtgggagaatctgcaagggaagtctaaaggatttcatttccactgtcactcaggcatcttctcttcctcacctaagccctgctgtgttggaggagtcccagaggcagggttttagtgagaccctcacggccactccccactcctgaccccataagccctgtgagcctacacagagacggtggctcctgagccgtagtggcagagaataacaccttgtcgggtggcccatgcagcaggttataaacaaatgttcgatgactgacgttctcctgttttgcagaaaattatagttttggtatgacaaggggaaattacattaaacaagcaatttagtgaactttttttttttttttgaggaatgtttcacacttggaactgaagtcattttcttttattctagtgactttttgaatgagtatgaaaaaggaaggactcccaatcctgacatagtttgcaacaagcacatcaaatttagttgcttttttcattatgctgtggataatcttggtaagtaatttgggtttaaaacatttttttttttaaagacagggtctcgctctgtcacccaggctggattgcagtggtgcgatcatgactcactgcagcctcgacctcctgggctcaagagattctcccaccccaggctcctgagtagcttggaccacaggcatgccaccatggtggctaattttttgtggagatggtgtcacaactgtattgtccaggctggtctcagatttctggccttaagcagtcctcctgcctcggccttccaaagtgctgagattacaagcgtgagcccctgtgcctagcctgtttcttcttgtggaacctcctgatactgaattgcttgcttagaccacctcttgatgtctgtggctatgctttatgaattttaggttcttcttcctgtcccctgccattggggtcaccataatgagtttctgaagttctggctcaggcttcttggtttgctctgtcccactgcagctcaccctgttgtgtgttgctacgagataccattgtaagccaggggcccagtagtgtcggcactttcagcaatgatgtagattaggcttgcagattcaatatgtcagcaacctaaagctgagttgatgataatgatgaaagttagtttgtggagttaggaataaacaaatgcctacaaaaacaaaaaatcaaaaagaaaaatcttaaatttcaacattgggctaacaccaaaaacatgaaacttaatagagataaatgcaaagtttgctaactaggttcagtaattctcctaggacaagattggaaagacctagcttggttgccattgaatcttctgccattggttgcagaaaatctgggggatttaggtgcccccaggctgactgagccagtagtgtgatgtcttttgtcagagccagcacagacggagctcaccttgatgatcatagaatgtctaggaaggggtgatgcgtcccctgtggtccgtcctggttagaccgtattagttattcaggaaaagagtgatagactgatagaatgtgaattgatttttattttcagggtatctggaaatatgtcctccctgaactgttgaaattactttgggtcgtagtggcagtggtcaagcgtgtgagttaggatgacattctttgtgtgacaccagcagacagttaggactggcaggagaaagagttccctgaggtggaggcgcaggcagctgttcaggaagggaaggcttgcctttggagagcattaagctgtcacgaaagctttttagggagcccctaggtggctggctgtcaggcacgctgtggaaggaacttctgcagtgaatgtttccacacctggaagaaaggcatgaaccgtgcagcacaggatgagaggacatgacgcccagacttctgaactcaccgcgcttctcagaggcatcctgcgctttttctagtataagtgctgttctttgaggacacagatgtaaagtggattgttttctctaggagaacctcagtcaagatgagattatgtgtctctaaagtgcctttttcaggtcgttaatatgcagcagctaattcttgctgtgtcttctgtttacatggagctagtgtggctggtccaggatggctgtgtcttctgtttacactgagctagtgtggttggtccaggatggaatccattttgctgcacctttcataaaagtctcttgcaatactaaatatctgtaattttttctttttttgagatggagtctcactctgtctcccaggctggagtgcagtggtgtgatctcggctcactgcaacctccacctcctgagttcaagcaattctcctgcctcagcctcccaagtagctgggattacaggtgcccaccaacatgtctagctaatttttgtactttttttgtagagacggggtttcatcatgttggccaggctggtctcaaactcctgacctcaagtgatccacccacatcggcctcctaaaagtgctgggatgacaggcgtgagccgctgcgcctggcccaaatatctggaatttttacacaatgaaaaggttctggattcatatgcaccttgttaggctctttggctttgtgtaatatgaaaagaagaaacagtgtgctggatgattcttcactctgatgaaaataatacatatttattacagaaaatttaaaagaggagaaacgacacctataatttcactctcagaatcaaaggaatagacctgagatttttcttcaactgtttctgtacagtaaaaaccgtggaatcatggtgttacatcctcgccctgctgaacagtgccgggcattttcccgtgttagtaaacattctctgtaaggacccccattgttacggcagtgcattgtcattcacttcacattctcccagtgttgaacattttggttcttttttttttttttttcctcctgagacagcatcttgctctgttgcccagactagagtgctgtggtgcagtcttggcttcctgcagcctcaacctcccaggttgaagcaatcctcccacctcagcctcccaagtggctgggactacaggtgtgccccaccacgcctggctaatttttgtattttttgtaaaggtgggatttcaccatgttgcccaggctggtcttgaactcctgagcacaagcaatcatctgcccgcctcggcctcccagagtgctaggattacaggcatgagccaccgcgcctggcctcccttcgtattatcacaaaccctgaaaggaatattttgtgtttaaatctttctgtgcctttcagactgtttccttaagccagaaattaactttggaaaggctcttaaaggtgcaataacactttaagtagcaaggttgtatcagcttaagagttcaaggctgcttgtttgatgaaattggatgtgtgcgtctgttccctgggatctctatgtttgggtgcagggtggattgtgcagcccctcagcctaagacttggggtctatactcttcttttgtgccttggtttatgctgatcaaggcctgcaagtatgagtctaaaacctgatccttgtgttctaaaaacctcacaggggcagatgccattgccacaggtcactatgcaagaacttccctggaagatgaagaagtctttgagcagaagcacgttaagaagcccgaagggcttttcagaaatcggtttgaagttagaaatggtaagttcatgtgcccaggtcagagccaaattcttgtgaacagattgaaatctttggaggaatgacagtgggttgtgcctgaggatcactgccacccctccctctgtgctccagagtagcttgtatgggattcacatttgaaaaggtgcagttaccaagaggacattttcccggagggcctgtgattgggtagtaaacagtgtccctgccggccatggtgagggctggtggaaagtgacatcagatactgataatccagctctcgacactgtgtggtgatttgaatgttccaaaaatatctgggtaaatatttgacagtgataattggggtgctgtcagtctagccaaggacctgtacttagcaacaagttctcaagggcgtgcggttcaggcagactttcaacgtgctgtgagcacaggacctgctgtggatcgcatgggctcagcagtcaggctttgtagccgtatttacacgttagtttatgcgtgttagggagccaagtttcacctttctagaaaaaagtcaatggcagacagtgagctgggaagctgctggcctgtcctggtgtacattcgtgtgtagaaaagaggaattccctgtattgttgagtgaaaaaccaagtggggctcagagccgtgtttccgcacggagcgtccgtccatcagtggggacccctgaagggcagccttgctcttttgtccggaagttcagatgttggagggagccttgtcccgccatctggggaataggggtctctggggctggggcagggctttacatacacacatttcttttttaattattattattaattttatttttttgagagaggatctcactctgtcaaccgggctggagtacagtggcccgatcttggctcgctgcagcctccacctcctgggctcaagtgatcctcccacctcagccccaccaagtagctgggaccacaggtgtgcgccactatgctcggctttttcattttttgtagagatgaggtctcgttaatgttgtccgtgctggtcttgaattcctgggctcaagcgatcctcccacctcggcctctcaaagtgttgggattacaggtgtgagccaccaagcccggcctcacacgtttcacatcactcctcttagcagtccatgaggtgtatgctctcatcccgtttcacagatgaggaaaccgaggcccggatgaagccatctgacctgggtccctcgggtggcagagctggatttcagtgcacttccgctcactccccagcccctgctgcttctgctgggtcaggccccagctgagttctttcctcagcgttgctgagcccatcctgaaggctgcagtgatggggcagggccgtgcttggtcaagggagccctgagtgtgccaacagtcgtctgccgccctctgttccctcctcgccttccttccttatgccacagggtgatcaggtaactgtactgacttgagcccagagaagagcagcccactcccgtaagacagccccccatttcaggaagacatgggtttgaatgcagataagacagccccccatttcaggaagacatgggttggaatgcagagtcctgccacttgggaactccagggtggaattcaccaagtaattgtgcatttacggggcctgaggagatggagggttaatttccatgttgaatagatgcgcctgcttacctcctagaacattacctcctagaacactgtgtgccctgcagagccatcgacctttattataggccacgtgccctcggaaacttgggacagtactgatgcgttctgttgagtgcgtttggcatgtgggaattgtgatggtgcacagtgtcttggccttcactgggttttgtaggcacactaaggtttccatttcattcttcttcagttgccctggcccagcctgggtctctgggtagagcacctgcaggggcagtggacggcctgggctcagggtcggtcagcacctgagaccagcgctcctaggcctggcctgtgactgggctgattttcccccacacagcgtgctaccaccggcctggcagagccagcacggcagccggcgtgtcagtgaggctccagcacaggcagcctcctccaaatgttgttcattcctttctgtgctttttcctctatagcagttcagttagggtcgccagcttgcttttttgaaaatcatagatttttagtttgttttaaaatgacgcagaactaggagaaaatgcaaatggctcctagttttctgaggcttttacacacatgcagtgtttgactgcagttagtttgggattgaaagtggactctgaggccaggtgcggtggctcatgcctgtaatcacagcactttgggaagccaaggcaggcggatcatgaggtcaggagttccagaccagcctggccaacatggtgaaaccccatctctactacaaatacaaaaaaaaaagttagccgagtatggtggcacatgcctgtagtcccaggtactctggaggctgagacaggagaatcacttgaacccaggaggcggagattgccgtgagccgagatgtgccactgcactccagcctgggcgacagagcgagactccatctcaaaaaaaaaaaaaaaagtggactctggaaagtgctctgcttccgtggcgactggtcggctgaacttggtctcacttgtcactcagttctgctgtttgtacctgccaagtaagggagggggactcgggaggctgggcagcctccagccccaccgcctccacctgcatcactttgggcgagtcatatgtgatgaactgggccggctccagtctcccctctgtaacgtggggagaattctccctctcacggctaacgtgggaatcggcagatggaaaacactagctacgcagagtgtgtactgtacacgtggctctgccaagccaggaagggtaggtgtgctgtctgaccgtcacggcatgtggcgtgctctgagtgtaactcgaaaggagaagtttatgagaaagattgaaagaagccagaaaactgacgttcgtcttagttttttgccattgatcattgaactcgagagtggagaactggacggttctaagccaggtttactcacacctctgctccgttgccttaaagccagaaatggttctttacaatcacatagggaatgtcggaggaactgcagggtcacctaacagatgtcagctgagactctcaacaaaaaaacgtttttaccaagaaagctaatgccttcacaggtagggcgctgctggaggcatgtgctggccgccgggcagtgaacctggaaagtgtagagtccttgaaaccactgtggcacgaacacatcctgtggttgttggaagaaggcacagctgacactatatcagtggaattttctgccagcaactagcttactccattttccaagatttggctgaatttattttaggtgtttttttttttttttcttatcacttgagaacattttttcatgtgatgtttcatctttgaaaatattataatctgaagtatgagctggaataatttctttgtcatgtaaaatccttgtttttttttttggaggtgcgaatttttcttacattaacccgtggtggtcttttccctagtagttgctattgagtgttgatgtctgcctctgacaggctaggggtagtctgtctaagtgaacagaaggacattgttgaaagtgaagtatcattatttttattcctgcatcgtcttttgttctttattcttggcagcggtaaaactcctccaggcagctgacagctttaaagaccagaccttctttctcagccaggtttcccaggatgccctgaggagaaccatcttccctctggggggattaacgaaagagtttgtaaagaaaatcgctgctgagaatagacttcatcatgtgcttcagaagaaagaggtacgagtgagcagttgcctttgattagtgcctgtttccctttcccgactgcatggcacggagcagctggacctgtgggtcccgcaccacttccccttctccaggacctaacatcaaaggcgggccttggagcaatagatggaggagtttgctgaggcgcacggtacagggctctgctgacatcgggagcagcctatacgagactccttgcttttttcctctcctctgcccctatgtggtaggcagctttccccacagccttagcagctggtggggtgctcttgggatggcctgcctgccaggtgagtgccaggcagtgtgatgcagccccgagacccctggaggggcaggtgctgtgccgccgtctgcacactcatgtgccctgtcacccgcttgcccggcacagactcgttcggtgccatctgttcgggcgctgtgctgctgggccgcgaggaattggtgacgcgcacacagttccatcttcgcctccatggagcccgcccgcgagtgggggacacaggcaggaggccaatcagtgtaaacctagaaaatgtctacggagggaggtgtaggaccctgggtgggaagcaccagtggggtctgagagtagggaatggagatgccaaaaacggcctcaaaagaagtcacatggaacctgagacctgaaggaggagaggatccggtgtcccagagagggctgggaaagtccagatgagggaacggcagtgcaaaggccttgaggcgaggagaagccagggagccgctgtgggggtgcctgcctgtggccccagctcctcaggaggatcgagcgcacccaggagtttgaggacagcctgggcaacacagcgaaactcgtctcaaaaagagagaacccggagtgttggcggaactaggatgaagcccgtgggagggccttggggatggagggcgagggcgctgtgggatgagcctcacctcttcaggggccagtgcggtgggagctgttgctccttcgtgtctcttcctggtaatggaaacggccatacctttcatcagagccatcttccctgaagagcacgcccaccgcccgtcctcctctcctcttgttttccgtttccggtgtcgctctgtggtgggagccgcagggatggaagggcagtcttgagagacacaaaccagagtaaacgatgcagcccctgatggggccacggtggagagcgcacgccacccaggctccccagctagggcagatgtgcttgaggaaggcgcctctctcctctgactcccctggagccctcccctaaggccttagcttcaggcctggctttcctgctacctgccccttctctggtccctgtctctcccccactcctcgcaggacagtggcctgaaggacctgaccgggttctgctttcttccccggggcagctggtgtgagggtctcccgcgcagggtcagaccccgcgggccgagacaatgaggcgttctctaaggctctggcatcgtgtgcgccggctgtgactggcggccgagggtgccggtgggcagccgggcccctaccctggaagcaaagtgtggggtgaggccgggaggccccagggcccgctcaggacgtctgggtacagcttgggccaccgccacttctgctcctctcacggctgccgtcttctcatttcagagcatgggcatgtgtttcatcgggaagaggaattttgaacatttccttcttcaggtgcgtgctgctctttgacacaaagagatggggctgcgtgtctgccctgggcctagatctccgtcggtaatgacatgtttgttttccagtatctgcagcctcgacctggtcactttatttccatagaagacaataaggttctgggaacacataaaggtgaggtgcagactctgccacttgtcatctgaaatgcctagagctgtggcgtttcagctctgggagactagaccagagttcctgtcgtcccttccacttggctggagaattgtagaaggctctgtggggcggccgggggcgggcacggcctagggtggaacagttgccttgatggtggctgggtgcacttccagatgtggcctcagctgagatgctggagttcatgaaaagcgcgcctctgacttggaaggactatactctgtgagttacgtatcaagtccctgtaaaaagaatgatttccttcctgtgtaaggaaaatgttaaactacacaaaactccactctgattcagggagtaaggtggacgtcccggcatggtgtgaatgattaaggaccacatgcagcgatgggatcaggcgtccgcgctggccagagtgctgctcgctcatgtgcagacccttactgcggtgaggcctgcgtgagcctgtgctgtgcctggtgtcaggggacaggctccgagtcagtcacagtgtgcagtcctgctgtggggacagagtgcagccattgttgggttagtacagtggcggggatgtgcctgccggcgtgatgatcaggcaggtcttgacacagcacagacctgagctgtgggactggccaggagagccaggctgcagctcaggtgtagggcgtcttgcagtgaattgcacttggagatcttccacctcttgtggaggggagacggcaggcggagccggggctaggcattcctgagacaggtggaggtgacagctttgcttgggacagaactgccagacaggattgcccatgtatctgccagccctggccccagcaggagccagttggatgactcatggcttccacctgcagttcacttcactgaagaaggctgccggcccaggccacgtggtaaatcccatgaggttctctctgcctgtgtgccccactgcaggggagggaggcagtgagtttgccatctgctgtgtgacattgtgagggtgcgcagagcagctgggggtagccctgatgcagttactgcattagatggacactgtgaagacgtgcagctatgtcatgggctcagcaagaagggcccctggcgtcacacagggcacccagccgcatcctgggcctagggtcaggggctcctacagctggaacctgcaccttctggggcacaaggtgccttctttgtggccaccacaccccatgtccagcccaggcctggacaatgatgagatgtgctcaggtgcttggtcagggctggctttggtggttggagaatcgtatcttcctagtgagttacaccattgctgggcctgctctgggctgccctcccagcatctgccttcatgatgaggcgtgacatgtgggctgtaacttgttgcccagcctcatggagaaactgtctttctgtaggttggttcctgtataccttgggccagagagcaaacataggtggcctgagagagccctggtacgtggtggagaaggacagcgtcaagggtgacgtgtttgtggtgagtgggccggcctctgagacagcactggggctggttctggcagggccagcagtgcttccagaccagggcttgagaaggcctccagcagccgtggcttcctggaggctgtgactaactctgttcctgtccttggtcccctgcctttcctgggactggccatggtggcaggagagttttaaggtattcattaggctgagttgtatgctggtctcttaatcatccctgaaccccgatacacagatacagtttctccaattttatgaaagaggacagcgacgcccagagcttgggtggctcatccggtggagagggcatggcctcagtgccaaggatggtgcccaccatggtaggatccagtgagttgttgtcaggcaggtgcagatggccaagccaggatcaaaccaagccttccaccacagtggggaccttaccactgtgaccctggcctcaaagcagggccgctcagtggcggcaagctcaccccaccttcaggggaccttgccagtgtctagaggcatttttggttgtcacagcttgggtggaaaagcaaggacgcgggtgctgctgcatctgtgggtcaggccggggatgctgcttgccgtgttcagcacagcctcttccctgagtgacccggcctccaccttggcgcgtggagctgagaaggcccactctcagcaccctggctgccggctcatgttctggcacgaatgctggggcgccttctcttagacggaggcgggggccagcaggccccacccaccgattccaggacatctccttactaggaagacctgtggggagaaaagcctggctgcgaatgaattaaatgatctagatttcagtttgctgtgagaagaccagaagggttaaccaacggcctcctgtccctggacgggtcttggtgcctgcttagaacccaaagcccttaacttcatgctcctcgtcctgcttcaggggcggggcttggcacaatcccaggaggtgccaggtctcaatggcccgaggccatgggtgggtgacagggagcaggggcctcagaaccaacctagggtatctggggccccccagaccagggccagtcctggggcacctgtgggaagccagcagctaccagtccctcctttctcctcagccatttggtgtgtggaggaattcctggggtggccttgagagaagagcccgtggtgtggctggcccctgtccctgcgaatagaaaaaccagtcctcgaggggggccgtgctgctgccccacaggtggttgcaggtagagggcctgagtcagacttgaacctgcagcattcactgtcatgggctcggatctcacccctgcctcttgcccactctgacatggtacttccttcctgggccttagtctcctcatctgtaaaatggggattcaaaggcccggcgggtgatgagatgaatttctgtgggtagaacacttcgagcggtgccagcaccgttacctgtgtgtgtgtgtgctggtaggacagttgttcccagggaccacactgaggccggccttggggccaggtgcccctcggcgtccccaccttcacattccattctgcaggccccccggacagaccacccagccctgtacagggacctgctgaggaccagccgcgtgcactggattgcggaggagcctcccgcagcactggtccgggacaagatgatggagtgccacttccgattccgccaccagatggcactaggtgactgacgggagggctcctgaggacgggccccttgaagctgagcttcctgaggccagatttgggccagggatgggagaccctggggtaggaaagtcccgttgtggagatcatttggagattacctaaagtatttagaactcccgtgtcctgtgcctgccctgagcgaggcctgggggtgctgggagcagatgcaggcaggccccggcgtgttgggctgaagcaagtgtgtacactgccccgcagtgtcctgctgcgtccagggcccaggctggtgccctgcccttcccctctaagcaggggtttttgaccccgtgggctggtgctcctttctccctgggggcctgaggtcgaccaggaaaggcctgtgccccctccaagggcccctctcttctacccagtgccctgtgtgctgaccctcaatcaagatggcaccgtgtgggtgacagctgtgcaggctgtgcgtgcccttgccacaggacaggtgcgtggggtgtgggggtgagcccggggaggactgtactgctctgcaccctgccagggcacccgggttacagaggaaggggctgaggcccaggagtagggtgtgctcgggtcacacagctggtgagggcagagtgccaccagccctgccctgggggctcctcccacagtgacaactgtgagaggatttccactctggtgtcaccaaccagccagttcctgctcgggccctgagaggctcagctgctgcccgggccccagaagcgaggacagaaaatggaaggggcatgaggacagtgctcaaagaggcagagggtcggggcccctgtgggccgagtgtgcaggagctcccagggtgggcgcctggtgggtgtaggcctgaggaatctccaggggcaggtggtgggagggaacctggggtgagggaagcggaagcatcctctggctgccaccatgctccttcctgtcacagctccacattcccaaggggtgcagagacctgccagtcccttggagtcccaggagaggcccctgtgactgtcccactcagggagaggtaccctgaagaccctccctagtgaagccactgggtgccccaggcctctcctctcctgttcagcagcagcagcagcagcaaaaccctgctcccctgggagctcagtgcctggtgctccgagcacaggccaggccccataggggagcactctgcccctgcctgccctcggctggctccctgtggcacccctgatgccagggtctctcccctacagtttgctgtgttctacaagggggacgagtgcctgggcagcgggaagatcctgcggctggggccgtctgcctacacgctccagaagggccagcgcagagctgggatggccactgagagccccagtgacagcccagaagatggtccaggcctgagtcccttgctctgacagagatggatctgctagaaggaacctggagagcaggacccatggctgggcggctggtgagcagtccaggtgcccaagggccagcttgctgctgcccaaagcagaggaagccgggctggctgagggtccgaaaagcctgcaggggcccggcgagccccaggaagagcctcagctccaggctggggctctggctgctggagcatctgctggctggtggggtggcccgagttccccttcaccgcccccagggagggtttcccacctcagagtacaccgaggggacctgcagagggggctgtcgggacagcgtggaataaacattatttcaaggaca

SEQ ID NO: 1289 - DNA, 50317 bp, Homo sapiens
gggattcaggaagcgcggatctcccggccgccggcgcccagccgtcccggaggtaagtggggcccgggcccgggaggggcggctcagccgaggtcccctcgcgcccctggggacatctccgtggcccgtccggctccggggggtcccgaggctccaaaatgcgggccaggggcgcgggagacggaaggcaccaggttccgcaggcgccagcctctcagctaagtgcccttgggccggacaccggctctttgggtctcggttttatcacctgtgaaatgggcaccaacgtggggcctggggtagcaggtctggggggagggcggttcggttccctgagaccccaagccagggaaccaaaggcccggagccttgcagcccaccttaggagacttggaagagggatttcgggggacctaaggtttgcccttggcccctgagcatgtcggagggaatttggagtctggagcttccaaaggcttcttcttggttactgagtcccggagagacggctgtttcctccaagaggcatgaaaatctttaacctctagttctgccctggactctcaggacgtcccgggggcgggtggctcctgggggtgggtagcgggggtgggggtgggggagagagagactcccacactccccgcttgcctggaaacaccaaccacagatgcattcatcgagccacccactgctccagcctgccccagctgttccctctgtctgtcctctctgttttgcagatggggaaactgaggcttaggtcggggatctagacaattgggatttaaacccagggactatccagccccaaagcccttcccaccacaccaggtggcctgtcctggggccagctctgcacacagggcctggtgcccccggggtgcttgggaagtggcagggcagaggtgggccctgtggctgttctggctcagcttctaaaacaagagcctctgctgggggcagaggggccgtgaacccctgaaatgttaggcagataccctgtgggagctttgttctgggatgctaagaaccgcttgaggatttaagctttgccactttggctccggagcaagggcagagggtaagtcgggactccccgggctcctgaggagggtgacgaggtgggcttttgggggaacaagggtagaaaggtcaggcctgggttatctgcggggctaagagcgggcctgtgtggggcccggggtgtgctctgcagtcccctgctgtgtgaccttggcctggtcccttagctgtctgagcctttgtgttctctcctctgtaatactggggtgcctgagggcaagcccccagggctgtcgtgaggaccgatgaccttccaggaacctggcacagccactgttggctgccatcaatgtttaaccagttgtcgttgccccaaacattttcttaacaaagagggtgaaaaaagtcaattggccatttccacatttctctagttcattctgtttgaagaatgatgggaaccagaaagcctggacacccaccttgattggtgaattgcacgcggaaggggtcccagacacaaatggcaaatggcagtcatagttcagggcggttcactttgtaagatcaaggtggggctgttttgaaatggaggtaaccagggaatggttgcctgaacaaaaagggtgtgatgcccccaggagggatgtttcacatgagctccggtgaggatggctgggattccccaggtgaaacccagataccttatatctggggaaggggctgtggaggttcctcctgccttatctggtgccaactgggcctctgccacttactccctcctccagcaaatgctctctgcaagctcacctgtgccagctctgggctgggcactggagcagtgagatgcttccaatcccagcttcgctgtagcctgaggcgtgtgaaggcaagaaggattttcccttgtggccccccggggaggagctcccacacctgacttgtgagcatctagcaaggtgtgcatggatggccgacgcttagtaaatgtatgctgtggaatggatggggtcaggggagaatgccgtagggtaggaggactggcccaggaaggacccacgagggcttggtcaaggtagtgtttaagccgcaccttaaagaataaatgcagaagtagaggaaagagtattcaggcaaagagaatggcactagcagagatatgacttttacctgttaccaggtggctacacctggggtttatagagcagagaaatagttctgtttgtctggagtttgtgacgtgactggaaagggtgagggatcagacaggcaggagctaaatcagacccagaggcccagaagtcctgcctgggagtgacacggttgtttgtctgttctagaaaggtccctgtggctgcagagtgggaaagattggaggagctcagacagagaggctggccccaaggctggggaagtcatccaagctctgagtggagagcggcagctggaaggagatgtaggagggaaggaaacacacaagactgagcctcatgtgcctggcacatagtaggtgctcagtcagtatctatggcatggttgtctgaacaaatacttttgagatggtcaaagtcctttgagttccttcctctgttcctagggggatggggtctacatgaagtgggtgtctctactccatgcaggcccttgaccctgctgtctgcctcagtttcccccatttgactttgggaaagacactccagtccgttctccaaattatagggacccaggtaacagctcctcttgttgtcacagatagggtctggggagccaagataacatttatttcatgccagtgggccctctggaatgctccacatcgcccatttggagcagaattcacctgttaaagattaattccgatctcttgagataagtggctgctgttatgaactctgggtacaaggttctgtctggctttagccaaccctgggttgcattaacaactattatgatggtggcaagcctttattgagcacttactgtgtgccaagcactgagtcaagcaccctcagcacatttggatacaaaactatttttgtctctatttttcagagggcagaatgaggtctagagggtgaaatctcttgcctgggttctctcagctgagaaggggcagagctgggacctgaatcccatttgtgtgattgcaaatccatcccttcacctgtaaggtggcccgtccccatttgtctggaccctcattggggtgcctggggtcatgggggagctactctgcagtccagagataggaacctgagttggccgggtgcagtggcccacacctgtaatcccaacactctgggaggccaaggcaggtggatcggtcgagcccgtgagtttgagaccagcctgggcaacatggtgaaactctgtctctagaaaaaatacaaaaattagccgaacgtggtagcacgcacctgtagtgccagctacttgagaggctgaggtgggaggatcgcttaagcccaggagtgagaggttgcagtgaactgcgattgtgccactgcagtccagagcaagagatcctgtctcaaaacaaacaaagagcctgaactgcagacaggcctgggcttaaactgcatccgcatgtttaagacaggcctgctattccccgctggaggagctcagggaagccacctggcctctctgggcttccatttcctcctgtgtcaaagggactctcatcccactttgcagggatgacccaaggcacgtggatggggctctgaagcacagctcttctgcctcagcccgtgtcagctccccttgtccccaggcccattccagggcatgttttcttccagcttatcccccagacatcctcagagagcccctccatgccaggtgggtgggtggaaggtattgggggcaaagctagacttgcatttgggcaaataatgatatgttttcagcaatgaaatatttatgagcattgactgagtgccaggagctgtcaactttttttactttcctgatttaatgcttaaaaactagggctggagcccagctgcccaggttcaaatcccagcttccaataagttccattattcctttggcctcagtttcctcatctggacaatggggataaggtaatgcctgccttgctgggaggttgtggacagtcttcagcacaaccttgagtgtttagtttaaaaccagcatctattgcctgttgttcacttttttttttatttattatttttagagacagggtctcagtctgttgctcaggctggaatgcagtggtgtgatcatagctcacagcagcctcgaactcctgggctcaagagatcctcctacttcagcctcccaagtagttgggacacacccagcttattaaaaaaaaaggtttttttcagacaggggtctcactatgttgcccaggttggtctggaattccagagctcaagtaaccctcctgccttggcctcccaaagtgctcagattacaggtgtgagggctgatgttcattttgatggtgtcacagcttccccactgccgggggtgggcaggggcaggaatgctgagccccattttacagctgaggaaatcgagactcagagaggaagcaatttacccagggatgcccagctggctcatggcagagctggagctggaagccagatctgagtgacactggtgtccttgggtccacgaaaagcccagtggccagcttagcttcttgcgtggaaagctacgctaggctcacccaccttggcgtctgagccaccttagcttacctcccagctccgccagttgctgctctgtgacctcagaaagtggcttaagctctctgttcctgggctttgctgaggtcagagctctgccaacttgaggagggatttgggttattctggctgctgctcttgttctggcctgggctccttcaacctcgggtgcccttgcagcccatgagctggcaccccagtggccggacaggaatgaggaagggacagggcctcactttcaatgtgactctgacttccttcccacccctagccccttcctgagcattggtttcccctttctgccccgagccctggccactgccggctgtgtgaccccaaggaggttacatcacttctctgagcatgtttcctcatcggtgagggaggatcacacgagaccacaccaggcgcacaggaagcccttgccggtctccagatgaggtcagggcattggaaaggccacagaaggaggcgggggctcaggggacagacaggcgggccattgaccaaacgggaatatccttctatttctttggttagtgagtaacagcagcccctcttgtccacccaccctgccccttgcacaaagagctcctcagtctcaccaggcgcccgttttcccctgagggtggagtggcctgggttccacccggttgaccgagtgggctggccaccttctgggaccattccctgtgtgtgtgtttgtgtacgtgtgtatgtgtgtgtatattgatgtgcgtgtgtatgtgcgtatgtgtgtctgtgtgtgtatgtgtatgtgtgtatatgtatgtctatatgtgtatgtgtatatgtgtatatatgtgtatgtgtgtatatgtatgactatatgtttatgtgtatgtttgtgtatatatgtgtgtatgtgtgtatatgtatgtctgtgtgtatgtgtgtgcatatgtgtatgtatatacatgtgtatgtgtgtatgtgaatgtctatgtgtgcatgtgtgtatgtgtgtgtatgtttgcgtgtatatgtatgtatgtgtgtatattgtgtgtatgtatgtgtatatgtgtgtaatgtgtatatgtatttgtgtgtagtgtgtgtgtgtgtgtgtgtttatggagggtgggttccatgggctttgggctgagaccccagcaggtgagggtgggacagggggcatggggttgactgacccatgggtctggctcactcctgtccctgcttggcacacaggaggggctcaggaatacctgtagatagagtgaagggatgaatgaaggaaggaatgagtgactggacaagccagccaggcagggcatcagaaggaagcacctgctcagatacaggctctggctctgagaccaagtgtgcttgagtgagtgtcctggtcttgttgagcctcaatttcttcatctataaaatgggctcacgatagttgtcctcatgagaggtgttggtcttataggccagaaaaccccacacatagcaggtgctccgtaagctgtctgttaaaaaatggatgggaggaagctaattagttagctgggcagaggttcgctttggagacctgtctgccctggagagaatgactaagcccgtctttcactcctttcctctgttcattcattcattcattcattcatccagcaaatacatcttgagcagctgctatgtgccaggacctgttccaggcatctgggcctcagcagttaccagaagggagtccctccgccctagagcttttgtccgagtgacatcattccacacgcagtgctttgaggccactttgtgagactctgatacccacaatgacaagtaatccagcagtgggaactgtgatgagctcccttttacaggtgaggaaactgaagctcggagaggtcaagtgatccgtctggggccacgcagttactaaatggcaaagtcaagattcagactccaagcctgtcaccactgtgccatcttgtcctgctgagttccaagggatatggcgttgagaaggggggtcctagggagagggcatggtagcccccaaagggatgaatgaactcaaatggatttaaaagcagatggttggaagtctagccacattcacttcctgtagcgttgtggactcagttaaatctcattctttctgatcttcagtttgttcatctgtgaaatgataacaataacaccgacctcaaatgagagagaaatgtgaaagtgcttagcatatgataggtattggataaatgtcagcccttacctcctttcccccgggactgactttatacatctgggaatggagacaataatatttaatgtctatagttattatttggattaaaatagatagaaggggccagccatggtggttcacgcctgtaatcacaacactttgggaggccaaggtgtgtggatcacgtgagcccgggcattggagactaacctgggcagtagagtgagactccatctctacaaaaaataaattttaaaagtaggaatggtggtacatgcctgtggtcccagcttctggggaggctgaggtgggaggattgcttgagcctgggaggtcgaggctgcagtgagctatgattgtgccactgcactccagcctgggtgacaaagccataccctgtctcaaaacaaaaaacaaccaaatgggaggtgctgtgtgaagtgtgccatggagggtaggcattactgatggtacattgcaggcattagcctcagtcataattccaagcagttaacccctgaggcagcagcttactgttggcacagactggtgttgaggtgggctgggacagaggaaggatctcaaactggttttctgctgccttgggctcccttccccgactcctgccccatccactcataacgggcacctgccctcttccccctcctctgatttggcaaactcgggacttttgctcctagaagtggggtagaggaacgtatgcatggacgagtgtcctgtcccttctggtccttagtctcccagctgggaggcagcccttgtcctgacagccttctaaaggtgacagaagatggaaatgaggtggcgaggaaaccctttccaaaggtgaggtctctgcagtcacgagccctggttttggagccgggaagtctgggttccagtgcctgcccagttctgacctccctggacctcaatgtcatcatcccccacctcccactgcaaactgagggaatgttagcaagaatggcaaagcagccattgaacatccttatctgtaaaatgggggtaataattgctacgacctgggtggggttaagctgtatttgctccatagttatttggtatacagtacattcatgctttaaactaaaaaataagttcaagttcattgaacacttggtgtttgttgggcactgcactgaaggcttgaattatcacatttaatcctcacaatagctctttggggtaggagctgttattttattttttaatattttaaaaaataaataaatttatttattttttgtagagatgggatctcaccattttgcccaggctggtctcgaactcctgggctcaagcgatcctcccaccttggcctcccaaagtgttgggattacaggtgtgagccactgcacccagccttattttttagtttaaagcatgaatgtgctatacaccaaataactatggagcaaatacggcttaaccccacccaggtcgtagtaattattactcccattttacagataaggaaaccaaggcccagagatgagatgtgacttgtgcaagaccatacagccagtgagtggcagatgagatgtaaagcattgatcaggcaacgttctcagactatagaatcctctctggagttctccgtggctgtgaccatcctctaggagaggggctaggccagagagaaggcgggcctaaggttttgttttgttgagatggagtctcgctcttgtcgcccccgctggagtgcagtggtgctatctctgctcactgcaatctctgcctcctgggttcaagagattctcatgcctcagcctcccgagtagctgggattacaggtgcatgctaccacacccggctaatttttgtatttttggtagagatggggtttcaccatgttggccagtctggtcttgaacttctgacctcaagtgatccgcccacctcggtctcccaaagtgctgggattacaggcgtgagccactgcgcccggccggactaagaatttgatgcctccctcctcctgggctggagctgagtagcatgttctcaagcagggctggctgagagggtggaatcctggggctatgctctgatgggaaggaagcgagataagggaagaaggacctggagcctcctggggtagtgactttgtatccttgagctcctactacgtgccagaccttgtttgaaaccctttatgtggctgggcacggtggccgacgcctgtaatcccagcattttgagaggccgaggcggtcggatcacctgaggtcaggagttcgagaccagcctggccaacatggtgaaaccccgtctctactaaaaatacaaaaattagctggcgcagcggtgggcacctgtaatcccagctacttgggaggctgaggcaggaggattgcttgaacctgggagacggaggttgcagtgagccaagattgtgccacttatactctagcctgggtgacagagcaagatcctgtctctctctgtcacacacacatgcgcacacacacacacacacacaagaaagaaaaaaaagaaaccctttatgtgtgcttaatctccatgacattcccatgttgcaacaaggaaactgaggttctgggagggaagtgacctgcctgaggtcactaagcctggaagggtcatttagatgtaattcacatactcataactcagtcttttaaaacgtacaattcagttggtttcttagtgtattcagagttgtacagacatcagcactatctcattccagaacattttcatcaccccaaaaaaggactctgtacccattagcagtcaccactccccactcccagcccctggcaacaactaatctgctttctgtctctgtggatttgcctgttctgggcatttcatataaatggaatcctgcaatatgtggccttttgtgtctacaaggtgcatgctcttaaccattaagccacaccgcttcttggtggctcctacccaggggccgggacccttggaaatgacttggtccctgtgaaagctcagaggggcatctgtgtgtgctgtcagccggcctccctccagccaagggcttgcagaatgaccaaatgactgccgtggccacgctggccttgccctccgtggggcgcggtgagtcaccccagacctgccctgcctgggtggtgtgagtgcatggggtgggggcccagcaggacactggggctctgtctgtcctggacaggcggccactgtgcagcaaacaggaagcgggctgggccgagacctgctaggtaaatacaggctggccagggaaggtgctgggcatggcatgatgcccccctactgctgccgcctgccaagtgcctgggagccgtggggtagcctggcaggcagtaggtttcgcctggccaaggagttgagctcccagccggctgttcccagcagccgccacttcgaggtggctgccagagtctacctccaaggctctggatctggccgctctgccttctctaggagtcattgccttccttggtcctcagtccttttgttcatctgttcccctaatgatactaataaatagtacactgatactgatgattccaacagcagccatgcttgactgaatgcatgctctgtaccaggcactgggctcagtgttttgcatgctttatctcatgtaaccctcacgacagttcccttggggtaggtgctaggatcattgccatttttcaggtgaggaaaccgaggcatgggcaggccaggtgacttgcccagagctggtgaactggtggttcgtcagggactgcgacccatcccccactccattctttctccagcttctccctcccagagttcccttgtctttgtaaagtgtccatcaaaggcgcaggtcccggggatgcatgggttctaatcctgcctccccctttctggagcaaggcaatgccagacaaatgacttcgcctctctgagcctcagttttcttacctggaaggtggggagggggtggacaggtctgggattttctctctagtaacagcaaagctcagagtccttgtcttcctagtaccttcctatccacatgtccccggcaagactgatttggaatggcaggcactcacagttgtgtttatttgagggtaccacaggaagtgggggcccccaaattggctaaggagccccagggtggagggaggtagaagcacactgggtctgtctgggagcctgagcaccttctctgtgggctccttcctacccatggattccaacccccacccacctccccactgcccacccactcacccatctcttctgctttccttctccctgtgccccaggccacaccattcctctgtgcaccctgcactttcccctctacacctttgtccttgacacctcctctgccctttatcttcctcctcctcctcctcacagcctttccccctccccatcaggattctggctgcccttgctctgcaaccctgcctggaacttcaggtccctgatcttacagcctaaaaaaaccaaatattcattgacacctcattttgcttcagcaccatgctgaatgctggggacacaggggacacgaaatagtccctaccacatggaactaaaactctggaggtgaagagagaagatgaatcaaagaataatatataggccgggtgcggtggctcacacctataatcccaacattttgggaggctgaggcaggtggatcatctgaggtcaggggttcaagaccagactgaccaacatggcaaaaccctgcctctactaaaaatacgaaaaattagccgggtgttgtggtgcatgcctgtaatcccagctactcgaggaggctgaggcacgagaattgcttgaacccaggaggcggaggttgcagtgagctgagatcatgccactgcactccaacctgggggacagagcgagactctcttgaaaaaaaaaatacatatatagaaaagtttaatcgtgggaagtgctgtaaaggaaggcacatgttactctaagagtaaagagcaggggaaacaggagggcttttcagaggaagtgccctttaacatgaggcctgaggagtaagtgggagccagccagcgaagggaagggcattccaggcggagggaacagcctaggcaaaggcctggaggcagagagagccatcagccttccctcctggactgcgagttctctgaggttccacacttttatgtctcccctgtgccctgcaaacaggtgccactgcattgatgcctggtggaatgaattgattccagaagggagggaaccgggagaaaccagctccctggattcctccccgctggggcggagcaggtttgcatgcccaaacttgcccccagatttaagcagctttccttggtcacgtaatcaggaggatgggatttgacaaatgtttgccagggtttccatgagatcaggcaaagccgcgggtaaccccgaggatgggcccctttttccaccctccgcaagttggggcatggggacggagccagagacctccaccgcctttgaatccgggattctcagagagaagccatctgttgtgcaatctgctgtttattgaggctttctttatgccaggcacttgactcaaggtatatacctctcacaacgaccctattacgatcccttaatagggcagctgagggccgggcgtagtggctcacgcctataatcccagcactttgggaggctgaggcaggcggatcacgaggtcaggagatcgagaccatcctggctaacaccatgaaaccccgtctgtactaaaaaaatacaaaaaattagccgggcgtggtggcgggtgcctgtagtcccagctactcaggaggctgagcagaagaatggcgtgaacccgggaggcggagcttgcagtgagtggagatgcgccactgcactccagcctaggcgacagagggagactccgtctcaaaaaaaaaaaaaaaaaaaaaaaaatagggcagctgaagaaagtgaagatcagagaggttgggtaacttgctcatactcacccagcaagtgagctgtgggtctgggatctgaccctctggtctgcctgacgtcaaaatgtgccccaccggctcagggggccatgagagcagaaagccaggtttctggaaagcctggggtctctgtctagggcagaaaggaaggtctggggaccctggctcagccctgtatctcatcaccctactcaggactcctgcaccccttaacttgcccactcctgagcccttctggtctatgcagttcttaacaccatccgacatgactctgctgcttgatttgtctagtttattgtttccccaccagaaggtctgcccccaaagggattgatatctgttctgttcacatctgtgtccctagtctagcacagtgcctggcacatagtaggtgctcaataaatgtgtggaataaataggtagctggcttctactgctgccccttgggccctttccagaggaagatgcagattctttgtccatcctacacaactgccatctctgtgtggaccaccattcagtatatatattctaaagaagagtttgaatataaacctgcttttgaatatataggatttaaaaccaacatattcaaaaaccgctactttggctgggcgcagtggctcatgcctgtaattccagcactttgggaggccgaggcgggtagatcatttgaggtcaggagttcaagaccagcctggccaacatgtgaaaccccgtctgtactaaaaatacaaaaattagctgagtggtagtggcatgtttctgtaatcccagctacttgggaggctgaggcaggagaattgcttgagcctgggaggaggaggttgcagtgagctgagattgtgccactgcactgcagtctgggtgagagagtgagaccctgtctcaacaaacaaacacccgctgctctgaatgaacgctgttgtgaagatgtcagtgtgtgaggatgttcacagtcgtgcaggaacgttcttgggtgcctccctgatgcacacctggtgcagctgggagcttccccactgtggaggggctcctggtaggaggcattgtgagcccgtgcgggaacgaagggcccaccatgcctgctcacagtgggcacacacacatgcacacgcccatggaggaaggtgggaagaaatgtacatgacagtcacacgcagaggagacacatgtggactcacacccaggctctcagcctctctccctgcctgcatccccgacttccctccctcctaaaactggcatgagtttggaatgtgtaataacagcctttagggcaaattagaacagggagtaaactctttctctgaccacagagaacaggacagtgtttggggagggaattgccacagagcagcagagccgggtgtgtgtgtgtgtgtgtacacatgcctatgtgtatgtgtacacgtgagctagtgtgtacacactcctgagtgctgtgatgtggaaggagcccagggctaggagtctagaggttttcttcaaagccatttgctccctagctggcctctcagagcctccgtttccttagctgtaaagtgggagcaatagcctagctttgttcaggttcttcgggggattgaatgagagaggggcttggtggattttagcatgggctataaaatgtcaggctgtagtgctggcacgtgtgtgcatgtgtgttttggggaaggggagtaaggaggacaggtaaatcaggaccatatcatagtggtgatgatgataattaaatgtgacaagatccaacatttatcaaatatttcttaggtgcccaagaaacacttgacctgccttatctcccagaagccctacaagggaggtgctattattgcaatccccattttacaagtagagaaaccgaggctcagagagatgagaatgggcggcagtaatcatcccttcctcctgggggtggttgtgaagcttgaaggagacactgtaagcgctcgggtggtaccctggtactccatcactaacctgctgtgtgacctcaggtaagtcgcttagcctctctgagcctcagtttcctcatctgtaaaatgggaatgattgcaatacctacctccagggcagattttctcaacctcagcgctgttgatgttgttgactgggttattctgtgtggtgcggggctgtcttttgttttggaggatgtttactaccatccggcatggcggatcccagcaaaggcccctgtgcaggcctggtgaggtggccgagcttcctggtggggaggccttccccctctcctccctggtcaatctatttgagggtgaggatggctccccttcaccctcacctggcacccaggacatccccagtccatggagggattcaatctgggctctgcagccagctgcccgcatttcagtcctggctctgtcactaacctgctgtgtgacctcaggcaagtcacttagcctctctgagcctcagtttcctcatctgtagaatgggaacgatcgcagtacctacttccagggcagatgttctcagtctcgacgctattgacattgtgggctgggtcatttttttgtggtgtggggctgtcttttgctttggaggatgtttagtgccatccctggccttgatctaccagatgccagtagtgctccctctcctgtacagttgtgacaacaaaacatgtcatcagatattgccaaatgtccttagaggaggagcagaactgtccttggttgagaaccactggtctggagtcatgatgagggctggatgaggccctgtgctgggcacagcctgagctacgtcatcaggcgaggatggtgatttagttcataattattatttcatcctaattagaatgctaatcatgatcgcggcgtgacttgccgaaggccacacagcagccatacaggttgacagttgctgggagaggatttgaacctgggattggctggcaccagagcccccattttggagtccccaggaacctggggtgctgtccaggcttaggggagggctatcctcctgaggggaggagggtgcaggcatggtgggggatggaaggaccttcttggctgccttctctggccttgggagctccctgggatggggttccattagcccctgaggtgccatggtgaggggtgcagtggatagaagggtactggaaacacagagggtgcgcctgatgcctcgtctccccctgacctcagggcccccagtgaggtggacagggccatgcccaggagagtctaatccacctcccgccaatgcctgtgcccctgcagatgcccctcctgcctcagcaaccccctggcccccattcctgcagagcaaagcccaaatgcatgtggcagccatgagggactagggatccagatccccctctcctgtctggccagtcgaaaggacttcgtgtctccagaggtcctactaggtgctggaactgagtaggtgcctcacatgctggaggaccctaggaggaggcgtggtcactccagtcttacaggtgggaaaaccacggggcagacagaggaagtgatttgcccatggtcaaacggctaatgaccagggccaagagaggaactgggtctcatttcagaacctggcctcctaacttctctttcttcgtttggttataataactgaaagtcccactctatttacagatgaggaaactgaggctcagagaggctaagcaacttacctgaggtatttatttttagatagagtcttgctctgttgccctggctggagtgcagtggcgccatcttggctcactgcaacctctgcctcctgggttcaagtgattctcctgcctcagcctcctaagtagctgggactacagtcacgtgccaccacgcctggctaatttttgtattttttatagagacggggttttgccatgttagccaggctggtctcgaactcctgacttcaagtgatccacccgcctcggcctcccaaagtgctggggttacaggcgtgagctgctgcactgagccaaaaccccactttaatcccagaagtggcactggatatatctgacctcacttcccactgcctgcaaccctatgaagaagtgactacaattgtacccattttgcagaggaggaaactgaggcttggggagctcaagtaacttacctaagatcacactacatgtaaatagcagagctgggattagaacccaggcctgaatgactccaaaggccaggctgtctctcccttttggtgtccaaagggaagcccacccccagtgggagctctgaccctctgtgtcctgctgcgcccactaagggaggcctcttgctgtgtccccacctctctggtccaagtcttccctcctggaagccacagaacaaacaaggtgggaactagtttatttgtttttctacgtgcgtattgggtgggaagggtgagatgtacaagagagggcttttcagacatgcccctgcctcccgggtggggtggtaagagttccaggaaactcacccttggtgcccagccctgcctggctggcaccatgctacagagagcagggcactgacagccaaccagtggggccttgcccctcccttgccctggctcctggctaagcactggacccgggagccagagagacatggttcaagtccagctcttcttcctgcaagctgtttgctgcctttgaaagctgcttcctcatctgagaaatgggaacaaatgacatctttgtcataaagtttttcatttgtgtgaggactcagggatggacaagacagatacatttcctgcctcctggcacccacagcctgggaacgaaccatcccgtgaacagctgggataaagcttctgaggagaggagcatggatcctgggagcgagtgtgtgcaggccagggagggctttccagaggagcccagttgagctggaacaccagtggggaggagttgaccagcaaaggtgcagggagggatcagcactttgcactggggagcagagtttgtgcactggggaagtcaactcaagtattggagcctcagtttcctgttctgtaaaatgggttcatcatgacagtgtttgatgaggaaaaggactgccggcctacacagcaagtccacatggattttctgagcccctcctgtgcctgaagcccacggttaatggttctgccttagcaggtgcttaccacgtgccaggcactgcactgcactggccactggactgcatgttctgtccatgaggcttggatatccccatcttacagatcaggaagctgaggctatgaaatgtcgacttgctcaatgtcatggaatgactaagtgtggagcctggatttgaacttggctctctggggctccaaagctggctttcttggtcagcagtagggtctgggatccaagtatggggtcccagcttgaccctgaagtccaccctctttcagctaatgcccagggtagttggacctggggccaatttgtgtttccaggttcgtgaaagaggctcctgttgcagttcccgcctgaggctggcggccaaccacatctgggagtggcctccctgtgcccctgtcattacaacggtggctttgaagcagctggcagcactgctgcttgtccacgtgggagggggcttcctggagcccccgcccctggccgggttctgcctgactcccctttcattcccttgcaggctgagcagtgcagacgggcctggggcaggcatggcggattccagcgaaggcccccgcgcggggcccggggaggtggctgagctccccggggatgagagtggcaccccaggtggggaggcttttcctctctcctccctggccaatctgtttgagggggaggatggctccctttcgccctcaccggctgatgccagtcgccctgctggcccaggcgatgggcgaccaaatctgcgcatgaagttccagggcgccttccgcaagggggtgcccaaccccatcgatctgctggagtccaccctatatgagtcctcggtggtgcctgggcccaagaaagcacccatggactcactgtttgactacggcacctatcgtcaccactccagtgacaacaagaggtggaggaagaagatcatagagtgagtattgttagcttcctggcctgtggtctcctcctctgtatccattcacccattcatcatccacccctctatctattatccacccatccgtcgattcatccatccatccatctgtccatccaaccatccatacatctatccatccatctattcatctccctatccatatatcatccgtccatccatccatccaaccacccatctattcgtccatccatccaaccatccacacatctatccatcaatccattcatctctccatctctatatcctccatccatccatccaaccatccatacatctatccatcgatccattcatctctccatccatatatcatccatccatatatcatccatccatacatccatccatcatccagccatctatcatctatccatctatccaaccatccatcatccatcatccatccattcatctattcatttatacatcatccttccatctgtccatctattcatctatccatcattattccatctgtccatctatctactatccatccatctatccatctacccatcatccatccatccattcatccatcatccttccatctgtccatctactcgtctattcatcattccatatgtccatctatccattaatctatccatccatccatatatcatctatctatccacccatcatccatccatccatctacccatctatccatcatccatccatctattcatcatccatctatctattaatccatcatccattactctacccatttacccctctgtccacccttccataggacatttgtctgttcatccattcatccatccacccactcatttatacaatgcatccatccacccactcatttatacaaatgcaaatgcatttatacaaatgcaaactcagccatttacccatttacccattcacccttccacccactcatttatacaactatttactcatctaactctccattcattcatctgctttttttttctttttgagatggagtcttgctctgttgcccaggctggagtgcaatggcatgatctcggctcactgaaacctccacctcctgggttcaagcaattctccagtctcagcctcccgagtagcgggattacaggcacccgccaccacacccagctaattttttttgtatttttagtagagacaggttttcaccatcttggccaggctggtcttgaactcctgacctcgtgatccacctgccttggcctcccaaagtgctgggattataggtgtgagccaccgcatcccgcctcatctttttttattcacctacatatccacgtactcatctgtcccccattaatctacttgtctgtccatctcttcacctacacatccagccttccatttgtttatcttcttatttatacatctgttcatccatccatccatccatccatttatccatctatcatctactcattcatttacccatctttacacttttttgtccacctatccaatctatagatccattgtccactcattaaaatatctatctactcatctacccatctgtcagccatctgtccagccatacacccatataaccaaccttccattcatctaccattttctcatctgaatgtcatttcatcttctcacctacccactgtttctagtcatctagccattcagctatcaaactattcatcattcattcatttattcattcattcattccatttctcatgcttgattgctcacctgcctgctgtccttctttccttcctctccttctctcttctaaccaccaattcattcacccagatctctgtccatccatttgtccattcactcttttgtttgcttagtcactgactcatttattcatttgctcatcttttcttccatttttgcatctattcatccatccatctccctaccttctcttcctggcacacatccagctgcccctcctgggtcttcttcaatcatcacctccattcctggccatccagtggctttcctgaggcttagaaagagctggaaaccccaaggcattcaaccttctttcccataatgacagccttgctgaaagaaaagacagactggagagaagccctggatggggccacagcatgtggcccctatgacgcattccatgccaggcctagctggggacagggagcctccagcccccttgaccaccttgtctggtccccatcctcccccagtgtgttatgctggcatctgcatgtggtttgtgtggcactctgcaaactcagacatcccgggttctgtttccagcatgactctattgtctgtcacctgcagactccctgctttgtgaggttgagccctccctcctggtcctttaggaagcccagggacttccacaagcttttggcagtttggaggagggagcagggcttgcagtctcctagccagctcctcctgagcctcagcaggccctgctgaactgtatcctttctatgtcccggccctgctgtccctaatgtgccctgaattgaccctttcctcaactgctccatgaaatctcctctcggtggcctgtgtgtgtgtcctggaggatggtgctgaggtctggagatgacctggacttgcgtgtcctcctctgtccccctgctggccacagattcatttatctcttggatggagccgattcaccttcacagcccttgcttggtcaagagccgccccctttatttattcacagtcattgattcattcagatgtctctttttcttttttttttttttgagacaggttctttctctgccactcaggctggagtgcagtggcgctatcttggcttactgcaacctccacctcccaggttcaagcaattctccagcctcagcctcctgggtagctggagctacaggtgtgcacgaccacaaccggctaatttttgtatttttagtagagacagggttttaccatgttggccaggctagtctcgaactactgtcctcaagtgacctgcccacctcggcctcccaaaatgctgggattacaggcgtgagccaccgcacccagccagtggatgtttcttgggtgcccactgtctgccagtcagtggggttggccctgaggcttcaggctgagccagaccagatccacttctactcaggcggcactttccgtttagagggtgagacagacaagaagcaagtagctgagcacatggatgtgccatgtgagttgggggaggtgctgaagttagagagtgggtggatacaagaaaggtaatccaggagggcttcttggaggagttgacatttaagcccaaagctaaaggtcatgaaggggcagtcacagagagggagggaagggtgttgtaggtggagagaagtgtgagtgcaagggcctaaggctggagaggctctgcagatgtcgccaaggaatagggcctcacagttgtctgtgctgaaaaatctgtacaacctctgctcagaggtggaaactaagggccagagcagcagagtgcccagtgttcccatccttctgtccccaagccttcccaggtcctgttgaaagctggtgggctctgtatctcccattcccctcccgcaagccctcctccccacccctaccccaggaagtccaggctggtggagtaagtggggcacggctgagccctgaaggctgcctcagtgagatctggtgggggcagtattgctttttattttttggctcaaaggtcaaagttcaggaagaggtaaagtgggggctgcctaagtgccctcattagaggctgtatctgtgcctgtgcccctgtcaacaggagagcacgtcttaccctactgtggatgctaatgatcccctttgccagtacctgccctgagatggaaaatctcaacccctggcgaagaggaagggaggagagtggctgtccccttctcatggcaagacaggctgggtacagccagatgccagctttgtccacccttgcaaccccgtcccacctgcttccacaacctgccctggcctcagtttccccaactgcattccccttcccctctggccctgctgcctcttgttagggttttctctgttcccctactctcccctcttctccctcccagaccctgtgcctccatcttcctccttctctttagtctcttattcattgaacagagtcttactgcatcccaagatgtgccaggcactgggccaggtaagaatgtgacagagagagcattcctgcctcatggtggccctgggctagctctttctctctcagaacctagcacataataggtgccgaaataatgtttgttgaatgactgaatgagtgtctccaagccctccagctcttagtgtctgtttccttcctttctctctctatctcttctcttcccagccctctctgtgccacacccttccgccatctgcctctgtagccccacatctctcccatgcacatacaagctccagacacacagtaggcactcattaataatggtaatatcaactaacatttattgaatgtttaccgtgtggtgggccatgggcaggtacatatgagcatggcctcatttgtctcaaatgtttgttgaatgaataaattaatgggttagttatggaatgaatggatgaaatgcctcatcttttagtctgctgtttctttattttatctttgtttttgtctctttcagtttctctgccttagtaagtactcaataaatgactaatatatgagtgggtgggtgagtggatgggcagttggatggatggatggatggatggatggatggatgggtgggtgggtggataggcagatggatggatagacgagtgatggatggatggatggatggatgggtgagtggatggatgggcagatgggtggatggatgagtgggtggatggatggatgagtagtggatggatgggtggacagatggaggagtgagtggatgggtagatgaatggatgagtgatggatggatggatggatggatgagtgggtggatggatggatggatcagtgagggatggatggatggatgagtgatggatggatgaatgggtggatggatgatgggtgggtaggtggatgggtggatgctgggtgggtggatgtatggatgagggatggatggatggatgggcgggtaggtggatggatggatgggcgggtagttagatgggtggatgaatggatggatgggtgggtggatgggtagatggatggatgagtgatggacggatggataagtggatggatgggtggatggatggatgagtgatggatggatgagtgatgaatggatggatgggtgggtaggtggatgggtgaatggtgggtgggtggatggatggatggatgagtgggcagatggatggatgagtgatggatggatggatggatgggtgggtggatgggtagatggatggatggatgagtgatggatggatggatgggtgagtggatgggtagatggatggatggatggatgaatgatggatggatgggtggatagatggaggagtgggtggatgggtagatggatggatgagtgatggttggatggatagatgggtggatgggtagatggatggatggatggatgagtgatggatggatgggtggatagatggatgagtgggtggataggtagatggatagatgagtgatggatggatggatggatagatggatgggtcggtgagtggatgtgtggatggatgggtggatagatgtatgggcagtctgtgcatttctttctgtttgtctccacccaacacacagtaggtactagctatagtttgttggataaaacattacttagtttttacatctgccccaactacctcaccctgttccttgtaaggcttcagctgcctgcccgccaccacagtctctgggtccctaaggccagggacagtggggcaggcaggggatgagccctcccatcaacttgcctccctacctcctccaggaagcagccgcagagccccaaagcccctgcccctcagccgccccccatcctcaaagtcttcaaccggcctatcctctttgacatcgtgtcccggggctccactgctgacctggacgggctgctcccattcttgctgacccacaagaaacgcctaactgatgaggagtttcgaggtgagccacccagatgggcatagccagtgggacagccaggggtgtgggggaagcctggcattgggggccccctttcccctcagcttctttctttgggtcggtggactgcattggcctggaaagtgcactggacagggagtctggtcctgtgtgtccttcaccatgttacttaacctctctgtgcctcagctacctccatttattcattctttcattcattcagcccttatgtatgaaaaggttagtgtagtgggtaagcagagtccacctacctgggttcagattctacctttaccagttaagcgatgtgtgacctctctgagcctccgtttcctcatctgtaaactggggaataatcatagcatactcctggctctcatcccacagagagcccagcgcaggcagctggagtcctggagctcctgctcccctgagggaaggtctggagggatgggcaggtgtctgggctggtagtcctgattctacttcttggggtctgctccaccccagcctagctttagggctccacttcctaggctgaagccccagcccagagagctaacccttcagccttgtccagattcaaaacacccacctcaggacaccggcaccctccacagccccaggccttacctgtgaacacctgcacccaaatcagccacctgcaatgtgctgggttctgggtaagccattattaaactggccgtgatctcacaagtcaagataccatgtcaagaagtgtgacaccaaggctgggcatggtggctcacacctgtaatcccagcactttgggaggccaaggcaggagggttgcatgagcctgggaggctcaggctgcagtgagctgtgatcatgccactgcactccagcctgggtgacagacaggaaaaaaaaaaaaaaaagaattgtgatacctgctatgaagaagggcccatcttggaaggcggaccatggttggtctacagcctaagtctgaggaggcttcagggatgtcagaagaggcttttttttttttttttgagacagagtttcattcttgttgcccaggctggagtgcaatggcatgatctctgctcactgcaacctccgcctcctgggttcaagtgattctcctgcctcagcctcccaagtagctgggattacaggcatgcgccaccacgcccggctaattttgtatttttagtagagacggggtcgctccatgttggtcaggttggtcttgaactctcgacctcaggtgatctgcccgccttggcctcccgaagtgctgggattataggcatgagccactgtgcccagccagaagaggacattttttaagacttcagttactttaagtaaattaagttcccaaacagggtgaacaagtctgtgctacatcatccacatatacctttatcaacctgttttttttttttttttcttttttttttttgagatagggtctcattctgtcacccaggctggaatgctgtggtgtgatcacagctccctgcagccttgaacttctggcctcaagcaatcctcctgcttcggcctcgagagtagttgggactacaggtgcaagctaccatgcctggctaaatttttttttttctttttttttaagagacaggtctcactatgttgcccaggctggtatcaaactcctggcttcaagcgatcctcctgcctcaacctcccaaagtgctgggattacaggcatgagccactgaggctggcctcaacctcattcttaccctgaaacaatacgatgcagtatcattgtgtccatcaggagacaattactggggccgggtgcggtggctcatgcctataatcccagcactttgggaggctgaggcgggtggatcacctaaggtcaggagtttgagaccagccttgccaacatggtaaaaacctgtctctactaaaaatacaaaaaaaaaaaaaaaaaagccaggcttagtggcacacacctgtaatttcagctacttaggaagctgagccaggagaatcacttgaacctgggaggtgggggttgcagtgagccgagattgcaccactgcactccagcctgggcgaaagagcgagactctgtctcaaaaaaaaaaagaaaatacaattgctggatttatgaaaaatattcattcatggttcctggccacgcgacgtggcctcgtttggaggcacaagtttagagctgtgggaggacggggcttctctctgctcctggagtagctcagtgatggcatgagtaatctcattcggagataacccatgtttaagccctggccaaatggcctctcctggtccaccaagtacgtgaggcaaaagtgcggaatcttggggtagagcgaatcctgggagatggatgctggcacctgtgccttcagcaccaggctagcttgtcaaggcctctggcttcttctgaattcaggactgagttgggggcttctagcatagtccaggaacccagatgcatgtgtgtctgtgcatgagtgtgggtgggggactctaagataggctttggaggtgggtctctgaaattgcagaggctagcgtatgtgcatagagggagacttactgtgaggtccatgatactaattaagtgccagggcccctggctaaggccctttctgaggtcctcgacctagtctacgtcccacaaaacctggatccgtccctgcatggctaaaaggtcatgagctcatctgattatcagggaagtctgggacgccctcctgtgcccccacctcccctccgcagagtttcacaacctccaatttggcaattgtcaatttagagcccctggctacagcaccccaccctgggcagagccacttcgccacctggtggctggttcctggaactgcatgttccacctcatctctgggaagatgctgctcctgacatcttctcccaggacccaggcgtcccctccctgggtctataacctgtgtctgaaagcccgaatccagggtctctagttccactttgggtcacctatggtttggaattacctggggtgcccagctctcgccttcattcaatgtgtgttaactcagcaaatggttgttgggcacctaccacataccaggcactgtgcttggcagaggccgaatgatagtgagcaaagcagacatcaccctgccctcaaggtgcccacaggctcctggacaggaccatcattgaccaagcaaccacataaataagcacacagttatgaactgtaacaggtgtcaacaaaaggctgtactggaggatttgacctagtcagggaaaatccaggagagcttcctggaggaggtaacacttgagcagagtctgagtgagttgcagttaaccaggtgaaaagaggagggaagaatgtttcagattggggtgggggttcagagacagcaggtgcaaagaccctgtagttcaccgtggtctattgcagtctgaaatgaccattccagctgctatgtggaaagtggataaaggaaggccagagaggctgggggaaatgagggaaataaaggaggtgtcttaggcatgtgagagggatggtggctgggccacattattccatgagaggtttggtgtcgcctctgagctgggcgccaggtggacagcgggaaagcaactgggaacaagacttgtcccaaacaaccctgctcctggaagggctgagactagaattcaggtctcttgagtctgccccactgattcccggcatttagggagacggttcctaaatcccgtctcatggattgataacagcaacagtaatatttatcaaagactgctatctgcctggtactgggctaatcaacaaacactgattagctctttgatttcccttcatagctttaatttagccagaaaggaccctaagcagagaaatggtcatacagctgtggggagcaaagccaggcctcaaacctgaggtgcctggcttcagaacgggcacctgaacccacacctgcgtctcccaccctctggccattcctgagcccctggctgattttgccctgtccttgattcacaggggagttttcaacttactcttttgagatataaatcaactcaggtaaccataaaaatagctacaacagaaagaaacttgcaaagagacatcagcaagcgttagtgagaggtgttaaggacccgctagtaccaaacggagagttgacttcatgagaaagattcgatagtggatgaaaccttcagggttattattgttgcaccccctagaacccccaagattctctcctggatcccctaaggtcagttcacatccactgtggcacacagtcccacactttggggaacgctgcacccctccactcccttctaggggcaccagtgtaaatgcttcatgggaaaaggattcgatgctctgacaggtgggtgaatgctgcctagtgtgtcttgcttttacaggttcacagtccctgttagtgtatgaaaggctctgagaagtcctgtagtaaggaattatgattggctttgtttaacccagcattctaaccatttatttgtttatgaagcactttacataaatcttttcgagggccaggtgtggtggctcacatctgtaatcccagcactttgggaggctgaggtgggaggatcacttgaggccaggtgtttgagaccagcctgggtaacagagtgagatcccttctctacgaaaataaaaattaaaaaattagttgagcatggaggtgcacacctgtagtcttagctgctacttgggaggctgaggtgggaggatcacttgagcccaggaatcggaggctgcaatgagctaggattgcacaactataccccaggctggatgacagagcgagaccctctctctcaaaaaaaaggatattaataaataaaaataaatacaaaatcttcccaaataagattaattaaataaataccaatctgtaggctgaagcctctcacatttcaaagcacctaaccccatgcgtttattgtaccctctcagcaccactggaggcagaaagatagagtggccctgggtccccactggacagatgaggaaacaggcttggagaggagatgttgacagccaggacatctgaccccctacccagtgttctgtaccccgatgcctggaagttcaaggtcatgggctggagcactgcgtcatcttgtgtgtctctcttgctagagccatctacggggaagacctgcctgcccaaggccttgctgaacctgagcaatggccgcaacgacaccatccctgtgctgctggacatcgcggagcgcaccggcaacatgagggagttcattaactcgcccttccgtgacatctactatcgaggtggggccccgggctgggcaggggtgccacgggggctgatggagacgctgtcctttgcttgtctgactcctgagacttttgatctgggcctaagtgccagcatgtacccaggacctgacaaatggatggatggatggatggatggatggatgcatggatgcatggatagatggatggatgaaggaacggtaactaccccttccaactttgtttcgagtttcagaatagaagattccactgggtgcggtggctcttacctgtaatcccagcactttgggaggccaaggggggcagatcgcttgagcccaggagttcaagaccagcatgggcaacatggtgaaatcctgtcttgacaaaagatacaaaaaaaaaaaaataaaataaaagaaggccaggtgcggtggctcacacctgtaatcccagcactttgggaggctgaggtgggcagatcacttgaggtcaggtgttcaagaccagcctggccaacatggtgaaaccctgtctctgctgaaaatgcaaaaattagccaggcgtggtggtgcgcacctataatctcagctacttgggaggctgaggcaggagaatcgcttgaacctgggaggtggaggttgcagtgagccaatatcgcgccattgcactccagcttgggcaacaagagcaagactcatctcaaaaaaaaaaaaaagatgcaaaaaaagccaggcttgttggtgcacacctgtagtcccagctacttgggaggctggggtgggaagatcacttgagctcagagggtcaaggcttcagtgagctatgattgtgccactgcactccagcctgggtgacagagtgagaccctgtctcaaaaaaaaaaaaaaaaagattccaagattctgagatgcagcgagtctagtgatcatgaactcgggatctggccctaagatgctgtggtggcggatactctaaggctctatgataataagtcctgagttcacaagttctaagaggcaaaggcagcagggggccaagaactgggccaatccccagttgagattctgtaaatcagagttgaccttcagatgcctggatattaagattcaaaatccatgaatattatatcttgagtccaaaattctgggaggccaaggtactgttgtttcctctaggagttttcttttttttgagacaaggtcttgctctgttacccaagctggagtgcagtggtgtgatcatggctcactgcagccttgacttcctgggctcaagggagtctcccacctcaccctcccaagtagctgggaccaccggcatggaccaccatgccaggctaatttttaaaatttctgtagagacagggtctcactatgttgttgtattagcccgttctcatgctgctataaagaactgcccaagactggataatttataaaggaaagaggcttaattgactcacagttccgcagggctggggaggcatcaggaaacttacaatcattgtggaaggggaagcaaacatgtccttcttcacatggtggtaggaagaagaagtgccaagcaaaagggggaaaagccccttatagaatcatcagatctcttgaggactcactcactatcatgaaaacagcatgagggtaactgcccccatgattaaattacctttcacagggtccctcccatgatacatggggattatgggaactacaattcaaggtgagatttaggtgtggacacagagccaaaccatatcagttgcccaggctggtactgaactgctaggcttcagcaatcctcctgcctcagcctctggagtagctgggaccacaggtgtaagtcaccaggcccagctaatttttagcatttctatagagatgggatctcactgtgttgcccaggcttgcctcaaacgcctgggctcaggtgatctccctccttggtctcccaaattgctgggattacaggcgtgagcctgcgcctggcctcctctaggatttttaaagcatcttatgaatctaaaaacttctcacattcaggattccacaaactaggtatccttcaggcttgagattctgcttctgcgatggatcccagggaatatccaaggacctatttgctgcccttgggtgtcgctgggcaggactctgcctgcatcccccaccccccaatttctacgtcctgcaccctacccccacccccagcaagcctggctaggtctctgctccgccaggaccctggatgaccgtcccctgcccccaggtcagacagccctgcacatcgccattgagcgtcgctgcaaacactacgtggaacttctcgtggcccagggagctgatgtccacgcccaggcccgtgggcgcttcttccagcccaaggatgaggggggctacttctactttggtaaggaggggcctggtgggggctgacagcatgctggagaagcatggcgggagatagcatgatactggttggtgtctgcagccctgaccatcacccagacacccagggccactctggccatgagcgcaggcagcactctggaccacaggctgcacgttggtcttggtcacagggccgttgcctctgaggtgtaagtgccatggggagtaccatggacctggattcagatcctcactccagccaggcacggtgtctcacacctgtcatcccagcactttgggaggtcaaggcaggaggatcgcttgagggcaggagtttgagaccagcctaggcaacatagcaataccctgtctcttttaaacatttaaaaaatggctgggcacggtggctcatgcctgtaatcccagcactttgggaggatgaggcaggtggatcacctgaggtcaagagttcaagaccagcctggccaacaagatggtgaaacccatctctacaaaaataacaaaaattagccgggcatggtggtgggtgcctgtaatcccagctacttgggaggctgaggcaggagaattgcttgaacctgggggacagaggttgcaatgagccgagatttccccattgcactccagcttgggtgacagagtgagactctgtctcaaaaaataaataaataaataaataaataaataagttagatggcatggtggcatgtgcttgaagtcccagctgcttgggaggccgaggctggaggatcacttgaacctaggagttcgaggctgcagtaagccatgattgcaccactgcactccagcctggaaaatagagcaagaccccgtctttaaaaagcaaaaagaaaagaacaaaaaaaaagccaaatcctcactctgcactttccaggcatgtgacctcacttccctgagcctcaccttccccagctgtgcagtggggatcacgagaggcccttgggctgtgatgtcagcgcccagctctgtattgtctgtgtgctttaatctggtttatgctgggaccaacagccccatcaccaggcccaaagcccaccactgccgttgtcatcactggactcatgaaatattttgaattttgcccctgcttaaaggcattcattatgtgcagctcagggacaaagtcacacaaagaattccatcatcagctgggcgcggtggctcacgcctgtaatcccagcactttgggaggccgaggtcggcggatcacttgaggtcaggagtttgagaccagcctggccaacatggcgaaatcctgcctctactaaaaatacaaaaattagccaggtgtggtggcgtgcgcctgtaatcccagctactcggctgaggcacaagaactgcttgcacccgggaggtggaggttgcaatgagccgagattgtgccactgcactccagcctaggcgacagagtgagactttgtctcaaaaaaaaaaaaaaaaagaattccatcattggatgtgtccagtccctcacagcctccaaatcgcgtggctgtgcccttaactagccacaccccatctccctggcatcacccagagaaacgtgcagttcatatccactgctggtgctgtctccgtcattatcctcagagcgccacggtgtccgtcccccgagtgtctgcaggcagagtcccaccctgggcccccttcgctgacctcccacccttcaccctggcccgcaggggagctgcccctgtcgctggctgcctgcaccaaccagccccacattgtcaactacctgacggagaacccccacaagaaggcggacatgcggcgccaggactcgcgaggcaacacagtgctgcatgcgctggtggccattgctgacaacacccgtgagaacaccaagtttgttaccaagatgtacgacctgctgctgctcaagtgtgcccgcctcttccccgacagcaacctggaggccgtgctcaacaacgacggcctctcgcccctcatgatggctgccaagacgggcaagattggggtgagtgtgcggctgggggcacagctgatccacctactcgtacccctctgcacacacacacgagggtctgctgctggtattcattattaatacgtgcatgcacctcccaacatgccaaccccagtgtgcagatgtcccagctcaagaacctgctatggctccctagtgtccagccaagctccttagcttcatccccgagcctctcgcctcatgtcaccctactggatgttcaccactccacccccaccagccaggatgagccactgataagaaactgagtccccgggccctagcccagcggtgctcccagcctcaaacctgttgaatggccctgccccagttccttcccttttctgggccgcgcagcatggggcctggagaagggtttctcaacttcagcatgattattttgggcggcaggctctttgtggtggggaccgtcttgtgctattgccagacattgatctgcatcccgggcctctacccaccagatgccaggaacacctccccttacacttgtgaccaccaaaaatatctccagaacattgctgaattgtcctctggggggcaccatcgctggattgggaaccaagtctggagtatgctagaggcaggagcacctgtccaagccctggcgctaccacttcccagtgtgtgacctcagacatctcatttcccttttctgtgcctcagtttccttgtctgtaaaatggggatataagagtgtcctctggtgtggtgttgtgacaaatgcggtgatccacataaggctcttaggaaggagcctgggagaagcagtaagtgtcacttacatgtctgtaatgccagctagttgggaggctgaggtgagaggatcgtttaagtccagcctggattatttgagatcccaaataaataaaaaccaaaataaaaaaaaatgtagcaaaaattactaaaattgcaattataccatggccctgaggcagtagaaaggctccagtttaaatcctggctttggctaggctcagtggctcgtgtctgtaatcctagcactttgggaggctgaggtgggaggagcacttgagcccaggaggttgaggctgcaatgagctgtgatagtgccattgcactccagcctgggcaacagagccagaccctgtctcaaaaaaccccaaaatcctggctgtgcacagtggctcatgcctgtaatcccagcactttgggaggccgaggtgggcggatcacctgaggtcaggagttcaagaccagcctggccaacatggtgaaaccccgtctctactaaaaatacaaaaatattagctgggtgtgatagtgggcacctgtaatcccagctactcaggaggctgaggcaggagaattgcttgaacctaggaggagagggttgcagtgtgctgagatcgcgccactgcactccagcctgggtgacagagagagactctgtctcaaaacaaaaaccccaaaatcctaacattgcctgaccttgggcaattcccacccctctctgtgcctccgcttccctgtgtgtaagccagggaaggaggagtggtaacaggaaggaccgcatgtgatcgtcagtattataattcacatgtcattaagatggattcattgctattttaacggcatgaagaagatattcattacaattaagatgttgaaggctcatccaggttctgtctggctccagctgactggttaagtggcttctggaacacccttcgtttttcccagcctccattctttatctgtaaaccaagataataagagcaagaattaaacaagatgaggaaagggtcctccagcagccggtgcttagctgttttctggggaggcgtcatgtgctgagctgggcccagccctgggggtctttccagtgtgagccccctgaccctcctggccccctgtgcagatctttcagcacatcatccggcgggaggtgacggatgaggacacacggcacctgtcccgcaagttcaaggactgggcctatgggccagtgtattcctcgctttatgacctctcctccctggacacgtgtggggaagaggcctccgtgctggagatcctggtgtacaacagcaagattgaggtgggctccaggagggggcatggggtgtgaggaaggaggggcagggctgggagtagggacagggccctggggctgggctgggggagacagccccagcctctaggacccaacgtggtgggtctgttggctgaatgcaagagaaggtgccaactaagtgcccagaacagtgtctgccatgtgaggaaatgagcaagacttgtgggaagatggacttttggggcaggtaggactgggttgggatcctggctctgtaacttacatgctgtgtgtctcaggacaagtggctccacctctctgggtctcagcttcttcatttgtaacctggggataaggatcatggatatcccatggggttcttgggaggaccaaagaggttaattttagaatggcttggcacagagtaaacattatgtcagcttttactactcatggttgttatatgaacttttgaaagctcttttttttcggtcaggcatggtggcttatgcctgtaattctagcattttggggagccaaggtgggcggattgcttgaagccaggagtttgagactagcctgggcaatatggcgaaaccccgtctctaccaaaaaaaaataataaaaatgaaaattagctaggcatggtggtgcgagcctgtagtcccagctacttgggaggcgaggtgggaggatcacctgagcctggggaggtcgaggcttcagtgagccgagatcatgccactgcactccagcctgggtgacagagtgagatcctgtctcaaaataaacaaacaaacaaacaaacaaaaaaccaagcttttttttccctacttagcagtattttgtgaacgtcgttctgtacttttaaatattctttggtaatattgtcgctgcatgtaaacataccatattcaaatgaactgttctcttattgctggtcgcttgggtttgtttctgcctttatcaggaataacactataagagcatctctgtggctgctttattgcacaaatcatgattatagagaaactcaagttaataaagggctaggaagctataaaaatggagcagaaaatgctggggactgggtgcaggtggtcttccttctagccctgccctgtggcttactggtctgtgagcttggcttccttgcaagacctcatttccctcattttttgaattagtgaccatcttgatttaaattagtggtggcaggaggtttagcatctcaggtgcaaactgattgattagtagtgtctacccagggaactgtatgaatacaattgtgcagggctcaattattgatgtctgccctgggttcagaattggagaattgtggtgagtcaatcatttatcatctttgggcaaaatttctcaatctttctctctgaatcagaatttctgagagcggaggccaggatttatacttgcagcaagttacataaattattttgcggccagcagcttggtactatccacagattggagtttgggaaccatgagaataaatgtctttttttcttttttgagatggagtctcactcttgttgcccaggctggagtgcagtagtgcgatctaggctcactgcaatctccgcctcccaggttcaagtgattctcctgcctcagccttaggagtagctgggattacaggtgtgcaccaccacgcccggctaattgttgtgtttttagtggagacagggtttcaccacattggccaggctgatcttgaactgctgaccttaggtgatccgcctgtcttggcctcccaaagtgctaggattacaggcatgagccactgcggccggcctgaaaataaatgtcttttaagggactttccagttccgagttctgtgatgctagaatagggtggaaaggtacattgaggcagaattgggcagctgaatccattcatgaatccgtgaatgcagctgaggaatggatggaaagagaaagcgctgtccgggtggagggtgggggaaggcacacccgaggcagcctgcctggaccccccacccatctcaggaaggcagcccccgaccaccctgcctctcttagaaccgccacgagatgctggctgtggagcccatcaatgaactgctgcgggacaagtggcgcaagttcggggccgtctccttctacatcaacgtggtctcctacctgtgtgccatggtcatcttcactctcaccgcctactaccagccgctggagggcacagtgagtgcccggggaccgggcaggggctggggcaggcactgggctgagccatgcaggactggggcacaacctcatccttctgggtcccctgtagggggacccggagaaggtttaggaacaggttggggaggcgccctccagcatccacgggtggccctgagctgggaggaggaagactcaggaggaagagagtgaaggaggaggctccatgggatgccgatgtttcgggcctgggggaacatctggattgggggccagatgttggaggggctgggtgacgacctgtgtgcccttgctgctccccagccgccgtacccttaccgcaccacggtggactacctgcggctggctggcgaggtcattacgctcttcactggggtcctgttcttcttcaccaacgtaagtgcctggcccccgtgccccccaccctgcctgccctcctcttctcttcctgcacctcttttctctccctctttttctcttctctctcctccaaatggtccttctcctttccttcctccttttattttcccatttctcttctacctcctccaatcccacgttctccatctctgcttttttctccttttctaacaggaaagagtcctttgtcttttctctgtaccagcctctgcctccctctcttctatccctttctctgtctcctctctcctcctctcctctcctgctggccccacccctttcacgtgccccctcctgtcttccagatcaaagacttgttcatgaagaaatgccctggagtgaattctctcttcattgatggctccttccagctgctctagtgagtagaggtccctgggccggcagcttctgggtgaggaaggtgggtttgggctgctaggtcgtccagattcaggagagaggtgattctgttagaaatgaatgcacccaacctgggcagctctaacccaaagtcaggacaaagccacaaacaatagggtcttctggttcaagaaaaattctgattgctagggagttatcatatacaacatggatagaaataattttaacctcttatgctggtgaatgattgctaatgtctgcctgaagtgccatgttaagaattttgcacctgtgtctgtgtttagtgggaaagagttgggattgattaatgatgtctgcctgggacagagaatgagagagttactgagtgtgtgttacctctttcacatttcccttagagttggagaatgatgaaattcacttagccacaaaatctccactgaacaccactaaatctttctttagcaattccaaggggcatcacttcaggatcctgtgggacctcaggattaattgccagctaattgaatgttcttgttaacagaatgctggggaaccctgctaatccactttgtttcttttctgggggtctagaaggcattgggaagtcctgataccctggagggcttggaggcgtgtcttcccctccagagcctcattgtcccctctcccctctggcctctcttgtggtctctgctgcactgcagcttcatctactctgtcctggtgatcgtctcagcagccctctacctggcagggatcgaggcctacctggccgtgatggtctttgccctggtcctgggctggatgaatgccctttacttcacccgtgggctgaagctgacggggacctatagcatcatgatccagaaggtacgggctgggaggaccctctggactcgtgtgttcctggagggagtcacacacacaccacatgcacacttatgcacctgcagacctgaggatgctgggtaccgtgggggcaggaggcatggtctggacactggggtgggaccagggtggagatggaggaatggggaaagtgagaaaccatgtgtctcctctttgcctccataatcccgctggggtctttagattctcttcaaggaccttttccgattcctgctcgtctacttgctcttcatgatcggctacgcttcaggtgagctctgggtgctcaggtggtcctggcaggggtggtgcaaggacgggaacagtagccatgatgtataggggacaatagcagccttgctgagttcttttttttttttttttttttttgaggtggagttttgctcctgttgcccgggctggagtgcaatggcacaatctcagctcactgtaacctccacctcccaggttcaagtaattctgcctcagcctcccacgtagttgggattacgggctcctgccaccacgccccactattttttaatttttttttttttgtatttttagtagagatggggtttcaccatgttggccatgctggtcttgaactcctgacctcaggtgatccaccctccttggcctcccaaaatggtgggattacaggtgtgagccaacgcgcctggccactgagttcttatttgtgtgccaggcaccagactaagtacgtttccatccttgcctcccaacaagcctgtaagctaagtgcctttattatcccctattatagaaaaggaaactgaggcttaggagggttaaataactagcacaagttcaaaagccagtgaatggtggccgggcgcagtggctcacatctgtaatcccagcacttcaggaggctgaggcgggtagatcacttgaggtcaggagtttgagaccagcctggccaacatggcaaaaccccgtctctaccaaaaaatacaaaaattagacaggcatggtggcgcgcaactatagacccagctactcgggaggctgaggcacaagaatcgcttgaacccagggggtggaggttgcagtaagccaagatggcaccactgcactccagcctgggcaacacagcgagactctgtctcaaaaaaaaaaaaaaaaaaaaagctggtgaatggcaaaactggagtattagctattgctacaaaggaagccacctaaagtggggcttaaaatagcacccacttattattattattttttttgtggcaaggtctcactctgtcaccaaggctggagggcagtggtgctcttggctcactgcaatctctgcctcctgggttcaagcgattctcttgcctcagcctctcgaatagctgggattacaggcgtgtgccaccacgcatggctaagttttatatttttggtagagatggggtttcactatgttggccaggctggtctcgaactcctgaccccaagtgatccacccaccttggcctcccaaagtgctgggattacaggcgtgagccactgtaccaggccaacttactattgcttatgagtcaatgggtcagctgggtggctgtgctgccctgggccaggtttggctgatccctacaggctcttgtgcctgtggtcagctggcaggctggctgctggctgactggtctagctagtatggacttggttagagggggtttgctatctatcttccacatggtcactcatttctggacagctagcttgggcttgtccacatggtggccttagggttccaagaacatgagcagaagtgttcaaggacacctcctggcatggcatcactgctgccttactctgttggccaaagcaagtcacaaggccagcctcgattcaagggatggggaaatagacgccacttctttttttccattttttttttttggtggaggcagggtcttgctatgttgcccaggctggtcttgaactcctgggctcaagcagtcctcctgcctcagcctcccaaagtgcaggattataggcgcgagccactgcacctggcctagactccacttcttagtgggagaagctgtaaagccacattgaaggaggatggatacatggaaggataaaatttaataattaaactagcagcccaggtattttcttaaagcccaacatcagctcccttgatataccttcttcgtgatgtcatgatgccactaagaagcattctgggacctcagtggcatgggtcatgggagaaggaccagggaccagggctggagaaactgaccaagtccttgggctgatccccgaggtgtgggtaatctgacatcaatgcccagcatccaaaggggaatggccaactcaggttagacctggacacatacacatctgagcaggttcatctggggacgagcctggcacaggaatctgacaagggtgatattttaacccacgatagtggccaagtctctaggtagattattggtgggaagtggaattgtagttttcactggggagatagggacagggtacagctttcccttcccagggatcacactggacaaactagacagtgtcaagggttcaacaacagtttgggattcaggtcagggatctagccctactgcagtcctagttattgaaactaaggagaaacaagggttagagtagcagcttagcagtcagcttggttgcaggtcttctccttataggatgcactagatctcaattctgaggctgacatgacataaacaggacacacatgcttctgttcccacactttggtgtccatagcagacatcactaatggatcacagaacagtttttccggtgagtccagacaaggtctcagaatccttctcaacacagtgtttcaccaggtactatacaactgaagaacattagcatatgagttgaaatctgcatactctaatccctggttgcaggcagtatgacattctgtgccccactgactgatgggactgagtcttcttcatgctcccctccctggctggtttagggacaggttgttgctgccaaactgtgttgagaaggaatctgaagctccacctgggcttagtaggaaaggagaaccatgatgagtttgagatgtctagagcaggagaggccccttagagaacacggctttggggacagtcaggactgatgcctggtttcagcccccacttttcctctctgggttggggtggagtgggaaactgtcagagagagagtctacccctgcgaataggggcattccagagcccccaagacctctaagaatggtaggccgcattaggatttcccaacactattgacatttgagaccagatcattcttcgtggcggggaccatcctgtgcattgtagggtgtcaggcagcacccctggcctccacccacctgatgccagtagcacccccacccccagttgtaacaaccaaatatgtctctagacattgtcaaatgtcccctggtgggaaaaactgagaccctccctggactagatcctgaaaaccttttccctcccggtagcagggaaccaccaggttgtgtaaggaggggtgaactgtcccaggttggaaacagagcaggtcaaaactcctacgcttatcagtagtgggattgagcctgtgagtagccactgcactccagcctgggcaacatagcaagaccccatctcagaaagaaagagagagagagagagataacctcttccttatcagcaagagtttatggaaaggcttcaaaggttttgggatcaggaggacctgggtctggtgtggcttggctgatgtgtagggtgacatgggtcagcgtgtgggccagcgtgctccgctcactaggcctcagctttctcctccagcaaatgagaatgacaccctccacctctctgtgggtgtgctcacactcagtgagtgccacccctatcctcccacagccctggtctccctcctgaacccgtgtgccaacatgaaggtgtgcaatgaggaccagaccaactgcacagtgcccacttacccctcgtgccgtgacagcgagaccttcagcaccttcctcctggacctgtttaagctgaccatcggcatgggcgacctggagatgctgagcagcaccaagtaccccgtggtcttcatcatcctgctggtgacctacatcatcctcacctttgtgctgctcctcaacatgctcattgccctcatgggcgagacagtgggccaggtctccaaggagagcaagcacatctggaagctgcaggtgaggccccagggcccccagccccactctaccagccaccctcgtccttccgaggagacccacccgactggcttcctcggccttccactctgagcaagcagtgtcttctcattctccctccacttctctgtcggtaaaatgggcatcagaggctgctgctgacttcccagagctgcctagtgaattttgaggtggcttcttgcctggctgccagcagtgggctcagattctccttgtggtccagctcacaggacacagtcggctccacctagcatgactgagtgacttctgccggctcagaaagtgctccgtgggcatcagcgtttcagcaggggtcccacgctgagcccaggggcagcttttgtgctctagcactccagcacagggatgtcagcattctcatgggggtctttttctagcaactgtgagcatgcttcctagaggagaaaccaatggggacaggggccgccttggcccggggagctgcagaaagtttttacttaccaaaagctttctatgcaatcctggaaagaacaggccctgggatcacagccctcccaggccaggtgcagcctacaaacctggtgtcctaataaacagtgctgccccacggcccaggaatacagcacccgtgtttaccttgactgtgcatttcaggaaaatggtgcagtgagaaaaaagggcccaaggttgtcctcccaggactgggtctgagggaaacagctctggcctgctcttaacctttatctatattgcttacttcattgggcctcagtttccccactgggcattactcacaggatgcaaactgggcatcctgtgggctggagtgcaatggtgtgatcttggctcactgcaacctctgcctcccaggctcaagtgattctctgtcctcagcctcccgagtagctggggctaaggtgtgcaccacctcacccggctaatttttgtattttttgtaaagatggggtttcaccatgttgcccaggctggtcttgaacttctgagttcaagctatccacctgccttggcctcctaaagtgctgagattgcaggtgtgagccactgcacccagcatcagaccattatattaaaaacaacaacaacaacaaaaaactgcaaaatttaaaaattaagagattccctatgaaaacccagatttctggcttttcttgaaaagttggaagctccaggcagtgcagggtccggattcctgcctggcagccctcaggtggggtgagtggcagctgcccccttacacgtgggcatttgctccctgttctccccagtctctacccctccctcactgagaggcaactgctgtgtaagtgtgatagggcttgggcggcagcctttctgcacctgatcctgtttcacccatttgttttcctgcctgccacctgtgggtatttgagtttataaaccctgtgtctagtggggagtaggagtctaaatgcctagttctgggcccaccctggcccgttgtctcatttctgccaccagagcggcaggcgcaggctgtgaggctcaccgatgtccctcctgaccctccctccccgcagtgggccaccaccatcctggacattgagcgctccttccccgtattcctgaggaaggccttccgctctggggagatggtcaccgtgggcaagagctcggacggcactcctgaccgcaggtggtgcttcaggtgaggctggggcagtggggccaggatggcagggcggaactgtccccactggctcggggcccctgctgctccagcgtcgtctacccattgcaatttctggagccactgaggccccaagaggcccgagcagagttcatttccaccaggcgatctcaggcaagtcagcccacctctctcagcctcagtttcttcatctgtggaatgagacaatgatctcacgggctcctaggctggcggtgcggattagacaggtcagcacgtgagaagtgctcagccagtgcccgacgcgcatcgggacgccacaggctcccctgttcttgctcagggggaagcagagacttggatggtgggttcattttagagcatcaccctgtatctaccaaacagtggggtgagctctagtgccctcggtgaaatgggaagctgaggaatgtgcagtttccagggctggagacctcacccagcccatctgcagaatgactccgtgttccagaggcacagggagtgccagcttcttaggggaaccccttcatgaatcttttctttccagttgattcattcattgtaaagtggttgtcagcatggagcataagcagaatgtttggagtcagacaaagtcagtttcttcatctgtgaaatgggaacaataatagaacccacctcctaggccatccgatcagttcaattccattttttgtttgtttttagaggcagggttgctcaggctggagtgcagtggtgtgatcatagctgactgcagcctccaactcctggtctcaagcgatcctcccacctcagcctcctcatgccaccatgtccgaccaatttttaatttttttgtagagatggggttcttgctatgttgcccaggctggtctcaaactcctggtctcaagcgatcttcccacctcagcctcccaaaatgctgggattacaggcgtgagccaccacacccagcctctgttcagtttgaatccaaagctcaaatcttggctgggtgtggtggctcgtgcttgtaatcccagcactttgggaggccaaggtgggtggatcacctgaggtcaggagtttgagaccaccctgggcaacatggtgaaaccctgtctccactaaaaatacaaaaattagtcgggagtggtggcatgcacctgtaatcccagctactcgggaggctgaggcaggagaatcgcttgaacctggtaggtggaggttgcagtgagccgagattgcactactgcactccagtctggcggacagagcaagactctgccttaaaacaaacaaacaaaaatgaatagataggataaaaaattaaagataatatgtaaaaaaaaaagataatatataaaaaaatgagtggataaacaaaatgtgggctatgtgtacagtgaaatattatctgggccaggcgtggtgactgtaataccaacactttgggaagcgaggcaagaggattgcttgagcccaggagttcaagaccaacatagtgaaaccccatctctacaaaacgtttttaaaaaattagccaggtgtggtggcatatccctgtaatcccagctacatggggggctgaagtgggcggatcacttgagcctgggaggtcaaggttgcagtgagctgtgatcgtgccactgcaccctagcctgggcaatggagtgagaccctgtctcaaaagaaggttaaaaaaaataatttctgcttgggggaatggaagaattttggaaatagatagctgtgatggtcacacaatgtggatgtgcttaatgccactgaattgtatactcaaaaatgattaagatggcaaattttttgtgtgtgtatacacacacacacacacacacacacacacgtctttttttttttttttttgagatggagtcttgctttgtcccccaggttggagtgcagtggcgtgatctcggctcactgcaactgcctcccaggttcaagtgattttcctgcctcagcctctcgggtcactgggactataggcacccgccaccatgccccgctaattttttttttaattttttttaatttttagtagaggtggggtttcaccatgttggccaggctggtctcgaactcctgacctcaaatgacccacccacctcggcctcccaaagtgctgggattgcaggcatgagccaccacgcccagccttgttatgtatatgttaccataataaaaaaataggagggtgtgctggggatggtggcatggagagcgtctctgaggggttccccatgaccctctgcttgggccctgccagggtggatgaggtgaactggtctcactggaaccagaacttgggcatcatcaacgaggacccgggcaagaatgagacctaccagtattatggcttctcgcataccgtgggccgcctccgcaggggtgagtggaggggcgggtgcggaggggagccccagtccattctcatcacgaatttgctttgagcagtcctgcttctttccgggactcagtgtccgtgtctacagaatgagagagtgtgcccctgagcttcctctgctgcttgtgaatgcctggggcacctcacctacgtggcttcatcctggccctccctactgttgacataagctggcctggggagggaggacgagctcctcagccatccctgtgtggagaaaaccttcctgtttgtccagtaagccatgagcacgcgagacgcagctggagaggacacaggcactcagggcattcggctccaggcttgaatcctggttcctccattctctcctggggaggcaccttgacctctcttgagccccagtttccacctctgtaaaatgagcatagtcacatccccccttcagaacactgtggagtgcccagtacacagtaggcactcaatatacgcacgctctctctccaccaacccccacccctccctctgatgtgctctcggtgcagatcgctggtcctcggtggtaccccgcgtggtggaactgaacaagaactcgaacccggacgaggtggtggtgcctctggacagcatggggaacccccgctgcgatggccaccagcagggttacccccgcaagtggaggactgatgacgccccgctctagggactgcagcccagccccagcttctctgcccactcatttctagtccagccgcatttcagcagtgccttctggggtgtccccccacaccctgctttggccccagaggcgagggaccagtggaggtgccagggaggccccaggaccctgtggtcccctggctctgcctccccaccctggggtgggggctcccggccacctgtcttgctcctatggagtcacataagccaacgccagagcccctccacctcaggccccagcccctgcctctccattatttatttgctctgctctcaggaagcgacgtgacccctgccccagctggaacctggcagaggccttaggaccccgttccaagtgcactgcccggccaagccccagcctcagcctgcgcctgagctgcatgcgccaccatttttggcagcgtggcagctttgcaaggggctggggccctcggcgtggggccatgccttctgtgtgttctgtagtgtctgggatttgccggtgctcaataaatgtttattcattgacggtggaga

SEQ ID NO: 1290 - DNA, 45232 bp, Homo sapiens
ctcggcgcgtggtcgggggccaggagcgcgtctggcctgcagtgcgcagaggacgcggcgggagcatgttccggctcctgagctggagcctgggccgaggcttcctgcgggccgcggggcggcggtgccggggctgctccgcgcgcctgctcccggggctggcaggaggtccggggcccgaggtgcaggtgccgccatcccgagtcgcgccgcacggccggggcccaggcctgctgccgctgctggcaggtgaggggcgcgggccgggcggggccggccgggcggggacaggggcgcgggccgggcccgatgacctcagagccccttcccgcagcgctcgcctggttctcgaggcccgctgcggcagaggaggaggagcagcagggagccgacggggccgctgccgaggacggggcggacgaggccgaggcagagatcatccagctgctgaagcgagccaaggtgaggcggctccgggccctgcgcccggccgagcgcggtagcctttgtgagcggggtcttggcgttgctgcgcattactctctccgcctcgccgaagagtggatggaggctccgcgggtaaaattgccgagaatgaggtgggtcatccgagaggggattggaatccatccaggcttttccgactctaaggcctgcagtaaaacctctgcagtgtcaagtgcaaatggagatggcgccctaggcatcacgctttatgcaaacgaaatatcgggaacgttttgtagtggttttatcaattaaccagcctatctgaaatgacataatttcgcacgtatatagcggcctgaaaatggcaacttagtgttggttatgcggttcggttctcctcctgaattcttccttttctccacatccttttctatttttttttcctcctcttttcccaagttatctcatctcttccattgagctaaatacctactcgatgccaacaacgtccaaatttgtatttccattctgtagtgtgctactgacatgccatttgcactttaggaccatacctacctctcagatttaacatgcccaaaactaaacgatctttaatgcctcctcaacatacgctttcgccatctctttactaccatcagtttttcagcctaaaaacctcatagtcattcttaaaacttgtggtaccttaccattgccttccaatacacttacagtccagcaacaagtcctgttgccaacaaatgcaaaatatttctcaaatctttccccttttgtctatctcccttgctgtcaccctagtgcaaaccatcattgccaccaactatgctccagtagtctttcctggcctcctggcctcttgcaatctattctccatgcagaaaccaaagcgaccaaaaaaaaaaagagtaaattggattatgtcatctccttgtcagaaagctctgaatggctacccactgcatttatgataaaatacaaactccttgccttggcttgcaacaccccacatgatctaaaccagcatataccttgcccacccatttggcagtaatcctctggctcaccatcctcccttcacatctatttctttgcatttcttcctcaaaaccattctcttcagcttgtagggacttcactcattctctaccctctgtttgagtcattgttctccccaggtccttatttggttgactcattctcatccttactacctcagtttagctgtcacttccttggaaggcttccctaagtcctatttagaggagaccccttatcattcctttctgtcatctttatagctcttatcattagttgtaattaagcttacttgtcctatatggtcacctccagcctgcaagaaattagaaagaggatggaggacaagcagcttccttataaaatatgttgtaagatcacattccttctgcctgtgtctcttggccaaaacttcatcagatggccacacctagctgcaagggaggctgacctccctgtcatctctgtagacaatgctttgtacatagtaggaattcagtaaatgtctgatgaatgagttagcttccttctatcagttgggatgtacagttgcatacacttctgtctcttagcatatgcatctactatatgtttcattttctattattttgtcttcccttttcagttgagcattatgaaagatgagccagaagaggctgagttaattttgcatgacgctcttcgtctcgcctatcagactgataacaagaaggccatcacttacacttatgatttggtaactcttataaccagtctgaaccactgatgaggaaggttggatgggagggaagggtagttagttcttctgatttatattcctgactttcacgatgttctaaaactccttttctttttactgagttttcttttggcttcagtttcattttttgttttgttttgtttttttgagatggagcctcactctgttgcccaggctgcagtgcagtggcacaatcttggctcactgcagcctccgcctcatgagttcagacgattcttttgcctcaccctcccgagtagctggattacaggcatgcatcactatgcctggctaaattttgtattgtagtagagacgaggtttcaccatattggccaggctggtctcgaactcctgatctcaggtgatccacctgccttggcctcccaaagtgctgagatttcaggcatgagccaccacgcccggccacagcttcagtttttttacccttggggtgacataagacctctcaattccagaccaaaaaaaaccagtatcattagcatgtttttttaatgatgagtggacctagatttggtttgttaacaacaaagtatgtgcaagtatttaattctcacatgattgctgtcctgtgcttcttcttgcagattaattggtgatgtgcttttcattttcaactattttttaaattttgagggtgaaagcaaaagggaattttaaagttttgaaataagtaggaacacagtattctaaactgaaaaacaatttgtaatttgctttcagatggccaacttagcatttatacggggtcagcttgaaaatgtaagtaaattgctttgtaatatcttgaatttatgaaggagtagcttcaagggaactgtaatagtaagagtacaggctaagctgctataacaaagagaccctagaatatagtgactcaaacaagataaaagtgtatttctctttattgtgttagtccagagataggctaaagactgaaggcagacagacataggcacctttgctctctgatccagaagtccaggtttcttctaagataagccctcctctgcctaggtgagctgactcacctccagtctgcaggaagggggagaagatggactgtgagcagcttccttataaaacatgattagaagttcacgttctttctgcctgcatcccttggcctaaattttatcatatgaccatatctaacttaagggtgtccaatctgctaaaattgactgaattttttttttaagataaggtcttgctctgttgcccaggttggagtgcggtggcttaatcatggctgactgcaacctcgacctgccaggctcagttgatcctctcacctcagcctcctgagtagctgggattccaggcgtgtgccacaacacttggctaattttcttatttatttatttatttatttatttatttattgtagagacgggatttcaccatatttcccaggctaaatcgaggggactctgtaatcaaaaagatggagaagagaatgactattaggagacagtttgtagtctctgccacagtgggtttggataagaacttaatctctgaggttgttttctactcatcagagagtagtttaaggtacacagaggatgttgagggtcctgatattttgatctgttttcgcttcaaaagggtacttttctgtgtgtgagtgtgcgtgtgtgtgggtatatgggttttacaaggaatgttgcatcagactggcacttagaatccagggtcatatatatatatataaaatggggcccaattaaaagaaaaatcttttccttatgcttttaggctgaacaactttttaaagcaacaatgagttacctccttggagggggcatgaagcaggtaaggacattgcctagtattggcccctcactgaagcagttttcaaaacagtcttgtctcctgaaaactcctcctagccccaccacatgctttggtcaggaaaggtggagtttcccttctgagatctctatacaaattgccattctttcactaaatgcaacagcatgcttgccaaggaattcacagttggctcatcactctaaaagaataaagactgtggctttgaggccaccgtcagtctggaagttgatctgaaatatgccatgaaaaaatttacttgttatgagttcccttcattctctttctctcacaggaggacaatgcaataattgaaatttccctaaagctggccagtatctatgctgcgcagaacaggtaagtacagcagccagggagtaggactgtgggcaggaaactttgactctgggatgttacataatattcattgtctactggtcatctgggtctcccagaaattgggtgtcacactcaaagtgttccatccctcatctttgaaattgtcagtctttttccagtttgcccctactgtttccatcagcctgcctagtggggcacacaacatctctggctgccctgtgacaaaactaactaagttttctgttgctgcttgaagtgggaagggaagttagagttagaactttagtttaacttttcctagaagaggaaagagcagtgtgaaagctgctggggataatatattaatactctgaagaagccattttgctggtataaatagagttcaaagatgaagcatctaggttgtaagcagagaactcctctagagagttgtatttgggatgaatttagggagagacctaagactagcttcccttcaggttttagtggtgcagaagttggtgcgagaggtttggagtgacatggagcctgatgctgtagaaagggtgctcactgaggccaggccctggcactgttccctactgtcctactcaccagctcctttgttctcatcaggacctgcatagtctccttgcattttgattggacactagataggctagagcttcctggagcctttgacttcaagtcttttgaggagctttgagcttggcccatgccagggaacactgcagcttggtcaatctttcttggagttgtaacaaacatgcctagttcttgattgggtatgaatccctagggtaagaagaagcccagagcctaataaacattgttgagtaagacaaattcatagtcttctagaggtgaaagctagtaacaattagcctctgagttacatggtactctgtacttttcattttgttttattaagagaagcatgagactagaaaagacatggccagatctgaggcttcgaaaggctgatataggttatgaggggaattgtttgtagacctcttgctccgactgggagcgtcttctgggcagtgtccacttgccctgtgttatggctagagagggccctcttgccaagttttgagcgtagggaaggaaggggatgcttctgttcttctgagaacagagcagaacagtagggtcataagttctcccctggcaaagcactagagaacaggtgagctttttagtgccacttctgtaagaaactagagccaaaactgaagaaaagaaccaaagctgagctcctaaatggagaagggatttctgtcacatttcctctgcatctctgtaaaaagcagcagtcagtcggcctgcttgggttgactcaaccctctccagttgattgagggtccagggctacagagttgggttaaatgacttctattgccatagctaggagtcccatttctgcaaaagaaacttttatcagagacttatagcttgaaagaaatataaaatgactaaagctcctcagaagctgtatgaggtcaacagttggaatcctcactgtagggcggcctgaactgtttagggtagtattactttgaacaggggtaaggctttcacacatggagaagttgattcactggaggccatctgttagtgggagatgatgaatactgctggctatgtcagttattaaaattagggcagcattcctagctttttgtgtcctaagttatattaaatggatgacttaaaaaaactgctttgagaaatggcagatttgacactacttagactttaagcaaagttccctcttcccattttacacttcctttactgataatgtttaaactgagctggaaaaatgaagataaaaagaatttgtgaaaaggtaaatgggccgggcgcagtggctcacgcctgtaatcccaccactttgggaggccgaggtgggtggatcacttaaggtcaggagttccagaccagcctggccaacatggtgaaactctgtctttaccaaaaatacaaaaattagctgggcatagtggcgggcacctgtaatcccagctattcgagaggctaaggcaggagaatcgcttgaaccccggaggtggaggttgctctgagccgaggtcacgccattgcactccagcctgggcaacaagagcgaaactccatctcaacagaaggaagaaaaaaaaaagaagaaaaggtaaatggctgattattgattttgctttacagacaggaatttgctgttgctggctatgaattctgcatttcaactctagaggaaaaaattgaaagagaaaaggaattagcagaagacattatgtcaggtaggaaacccattatctgggcattgccttttctccacaaaaggctttactttacacttttgagaaatggaaagagatctaaattgggaagagggaaagttacctattttgcaaaataagtgtctgtctttaaggtatcagcagaagttttggaataagatgttttatttaaaatatttgactgctgttttggtggtggttttttttttaacccccttggtaacatggtcataatttatttgttaacttttagttacatataacttaaggaaaattggggagcagaaggagaaggtgtttctcgtatctcttagttcagctaccaatcaaaatgcttattacgttttagccctagatatacagcaaattaagaaagaagagaaaaaaagctcatgtttttacaatccatcctcactcattctggaggctaggaatagaactggatgagcaggaagctctctagctctccaccattttgggtttcttaatttgggttgaagtattgagaattttcagatttgacatttattcaatacctactctataccaagagctaccgagatggtagggatacagcagtcaactcttctgtacctagtggtcttctaactctctcttgaacatagagtagtcccccgttatccatggggaatatgttccaagacccccagcagatgcctgaaacgacttctaatacactgtgtttttttcttatatatatgtacctatgataaagtttaatttataagttaggcacagtaagagattaacaacaataacttttaatagaacaattataactatatactgttaacagtgtcacagacaggagattcattcttattgtagatcttatcaacctcagcatacagttttttgttttttgttttttgttttcttactaagttgagaactttcaccttttcattaaaaggaagcactttatgacttctctttgtcatattcaaattgccagtatcaccactctcacactttggggccattatgtaaaatatggattgcttgagcacaagtactgcaacattgtgggttgatctgataactgagactgctgctaagtgactgaggccagctgccgtatacaacttgggtacactggacaaagatgattcatgtcctgggcaggatggagtgtgacagtgtaagatttcttcatgccacccagaatggcatgcaatttaaaaacttacggattatttcttgaatttttcatttaatatttttcggactctggttgactgcagataactgaaaccccagaaaatgaaactgtggagtaggagggatcactgtacaccaatttttttgttttcatcactccactgaagctacctttatcaaagtcaccaaatccaatggttacttctcaatccttaacttactcatcagcagctttaacttaggggatcactgtctcctactgaaaatactttcacttggcttctgggatgcctcactggtctctctagtgaggtgaatagacttccctacctcttaatgttggcacgccttagggctgttttcagccctattctcttttctctctgccccaacacctaggagatatcttttagttccatagttttaaatattagatttataccttcagccccaacttgcccccaaatggcagacttataattatgattgcccacccgacatcttgacttgaagtctaatggtcatctcatacttaacatgtccaaaataggtctcagttttgccgctcacaacttgtttcgtcaccagtcagccccagatttgtaaatggcacactactcatttagttgctttggccaagaacctaagaattgtccatgatttcttcctcattcctcatatctaatccatcagcaagttatactggatcagccatcaaaatatatccatactgaccatgtctcatcccattaccctactgctttggtccaggccatcactgtttcaagacctcagtacctttgtatcacctttagaataaatttagaatccctgcatggacctgtaaggcgcttatgacctgggcccacccacctcttccatgccatctgctgctctccccttgctcgttccagtctcaccacactggtcttattctggcacattccaagcttagtgccacctcaaggcctctttgcttgatattccccctacctagactgttctctcttacctttctctggccaactcccgtacttcactcaggtctctgctcaaatagcacttcctcagagtgctcccttcactaaaactatcatctcttcccaccttactattgctctactcctctttcctttacttttcttcatcacacttaaaagtagaggtgtgtgtgttgtgtgcttgtgtttctccactaaaagtatgtttttgtttaaaaatttttagtctttgtcttccatatcaaagaaggatagagacttcatccattatactcagtgctaaatcctcggtgcctagaacagtgcctggcacataatagaggctcaataattactgaatgaaagaacaaaagacccaagaaagaccagcaaataaatccagtttcagtgcagtgtggaagtgctttgaggaaatccacaagaggtgtaaaaacaagtctagctgtcaagtaagtcacttctgaactatttacacctttgctgtctttcatttatagtgttgactatggtttcttaggagtgtaaagctatattttctgattcaaaaaataataccagtaaacactgaagaaagtttagaaaagcactaagtaaaaatcatctgtaatcatactattaagaaagagctactgttttatttattactacggcttttcgggttacattttaagaaataaatttgggatgatactgtatatcctactttgtaacctgagttttaacaatttagtaacatattatgaaaacactttttttttccaggcaaaggaattcttgttagatagagcaagctaatttctattataaatattatttttacattttactagttgcacagtatagaaaatgtgttacatgattcttcatcttattttttctagaaaaggaattcctacctattcagttttgcacaaagcaaatccattatcaaatttacgtgctttttattgacacaactatctctattctaggataacattacttaattacataaaattacattacttaattacataaaaccttgctctaggataattattttgttacctatgttgtagacatatatgtacttactgaggaaatgcccataaaaaattaagtgaaaactttggttacaaaacagtatagttagtatgtagactaaaaataggaatggaacaaaggctgaatgatagatatcaaaatacaggcagtgattctctttggttggtaggtttatagggaatttatattttatttgtgtttctctgagtattctataattttgtacaaatttatatttttctttttaatttccaatgttatctgttagtataaaaagtcaaataatattaatagtacaaagcttaatttaagagagcattttcttggctatctcacccaccccatctattttttttattttttaatttttaattttttttttttttttttttttttgagacagagtctcactcttgtcaccaggctggagtgcagtggtgcaatctcggctcactgcaacctccgcctcccgggtttaagcggttctcctgcctcagcctcccgagtagccgggactacaggcacgtgccaccatgcccagctaatttttgtgtttttagtagagacagggtttcaccatgttagccaggatggtctcaatctcttgacctcataatctgcctgcctcagcctcccaaagtgctgggattacaggtgtgagccaccgcacttggccctattttcaacttttgtttttgagacagagtcccgctctgtcgcccaggctggagtgcagtggcgtgatctcggctcactgcaacctctgcctccccggttcaagcgattctcctgcctcagcctcccgagtagctgggactacaggcacccgccaccacacctggctatttttgtatttttagtagagactgggttttaccatgttagccaggatggtctcgatctcctgacctcatgatccgcctgcctttgcctcccaaagtgctgggattacaggcatgagccactgtgcccggcccctattttcaactcttaaccagtttcctctggtatttaccttcacatttctcaataatataaaattgctatttcctagttcattattttcagaatatgttgatttatggaaaagtgaagatttagtgcagtttctggttgtgtctacattatgagtgtatgaatagtgttagctgctgagccaagtaacatgattacacagttacatttccttttgtgtacgttttgcttcctctgaagttaactaggtttttttgtggctccgtttgttatgtatatgccagattcttcacttttacatattacttgctttcttcaattcataagctttcccagtattctagagttcatgttggctcacttttcattggcatggctggccataggcattcagtcttcatcttcttttttttgtttttgtttttgttgagacggagtctcactctgtcacccaggctggagtgcagtggctcaattttggctcacagcaagctccacctcctgggttcaagcaattctcatgcctctgcttcctgagtagctgggattacaggcgtgagctaccacacccggctaattttgtatttttagtagagacgggatttcaccatgttggccggcctggtctcctgacttaggtgatccacccgccccagcctccccaagtgttgggattacaggcgtgagccaccgcgcccggccgcgttatatctttttcatcctgtaagtttcattttagtggtatttggggaaggagtggagaggaatgcctgtgttcagttcagaatagtaaatctgttattgggcatcaagatagtgtccaaacctgtttttttaaagtggattcttagcactgagatttccaagtcaagagtagcacattttaaggttgttgatgactattgccaaattgccattgaaaggactgtgttaatttacatttcctggtttggctatttatgtactttgtgactttggccaaattacataatccctgtgtgctttttcttcagtgtgggattaagagtaacactcataggacctttaggaaggtggaatgagttaatacataaaacgtacttagaataatacattgtagctgctcaaaaagggtttgttagtggtttttattattgtgataagcctatgtcctcctccccaaaactcattaacttttataatctttgttagcttgatgatatggccttgatgcattatctagcatttctttgataaacagtgaggtttatctttttttttttctcaccatgtcttagggtgctaagaggtttattttttattggagctttattgtaaaaatattaatcctttgtctcttgggttttcctcctgatttgtgtttatagagtggggtttttttttctaataaaaagggaatgtgaaattaacatttgtataaagaatttatgagaattggcgagggacagtggctcacgcctgtaatcccagcactttgggaggccaaggcgggtggatcacttgaggtcagtcgttaaagaccagccctggaaacgtggcaaaaccccatgtttacaaaaattatctgggcatggtgttgcgcacttgtagtcccagctactcgggaggctgaggtgagaatctcttgagcctgggaggtggaggttgcagtgagctgagatcgcaccacctgtggtccagcctgggtgacagagcaagaccctgtcttggggctggggggtggaagaggattgtgagaatagacaagtgatccagcattgccagtacctttggagctcttcctacctgggatactattctccttaatcttgtcactatcattcaatggcatgatctcggctcactgcaacctccgcctcctgggttcaagtgattctcctgtctcagcctcccgagtagctgggattacaggcatatgccaccacgcctggctaattttgtatttttagtagagacggggtttctccatgttggtcaggctggtctcgaactgccgacctcaggtgatctgcccgcctcaacctcccaaagtgctgggattacaggcatgagccaccacgctaggcctatttgcttttctttcattttactctgtgtcccttaagaagatgtcatttagtttttgcatattgcttttaaaaatttaaataggctgggtggagtgactcaagcctgtaaccccaacactttgggaggccaaggtgggaggatcgcttgagcctaggagttttgagaccagactgggcaacatggtgagatcctgtctcttcaaaaaataaaaaaattacctgggcacggtggcacatgcctgtggtcccagctacttaggagactgaggcaggaggataacttgagcccaagaggtcgaggctgcagtgagctatcatagtgccactgtccttcagcacaggcaatagagaccctgtctcaaaaaaaattaaaattatacaaatgaatcataatatgtattcattttagggcatttttatgacttgcatgagtaatcttttcagaattagatcagaattcatttctaatttcctttgcttttattcatctttaataaatactgagtagctgttctgtgccaggtattctaggatttgaatagcagcaagtaaggcaaaagtccttgctcttctggagcttaatgcttagagagatatttttcaagctttgaaattgtatgcattctcactcatctttccttataattttctatttttttccttttatttctaaacagttttaactttttagtatatctggtattttggtgtgaagctggtgactgttttcttgcagatagtaatcaatctatatgtactaattagtacatacttgggtttcttttggggttttccattctgatgtatttacctgatgagttttataacagtatacattctttgaattatatatttgagttatatggtaggacagttgacacatgcttcctttgtaaaattccttcccacatttcactgttttcacatgaattttagaattattttgtcaagttcgtaaagtgccttcagactgaattatcagatatgcattatatttataaattagtttggggagattgccatctgaataagttagcatatctttgactgcaaagagcagaaatttcagctaaattaggtttaacagtaaggacatttatgtcaagtaactggcagttcagcaatagggagcaggctgttgagttagttgacagtgtgattcactgaaatcataaaggaacaggctctttccatccttcctcactcatgtattggctttttccccatgctcccctggtggttgaaacgtgaaactataacaattcccaggaatctcatccagaaatgacagtgtccagaggaaaaggagacttctttgatgtttctcataggatcaaggtaatctttcctagaagtctccaagtagatttgtccttacttctcattggttagaattgggttacatgccatttctaacccagtccttggcaagaaaaatggattatcatgattggctaaaatacatcagtctcctttcctgaggatgtgagtcatgtgagaaaagaacggatactgggacaaagcagctgctctgctagcaaaggaagatctttgtaatagtgagccgtctcactgaggaacattctatagctcctgcttatagttttcttcatatagatgacagctatttattaaatttgattctaactgactccttgactgaactctttgcttttcagttgatattcacactaattccagatttataatcatacattccggaaatcatgatacaggttgagcatcccccagaaccgaagctttctgagtgccaacatgatgcataaagaaagtacgcattggagcatttggatttgggtttttggttttgggatgctggcagtatccaaaggaaatattccaaactcaaaaaatctgaaatctgaaacacttttggtcctaaacatttcagataaggaatacttaacctgtaattgtttccttccagagagttatactactgtctcccttccccaccctttataaaattagttcattggctgtaccttcagaacatcaagcaatagtagtaataggaaacttagtcttatatccaatttggtaccaagatatatgaatagatttattactattatatatctagagcggaccaggcttgcttgtaggttaattgcttagtacctgtgtagtgctggataatatttaatgctgatatgtaacttgcgtttcttatgagatccacagtaaatttcttattgtattgtttgtactattatgtttgtattatttgttatcgcaggattgttattaatgtgataaaatgaattgggatgctttctgtattttctattctgaaataagtgtgggatattgcattggaatggtctgttccttgaaagttgcagagtctgtgatgccagatggaccagaactcctgagttaattctccggcagctttttttttccttcttgattactcatgtatttcttccattttcttaatttcaatataggacagtgctaaaaacataaacattaataaatatctattgaataaatgaacgtatgggtgaacaaattttataactattaatttcctagaagaaactttaaggaattatatttttaaagcatattttacactactcttacgtatctgagatcctcttccttttctagatcctaattttatggatttccttttaaattagtaaaaagatgtttcccattgattccttcctcctcctttccttgaaagtttttattttcatatattaaataaaacatttctagaaagttatttttgatgacataatatttggttccatgagtgcttaaagtctggagcctgagttcagattctggttctgccacttactagcagtggacaagttatttaacttctctgttctcagcttccttatcaataaaatgaaaataataatagaacttacctcatagagttacaagaattaaatactccaggactatgaccagtactcattaggcactattatataagagtttgtggaatgtgatatatttactaatcttatttattatatgatttggcacctatattttactattatcaatttatgaaggaccttcctggccattttatttatagtttctccttggtttttgttaattttgtttattcattcaaagagccaacttctggtttcattaattttctttattgtctttctattttccatttcacttatttctactttgtctttattacctctctcctgtttgctttgggtttattttgttcccttttttctggtcccttaggtgggagatgaggttattgatttaaggtttttcttctaacataattgccatttataactataagctttagctgcatctcattaattttggtaagttatattttcatgtatctcaagtattttccaattttgggggggatttcttctttgaccctttggatatttaggagtatattgattaatttccacatacagtgaatttctcaaattttcttctgttgaatccagtttcattccattgtgttcagagaacaactgtgcttgattttatttattgagatttgttgtatggcctcacatatggcttatcctggagaatgttgtatgtgcatttgagaagtatgtgtattctgttgaatggagttttctatgaatgtctgttaggtctagttggtttatagtgttattcaagtcttctgggtccttactaattttgtctagttgttctaatttttttttttttttttttttttgggatggagtcttgctttgtcgcccaggctggagtgcagtggcgtgatctcggctcactgcaacctccacctcccgggttcaagtgattcttgcacttcagcctcccgagtagctgggagtacaggtgtgcaccactgcatctggctaatttttgtatttttagttgagatcgggtttcaccatgttgtccaggctggtctcgaactcctgacctcaggtgatccgcctgcctcagcctcccagagtgctgggattacaggcatgagctactgtgcccagccagtttttggtatttttagtagagacgaggtttcaccatgttggccaagctgttcttgaactcctgacctcaggtgatccacctgcctgagcctcccaaagtgctgggattacaggcatgagccaccatgcccggccgataaattttttaaaatcttctttctttatacatgtttctgtgctctgtttagacagtctcatagatatatttatttgttacgaattgtcccttcatcaggaaaatgattcctttttccctatttaaggtatttgttacgaattctagttttatattatctactatatcttacccttaacttttctgagtcattttcagtgtatcttttatagaaggctatggttggaatttttttaaaacctgagtatcattgtcttctgatacagaatctgaaaaccttttaaaaattagtgaggcgaaaaaaattagccaggcatggtgacgggtgcctatagtcccagctactcgggaggctgaggcaggagaatggcacgaacccagaagccagagcttgcagtgagccgagatcgcgccactgcactccagcctgggcgacagagtgagactccggctcaaaaaaaaaaaaaaaaaaaaaagtattcaggctgggtgcagtggctcacgcctgtaatcccagcactttgggaggctgaggcaggtggatcgcctgaggtcaggagttcaagaccagcctggccaacatagtgaaaccccgtctctactaaaaatacaaaaaatgagctaggtgtggtggcgggtgcctgtaacctcagctactcgggaggctgaagcaggagaatcgcatgaacctgggaggcggaggttgcagtgagccgagatcacgccattgcactccagcctggttaagaagagcgaaactccatctcaaacaacaaaacaaaacaaattagtattgaaagggataattggtctaattattgcattttaaaaagtgctttccatttttgttaattcctttgttttcagttcctcttacaggaacttttccctctctgatctgtatttgtattttgtagggaaggtatatgtatatatgattttcagttgtataaggagtaacctaaacatttcttaaagacagttgactcagaggaaaaaaaatttttttcagtttcttctctaaaatgagatgagtacattttaacattatccttctttcccttttcctcacttgttttttctctgtgatctggaattttagacttagtggaatttattgcagaggagaattctaaagcctgcatatttgccttgttttttaaatagtctattttctcctgctcagatgctttgctggactcagaagttaaatgagcataaggttagggagttgtctgtttatgaagcttgcttagtccctggtgaaccttcatttttagcatccagttctctggagcttctgtagtctattctggctcaatgcttctgtcccacatgctctggcctcttaccctggaatgtcatttacctgtatgttgacctctcttctctatccttcacattatcccctcttccatcagttttctcatgtatattttgggagtttcttcagttgatattccacattaccaatttattattaagaaaagtcagttctgtgcttttcttttgatttgttttttgttttttgagatagggtctcactgtgtcgcccaggctggagtgcagtggtgcagtcatggctcactgcagcctcaacctcccaggctcaactgatcctcctacctcagcctcccaagtagctgagactgcatgctcatgtcaccatgcctggctaatttccggattttttcatagaggcggagtttcaccatcttgcccaggctggtcttgaacttctgagctaaagcaatctacctgccttgacctcccaaaatgctggcattacaggcatgaggcatcacgcctggcttccctctgatgtaattttttaaaattagatttcaaacaaaagtaaagttttgaggacttaccaaatatctgtgtactttcagccttggccagatttcaatattttaccatatttgctttagaattttttttggatatttaaatccctgtatacccttccctccctgcctaggggtagctactatcctgagtttggttttgtttgcctacttattgcacttgtatatatcaataaacaatatattgctgggtacagtggctcacacctgtaatcccagcactttgagaagccgggacaggtggatcacctgaggttaggagttcaagaccagcctggccaacatggcgaaaccttgtctctactaaaaatacaaaaattagcccaacatggtggcgggcgcctgtaatccccactactcgggaggctgaggcaggagaatcgcttcaacctgagaggcagagattgcagtgagccgagatcgtgccactgcactccagcctgggtgacagagtgaagactccgtctccaaaacaaaaaaacaatatacaatagggctaatatgtttttaaacttaatatgaatggtatcatactgtacaattggttttgtagtttgcttttgtcactcaatattatgttgatgagatttattgggctgctatttaaagcagttttcttagcacagaggccctgtttgcttgccaaactgcatgtctgctgggttgcgtctgtctttaaagggtgacttcctctaattaatccactggggtgaggggtaagttgaacctgttttttctgttcacaagtgtggatacaagctaaaggtggccctgtgtggttccctcactacaaccatggtatagtagtccattgtagaaatataccacagttctattgatggacctgttgggttattctatatgttttgctgttaaaagtcatacttcactgaacattcttggacttgcatctttgtgcacacctggaatattacataaaagtggagttgccagggtgcatataccaaattgcttaacaggctgggtgtagtggctcacacctgtaatcccagcattttgggaggctgaggcaggcagatcatttgaggtcaggagttggagaccagcctggccaatatggtgaaaccccatctctacttaaaaaaaaaaaaaaaaaagccaggcatgctggtgggtacctgtaatcccaactacttgggaggctgaggcatgcgaatcgcttaaacccaggaaggcagaggttgtaatgagctgagatcaagccactgcaagactttgtctcaaaaacaacaacaaaaaccaaattgctgatcaaagtggttttaccagtttacattttgactagcagtatattagtgttcatgatgttctctgtatatctttgttatcagatttttttgataatctgctgggtttgaaaaggaatttcattgtggcttcactatgtgtttctgattactgtatttatcggttattcagattacctgctctgaaaattatttcttcatatcttttgcttatatttttgaggggttgtctttttcttaacgattcgtaagagttccttacgtattcgatcattttgtatttttgtgggttacgtatctctttgtagcttgtcttttcacattagggcatttgatgtagattaaaaatttgtatattaacagaatcttgatatttatcttcatagtttgtgcttcttatgtcttgatttgtaatgacatctctatattgggttttcatagattcatggggtgctaatgtttaaatctgtaattataactatttttagtttcattataatttttccctatttaattcagtactttatttcccccactaccccccaccccccaagagacaaggtcttcctttgttggccaggctgaagtgagtgcagtgacacgatcacagctcactgcaaccttaaactcctgatatcaagtgatcctcccacctcagcctccagaagaattaggagtacaggcacgtgccaccatgtctggcttatatatatttttggggggtggtgggggagagtagagatgaggtttcgctatgttgtccaggctggtctcgacctcttgggctgaagtggtcctcctgcctcagcctcccaaagtacaggattgcaggtgtgagccaccacgcctagcccttttataattccttctatttgttcattcattcaacaattcagtcagaaatactgagtgcccattacacactagatatgctgctaggtgctgagatacagatataaataaaagaaagttggctgggcgcagtggctcacgcctgtaatcccagcactttgggaggccaaggcgggcggatcatgaggtcaggagttcaagaccagcctggcaaatattgtgaaaccccgtctctaataaaaatacaaaaaaaatttagctgggcgtggtggcgcacctgtagtcccagctactcgggaggctgaggcagaagaatcacttgaactcaggaggcggaggttgcagtgagctgagattttgcaactgcactgcagcctgggcgacagagtgagacttcgtctcaaaaaagaaaaaacaaaaaaacaaagtcaccgcctcatggagctacatttctggtgggggaaagacgcatagtaagcactacccagtaagttggtgtgtccaaagtgctatgtagatatttatgaaggaatatgtataccaggaatatgttggggcagtatggtgtcttatagagggggtagggaaggccttgttagtatgaaacctggtgaatgggagagaataggccaagtggctatttgtgagggaaaaaaattacagacaaagggcaattacaggtacaagactctgaggtggtgtatgctgcttgacttactggaagtaaggagttagaattactggagttgtctgattttctaaaattttgggggatgaggcctgcttttttactgtctgctgattctcatttatgatgaattgtcatgtttactaatcttggattatacattcatcttcagcaaggttttagctataagtgagattccagaatagttttgtgtcttccaggcactcagctcctggccgaagtggatgctacaaatttagacatcaaatttacagggtagtcatttttctcctctttagattccagacttggccattcaaggctccttgttgtctccctgtgcctgtggtcggggggttaaggggagtgtaggctggagtggtgcaatttttttcacatacatgcttttcctggggttgtggtcctaatggtaatcatcctggtttatgcattggcttcagatctcattttgtttagtacacatcaacagctttaattcctggattacagagacaactcaagctacaacaaaaaccgggcttctgctgtgtcaactcacagactctccactttgggttttagcttactcctaatttgtggctcttgggagctcagctgtgcagggaaaggatgtgtgttatagtttatctaaggtttccaggtgtttgaagcagatgggtttcatctatagtgttacgttagattctgctttattccctccactaaaaccattaacactcatcagaaagtgctaatcagttgattaacaagagatttagtttagcagaaatttcaggatattcttggaatttgggcaacaaatatctctagtttcaaagacccttgtagactttcctatattgctattgatggtgagggggtaggggagtgttagaggcctatgctcaagttttcctaaattagagatgctcttttgctattgttacaaatgcatataattgctccagtactttatcaaattccctttagtctatatttatgtaaacctagtttgatatactgaaccattcttttattcctggaataaatgctgtttggtcatcttaatacatctgattattccatttggtaatattttgagtaaaaaattctatagtgaatcctgtttgcttcatggactgagtatagtagcgtatctttttctgtgactagaagttatttatgaaagagaatcatttatgtttgaagaagtaaatatgcctcagtttcaaatggtcctttaagggctctgtataaacgattccaatatatttctcagttgttattaaagtacttgatttttttcttgtctaacttttagcaatttttatattaatatttcaaagaaccatgtttaagtaaattactagcaaaggaactctttgggggaactttatgaaattttctcttggcagttgctaaaagttttcttacgttttctaaaagttcagtaatagtacatttatctttagaaaagtttgcttttcagaaagtgtttccatttttcttgtggtcagaatgtgctgtgaattttaaatgtatttttaagatattatagctaaattgtacctcactgttttctctaaaaagttttactgcttttgcttccactccactattcagtgataacaagggtaacaagtttccactagaattgcttgtcactttattcttgtacttttgttttactactgaacatctttttaaatcgttgccacaaaatatctcgcttttatcattttcacattgctctagtatatcaactttggaaacaagacatcattctatttatagcattctgtttttagtagtggtatttccatttacaaaatacagtaattcttgatcgctgaagacgtcaaatcctagaaaacatagcatgcctacgcgtgatgttaacatcattctcgaatagttgttggttgaagattcatttgatgaatccgatttttcagaaatagacgagtctgatgatacagacgattctggtgttagttctctgtagaaataactccaagaacacttttaatagtttattttcacattgaaaatcagatttgctccagcctcaaagagtatatttatgtaaaattaggtaagcgatatagaagcaagctgcactttttttctaaatgggaaggtattaaaaaagaaaagtctcattttagtaacatagtcttccttaaactctatgccacttgtaagatttctgaaaactgaagacatagaagggaacgggcttgatatgaacgacagctttgctggtaaataaacccaactgaacctaagattatctaaggtaacctctttttctagtcttttattgtgtgaacagttacctcctgctgagttgttggcagaatttccatataatcttgcttatgaccatttctacattatttgtatcatcttttagaagtcttacccaggttgatataggttaccgttctctagatctgtgtctccaattcttcttacatggcattaggtattttaagcttgttttttttcagacatcgtatagtcaattcttgaatgtgttgagaggtgctatgtcattgtaagctttattcttcttctctgaatgattagcttgtttaaattttaccttaaattcttttttttctttttttttcttttgagactgagtcttgctctgtcgcccaggctggagtgcagtggtgtgatctcggctcactgcaagctccacctcctgggttcacgccattcccctgcctcagcctcctgagtagctgggactacaggtacccgccaccacgcctggctaattttttttttttttttgtatttttagtagagacggggtttcaccatgttagccaggatggtctcaatctcctgaccttgtgatccacccgcctcggcctcccaaagtgctgtgattacaggtgtgagccaccgcgcccggcctttacgttgaattctttaaattcagcttgtgactttgcacttcaggattctgagtgttctctgtcttcttcctgcattgtttttcttataccatacaggtttttcattggccttgactttttgttgttaactcattcttctttgggtttattttcatttgtttctgctgaatattatttgtttcaaactaaaaataacattccacattttaattgatgtgcggactcttaatctacttaaaatgtgggctgaagttccatgattccagctagtctggaataggtcatttaactggatgttaattcacctacattgttccctaagtgacatgtgggtcccattctgctgacatatttgtgggtcctggtaacaaccatttgggtagatttgctgattcctcttttctccttagtggaagagaaagccaatacccacctcctcttgggcatgtgcttagacgcctgtgctcgctaccttctgttctccaagcagccgtcacaggcacaaaggatgtatgaaaaagctctgcagatttctgaagaaatacaaggagaaagacacccacaggtaagggaggaaaacacagaagggggaatataaaacaaaggcttcaaaattgaagggtgtgaaatgtcacactcattggtaacaggatcagcagatggtcctagatcctccttggtccccagtctactcattttcttatcaccagcaccctcaccccaactacttgtttcagaaaggatttgagactagttatcagttactaggtctgcccagaactttttgcatgatccatggtttgcacaacagagcaacctttctacagagcaggactggtcaggcttcaatggacacagcacagtatttcagagtggggtctctagatacccctattagaagcttatgaggaacggtttaatacacaaatatccttgcctcccttgccccacagttaaaatggcaagaggtgagggaagggcaagggaccacattaaaaacacttaaaccattggcatattatagaatttaagtataacgtgtaaagctctgtgttagaacattaaacacattgaattgaaatcatctctttgggtctcccctccatccgagtaagttcttagatgtaaggagtgcattgctttgtctatgaatgcttgctactgccaatataagacataacaattttaactgaatgtgtcccaaggctggggtacatgggtagggtgagtaatatgttttggaagaaaagggaggttgagctatgaattatctccatgaaagggatttataacttattatgaagagtcccttaatggagtgaggaataataaacaagcaagtacagaattcagatctccaagtactagagtcagggggcttaaagcatggcatcagtggggaagtaggtatggaagtctacctcttccatactgaaattccatttcagtagccaaattaaaaaaactcctactgggcatcttcctaaaatagatggtgtatttcttgtttttgatgagcctcagggttatcagcaggaacaacataatacagtggggctccagaggcaatcaaaccataggaggctggcttctcaaagttgctcagccttaaaggagataatatgtgtagcttcttgctgttgtttttcatttggtgcttctaactgggtaattagttggattaataagcactgtctgttacctaatttccagatttgtattatttcccaaaaggtcgaactaacattgtccactgtacaatgtgattatgattaacaaatgcccacaaatttgttaaagaatggtatccctcatcttttgtggaatgctaggaaagatgaaatcttatgtattcagagttggatgcactccacattaaagttctgtgaaggcatgtttttaaagaaaaaattgttttttcttttacatacagaccattgtgctgatgagtgacctggctactaccctggatgcacagggccgctttgatgaggcctatatttatatgcaaagggcatcagatctggcaagacagataaatcatcctgagctacacatggtactcagtaatctagctgcagttttgatgcacagaggtaggtagcaatgtaaacttaactgacttgctttaagggagggatgtcactggattgatagatttgtgaagtggtatgtagggagggcaagggccaacgaataaacatgtaaattaaaagactggttgaatggcagaaaaaggaggtattgattaggttgaagtactattgtgttcaattcacgtaacttctacagacctgcactagcctgtcgaaccccatcaagctggagaaaaccttgcaatgatagtaccttacgtcagtagtgctttacagatttctaaatgtgttcagttacaatgtgtttctcacagtgtgctggtgaagctttatgacaggaagtatcattttgtcagacatttcttagtgtcagcacactataccgatcattttcagaaacctgggatgacaggtgtattacacataccaccattcatgaaatcttgggctcatcaaagtcctcaggatatactggaaagggccgttaggaatcccacagcattcagtggagttccagcctgtcagatggggatgaaatgaggcagcaccagcttgtcgcttcataagcacacagtaaattagccctatatctgcattcatgctctctcttcagaatcaccttgaaaacatacactttcttcttactgtcccttctctctgggttattttagaacgatatacacaagcaaaagagatctaccaggaagcactgaagcaagcaaagctgaaaaaagatgaaatttctgtacaacacatcagggaagagttggctgagctgtcaaagaaaagtagacctttgacaaattctgtcaagctctaaatccatttttgtgtagggagaataatgtctagtaatgtggaagaatagctatcattcctgtctctgtggcacccgatcaatggcttaaatctgtcgtttttgatattcaggtttcctcaatttagccttagtgaaggaggggttgtacacactgccatttttgtattttaaaggaaaaatgactttcattcccaactgattatgacctttcaggatgtcgtcaagtgatgctttcagttgtaacacgtgacttggtgctgtccctgctggtctaagtagaactgtagattcatatgggctggtgttcctgtgcgctgtgggtgtggtgattcagcctggcatttctaccataagtttttggtctgctgatttgctgccctgtcttctcttactttactttatcaatacctggcaaactgaccagaattaccttcctcatggcaaagggggattatggtgaattgttgttcttatagtctgtttcatgaagcacaagtggaatttaatacataaaagagaaaaatatcttagtttgctaccagcatccagcatgaagttgtaaagtggggattaggcacgtgacagtatagcacccatttgaatttaaataaaagtgaaccatatttatctggttatataaaactaaaaatgggggtgtttatataaaactaaaaactaagaatgatgtaaccttttgtctgtgttatctgaacactctacttcctttgcagccttagtcacacaactgagtcatctcaagtactctttaaggacacacagcccaggctgttctgagtcagaataggcccctacaggtatattttaaaactcttcgtaattctaatgtgtactgctggtatagctgaactactgacctggatcttagtcctagcctttttgcttttgcaatttcagtatcttcatctctaaactagggaaacactgggattctttcttagctgtgggggaaggtatttggttagatgactttgaatgaatagactgctgtgctgaaagagctttatcacactgtctcaaagtatgtaaagatacataggtggatgctcttactgcagcagtcatgaatacatttttagccatttacctaaggaaaaagacagtttttctaggtaccatgaaggaagattgaccctgttggtatgcctgtgggggtgggatgtgagtgggactgataaactgatacttttggttcgtatgtacatactggaagaatcttcataataaatgagactacacaacaatattgtatgtatcccagtaatctttgcatttctcaaaaaaaaaaaaaaaaaaaaaaaaaaaactttctgaagaaaataaaaacaccagaaaccttgaggtccaaatcctcagggattagactaaaactagagttttgtatgttgcagatgtaaatttcttcctattttctgtctaatctcatattatttaccatgcagctaatgccgtttaccaagtctagctcagagagataagatacaatataaatcagactgtttcagtagaaaccagtattaacgtatggtgatttcttaaaaaaattaatgtcaaccactcaccttttgcattgagaatgtttttaccttttcacaactgcaggggttactgaaaggtttttcattccaagttttatttatttattaattttaaatcatccacagtgactcagctcatggtctcgttgttggaaacactaggagttttcaggacagtctcttcatgtgggtgttttcattacagttcatttacactgttgtaaaataaggtactgaagcaaaaggaggactgatctcctttactgattggtctaaattcaaaagtgaattggttaaaatcgtgtcattaaaattttttaactgtccaatggtcactggagttttctgggcataaatatttttaaaatagaatcactcagtgtaccaaaattaaaagcattatgaaatttgcagtcataaacatgcagtggaaaactggctgtcagaatacttttatgaagagtattaggaagaccttaatttagttctgggtgctaaaaaaatcacgtgtaaggatatagtgtcagaacactgaaatctaagtctacaaagaatatcatgttttggtttgcagtgaaccacagtaagttgtcagtgctgctctgtgcttaccacttaaatcatgataaggtgaacctccataggtaaaccatgtgagaattctgtcctttcatttattttgaaccaagaactattattggattttaactctcattctgagatttcttctccaggtgatggtaaataaagtaatacgcacatgcattatgatgaggatggagggagtggttcacagcacctcaccttcgggtcctcaggtagaactgcaagagtaagaagttaggctctgatctgacatgttctcagaaactatacggttgaccttcaaataatgcaggagttaggggcatagaccccctaagtagtcaaaaatccacatctaactttgactcctccaaaacttaactactcatggcctactgctgaccagaagtcttacggataacatagtcgattgacacatattttgtatatgtattatatactgtattcttacaataaagtaagctagagaagagaaaatgtttgttaagattataaggaagagaaaatatatttactattcattaagtggaagtggatcatcatgaaggtcttcatccttgtcatcttcatgttgaataggctgaggatgagaaggggttggtcttgctatcttgggtggcagaggtggaagaaaatccatgtataagtggacccacacagttcaaacccgtgttgttcaagggtcaactgtattctgactcagaatagcttaagaccctcagggtcatagaaaaataccatcataatctcttttatggtaggttggcaatataaattattaacaaactctaaaatattaccagtacctgaaaaaaaaaaattcagcagaaaactgtgaagtggaacatttagtcactgtttttcattcattttgaaatttttatatgtttacatatatctgttgtaaaaaataccaactttccaagtactaggaatgctgaccactaagcctgatctaaagtttatgttggggacctcaggtatacaggagtggaacagggacaggagtgaaagctttgactgaagacaaatgtgggcttatggcctatctctgtcactaatttaactatatgggcaaagtactaaacctgtgtcttcatctgtaacatagggattagacaccagtgataggagggtcttggtcagtagctaatcacagagctgcttccttaaaagccttgagtacttttgtttaaaagtttaggtctacttgaaagtctgtaaagtgctaatttttatcatcctgagagatctgtttctcccctttccagttaccagtggcattctcccaaaactgttagtatctatgttatagaaagatacttaaatgctatgataaattgtatgaaaaaaactttaaaattcagcaagcaattcttaatgaaagataaaactggccctctagtaccataattagtttagaattcagtcttttaaattatttgcaccttgagactctgtgaaatgaaaacatttaacagtaaactcttgtcccaagggagcaaagtgagagtaaatgctggtccatagtgatggggaaaaaggactgtgttcaccatgagtttttcaggatgcagcataaagcttatctaaatactacacagatcattatcttttaacccaaccaatcatatattcaaactaagggaaaaatatgtaagcttttcctttggaacctgagacaccaggagccttaaaccacaaataatctactgtagctatggacagggtagtcaaatttatttcaaaacaaaagctttgttgggctgcatcaaatgcaggagaaaaggaatacttaggggcatggttaaattaccagtgtgcgtaacagtgaggtatgcctcaaataagcctttaaaactttataaactgaactagaacatacccatgcagtaatattttttcagtgctactaatgaaaaaaaaaaattaaagcctgcactggaaatttacaatatggcagaatttgttacttttaccttttgaccctaatgtacagattttatgacagggtctgtgttaaaaatctaaacattttcacaagattttaaacatcactggaaagctgaatttagaggaaacaatatcagataaaagtacaatgcccgtgacagccaacattatgtaactgggctgtatgaggttgtttagaaggctagggttaaaaagatagatagacaaaaagatttttaaaaatcacccccaaagttgatgcgctgatttgaacataagtacaccagatactacagcaaggggatatacactgcaaaaaggtcatctatttacagaagagtgatttaaagacattatggttttctttacagatgtaagaacagcaactgttcactttttaaaaactctacatctcaaccctccactattattatagtccactgaattgcctgtatcaaaggcagttttttgtttgtttttttcccatttgactctccaaatgaacttccatcatttcttcatcatctgtgggctggctctcctgaaaagtctcagggaataagtcacaggagggcaggtttttgacctgctactaaaaattaaaccacaaaaactagagatccctctcctgcaccctgttcccctcactttgtgcagttcagtcatcactatccgacagggtctcgtactgtgctgagagcagtggggcaggctctcgctcccagatcctgttctgttggtgaggagctgcttggttcaccgcagagggagcacatgcaatcggtgttggtggagtactgctgagcatccgcatagtcagagggttataaggaaactgagttgagcctgacaaaagaaaaattaggttttcattgtcatgaacataactggtatttcatccaatccaacttttgtaggatggagtagaataggattattgtaaaatggtcatgtgacaccatgaaagcaaaatgaatacaacacggaatggccaaagtctcaccacttaaatcctagccaatgatatatagcagtcagtgcgggtccaaaaaagaagagtaacatgagtagcatatgagtgagggctgctgagcccagaagagaaagcccaggctagatttttagttaagtctatatcagatgtttccatggagaatcacagagtcaggttatagcaagagctttcttaactcttcaagagaaatgcaagagtatagttctcagacgacaatggacaagtacccaggaacgtctgcagactgaggggcagcaggatgcaagtcatctgctgaatctcactgggcagattttaaagtctacaagattgagaaatgaggtaattaatgaacactgctacccttcatcagtttctagatgtttaactgtccccagaaagcctcctacagcttaagaaaacgcaaaaacaggctgggcgcagtggctcacgcctgtaatcccagcactttgggaggccaaggtgggcagatcacctgaggtcgggagttcaagaccagcctgaccaacatggagaaaccccatcttacaaaattagccgggtgtggtggtgcatgcctgtaatcccagctagtcgggaggctgaggcaggagaatcgcctgaacccaggaggcggaggttgctgtgagccaagatagcaccattgcactccagcctgggcaacaagaacgaaactccgtctccaaaaaaaaaaaaaaaaaaacccaaaaacataaaacataaccatttaatcaaataataaatctcatgtatggcctaattaattcttccctaagagatctgagaagcagcaaccactggtctgggctgtaagctttcaaactcaaaacaaccactttgcatgtgacatgagttttataatgcaaaagcctgatataatttacatatatcttacagggaagggcacatttcagatttttttcagtgacatatttgtatttaatcctaaggaaaagatggcttataattctctgaaactctaaaattcgtaatatcccagttttaaaagtctgttgctttttaaagctactgtgatcatagttattacatacattaagtttacaaataggcacaaaatagaaaataataagtatcctggagtattgtttttcatcagtttgtgtaaatgtagtgaacgtacagacagatgatggctttttttgtttttgttaagatggagtctctttttgttgcccaggctggagtgcagtggcgcaatctcagctcactgcaatttccgcctcccaggttcaagtgattctcccacctctgacctcaagtgatctgcccgcctcagcctcccaaaatgctgggataacaggcatgagccaccgcgcccagctagatgatggctttttaaactagtcttctcatttctaattttgatttcttagtatttccctaagaactttttctaagaataccaatatgaaaggtgaagtactcttagaagtggcatgggtacattcaggtacagttctcaaaagaactaaaaccaccttatttgctttgcaaatagtcaatgttcgctaccagtgtaatacagaagtgaggagaatggttgagattattttttcatagctcttcctttgtttatggtaatcaggctttgcattctaaaaatgtttcaggttatatgtgcattcagtttctattctgggtgtgtgcattggttgactcctgtaatactaacactttgtgaggccaaggcaggaggaatgagttcaggagttcgagaccagcctgggcaacgtagtgagaccttgtccctacaaaaaataaaaattaaaatgaaaatgaaaaaaattagccaggcatggtcgtgcacgcctgtagtcccagctacttgggtcgctcaggtgagaggatcacctgagcctcagaggtcgaggctgcagtgagccatgatcatgccattgcattccagcctgggtgacagaacaagacccctcaaaaaaatacttctattcgggaaagtggaacatattaatgatacagaaatgggaatataggtttccaaattagaagagttgctgaattttgaagaactaataaccaagacattgatattattgctctgtctcattttctaagttaaagcagaatccttacctgttgaagagggcctgtcttcccaggcccaccctggcgtctgcctatggtaatccccttctgaatgtacagaggagactgaagagggccgttccgttcctaagtagccttgcccaggtataggagacttagatttcctgctgtttgacttgctgatcagctttggtttgcaaactcctcctgaaagtgaaattcaagttaaagtattaatatattaagttctcaaaaattaccaaaatgctaatgattatatattgctaaatgaaaaaaaagcagaatggtaacatgaagaatccagatcctggtactcaatgaaataaaatactacaggcatacctcagagatactgagggtttagtaagtcacaattattttgctggtggatggtcttgcctccatgttgatggctgctgactaatctgcatggcggttgccaaaggctgggatggctgtggcaatttcttttcctttcatgaaagacttatttgtagcatgcaatgatagcattttagccacagtagaactttcaaaattggagttgatccctcaaacccttctttattaactgggtttatgtaatgtagtattctaaatcctttgttgtcatttcagccatgttcacagcatcttcaggggcagattcaatctcaagaaaccactttctttgctcatccctaagaagcaactcctcatccatttcaagtttgatcatgagattgcagcaattcagttacatcttcaggctccactactagttctcttgttcttttttttttttttttttttttaaggcagggtctcacctctgctgcccaggctgcactgcagtggcacaatcacggcttaccagctcactaaagcctcaacttcttgggctcaagcaatcctcccacctcagacccaagtagctgggaccacaggtacacaccaccacacccggctactttttaaaatttttgtagagatggggtctcaccatgttgcccaggttggtctcaaactcctgggttcaagtgattctactgcctcagccacccaaagtgctgggattacaggcatgagtcatcatacccggcctctcttgctatttctcctacacctgcagtgactccctccactgacgtcttgatcccctcccaagttatccatgggagctggaatcatctttttccaaactcctgttaatgttgatattcttacctcctcccatgaattacaaatgtcgttaatagcatctaaaatggtgaatccttttcagaaggttttcagtttactttgctcagatccgtcagaggaatcactatggcagctattgccttatgaaatgtatttcttaaataataagacttgaaagtagaaattattccttgatccatgggcttcagaatggatgttgtgttagcaggcatgaaaacaacattcatctccttgaacctttccatcagagctcttgggtgactaagtggattgttaatgagcagtattgaaaattattttttctaagcagtaggtctgaacagtgggcttaaaatattcagcaagccattctgtaaacacatgctgtcatctaggctttgttccatttctagagcacaggcgagtagaccaagcataattcttaagtggcctaggattttcagaatggtaaaggagcactggcttcaacttaaaagtcaccacctgcattagcccctaacaagagagtcagcctgtcttttgaagttttggactcttccagtagaaggctgttttgtctacatggaagatctgttgtttaatgcagtcacctttatcaaagatcttagctaggtcttctgagtaacttgctgcaacatcttcatcagcactttctccctcaccttgcacttttatgttacagagacggcttcttcaacctctgaatggcctctgctagcttcagccttctcatctgtggcttcctcgcctctctgagccttcagagaattgaagagttagggcttggattaggattaggttttggcttaagggaatgttgtggctggtttggtcttctatccagaccactaaaatcttctgtgtgtcacgaaacactgttttgctttattaccatttgtgtgttcactggaatagcactttcaatttccttcaaaaacttttcctttgcattcacaatttggctaactgtttggcacatgaggtctagctttcagcctgtcttggctttcaacatgcctttctcactaagcttaatcatttctaacttttcatttcaagtgacagacttagtgattcttcttttcacttgaacacttagaagccattgcagggttaattggccgaatttgaatattgttgtgtgtcagggaataagggagccagaggaggagagagacagggaacaaccagtcagtggaggagtcaggacacacaccacctttatgggttgtttgccatcttatacaggtgctcctcatggtgcccccaaacaattacaatagtaatatcaaaggtcactgatcaccatcacagagataataatcatgaacaagtttgaaatattgtgagaattaccaaaatatgacacagacacaaaggagagcccatgctattagaaaaataatgctgatagacttgcttgacacagggttgccataaaccttcagttaaaaaaaaaagcacaataaaacgaggtatgcttgcatttaaaagaaagccaggatttcacttgtaacaatcaaaacaaaaaacaaggttcgtcctcctgccattaaaatgtggtaattaaggaactgaaatttctgggacatcaagccttctttactggcctcagagtacagaaactactaaagaaagaaggcagggtgacaaaaatcatacttcactaatgaccaacccccctttcccaactggaattaatacaccacacaaagaaataatatgtaaaggaaaaactgcagaacaaagcttcttcatgctactacaggacttgagcagaggctcagcaagttttggtagcccttttgatttttccagactgtgtagctgatgaactcagcagaatttcacagaagtgagacacctctgactgtgctctaaaagaaaacatcaaaaagagctcagaagagatcagagcccaggtcatcagcaaattttttcctcagccccagcaaaacaatttcacactgccccaaattcctatacaaccagtacaattgtaattgactaagtcaccagtcttataaccttaaaacacacacacttaaagccaataaaaattggaaggtaagaacagaaaggggaaggtcttaaagttaacatgtatagttttttttttaagacctctaatctctttaatctttttcttaaccatagtgagatagatcttttgcttgaagataacaggaaaataaatctaaactaaaacagaaatactgctgaacttcaggtaattttgaaaagcacaagagatattctcaaaatattaagaaaaaggttgtaagattaaagcttaggattattatggtttttttgtgtgcttgtttttaacagaatgtataaaatctcattctagcaactcttatctggctatccagagacatgtctgaaacaatgcttatcagatacaagcattagcattccggatgatgtgatctgaagaactgtttctttttcttccctttttcctactctttttttttttccttttttgagacagggtctcactttgtcacctgggctggagtgcagtggtgcaattgcagctcactgcaacctctgcctcctgggctcaagtgatcttcccacctcggcccccacaagtaactgggactacagcgtgagccaccacacccagctaatttttgtaatttttgtagagacggggttttcatcatgttgcccaggctggtctcaaactcctgagctcaagtgatccacccaacttaccctcccaaagtgctatgattacaccttttttcctactctttttttatggcttacgattattttattttattgtgtgtgtctgtgtatgtatgtattttgagacggagtctcactctgtttccaggctggagtgcagtggtgtgatctcagctcacagcaacctccgcctctcgggttcaagcaattctcctgcctcagcctcctgagtacctgggattacaggcacacgccatcatgcccagctaatttttgtatttttagtagagatggggtttcaccatgttggccaggatggtctcgatctcttgaccttgtgatccgcccgcctccgccccccaaagtgctgggattacaggcgtgaaccaccgcacccggctggcttatgtttcttttctactgagcctaatttttacagttaaatcacttttattcaaaaacattatatttgtgttacaattacaatgcagtatgtatagatgaggactaggtgcaaacaaataaaaaatggacatcccaggagggtgacactttgggtaaaaattttcttccattttatttctgttcatattataatgtctgggtaggttttcaaaaaccttttttaagtaacggaaaccctaagaggtgactctgagcacataaagacataaatgaaatgtcttagtgatgcatcagaatttgggaaataaactggcttttttggggaaaagcagcagaaaagcactaaaatgaaagctgtacctgaatgaggtgatgggtccccttcctctcttcgtgtctcaccactggtcacaactgaggtgttggcagtaccaggcactactcccataggctgggacatgacaactccatgatcctcaactttgtcatcaaagcttcccatgagagccttcctgataatgtcttccagcccaagattactggcaggatcagcaaaagaatggcctctagagctaactgagcctgaaagagaatcaaaaacatttccacttatttctgaaaggccaatcaggaaacaaacatgcattgccccatcagcccactgaatacacacagcacttggcaagtgacctagaacaataccaggacccaccacacagagacctttttttttggagacagagtctctctctgtcgcacccaggctggagtgcagtggcgcgatcttggctcactgcaacctccgcctcccagattcaagggattctcctacctcagtctcccaagtagctgggactacaggcacccaccaccacaccaggctaattttttgtatttttaggagatggggtttcaccatattggtcaggctgatctcgaattccgaacctcaggtgatccgcccgccttggcctcccaaagtgctgggattacaggcgtgagccaccgcacccagcccagagaccatcttaatccacagataactccttaaggaaatttgtttcccaagtgaatcagtcacccacacttctattaaagttactcaacaattttctcagttccctagttttgacagtgttctttaatagtttcattctttttgttcatttatcttttcaataggtatttactggatctcagttcctttctgtgctactgggtaaaccttccttcactaaattatttatttatttttccatattagagcagtcactcccctggtatacagttggtactcagtacatatttgttggactgactactgctgtgccaattttgtattggtaaataatgtcttttcaatcttacctgacgtagtaactgctggcagattaaagatctcagttcctggctgagcagctgctatatttaagcaaacattcaagttaattaagatgtgataatcatatataccaaactaaagtctcaaaaaattcctataataaaattaatctttttatttttcatgatctcaacctttatttctcacccattaagtgaagataaaatggaagtattttttttttttgagacagggtctcactctgttgcccaggctatttttaaagggaaatcaggaaataggtaaggtaggaacatcaaaagaagagcaataagctgtgtgcagtggtgcactcctagtcccccagctactcagcaggctgaggcggtaggactgcttgagcataggaatttgaggccagcctgggcaacacagtgagactctcccatctgtttaccaaaaataaataaataaataaaaaaagaagcagtgtaacccagaaaagggaaaggaactttgcactgctggagaaaaacaaataggaaaatgctgttctcagaacaggaaccaaggctttctgacgaagaagaaaccttggactctgggatgaccgccacaaataccaacaggtttgaggcagcctgggatgtgatccagaggaaagccaccacagtgaatactatgaaaatgactgtgtttccctgcatggctaactggaaactcaggatatttgctggaaaaaacaaaagactctgttgatccttttcattcctgctgactgtgcaacttgtaatctgcagtttgaatgataacagcataagacctgggaaccgcctataataaagcagtgtgccagaaaggggaagaatttgggacataaattggtgtttccgtcattcccaacttgacgctaagaattttaaagagaaaaaaagaatgcagaaagcaagtgggcagccaaatgatgtgtcccaaagaatgtgaaagttcttttttttttttttttttcctttgagatggtggtgttttattcttgtcacccaggctggagtgcaatggcgtgatctaggctcactgcaacctctgcctcctgggttcaagcagttctcctgcctcagcctcccgagcagctgggattataggccccccgccaccatgcccagctaatttttgtatttttagtagagacggagtttcaccattttggccaggctggtctcgaactcctgacctcaggtgatctacccacctcagcctcctaaagtgctgggattacaggcatgggccactgtgctcagccagaatgtgaaattaattaatttattaattaatttatttttaagacggagtctcactctgccgcccaggctggagtgcagcggtgcgatcttggctcactgcaagctctgcctcccaggttcacgccactctcctgcctcagccccccgagtggctgggactacaggcgcccgccactatgcctggctaattttttacatttttagtagagatgggatttcaccgtgttagccaggatggtcttgatctcctgacctcgatatgcccgcctcggcctcccaaagtgctgggattacaggtgtgagccaccgtgcccggccagaatgtgaaatttctaatgagaccacagaaggatggactcttacccaagggctgagcacatgagaggagggaagagtgcatgtgcctagaaacaaacttggttgattagggaggctttaaactgacagaggagaaaagtcctcagaagaactagaaaacaatggccatggatgacagtcttcttacttatgggccaggtgacaaggtaaataaattgagcctgaaacagcagagccctgttatcatgaagtgtgtggaacaggagtcattcatttgatagatatttaattgagcagttatttgactgaattgttaagattaccttattgatcaaaaatggtcagatgaagacaatttcctataagttaaccaatgataatccttagatactgcacttgcaggataacccttcctttgctaatggagcttacagtgcagtgtggtacttgctaaggccatacaaattagaatcacctgggtagcttagtaaattttctacattcctggggctccataattcaactatttaataagcaatccaggtgactggtacctactgttgagcaagaatgtggtaactgctcagaaattagcagaatggaaggtagacatgtgaaagccactgtggaggccaacttgacaggaggagctgactcccatcaggaggcagagagaccaggatagtaatggccagagtaatggtaactgttaactgtggtagggaaggaggaggaactttttgtatggggaggtagaacatggattcaattttagatatttaaggagccagtaagttagtcaagaagtaatgaggtctgcaaagatatgtaagtagagcttagtaggaaaagctgggctacagatacaaatttgggagttttcagcatacaagcgaccattcaactccccagagtagatgagatgactcaaattataagacatgaggagaaaggggctaagaagtgagccctggggaaaactaacaatcaagggccaggcaaagcaagactgagcttctaaggagacagaagtggccagagaagtagagaagaaacaggagaacatggcatcagaaagccaagagaggaaagcatttcaggaaaggaaagtggttcactgtgtcaaaagctgcaaagagatccaataaagtaagttttaaagcattacagttttcaaaaaaataaagtcactgatgtccttgggaacactggattcagatacaatgagctgaagtgaagctgtgttggctgctgatggctttcatttagttctacttcccagtgaaggctaaatgtgccatggtgggcccaggagcccactggttctttaatataaattctcctttccaccatgaaaaatagttcttgcaataaaaaaaaaatcccagactctaaagcaattctgttagtacttcccttaagacattaattatctcctgttaaagttaggtacttgtttcatcatacagcttcagagaatagagaccatgtggcatactaaaacacccaacatagtacgctactgaaaacattaggcaagagagaaaaaactataaagtaggcttcttcagttcaaacatggcatttccctgtcaaagagtttcccactttaagggtaagacaaagactacagaatgagcagaccacacaaaggtgaaatgatttgcatctcagttcctggctgctctgagatctctagctctccgtgctcacacagattcatctctgagtgccaagagaaattgaaaacaagagtatatttttgttggtgacacttgaggagctgtaaataatagattaaactgttgaagactggagacagaaaatagtaataacaatattttttgaaaaggtggccggatacagtggttcacgcctgtaatcccaacactttgggatgctgaggtgggtggatcacctgaggtcaggagttcgagaccagcctggccaacatggataaaccccgtctgtactaaaaatacaaaattagccggatatggtggctggtgcctgtaatcccagctactcgggaggctggcccaggagaaacacttgaacccgggaggcggaggttgcggtgagccgagatcgtgccactgcactccagcctgggccacagagtaagactccatctcaaaaaaaaaaaaaaaaaaaagaaagaaagaaaggctatctgtaagcctgataacaattctggtcagcattctaaaatatttgtcttttattttgttgccacctaaacagaacctagtaattaagagcgaggacaagttcagaaacagtggtgacactggctcatccttttttccttggtgttcaacatttattaatcacaagagtgacacagatctaaacaaacatccaccaggcagttcacagtgcaaggcccccactttcctttcttttgacaggatcaggagactagtagatggtagatcacagaaataaagcagatcgtcctttcctcagctgccaccacagtgcttggtccttccaaggaagctaaggccacgttgggatgaggccctcacttcatccggcaactaccaccacgtccggcagcgccagccccacacttgcccataccatgtcctctgtctccgagctcgcctgcatctactcagccctcactctgcatgacaatgaggtgaccatcacggaggataagatcaatgccctcgttaaagcagctggtgtaaatgttgaacctttttggtccagcttgtttgcaatggccctggccaatgtcaacattgggagcctcatctacaatgtaggggctggtggacctgctccagcagctggtgctgcaccagtgggatcctgcccactccactgctgctgctccagctgagaagaaagtggaagcaaacaaagaagaatctgaggagtctgatgatgacatgggcttttggttgttttgactaaatttcttataacgtgttcaatacaaagctgaacttaagaaaaaaaaaaaaagaa

SEQ ID NO: 1291 - DNA, 4281 bp, Homo sapiens
gccgccgccccgccgccggcagtggaccgctgtgcgcgaaccctgaaccctacggtcccgacccgcgggcgaggccgggtacctgggctgggatccggagcaagcgggcgagggcagcgccctaagcaggtacgggcggggctcaagtcgcgaggcggggaagcgggaggcagacacggacgagggcgacacagacacgggaccgaggggcggacaccggagagacacgggaaaggggtcgggacaggagcacgtggctcagacaccgacgccgggaggccgcagaccccggacgtgtcaggcatccccgcaggcccggagcgatggcagccttgatgaccccgggaaccggggccccacccgcgcctggtgacttctccggggaagggagccagggacttcccgacccttcgccagagcccaagcagctcccggagctgatccgcatgaagcgagacggaggccgcctgagcgaagcggacatcaggggcttcgtggccgctgtggtgaatgggagcgcgcagggcgcacagatcggtgcgtggggagggttgggcgttcctgaccccgactgggaggtcagcccgagagactttgggtccctgggggtgcgacggtgccccactaccagcaccggccccagggtgccccaccgctgtgggctgccaccctcacgcgtacccccacataccaggggccatgctgatggccatccgacttcggggcatggatctggaggagacctcggtgctgacccaggccctggctcagtcgggacagcagctggagtggccagaggcctggcgccagcagcttgtggacaagcattccacagggggtgtgggtgacaaggtcagcctggtcctcgcacctgccctggcggcatgtggctgcaaggttagaaaccacctcctttccagacgggagcctataccgcacatgcagcaaccagtccatccacaggcagctcccaacctcaagcctggcccaaagcctccaagaccctaccaaggcttctccccaccctgctccccagcacagttctccccaccccgttccccagcacagcgcttggggcccctctggctccagaccaggccccttggagcaggaaaaagatccactgatggaattcagacccctttccccttgggtccccagacagctcccccaagggaggagctgaggactttcctccctctgccccaagccttgtttccccaaggacaggtaccaacctcctcccctactgacacttctcaaccaagaaaacttcctttccattccctcaccagctgggcacccctatagctgcttaaatactttccaaatccagctgcactcctagccagggaaggtgaagggatgcacagaggtgggggaggggtactgtgcagggtactcagcatccctgaccaccaggtgccaatgatcagcggacgtggtctggggcacacaggaggcaccttggataagctggagtctattcctggattcaatgtcatccagagcccagagcaggtacggggcgccacggatcagtcattaatccaggttgatgatggagaccctggccagaatcactaaaagatcactggtggatcattagggtcactaatgagaacactggtcaaggttactcatgagtcactgggcctgggccgaaatcatcagtggaactttgattaggatcataaaatgggaagttggtcaaaatcacagatggctggcggggcacggtggctcacacctgtagtcctagcacttggggaggccgaagagggcagatcccttgaacccaggagttcaaaaccagcctggataacacggcaaaaccccatctctacaaaatagttcgctgcgtgtggtggtgcacgcatgtggttccagctactcaggaggctgaggcaggaggatcacttgagcctgggaggtctaggctgcagtgagccgggacgatgccactgcactccagcctgggcaacagagtgagaccctgtcccagcactctgggaggcagaggagcccagttggagatcagcctgggtaatatagtgaaacttgatctctacaaaaaaaagaagaaaaaaaaaagccgcgtgtggtggtgcgcacctgtagtcccagctactgggaagctgaggtgggaggatcacttaagcccaggaggcagaggtcacaatgagccgaaattgtgccaactgcactccagcctgggcaacagaggaagactcttcacagaaaaaaaaaaaaaaaaaaaaaaagctgctaagtcatttaccataagtcactgagaacaggggatgtctgaccagatgcaagtgctgctggaccaggcgggctgctgtatcgtgggtcagagtgagcagctggttcctgcggacggaatcctatatgcagccagagatgtgacagccaccgtggacagcctgccactcatcacaggtgacctgactccatggcctgcttctgcatgttcacaggctcctgacctccaaactcaagtcaagggcctctcgttaggagttacccgtcacctgaccgtgtgcccccctacccccatcacaagatgcctgaccaccaccatgtggggtggcctgatactcaacccaccaggtgctgccacccccataataagggacttgaccctcaatgctcagggcccctgaccccaaagtcggcatccccgaactctcccaagaagctccaggttctccattgtctccaacctcctctgcctcccccaaagcctccattctcagtaagaaactcgtggaggggctgtccgctctggtggtggacgttaagttcggaggggccgccgtcttccccaaccaggagcaggcccgggagctggcaaagacgctggtgagcggtgtggcctttccctgggcaagcgtcttgatgcgggcccagcctacccttcacccctcccgtccccactgcctccctccactcagcagtcctgcctaaccccagtcccaccctcttctgcccgaagtccctccctccttcacggcttcctaacctgctgtgactttagaggtcaaggctggcccggcctggacctggggaagccctctgtggcgttcctgccccagaccaagtacaagttcctcctggccccatggcgaggtgtcgcacttcactcgtgtctcttccccaccccaatccttccctgacttcatgctggggggctggcaacccagggtgcagcaggggctggagttcgaccaagaaccggctgcagaaggccccgccatggggggtccacgctgagcctcctctccgcaggttggcgtgggagccagcctagggcttcgggtcgcggcagcgctgaccgccatggacaagcccctgggtcgctgcgtgggccacgccctggaggtggaggaggcgctgctctgcatggacggcgcaggcccgccagacttaagggacctggtcaccacgctcggtgagggggacggggtgtaggggagcggaggcggcggggggtgcttcccgctggggccgccccgacccggccgcgcctaagacccgtccccgcccgcagggggcgccctgctctggctcagcggacacgcggggactcaggcccagggcgctgcccgggtggccgcggcgctggacgacggctcggcccttggccgcttcgagcggatgctggcggcgcagggcgtggatcccggtctggcccgagccctgtgctcgggaagtcccgcagaacgccggcagctgctgcctcgcgcccgggagcaggaggagctgctggcgcccgcagatggtgagcgtcgggggagtccccgtccttccgcctccgccatccccttcccttcccgaggccccgccccttcccgagcccgcgcctctcagcccctctccccgcaggcaccgtggagctggtccgggcgctgccgctggcgctggtgctgcacgagctcggggccgggcgcagccgcgctggggagccgctccgcctgggggtgggcgcagagctgctggtcgacgtgggtcagaggctgcgccgtggtgagcgccgcccccgccctgctggccccgcacccccgcccagctccggccgcgcggcctctaacagcccctcgctctgcagggaccccctggctccgcgtgcaccgggacggccccgcgctcagcggcccgcagagccgcgccctgcaggaggcgctcgtactctccgaccgcgcgccattcgccgccccctcgcccttcgcagagctcgttctgccgccgcagcaataaagctcctttgccgcgaaa

SEQ ID NO: 1292 - DNA, 18841 bp, Homo sapiens
ggcgcctgggaatttgaagcaaacaggcagcgcgcgacaatggcggtcgctcgtgcagctttggggccattggtgacgggtctgtacgacgtgcaggctttcaagtttggggacttcgtgctgaagagcgggctttcctcccccatctacatcgatctgcggggcatcgtgtctcgaccgcgtcttctgagtcaggtgctggcctaggaagggaaaggacagggcttggtggcgggaaggaggacaaggaaatggaagagggtgacaggagttgggccgtgagtgagagcaaaagagccaagcaggcagaccgaccctactcttggtttggggagtaagcatgagaagcacagaggccaggggttgggctcctcgagagtcgtctgttctttcacccacacgcttagacacgtgttttgcaaaagtcgggaaacccagtttggaacgctttctggcactgaagcacacttgaatgaattctgtatatttaactctttaagaaaattagacttgcggccgggcgtggtgcctcatgagagtaataccagcactttgggatgcctaagtgggcagatcacctgagccccaggagttcgagaccagcctgggcaacatgacgagaccccgtctctacaaaaaattagctgggtgtggtggcgcacgcctgggacgctgaggtgggaggatcacctgagcctgggaggtcaaggctgcaatgagctgtcattgcgccactgcactccagcctgggcgacaagtgagaccctgccctcaaaaaacaaacaaatagaccgggaaaacgtgggtaggcagagaattcagtagctgggaaattactggtgagaaaaggaaaatagaacaaccagaactctgtgatgtatacaaaatttatcagagcccagagagacttcaaccatactcccctatgcagccccgggacaattatttaaaggaattttgtccctgactagctgcctctcccattatcttaatgtacctggaatgtgtgatacaaagaacaatgtatagctaatcaatcgcttgtgttattattttatttatttattttttagatgggatctctcttacgtcacccaggctggagtgcagctctgtgatcatagctcactgcagcctggaactcctgggcttaagagatcttcttgcctcgggtgagcacaggggctcatgcctgtagtcccaactttgggaggctttctttgggaggctgaggcgggtggatcacttaaggtctggagttcgagaccagcctggccaacatggtgaaaccctgtctctactgaaaatgcaaaaattagctgggcatggtggtgcacacctgtaatcccagctactcaggaggctgaggcagaagaatcaggaggttgcagttagccgaaattgagccactgcactccagcctgggcaacagagggagactgtctcagaaaaaaaaaaaaaaaagagatcctcttacctcaacctctgagtagctggaactacaggcatgtgccatcatgcccaccaaattaaaaattttttttttttgtagagaggaggtctcaccatactgcccaggctcgtctcaaactcctggcctcaaaagatcctcttgccttggcggcttcccaagtagctgggactacaaatgcctggtgccacccccgggctacctcctgttatttcaatgcaaattcttggtgaatataggaactgccccttcttttgctttaaaaatccacttgtaactactgtaatcgaagcctatagtcagggcaactactcatattaattttgcctcagcctcttcctgttaggtccacacttggaagggctgtttggaaaggggagttgaattttgcactgtgcggccagaagcaataattaagactagaaggtggacatattgggaaagcaggtttttagtcaatataaggaaaatttttgtacaaattagaggtttctaatacagtgcttctcaactttgagtatatatgaattacctgggaattttgttaaaatgcagaatccatttctgtagctctgagactagacctgaggttgtgcatttctaacaaagtgccagctgaaactgcagaccacactgagtagagggccgtaaatatgctttccaatacagtttgctactagccacgtgttactattgagcattatgaatttttaagtttaaatagtcatatatggccagtggctatcatattggactgcaaagatagagaacatttccatcattgcagaaagttctatcaagaagacatataagtttcctcagcccacttaagggtttatgttcactagggaccactttgtgtggttattgtaaaaagtattgaagataggttggactattaaggttgcggtactttggaccattaacttctcaccatccagaatcttgctatggtgtatcttagcaatgtggagaattactaaggattttctagggaaaaattgatttattttaataagccagctgataaatgacagaaaaagttttttgataactagatcatggtgtgtgtgtgtgtgtgtgtgtgtgtgtgtattttggtgattaactggggaggagttcaaaacatggagagacttgggtataacaaaacttcttttcacatcttatgcgaatagaatttctcagtatttacaccccaaaaagcaatataatttatgctaaactctaacttcccttaataagtgataataagtgatatttgactatagtactatatacacattagtgtacataaagtaattggagaggaaaggtagcattaactcactaaaaatgcattttccaaatctgtttttatctctctgtcaaaatttgcaaatcatgtttgaattaatcatatgcttgttataatttaatgatatacagaagaattctcttctttaaaaagtacaatttccattttcttttcctcaagagaatagtttctcttcagtccttaaggattcagctccttacatgggctttggtgagggtcatgaggcagcacccacaggtttaaatcagattggggtatttggtccttgtgggattcacaagatggattactgactgccttgctgtgaatggcacaactcacaccttaatgtagcttcgcatacagcttgggaagaacataggaggcaaagttgctcactgcagtaatgtccctgactgctgcggcctctactatgttttgcacgacgagcttcttaatggtcttttccttgggcatgcatcggacatagtatgtgccactactggccacagccctttttggcacgatcattgttcctttcttttctttgtcatcttggaagtaaggacctgagagagctacagaagaattcttgacatctagagacttatggtcatgggaaatttttttttaattaccattttaaatttcagtttacatacatatagacaagtatgacagagggatcagtaaaagcttttcaagtataatcatatattactttagaataaaattctgtggacacagtggagtgaaaatatgagttggaaaaagatgtaaaaaattttaaacttttcatagtccagcaatttcacgttttgtttttttaaatggagatggtggatatccagtcactagcatttgtattccaagtttattccttaaaaagagtgataaaacagttctaagataatatgttaatatttttagtactagaaattacattctctgcaacttaaaatagtcatagtttttttttgtttgtttttttactctttagaagtactggtgtaaacctatgatctagttcacaaagcaactcagtgactgtttgcttttttaaaaaaaaaatgaggtggtcttgggtgggaatatgtatcctaacattaaaatatgatgatttatgtggaaaaggagattataaaatagcaattcacacaatagtctgtatttatgaaacttcctaattgaaggcttctttcaggatatataactaaaagatgataggtttagatactcagcctaatgggttactgaggaaaccaggaagtcgggatcgtccttagtctttggggtcaacatcatgagcttccccagcacatctcaggttgccttcagaacagattctgagtctggttgaatagattcattcttgtgtttttagatttatatttgtgtactgggtttatggagagggtaataaaaaggcatttgtttttttttctccaatcaagtttgagacttacccccactagtttattactgtcttttctgttacgttgttacatgtttatacactatttaaaatagttacaataggctgggcgcagtggctcacgcctgtaatcccagcactttgggaggccgaggcaggtggatcacaaggccaagagtttgaggccagcctgaccaacatagtgaaaccccatctctactaaaaatacaaaaaaattagctgggtgtagtggtgcgcgcctgtaatctcagctccttgggaggctggggcaggagaatcacttgaacctgggaggcagaggttgcagtgagccgagatcgcaccactgcattccagcctgggcaacagggcgagactccatctcaaaaaataaaaaatataaaataaaataaaatagttacaataaaacattgtttatgtgttcattttcttacaggttgcagatattttattccaaactgcccaaaatgcaggcatcagttttgacaccgtgtgtggagtgccttatacagctttgccattggctacagttatctgttcaaccaatcaaattccaatgcttattagaaggaaagaaacaaaggattatggtaaaataaaagtaacataaagcatgaagttaattaatctgtaacatcatactcttagaatttttccgcttctgtgcactaatgttttaccagtcatcttgagttctttaagttgttactgcttgtagaatttataattgttactataagtcaccttcctttttttagacttggggtgaaatgctttgtattgattaggaaatgaaaagtgctttttttggtactgtatctatgaaactccaacattttttttttttaccagcccttccctcatcagcaaaatgttgtaacagcacatactttcccagtatgtttgtatttaaacttcatgaaaagtaatccatggataaaattactctcataaagcagtgtaaacacctcagagagatatttttgtgggttcatggcaatagattatcaggtgacttgctttaaaacccgaaaatttgtccaggcaccatggctcacgcctgtaatcccagcacttttggaggccgaggtaggcggatcacttgaggtcaggagttcaagaccagcctgaccaacgtggtaaaactccgtctctactaaaaatacaaaaattagctgggcgtggtggtatgcacctgtagtcccagctactggagaggctgaggcaggagatgcgcttgaacccaggaggtggaggttgcaatgagctgagattgcgccactgcactccagcctgggcgacaaagtgagaccctatttcaaacaaaaaaaaccctgaaaattggccaggcacagtggctcacacttgtaatcccagcactttgggagggcaaggtgggaggatagcttgagcccaggagtttgagaccagctttggcaacgtttgtctctacaaaaataaaaaaagaatacaaaattagctgagtgtcacagttacatgggaggctgaggcaggaggatgccttgagcccaggagctgaaggttgcagtgagctatgattatgccactgcactgcaccctgggtgacagagcaagactgtcaaaaaataaataaataaaacctgaaaagcaatcttaatgatagtaaggaattaatgggcttttttgtttatgttggtttattagtgttttgttactttttttaaaacaaatccttcttctacagatgcattctgaaaatttttatgattaaaaaaaagaaacatattagttgagtttttgtggcgtaagggcagtgttagtttttctgtttttgttttttgtttttttgagacaaggtctcactctgttgcccaggctggtcttgaactcctggtctcaagccatcctcctgcctcatcctcccaaagtgctgggattacaggtgtgagccactgcacccagctgagactttctgagctaaaaaaaaactgtatgaatccctacccataagaaaactcttatttctattattttatgttttaaaaactgtttctatgaaattatgcatttttaaatatactataaatacttgcagtcttgtgttctagcttaagctgattcagttaaacttaccagttgttcaagaagcggaaaggatttgatgagtctaaagtctacagcccaagttatttacgttttgtagattatctgaaaatagtctagtgggatttgggtagagaagtatatatttaatcacattgcattatataattctttagattgtagtaatgggtctaaatgattgctgaatatttttccttctgaatttgtgtcttcaaaaagtcaattatttggctgatcttgaatagtgaacttaaaatactttgatggaaaaaggaattatttcattcatgatactggattattctgtttcataactttccttgatctaggtgatcttgctgtaagaaactctgtatttaggctggacgtggtggctcacacctataatcctagcattttgggaggctgaggcgggaggatcacttgagctcaggagttcaagaccagcctagacaacatagtgagacctcatctctatgataaaacagatttttttaaagtaaaaaaaaaacctctctatttgaaaatttgatcataaaacacattaagcagtgtttataatgtgaaataatttacttgatttactataaatatactgtatgtgtaactggcaagtttggtatacagagttggctttatacataaatatactgtatgtgcaactagcaagtttggtatacagaattggtatacacatatactgtatgtgtaactggcaagttttgtatacagagtgtgtgtacgtatatacgcacatatacatacatatttaaatttggaatcagcaaaattttttcttttctaggaactaagcgtcttgtagaaggaactattaatccaggagaaacctgtttaatcattgaagatgttgtcaccagtggatctagtgttttggaaactgttgaggttcttcagaaggagggcttgaaggtcactgatgccatagtgctgttggacagagagcagggaggcaaggacaagttgcaggcgcacgggatccgcctccactcagtgtgtacattgtccaaaatgctggagattctcgagcagcagaaaaaagttgatgctgagacagttgggagagtgaagaggtttattcaggagaatgtctttgtggcagcgaatcataatggttctcccctttctataaaggaagcacccaaagaactcagcttcggtgcacgtgcagagctgcccaggatccacccagttgcatcgaagcttctcaggcttatgcaaaagaaggagaccaatctgtgtctatctgctgatgtttcactggccagagagctgttgcagctagcagatgctttaggacctagtatctgcatgctgaagactcatgtagatattttgaatgattttactctggatgtgatgaaggagttgataactctggcaaaatgccatgagttcttgatatttgaagaccggaagtttgcagatataggaaacacagtgaaaaagcagtatgaaggtaagtgtattattcaggaatctgcaagaatcagaaatccagcttaaactgaagaagaaaaaggaaatgctcatgtcattgaaagtccattcatagagcaggctgtcaagcgtggttggatccaggagctcaagtgatatcttcatgacttgctttctctccatctctcagctctgctttcttctctgttgacttctttctcaggtaggcatactctgcatgctcaccccaaaccaatcactctagcttgggatgtagaataccttcattaactagcctgggcaatttgctctgcaactgtgaggttgttaactctgtatgaccttcttgaaataagaaccagtcagggataatttccttaaagaaaatggatgtgctagtaccagaagaagggtatgtgcctgggcaagcaaatttgacagatgtccttggcagaatatgatgttttgaatgaaaattccacataaaggaaacaatgaaaaagaaatataaaatggtaagatttatttgtagcagaaaaagttctattgataaacattatttaaagatttttcttttatcaaatagggactcaaagtagtgcatgtgttggttgagaaaaatgcttagttctactgcctattctatgcaaatttctgtctatgtttttacaactgtgtgatcagactatatttaatgcatttttcacttaacctggtaacagatatttggttgtgtcatataacattttttgtaggcatctttgaggtaacttttctttaatgtatgcatgttcataagctatttctttaaaatagatttgtctttaagtgacttcttcatgtgcttaagatgtcctgccctcatcacattgcctagcttactttagctgattgactgacataagagttttatacaaactttcttcagctctgcatagagttttttcgaaaatcaggcttgttactgtccgcttttaaaaggaatatagttgcctattgaaattagatagctaaggagatctaaggaacacgtagaaatattgagcgatagtaaagctgctgagagacccctgcagagtgaaaacttgtcatcttcaagaagaattttatttttattattattttttttgagatggggtcttgctctgtcgcccaggctggagtgcagtggtgcaatcttgactcactgcaacctccacctcctgggctcaagtgatcctcccacctcagcctcccaagtagctgggaccacaggcatgcgccaccacacctagctaatttttttgtatttttggtagagatggagttttgccatgttgcccaggctggtctcgaactcctaaactcaagcaatctgcccacctcagcctcccaaagtactgggattacaagcatgagccaccatgcccagcttcaagaggaatttttaaatgttatccttgacatcaataaatgtttatcttcactggagtccctttctaatagcatgagctttatttgtggtcatgagcttcagccttcaaggaaaaagagtcctgttagtgttccagataagccaagtgcagaccttgaaagttttttctcattgtgatctctcacccagctacttacctgaataacagatacagttttcacagatggaaccatgggtctgctgataatcactaaagttcctgaagagttttgattctctcattaacatgttactgggagattatttcatattgtagttggttggttggacaagacgttagaggttttgtttgaaaatcagcaaatatcttttttcccccttcttcttaggaggtatctttaaaatagcttcctgggcagatctagtaaatgctcacgtggtgccaggctcaggagttgtgaaaggcctgcaagaagtgggcctgcctttgcatcgggggtgcctccttattgcggaaatgagctccaccggctccctggccactggggactacactagagcagcggtaagtggtggggggactgggtgagagggggcaggggctgctatgctgcatgctgcaagaagatatctcctaatctggcgtttctggaacctctgccaaaaaaaaaatccagctcttgttagtgtgacagtatattaatactagttggatagaattccttgatagttaatagcattttatatcatgtagtggacacttcaggaatttgaattatactccaagagaaactttgagacccagatagttagtcaaacaaacacttactaaatctaccaggactttaagataatgtctttttcatcttaccatgaattgagagaagatgagaagagcttcccagacatgcagtttctcagaatctcccaagtcctacagagatgcacattcccatgacagcagcccacatgcagtggctttctcttattcttgtcagatattttagaatataatattactttaaaaaaattgccatagggggctgggcgcagttgctcacacctgtaatcctagcactttgggaggccaaggcgggaggattgcttgaggccaggagttggacgtcatagtgagatctcgtctctacaaaaaaatgaaaaagaaaataaccaggcatggtggtacgtgcctatagtcccagctgcttgggaggctgaggtgggaggatcgcttgagcttgaagttcaaggctgcagggagccatgatcatgccactttacctcagcctgggcaagagtaagagcctgtcaaaaaaaattaaaaataaaaagccccaagaaaatccccatgatttttttaaaaatgaaatccccaagacaatccccatgtgaagattctagaagtaaaggatttccattttttcatattatttcagactatttggagacttaactcatatggccctacagtcaggttttaaccctatccctgaattgactataactgtctgatttcccaagtctcaaaatcacaggggccatgagtcagttttaatatttggcattctgggagtctgggtctggctcaaggacaagacatgacttgtttgttggcagtagtacttggtggcaagaatgaatgtatcaatgtgtgtctcaggtctcgaagtaccgaggctggagtgcagtggtggtactgagtctggtctccgggaagtatcaaataagaagggaagtatgggagtcacgtctcggggaaagtacctaccgaatcagaaagccaggcagaccttctaaagagacttttatgaatgtgagataatagtatagaaattggggagaccagttgatgttacagaagagggaaagtggtagaggtgagatttctttagctcttgaaagcgtagctgttctttacatgacagctgcctttggatatggagtaccccgtctgtagatagtcagtaagccttgaatgtggtttcataccattataatatgttctagagtactcgcctcaaatcctttttggaagtaggtgggtcaccaagcattattagaaataagaaattatgcagcatcttgattttagatgcatatagtataggatttctgctttacgtatggtttattgcgggaagggaagggaaagggtcatctcagagtcttaatgaagcagatgtgttttattatggtttctatctaagatgacctgtttcagatatagtaactttatatatatggaatgagaaaaggcatctataatacagcaaagtttctaactagataatagagcataagccaggcatggtgacttacaactgtaaccccagcactttgggaggccaaggtaggaggatcccttgagcccaggggttcaagaccagccagggaacatagggagacctcatgtcttttttttttttttttaagttttgaaaaaatagagcatatttttacttttattctgtgtgattaactgttttcttataatatgtcctattacattccatttaggttagaatggctgaggagcactctgaatttgttgttggttttatttctggctcccgagtaagcatgaaaccagaatttcttcacttgactccaggagttcagttggaagcaggaggtaaatctggtcactggtcgtggctcttccaaaaatgcttctttacccatggcaggcaaaataaaactttgcatattattatacacttgcttaagaaaagccttcttagtctagaacaataatgaatgagccctttggtaactatgtatctttggacaagtcagtttacttcttttagtctaattgtctgtaaaatggggatgataacagtattgacctcataaggtaatcaagatgctttaatgagataacatgtagaatatttaacacaatgtcttggcacagagtaaacactctgtacttataagcccttattcgtaagccctaataattgtttgactagatattatagttagggtctaggcttttaagaatacttaaagtatcttggatttggaagataataagccatttaacagaatgcttctgaaacagcggaatttaataaaaaagcaaaatttaaggattcgggtttatggatagtctgtgtgaccacttgatggggttcttgtatatggtagtggtcaggttagacttgctcagcagtgccttgtggtgattctaagatgtgtgctaaaattttcttcaattgtgaggccaatctttattgtatttttttgatattgaacctttctttgcaacatatgagttttacttctttttttaatatattgttaagctacagatgatctaaaatttgacattgagggggtgaatatttagggcaacttgaatttatgcttctggaaaaaaattacatgaaaaaataatgataaaataaataaggctgggtgcgggggctcacgctcgtaatcccagcactttgtgaggccgaggtgggcagatcacctgaggtcaggagttcaagaccagcttggccgacatggtgaaaccctgtctctactcaaaatacaaaaattagccgggcgtggtggtgcacgcttttaatcccagctactcgggaggctgaggcaggagaatcgcttgaatccgggaggcgggggttgcagcgagctgagattgtgccattgcactccagcctgggtgacagagcaagactctgtctcaaaaaaataaataaataaatagggcggggcgcagtagctcatgcctgtaatcccagcactttgggaggctgaggcgggcggatcatgaggtcaggagatcgagaccatcctggctaacacggtgaaactccatctctactaaaaaatacaaaaaattagccaggcgtggtggcaggcgcctgtagtcccagctactcgggaggctgaggcaggagaatggcatgaacctgggaggcagagcttgcagtgagccgagatagcaccactgcactccagcctgggtgacagagcgagactccgtctcaaaaaaataaataaataaaaataaataaataaataaataaataaaataaactttaccattgaaaaggagttggtgatcatctttctccatttgacgtctctggcctacccagtgagtctcttcagctcctgtttttacgcagttgctgtacaaaaggggaacgaaagtaggggcatgtttttatttaaagctggttagatactttttcagagaagtcatgtgacaggttttctgatttttgtattatgtgaaacaacaatttttgtgtttcttgcaggagataatcttggccaacagtacaatagcccacaagaagttattggcaaacgaggttccgatatcatcattgtaggtcgtggcataatctcagcagctgatcgtctggaagcagcagagatgtacagaaaagctgcttgggaagcgtatttgagtagacttggtgtttgagtgcttcagatacatttttcagatacaatgtgaagacattgaagatatgtggtcctcctgaaagtcactggctggaaataatccaattattcctgcttggattcttccacagggcctgtgtaagaatgggttctggagttctcatggtctttaggaaatattgagtaatttgtaatcaccgcattgatactataataagttcattcttaagcttgctttttttgagactggtgtttgttagacagccacagtcctgtctgggttagggtcttccacatttgaggatccttcctatctctccatgggactagactgctttgttattctatttattttttaatttttttcgagacaggatctcactctgttgcccaggatggagtgcagtggtgagatcacggctcattgcagcctcgacctcccaggtgatcctcccacctcagcttccagattagctggtgctataggcatgcaccaccacgtccatctaaatttctttattatttgtagagatgaggtcttgccatgttacccaggctggtctcaactcctgggctcaagcgatcctcctgcctcagtctctcaaagtgctgggattacaggtgtgagccactgtgcccagcctaattgcagtaagacaaaaattctagggcaccaagaggctaaagtcagcacagcttttcttgtgtcctgtattctctgtctaatgtgttgcccaaataatacctaattgttagccattcccctccatctctggcctaaaagtgatagtccaggtatccacatgggctggttcccagaactgccattgctcactctccaaagaggggaaggtggggaaggggaaggtgactatagctcagctcctgagctagtatctggctgttatttcaacaaccggagttggggtttgggctcattttttcccctagccagcaattatggaccagtagtaacacaagtgacagcttcctgtgactgacttcacaattaggaggtctaagattccatttgggtatttgcttaaggatcccacataattgtcccaacggtcattagtagaggggaggtaagccttcattaataataaagagaaagcccacattcaaggtggtgtttgagcaggggcagggtgagggctgtcccggtgctcattgcaccagcacactcacattccttctcatttggggcccacctgcaggaagtggcacaggatcagccatttccccacccttgtcagctgatggcccactgttctttaatgactcagaggaatgcctaggatttttttttttttttgagacagaatctcactgtcgcccaggctggagttcagtggcacgatctcggctcactgcaacttctgcctctctggttcaagcagttctcctgcctcagcctcccgagtagctgggactacaagcctaggatttttaactcaggtttttattatattccctcctgaagtttttacttcaagagcttctgctctaaagtccaatttgggcttcatgtccccagtgctgcatctccagggaaatgctgtctgtgggagagaccaactctcaaggaagaagtggccacagaaggagcaggaagggagttggccctcagggctactctggggaagccaaaagtcatgaaggggagaagaattttctgacaaaaacttgcaggaatctcttaggtgtcttcagtgttggagtgatatgttgagaggcctttggagtgatgtgctgaggtctcaggcgcccacctccctggctgtcacttccatgtgtcagtggttctcccactttagcaggtatcagagtcacctggagtcttgtcaaaacaggtaccagccccacccgcagcgtttctgactctgggtagctctgggatggggcttgagaatttgcgtttccaaaaaggtcccaggtgatgctgcggttgcctgcgcagggactggactttgagaaccacttcactggttattcacatttctgcctctgcagtgagacagccttgaggtctgcctcctgctaagagtcacatgctcctgtcctttagaaatgtgggctcctgccatctccaggacgcaggcactgttcctgttgatgaaccctatttcacaggacccctgctaaggtgatttgaggggaaatgagaggaggctcaaataatcacccagcccctgccacttactgaaagtgtaggtccttgtgccccacaccatcagagtttctgcgttagcagatttgtggtttgcccagcagcctgggcgtgtgcatttctaatgggtgcctcaagtgatctgtttctgatttgtatttctattgtgaagagtcagcccagtactgcaggcctcttacctaagcagaatcccagtctggcatcaaagctttagaggacaagttgattcaggcagagaagaacttgggctatacaagcgctgttcttcagcattgaagtattttggaggcattagatagtttaaccctttctcagtcaaggaatatttacagaacatgatctctgggcattgtaactcctggtcttagtggggaatatagggaccccatgtctccatggggtgcacagaatgtctgtgagactgatggagtggagaacgccatcccccagcctctccagctactcgaggcattctgtagaacataagcccatagattgtgtgtgtgtgtgtgtgtgtgtgtgtgtgtgtgtgtgtgtgcatgcgcgcgcgtgcgcactggaggaacctaagaaactatttggtgcacttcctcttattttagagctcccaaagtgtagctccagaatcgtaaagggatatgctcagtctcacagccagcctgtggatctcagtcccaacactcacccttgtgctactgagtcagctctaagaaaatctgccaaaagtaggccgagggctggttttttgttttgttttgtttgtttgatacagggtcttcactctgttgcccaggctggagtatatcatggctcactgcaaccttgacttgggctcaagcgatccgctcaagtagctggaactactctcaagtagctctcaagagcctctcgagtggctggaactacaggcgtgcaccaccacagctggttaatttttaaaattttttgtagagacggtggaggaggttctcactgtgactcagtgtgtgcccgacagcagagcccacaccactccagttgcagtggttgccatctgggtcatcagacctggctgtcaggggtgcagccacaggagagccaacagcagagggtgctggccgctgagctagctgctaatgctggcctgggtgcagttctcatccaaagtacccggtgggtgggagtcactcagtaccagttccgagcctgaacccaaactctcgtgtttctgctcacccctctctggcttctgccaccacatgggaagaatatgccctggttagcccatggcttctgaagagcaagagaaagtagagcagagcctactccagcctcccccgtccaatgtatgaaagccccagctgatctgtaagcctgggagcgtgataaatgcttagtagtgcatgccatggagttccagggtggtttattacacggcaatatctagctaaatacatttaacttgctgcagctctctggatccagcctggttaccaggaagacaaaaactgggctccaccaggaaccagtcttctgccttcccaaccatcacctctggctgcatcagcgatctctcccagcgaaatagctgcttggtcttgtgtgaatcctgtactttaacacagtggaccaagtgtcagtcattgaaaatgaccatgagtaaccctgtggactctctgcagcttggttcctttgccccttaacaggtgggtatgaatcgtgtcttcagtgccagggctgaatgagaaagggcattcctttttgaaggaatctgatactaaacacaaagcatgagaaaaatcaggacttgttggagttatatttttaaaatatatattttaacagttatatatattagatataatatataatagtatatataaataatactatattgcccaggctggtctcgaactccttagctcaagtgatcctcctgccttggcttcccaaagtgctaggattacaggtgtgagccactgctcccggcctgttggagttctttacatttattttataatcaatgctgttttattaaatgcggattttattttggattacaggatgtagaatgccatatttttcttagatcatagggcctttcacatttgtaatttggccttgtatgagttaccctgcaatccctttgttttccccataacccttccaaaggaaggccgcaatagaaatacaaagagaaacaaaataattagaatattttttaacttctaaagttcaaggttttggcataagtctggtttagaagcacatttgcctagccctttccttcccaccaagggggaaagtcttcctctagacaagaggcagagggctcctcagagtcagatcctggtgtgggctctcacgtgctgctgctgaatcccagggaaggagggaggaagggcagttgacacccaaaataagggtggggaactgtcagcagaggaggtctgtgtcatgtttttcagcgctggggttggggggagcccaggagagcaggaagatccagagatccctcgccccagctcggccatgtgtgtctgggacagagcctgaggtggcctgagcttcctgtggctccagagtaacattatagagaagctgaattctcctgtttttctgaaaagggcatgggagttagctgagaagcagacctggtgggcctgagagtctcaatcgtcaggtaaggacagtcagtgggaagtggacgggccgcacaaccaaggttctcatgaggacaaccatgtcttcgggggtgcccttgtgcacagacagctccatagtcctgcctccaatgtcccaacactgcattgtctccctgcacttagcagccctgcagggtgagacttggggaggatcctgaaatgattgtatttaacaagacatgctgtccttgtttacctggaacctagcaatgttgttttctgccacaacttgaatagatacttgaagcagagatgatgttgagttaaaaaaaatatatacataaaaatatgggttcttttcaacctgaatagatggcctaaaaattcaaa

SEQ ID NO: 1293 - DNA, 4626 bp, Homo sapiens
caggcgccgcgccggagctcaatgctgtcgcgggcggcgcggaggggcccggagccggtaccgggggctgggcctgcggcgcccacacgcagccccaggccctctgcctcccacaccggcagaagcacgcgcgacggtcccgctgggtccttgtaaagcttgtagagcacctctcgcggcacgaaagccagcgctgctggcagcggccgcccggcgcggaggctccgcgctgcctctgccaagaagcgcacgcggcccagcagctgccggggggactccagcaccgcgcccgggccaggacccgccatggcgaagtggcggaggtgagcacctagaggcgaccctgcccggggaacagctggcgcgaccgcggacagagcttcccaccacgcccttccccgcctttggccagcctttgccgtatgttctggactaagcgcaccccagctctcactgtattggactgtgtactcccacactcaaccatattacttatctctgtgccaccctaacccagccgaccaaacccaagattggtgattgctacctgatcaatctccctctctccatttccttgtgactaccattttatctctactgctactaccctcattcaagtcaccattctagctagcctgggtcattgccaacagtcatttttctggttcttcggcctgctgtttttcctcccactcccagcgaatctgctggactccctatcctatgggtggtgtgattaaagtgtttgagacaatggccccttcccctgccactgacaggagtcttgagtcattagggttgattctgtttgtcactcctaatcccaaggacactggagatcattattcattttaatgtgattgctgatttctgtttccccagtcttgtagctccttaaaggctggggctgtcttgagcagagctaacctctgcacctactataggtccaggctatagtatggacctggctggataagactgttggtatcatgagtgggacttgcgccaagcctccggatacccagactgtcagatgagaacaaattcctcatgtcaccgtaagatacatttacagcggagttttcttttgggcctttgttgttgcgtcgctacagcaaactttacggtgaaaaaaggtaggggtcctacgggcagcagccagggcagccctggagctgtcgctggagtccgatcatgtgatcttcaacatggcgacgctcttggttccctacagaaaggggcggagcctggactggggggcaggctcagattcaggttaaattgtggattgagctcgcagttacagacagctgaccatggaagcgaatgggttggggtgagttctccagagcacgcggtgtggctagccgggcttctaatttgagtcttccaactcaggactctatccctctactcccctttccccaccctggagacctcccaacctgaactccgttagctgggatcctgaatcctaaaaccatggatttttgagatgttcatcccagggccttaattcaagggatgcctcaggatttccaaccaggatctctattctgggaccatcaactctgatccctctttatcccccagcctgggtatttctcagcccctgaaccagcccagtgacattcccgtttctgaggctcactagttcgaagacccccaaactatccttagtgggccttcattccctccccccagtccctctggttgcttcgagcttggaagagtagagactaagtggagggaagaggccccagggcgggcccttctggagtttgtgcaccacctgataggcagagaggaggcggaacgggcggaaagccagggtttgggagctggcctggaggaggtagatagcggtcctggactgaatcggccttatgaacccgcgctttccccagcctccagcgtagcatactgacacctacccccacccccacctgatcgccagacctcagggttttccggagctgaagaatgacacattcctgcgagcagcctggggagaggaaacagactacactcccgtttggtgcatgcgccaggcaggccgttacttaccaggtaagagtcagggtctggaaatctagataaaactccggagggagaaaagttttcgaggggcaggggagggctctggagggcctcaaggctgagccctgtcttccctctgtatgcagagtttagggaaacccgggctgcccaggactttttcagcacgtgtcgctctcctgaggcctgctgtgaactgactctgcaggtgaggggtccacaaaagagggaaagatttatgccttcagtctgccacctagcaacctgtctcctgtttcctacagccactgcgtcgcttccctctggatgctgccatcattttctccgacatccttgttgtaccccaggtacccactcaaacctgatcctagaatataatccaaggacgccttgaaaatccttctatcagtccagtcaaggtttacaataagcacttatcctaactggatcgagggaaaaactaaggttgaaagaaatggagtttggcagagttttattctccttttccttcctcctggaatgagctgaacagaacctttcctcctggattccattttgggaacccagatgttttctccccctccaggcactgggcatggaggtgaccatggtacctggcaaaggacccagcttcccagagccattaagagaagagcaggacctagaacgcctacgggatccagaagtggtagcctctgagctaggctatgtgttccaagccatcacccttacccgacaacgactggctggacgtgtgccgctgattggctttgctggtgccccagtaatgtgggacagggcagggactcggggcgcggggagatcactctggaaggtctggggtagacaaaaggaagggtcagtctggcttctgtgacaccatctttctatccttctctagtggaccctgatgacatacatggttgagggtggtggctcaagcaccatggctcaggccaagcgctggctctatcagagacctcaggctagtcaccagctgcttcgcatcctcactgatgctctggtcccatatctggtaggacaagtggtggctggtgcccaggtgagtcctgagagagagagaaataggctgggatttggtctgtaaggaccagaagcaagagtgtcctaaacctgagagggcaggggtcttaatgccagggatgaaagaaccttggcctccagtgatctagcggagcagccaagcccatcctgacactgacagtggggcttaatgctctaagtattcagacaccaaagttagtgctgggatctgaggaaagtaaatttttttttttttaattactgggtttttagggtcaggcagtatcagggattgaagtcatttggggaaaattgaggtggattttgtatgtgggggaaacttcctctttgtgtgttacatatttttcttcaccataccctaactaggcattgcagctgtttgagtcccatgcagggcatcttggcccacagctcttcaacaagtttgcactgccttacatccgtgatgtggccaagcaagtgaaggccaggttgcgggaggcaggcctggcaccagtgcccatggtgaggattgggatgggttgagtgaaggtggtcctgtggagctttcaggctaagtcctgcatggactggagtgaccactggagggcagcagaagtacagtcaagaaagattagtggttgtagcaaggccctctgtagcctgagatctgcttttttctagatcatctttgctaaggatgggcattttgccctggaggagctggcccaagctggctatgaggtggttgggcttgactggacagtggccccaaagaaagcccggtaagccatggaagggtgaggccttgaggttgaggtgggggtgttggctgggggagctgccatgtatgcagttaccagaacgtggcgctggctttgcttccagggagtgtgtggggaagacggtgacattgcagggcaacctggacccctgtgccttgtatgcatctgaggtaacagccagggcccctctgtgtgtctgttactgtgcactcctgtggctgtggctgtattattctgtgtgcacttgtttttaatgtctgtctgtccttttcttctactctgtacaacataagccctagaaagaccggactttttgttgctgttgttcatttgtgtttatgcttcatgcctgggtccatactagggatctgataaattttattgaatgactgaataacactgagtagaagcatgcctacatatgcgtttgtcactagtatatatagggaggacaaaggcttgctggtcctcctgtagccagtgccctgttggtcccccaggaggagatcgggcagttggtgaagcagatgctggatgactttggaccacatcgctacattgccaacctgggccatgggctttatcctgacatggacccagaacatgtgggcgcctttgtggatgctgtgcataaacactcacgtctgcttcgacagaactgagtgtatacctttaccctcaagtaccactaacacagatgattgatcgtttccaggacaataaaagtttcggagttgaa

SEQ ID NO: 1294 - DNA, 58220 bp, Homo sapiens
agaggaacctgacagcggcgccgagggggccacccggactctgtttggaacggaagcacagtgtccgccgcttcctggttgcgggtcagcgcccaggtcctgggctggccgccgggatgttgccctacacagtgaacttcaaggtgtcggcgcgcaccctcacgggggccctcaacgcccacaacaaggcggcggtggactggtgaggacgccgagcttccaggtcgccaggatcggccaggaatgtgtgagggggaagggggaaggacaagaggtttcaccccctggttagtttggcctcgctaaggcagggagccgccctcacgcaatgagcttgctttcagttggtggatttttgttgttacaaaagtgataatagccccgtgtgggaaattcccccatgcaaatacatttcccctctttctcgcgtatttctctgctgttttctctgcacctcgcccttttgccgttccattcctctctcttttcctctcctccagcttccaggcttctctctctccaccattaattccctgtgcactttctctttcccatcctgtcttttctttttcgttgtcttgtattcctgttgtctttcaacaatgtgccagaccctgtgctaggcgcctgttctttcacctgtccttttcacctcttttcgggctcctcctgtgtagaacattcctgccttcaacaggtcgtctttattactctctcctttcactataaattactactgcagctctgaaaactactcattagacaaatgtaaagcaaaattctgtggctgtgggatgttgttaggaggactgaaacgtcttgtgcagtgtttgtcgttttatttagttggaaggactaggattagtcgcagtatccccaggcacattgtggatactaaggattagaaatcggataagcgaaagacgtatgcctacaagaacagtcagagggcacaagttcctttttatgtcctcgggtctctattttcatatcttttagaactttttttatccgaatgaaaagtgaatttcaacaagcattttaagcttagccagatcttttatttaagtgggataatgataaatactggcctttgggtttaaatgattttattaatggtggtacatatgaattagacttatcatttatttaggcttggcaagaaagaagtcgtcctgctttgttctgtacttaaactttaacattactgttttgctaggggctggcaaggtttaattgcttatggatgtcattcacttgtggtagtgattgattccattactgcccaaactcttcaagttttagaaaagcataaagctgatgttgtaaaggtaagtaaaatcccactttgacgctaacatgttgtctagtctaaagtttaatactgtgtatcactaagctctcattaagtcttacgtgtaagtgttgaatagcttttaaatataacaacctatttggggtagcctagaattttcatatatatgacttaatgtcaatacagggtgagttattaaatgctagttgttagatcattttaaggcagatgaaagttctaccatttacaagaccactcagtcattccttagttttgagcacttaccatatgctatggatatggagatgaaagccctcagataattctccatcttataaggaagactcacagcgtgatagtgtgataagtgagacttgcgtaacacgctgtgagaaaacagaggagctgcatattgcctggttgtgaggagagtcacagaagtctacagtttcaagactagtagacagtagttagccaagtaaaaaattgacaaggagcattgcagggaaaagcaagaatatacacagaagtaagtagcgtgccataaagatggctaaagatgggacacttgtaggagtgatgaaataagaggcagccagagagattcagctgtctgtcctgaagttttgtaagattacgaaggagtttggattttttttttttttagacagaatctcactctgtcgcccaggctggagtgcagtggcatgatctcggctcactgtaagctccacatcctgggttcacgccattctcctgcctcagcctcctgagtagctgggactacaggcacccaccaccatgcccagctaattttttgtatttttagtagagaccgggtttcaccatgttagccaggatggtctcgagctcctgacctcgtgatccacccgccttggcctcccaaagtgctgggattacaggtgtgagtcaccgcgcccagcaggaatttggatttttgagtaggagattgatgtgaccatattcgcgtcttagaaaaactctggcagcagtggaggatctgctgaagaaatgcaagactggaggcagtaagatcatttaggagatttctgcagtaattttggtgggaaattctaagggcctaaaataaagctggggcatggagaagtcatgtttaagagcagcaaagaggtaaacctgatagcctttatagtgatcagtataaaggagagtaagagaatagagtgactccaaggtttcttttggtgtaattgaatgacagtgtttccagttatcagaggtaagcatctgtgaagtcagtgaatttttaagttttcaacatgcaaaatctgagatgcctgtaatatattgcattatagtgatccgggctttaggagataggtcaggattagagatagagatttggagtctttttcttttttaaataatagctttattgagatactcataccataaaatgtactgacttaaaatgcacaattctgtggcttttagtatatccacagttaatgcagccacaattacaatgaacttttttacctcaaaaagaaaccctatatccactagcagtcatattccatttcccccatttccctcatcctttggcaaccactgacctactttctgtgtctgtagactggcccattctggggattttatataaattgaatcatataatttgtggtcttttgtgcatgacttctttcacttaggataatgttttcatggttcatctgcgttgtagcatatatcaatactctgttactgatgaataatattccactgtaaggatgtatcacatttattttattgatggacatttggatattttgtactttttgcctgttacgaataatgctgctttgcacattcatgtgcaagttttgtgtgaacctgtgttttcatttcccttgagtatgtttctaggggtggaattactgactcatatggtaactctgtttaactttttgaggaactgctggactgttttccaaattaacattctcattagtagtgtatgaggagtctaatttgtccaaatcctcaccaacgcttgctgttctctgttcttttgattataaccatcctaatgggtatgaattgattctcattgtggctttggtttgcatttccctgatggctaaaggtgtggagtatcttttcatgtgcttattggccatttgtatatcttctttggagaaatgtctatgcaggtcctttgcccattttaaaattgtattatttatctttttataattgagtcgtaagatttctttgtatacagtagtcctcccttatccagaagggaaatgttccaagaccccagtggaagcctgaaaccctggatagtactgaaccctatatatattgtgctttttctcatacatacttacttatgataaagtttataaaccaaaccctgtatatactgttttgtctcatacatacttacctatgatcaagtttataaattaggcataataagagattaacaacaataactaataataataaaggagaacaattataacaatacatcagcattactactcttgcactttgggggcattataaagtaaaataagggttacttgaacatagcactgagatatcacaacagttgatctgataatcagtatggctactgagggcaggtggtgtatacagcatggatgttctggacaaagggatgatttatgattaaggcaggatggaacaggacagtgggagatttcatcatgctattcagaaaagcgcataatttatgaattgtttatttttagacttttttgtgtcatatgtttggattgatacatgatttgcaaatattttctctcaatttgtgggttgtctttttactttcttggtggtgtcttttgaagaacaaaactttttcattttgatgtagtccaatttattattttgtattgttgttgcttgtactttttgtgccatatccaagaaaccattgctttctccaatatcaagaagatatatacctttgtttttttcttagaattttagagctttagcttttaatccattttgagttaatttttatatatgatgtgaaatagggaaaaatactattaatttttgtttattgatcatatcctgtaatctagctaacttcacttagtagatctatttaatagtaattttgggtaaattttttttaagtagacagtcatgtcactgcaagtgactgcagtttaatgttttcattgataatctgtgtgtcttctatttttcttgccatgttgcattggctaggacctctactacaatgaatgggagagtagtgagaggatactcttgtcctgttcctgagcttagggggaaagtattcagtctttcatcaagtctgatgtaaggtatagggtgttttgggaaaaatatatttaccttctctttccctctctgtttcctttcccctacactgccccttggcatttctggagcttttatttctttatgtaggtccaagtttcagtctggtattatattcccatcgactgaagaatttactgtaagttcttaaagtgcctgtctaatattggttgattctcttagcttttatttctctgagaaagtatttcacctttgttttcgaaagataattttcaaaggatatagaattctgggtttataatttttttttctagtagtactttacaaatatcattccattggccaggcatggtggctcacacctgtaatcccaacactctgggaggccgaggtggatggatcacctggggtcaggagtttgagactagcctggccaacaaggcaaaacctcatctctactaaaaatacaaaaattagccaggcgtggtggtacacacctgtaatcccagctacttgggaggctgaggcaggagaacagcttaaacctgggaggtggaggttgcagtgagctgagatagtgccactgcactccagcctcggcaacagaataagactctgtctccaaaaaaaaaaaaaaaaaaaaatccctccactatcttcaagcttacatagtttctgatgaaaaatttttgtttttgtttctctgcattatatcttttttcctccgattatcttcaagatttccttaaccttggttttcaatagtttgattattaaaatatatatatatatggcttggagtttacctaaatggaattcaacatatacatatacaaatatatacacatatacaaacatatatatacacatagagacagtcaattcttgttatttgtggtagctatattctgtaaagttgttgtatacactgaattagtgaatactgaaactttgtttgctcctaggggttaggttcttgtgaggctctggtcacaacattttcatcaactgatcaatagataaccttgctttatatgtgtttccgtttaaagacatattaatatgtcagttgatctattaacattgaactcatagccaacaacacatgcctgagcaaagattatcacatatatatatatgtatgtattttttgcaagacacatcacaacttctcatacttagaaacggtaggcagtatgcttggggacctatttaaacagtgaagtcaccagcaaaaggaacaaaaatgtgaaaaatgtggtactaaataaatcatgagatgaacacttgttttgccattggaaaagctaaagcaagaattcttgtttgacttcagctgggaacacacatgtatgttcggtgacatttttttcaccattctgcacttgtccacaaaagcactgcaagtattgattttgaggttgcaaattatagtgagtaggtaaattgacaaatacagaatctataaataactagaatggactgtgtacacatatatacactatacatattctattcatacacattctatacctatgaacttaaacatatacacatacaaatatgcatacacacatacatatgcatatatacacatacctcatttaaaaatttttgcctgagcaaaagatctattacaggaaaaccttaaggcctgttcacgctcattttcagaaaacgttgtttccatctttttcatgaatactactgcaattggttggcttactttcctaccttagcattatatatgagtgtatttatatctgtacacatatataggtatatacatttatatgtatttatagatttgtggtatttaaatctacttattaaacagaccttggacactgtactaagtctgagaatagaaatgcaaacaaagaccacatggtgtgccctatggaacttacagttgatggactcatgaataggcaaaaagaatgtaaataaaataagtacaaattgtgtagtagtaaatgctttgaagaaaataagcaggatactgagaagagaggggtggtagtgaccagggaaggcctgactcctagtgaggactatgaaatttttcccttattctgtcagtattcattgttcaagaatttaatcagatttgccctggagttcatgtgttttttattttaaaaattctattgttaatcatgttgctataggcatgaagcatttttttttttttagagaaaaacttaatgttttgtgaaagagagagacagctagagttttttgtttgactttgccttctcctgactttccctctgcaaggtttttgtgtttctaagttgtcttcttttagttaggagactagaatacagaaaaacattctgctaaatatgattttaggtattttgtcataaattagatcttaggaaaactgattttcaaggcatcctggggttttaacctaaatttcccaaaatattaaggctgtgaatcatttttcatcacaggatctttgtgatgtgtcaaagaaaacaattttgtaactgcagttaaagatatctaccaaagtaacacaaatgctgccttcaaaatgaaaaccagttttctgtttattcttgctaaatgtttatgtaatataaatgtagtatgggttctggttgatgttttgtgaaaattatgttctgtttcatccagcgcaagtatttacttgatctgatttcttcttgatacaggttaaatgggccagggaaaactatcaccataacattggctcaccatattgcttacggttagcttctgctgatgtcaatgggaagatcatcgtctgggatgtagcagcaggagtagctcagtgtgagatccaagagcatgccaagcctatccagggtgaggaaagtctgctcagctaagtgtgtatattgatacacttactcttggagtggttttttggttttgggggttttcccccattcatttaattttatcaattccaagttagctcttgattgtgttttgcctattctgctgatctaaatctggctttctgtccttactaatacacttctaggcatatttcttcaaatctcaactgatttgtgctttggtaaaactcattaattgcaatatcagcctcattcaagcatgataagaaaaagtaagtggtacaatcttgtaatctaagctacaatataaggaaaattggccactgctgttaggaactagccatcagtgcttactctacattaagtaatttgttcattatcagagatgaacaaaattttattctcattttcatatagattgcttgtttgttcgtttcatgttactgacctaaaaccagtacggtattctttttttttttctttttttttttttgagatggagtgtcgctctgttgcccaggctggagtacagtggcgctatctcggctcactgcaaactctgcctcctgggttcacgccattctcctgcctcagcctcccgagtagctgggaccacaggcacacaccaccacacccagctaattttttgtatttttagtagagacggggttttaccatgttagccaggatggtctcgatctcctgacttcgtgatccacctgcctcgtcctcccaaagtgctgggattacaggcgtgaaccactgcgccctgcccagtacagtattctttagacttaagtcctccagtggctctcttgactgaatgaattttttaaatgactatttaaaaaatatttattaaatacttactgtgtactaggtactgaactagatctttgcatattctgtttattttttgaaaaaccatgaagaactgtaaagttccattaagtaattccacagaaacattaggaaagtctgacatcttggttgtggctaagagagtttcatattgattttatagttttaagtaatgattagggcaaattgccttttattttctttgaagtaatatttcagattacttcaaaatttttaccttgagagtttaaccagacaacttatttttatatagaattagttttttctctggaatattgatacacacacacacacacacacacacgtcacatttggggctggtggttaagtttttaaagattatattttaaaaactaaatatcaaggacaagttagccaaggactttggagagtgtggtttctgaattttgcctttctttatcgggtctttccagatgttcagtggttgtggaatcaagatgcttcccgcgatttactgcttgctatccacccgccaaattacattgtgctctggaatgccgacactggcaccaaactatggaagaagagctatgcagataacattctttctttttcttttgacccttttgatccctcacatttaacttgtgagtaacagttgcttgtggaaaatgagttaagtgagatatttataatatagtaatgctatgtgcatgagatatacacacacattatacatctataatgttaaaatgactgagcgaagtggagaagcatgtctagtccatatatctgcagctcctaatacacatactcaatcataagttcatatcattgcaaatatgataaaaaattaaatcagcaagctacaccttcactgtgttgaatttgtgaatagtattagactagccagggacagagagttactttgacactccagacttaattagttcttctaagaacatttaaataacttgaatcaagggtttcattcagtctgtggccaagttaagttcttgctttttaataaattgtcctaattcacgccattcattttgagtgccataaacagatgcatgtaaagaagaaataagcctaagcaagttttttcttgcagagatagtttttgctaatatgcttttaatgttttcctgagctaatgatctaaaaatgagatgtgctttaggtatttttgtggctaaattgtttagaaactatttaatcatccaacagatatttcttgagctattgctactcttctgggaaccaagatgtctcagaacccaaaaggcaggagccttcacagagtttgcattctagtgagaagaagtcatatcataaactgtgaccacaatgaattaataaattctagtgtagtaagaggtgacaggtgatataaaggcaggataaaggggatgcagaagaatgggggatgagggcatgcaagttgtatgagataaagtggtcaaagtaggcttcactttgataatgatcagaaatgtgaaggaggtaagggaattagctatggtaaggaatgtttttcctggatttgaatgactcaaaattgttttacccatcaacttttattgaggggtgtgtgtgtgtctgcacgtgttaaaggaggaagagaaaggcagacaaaattgaaattataataacatgggaaatgtggctgtgtaaatacactacagggtgcttaggcttttatgtatgtaaatgtttgtatatggacgtgtgcatacatacactcacttggtcaccagtttacttactcacataggtgcagtgctggggaaacacctaggagggctggcccagttggcagagtcagggaaggagggcatcacaaaagaaggaagcaaaggggaccttgaaggatgagttctggaacctgaaaaggcaacaaggctttcagctaacttgattgcatcagctctttacatctctgtaatttggttgatgaaagcattgtgtgttccagagtgtcagttgacctaacatctttgatttactcatattgaatgtgctagggttgtcataactcttgaatgcatcctttttccctgtgtttagagcagccttgctaagggctgggacccagggtagtaaggtttttctgctcatgtcttccagtattaggcccattgttgagggagattattttttcagtcataaaaaggcataatttgtattgctaaatatggtgctccctccttgactatttttgtttcatgtacacttagtaagtcactgtgggcccactactgttttctaaatattaagggaaaagaatattccttaatcatcttaaggttcgatctgatgcttgagaagaaaaagggaatatatttagactgagtagctcaggataaaaatttggtatcatcaaataaaatatatgaacttagctaattgtgatatgcagagcctcttaagtatggttttttgtttttttaagttatgggatatgttaaagtttttttgtttgtttgttttttgtttttgtttttgttttttttttttgagatggaatcttgctctgtcacccgggttggagtgcagtggcactatctcggctcactgcaacctccacctcccagttcaagcgattctcctgcctcactctcctgagttgctgggattacaggtgtgtgccaccacgcctggctaatttttgtatttttggtagagacggggtttcaccatgttgatcaggctggtctcgaactcctgacttcatgatctgcctgcctctgcctcccaaagtgctgggataataaggaaagatttttaatgaaagtccgtgccctgaatttatttagaagaacaaacacttgttctttctgccaataaccttatgttatctttttaatataagacataatatagaatgccaagcttggaggcctctgatgaattgtaatggaccacctgtttctcttcaacttagagaacattcccattatgttatgaatgcataacattgccagttatatattattaaaattatcactatattgctctcaaaattgtattggaataaaactgtatgctaaacttcattaaactttaatcagagttttgcttttctcaatatagtgcttaccagcgagggtattgttttcatctcagacttctccccatccaagcctccctcaggccctgggaaaaaagtttacatatccagcccacactctagcccagctcataacaagctggccacagccacaggtgccaagaaagctctaaataaagtaaaaattttaatcactcaagagaaacctaggtaagttacaagtgtaaaattaacattcatctacttatctggtatgaaagcatcatttttggagatgtacaaagactgatgtttttcttcatctcactttttctcatttctaattttgaatttattagaggaaaaaaatatttatttttgtcccctgccctaagaggagattcagcatttaacattgcctttgtttccactagctgtgctaaacttccccactgacttttatagattaaaatttttgaattctgatttttacttgtgaaaatcgcaatgatcctaaagttcaggcaattgaatgcattaaaaatttgggcacaaaagctggatactcattttaaatacattttcctgacttaggtgctgtgcattctcattcagcagtaaaatcggagtgtttttcttatgcaggtgaagatgtctcccatcctggttaagagccaaggctccgggggaagctttagctatgagactgagaaacttctttaatcttactcaaatttctctctcccagtctctaaaataaggctttaaagtatttcatagggttgttttaaagatcaatagatccaataatgtaagtaaagcatgtaatgtcattgatacatagtaatttatttagaagatgtcggctgttattaagaaattacaactgaataaaagtttattttaagtaatttgatgtattcaaaataggtttctttctttttcctatagcaataatctgtatattattgctttggcaggcttttttgtttgttttggcattcattttcagatagcctttatttttaatatgccaagattactctctctaggcttggtgagtaactacttgaaaaatatgtggtaaaaatataaattgctctacaaatacattttgcacttgtgtgtaagtatcacttctatatattaagccataggctggttaagttcactagttaatttatctctcaccctgtgccaaaatgacttaagattacttcttaagtatcttaagagaactttctattttttatgtattccctctcataaacaagaaattatttggcagtctgaatagttttataagttatgttttatatttcttaagttttctctcatatgaattatatgtatatcttgagtattggggaaatacattatttcttcaagtagaaccgctctgggtgctttcacatctattaattcctggactcttactacaattctggcagtagtaatattcccattttacaaataaggaaaactgagtcccacaccaatttaaataaagttactcaagctcacccaactaggacatggcagtcgggattttaatgcaataaaaattcctctttctagtcttgtgaactaactttattttaaatttcaaagccttttaataaaattatgtttgtaaaatgaaatgtaaaatgaaaatagtacataattgtatgtctattcctattgaaatatatttaatatagaaaaggtcattgaatgtatgcaacaatcacaaattattaaaatgatttttcagaccctaacaatctcttaaaatccttatagtttcacctgttttatttacacacaagaaaatgctgcaatataagtgaaactttgtttcaaaaaagatttaagacagcttaaaagtgaatgaaggcagccaaggggaagttacttgcccaaagccatacagatagtccagtaactcctggtccaggggccctaattaccctaaatgttgatgtttttcatcctgagtcttgattttaacagtttgcctagtacttttaatgacaaagtaaaagtaaaataaaactgtcttatgcatgccagctattattatattatcatttaccatgtcttgtgtaatattaataacttaatattctactacttaatatttcaaaaacttagaaacactgacatttctacccatcctatacaatattattagcatttggattttggtacatagtagagatctaagttttggatgccaacccatgttggtcacttcagggaatagttgtacatttttattgtcaatttttatgtgtaaagtacaaaattaaatcttttattaggtctgatataaatgaagtctttgacccaagtgaatgtttacttttttcagtgctgaattcataactctcaatgattgccttcagttggcatacctgccttcaaaaaggaatcacatgttgttgctctatcctcgagagattttaatccttgaccttgaggtgaatcagacggtgggtgtgattgcaatagaacgcacaggagttccatttttacaggtatctacaattcataaattatattccccaaaattattaagaatgttatattaaaagaaggccataatcttgcataagtcttgtcttcagttctccactttctcttttcaatttatcaaaagactagcaacactattttagattgttttttttgtctgcacttttgattggtttgatttaccctagaaattgtgactgatcctgagatatttattgaactatttaagtcacatgggtaaagacaaattattttaggattataaatggatattttaaatgtacatttagttttaaagtttgggatttgtctatttttttttcttttgcccatattatctaaatatgagtttgagtttcacagtatatactttattaatctattgtgttttaaaaaataaatatatcatctatttaaaggtaataccctgctttcagcgtgatggtttattttgtctacatgaaaatggttgtataactttacgtgttcgaagatcttataataacatttttaccacttcaaatgaggaaccaggtgagtttctgtctcacaataatgttatatttttcttcaaaattattttataaagcttgatgtggcaaataccagccaaggtatatagttaatgatactccttgctttgaggaagtttaaaatatggttataataagaggcataaaaagtataagcccaagattaatctcttgatgttaaaacagtgcacctcctgtatacatcaaagagagtaaaattttgtgtttcttgatcatatccatgagccaagtagatattattttttggaattttttttttttttcagtacaagtccaaccttgtgtgcctttattattatacccccttgacttgttggctgtaagaacttccattgtaaagtgacagaggttattaagtctcagttgtcaagtcagtcttatcttggagaatggaaataatgtttttgtgaaattatatactgtgtaaagatcaaagtgattttcacatcttttggaaagtacagttattttcaggcttatagactactacaaattatgatggaaatttattcattaattatatatcactgttgatcctttttcaaagtatcgtctttattttaaaatattgaaaaaagatatcttgattatagttgttattttggaaattaaacttagtacagtcattaagtaaattatatttggaaaaaatttagtagtaattgtaaaaagtgaagccatgcttgacattgcattcatgaaggagtgatgcccaaatttagttgaggttttatttaaattgaaacaaacagtagtggtatcgatatggctgctttctgatatttaaaacaattttatgtgaagatccagatccagttcaggagcttacctatgatttacgaagccagtgtgatgcaatcagggtgacaaaaaccgtccgtcccttcagtatggtgtgctgtcctgtcaatgagaatgcagccgccctcgtagtgagtgatggcagggtcatgatatgggaactcaagtctgcagtttgtaatcgaaattcacggaacaggtaaatgaatcaacaggatcatggttttgttttttgtttcctgtttccttttataaaaaatttccataatcataaaaataggagggctggttttctataaaaatatttttaaggtaataattaaggctttagattattagggaattatgtaaatctgctagagctatttcacctatgggtaagatgaatgaataatataaaaatagatagaatgccataatctggacttaatactttgaattcctaatacgtaatgcagattttaagtatgtaaaaccttctaattattatgtctttgcagtagttctggtgtgtcacctttatattcaccagtgtctttctgtggaattcctgtaggagtgctacagaataaactcccagacctttccttagataacatgattggtaagcttttttcccctctaactccatgttaagtattctttctgaagggcaaaattaatagaatcactcacttgtaattattttaaagtcaaaaaagttaatacttgagaaaactagaacatggaatcattctttcctaaataaatcagaggggtttaaaatacttaggtagaaaagtgcctgaagtagcacgggtttgcattatagttgttagaaatagaaaacgttcattcgtgagagactgatgtaaatgaaagcaatgacattaggcatctggattttggacctagagccgatgctgagctatgccatgccaactcagggccttgctgtttgctggttcctcagcttggaatgaagtacatgcttcctttctgtctgctactcctaattcaaaattcaactcagatgttgttttctttaatctcccaagtctaatttaaatgctcttcttttgtttttcctaacagttatcagcatattttaattgtgggtttttttcttctgtttcatctcatcaattgtaagcatcacaagggtggtacagtgtttgattctattttgtctttcccagcactcagcacagtaccttgtgcatgcctgttttgtagtaaatatttactgaaggaataaagtaactgagcagtattagaaaagattattttaactttttgacatgaattatttttatgttggggattctttcaaaaaatcatttttggagataaagtgttcaaagttatttaattatgaggccagtatgtattaaaggaagaatgagagtttgtgatttcaaattttatgctacttgaaattataaggctttgtaaatatgccaagcaatttggacatctaatttttttacagttgtggctatggtttataaaggattttctgttttattatttattctaccataatataattgaaaacgatattatttaggagggtttttttgttgttgttgaaacgctaaataagtgatgcactagaaagagcattggccaggcgcagtgactcacgcctgtaatcccaacacttttggaggccgaggcgggaggatcacttgaggtcaggagttcgagaccagcctggccaacatagtgaaaccctgtctctactaaaaatataagaattagccaggtgcagtggcatgtgcttgtggtcccagctacttagggggctgaggcaggagaatcgcttgaacctgggaggcggtggaggttgcagtgagccgagattgcaccactgcactccaacctgggcaacagagcgagactcgatctcaaaaacaaaaaaaaagcattacattattaattacattaattagatcacatttattgggtacttcatactgtgttaagtgctgtgctaaatattctacatattaccttggtacagctttgcaatgtaagtaatattatctccatttgatacatatgagaactgaggcccagagagattaaaactttaaaccacacagtcacacagtcacacaatggaagagcccaagtgtgacccgggtaatcctggctccagagcctgctccttagcaatggcctccagtcctgacagctccactgtcatcttgggtaagaccatcattcatctctaggcctcagttttttcacgatttctgccagttatgaaatccttttgttcagtgatacttactattatatctaaaattatttctctccactatctattctaccagacataaatccatatgaggaagcctggacacatgttttgcaaaatttattttatcagtaacacaattttttgagttaattcaccttgtctactcttaatatgaaaacttaaagtgaaaagaattataaacacacacaagaacagcactaatcagttatatggagcccataggagtttgaaattttatgctgtttaggtatctaagtgatataaattacaggttttttttttttttttttttttgagacggagtcttgctctgtcgcccaggctggaatgcagtggcgcgatctcggctcactgcaagctccgcctcccgggttcacgccattctcctgcctcagcctcccgcgtagctgggactacaggcgcccgccaccacgcccggctaatttttttgtgtttttttagtagagacggggtttcactgtgttagccaggatggtctcgatctcctgacctcgtgatccgcccgcctcggcctcccaaagtgctgggattacaggcgtgagccaccgcgcccggccaaattacagtttttaagagacaaatggatacggattgtatagcagttcttgacaatgtagttgattttaaagtgttaaataaagcttcgtacttgaaaacattttaatttaaacttttaattaaacttttaatttgaaattcactgtgttcttagtgaaaattcaaagcaattcaggtaaataaagaggctgatttatattcactggataaatgctgatacttattaaggcctaatttgccctacattgtgaattgcctcttatgaaaaatacttgaagaaaaatgtggcattccctggatgtcaactcaaagccaacatatgtatgtgtggcacttacatgttaagcttcccattccttcatatttcatcttttttattttattttattttttttgagatggagtctcgctctgtcaccaggctggagtgcggtggcgcaatctcggctcattgcaacctccacctcccgagttcaagcgattctcctgcctcagccccatgagtagctgggattacaggtgtgcgccaccacacccagctaatttttgtatttttagtagagacagggtttcaccatgttgaccaggatggtctcaatcttctgacctcgtgatccggttgcctcggcctcccaaagttctgggattacaggcgtgagccaccacactcggcctccatctttttttaaccaaagttatgtagagagattgatattgagtatgtggctaatcctaagggatcattttaataggattaaaatgctattttttctatatattttgtggattttaaaataacattattaaaacaactttacagcttcaaaaggttgtatttatcacccactcttagtaattatttatacttttcctttcacactatatacatgtttgtgtttatgtgtgtgtagacatgtatgtatatactcatgcatattctttctatttttggcaagttaatcccaatattctgtagtggtttataggaaggaaatttgtatacctttttaatgaacagtcttgatttcattgtactgtttagatttagcttttgttagaatgatttttattggagtcatctttttagtttgagacttgctaacctaagtacgaatggtatatgtgaaaataatgccattgaagtcttaactattgacagtgatggtgtatatattatacacgtgatttatgaatatatatatttgtatttgttttatatttacttataaaacattttgtaattacactgacacattaaggtttcttattagaaattatgaataagttatttaaatctgtttttcatgaataccaattttgtatgtactttacagagtacatcagattgaaaagtaaccctttcaaaaggcagtaaaatgagaaaaatgtggtacagtagttcactctgcagaaactgttctctaatgcaagttctcttgctttgttctgaagcctgtgtagtgctttaataccaggaacattgactgaaacagtgtttcttagaagacataggtccctgcattctggatagcaggactcgggagtaatctatcctttgaggtgttagttgatgcaatttaagtcctatagccaggtacagagtcattgtgtccttaataactacagccactaaagtactacattaactacattatacttttagacctgaagagcatttctactgaaaattttctttagctttttaagatcagcatacactgtagttaatatatttgttatttttattacaaatcagggcaaagtgcaattgctggggaagaacatcccagaggttcaattctgcgggaagtgcacctcaagttcctgctgacgggactgctttcaggactgcccgcaccacagtttgctattcgtatgtgtccaccgttgaccacaaaaaacatcaagatgtatcagccactgctggctgttggtgagtatttgacctggtctttttttttttaactcactttataagatgtttaggttttctagtttctagaagatcctttattctttttgaggatgctttaaaaggagatagagactaagtgaaactgtaaatactcatcctggaacttaaaaaaaaaaaaatttctgtccttttattccaactgtcttatattgaattggaatgctgagtcttcatccacctgagactggacagtcgagtctctgacgctgtccattcatctcggaaataccaggaggctcatccctgcagtgctgaatcccaggctccttgtctgtaattggaccaccccagtctttatgtcatgtcagttttcgttgggtctttattgactaaaaatatagtcagggttaatagcttaataatagcagggttcttcttttgccaagagttatatattaaatattatttaaagtggctatggtccctataaattaagatttgccttttggtgtgaaattgtgtatttgtatgttataggtagaaaaatttatctgggttccaacttgctgtcacattgatttcatagtaatgtgatgaacctaattttctttacagcatagagaaaaaaacaaaatttagtttgctattaagtacacattattaaaatacatttctccaaaacttctgaaaaacagtgtatttgtttgaaactcaacatttcttcttaagatgctatcggctggcttctggctttctcccccagtctattaacatgtgatttgtggtgaaaacctcaccatatttattctgtggccaacatggctgacttctcagtgttaaagactcatttgggtattactgtttggtagtacccttctgtttttttctgtgcctatcttttgaaagcgatttgatttttatgattcaattgtctatatatgtgtcccgatttatataatgcagataaatgtttaatttttgctttagaaactgttgattaatatttcaccactaatagattttaattaggattcatcagtgtgcttcatatgtgcatgtatgtattatgtcagtgttcctgatttgtcagttaggattttgtcaatttcttggggaaaactacttcttgggatagctatgtaataagagctatggcaaggtctgagctttccattgtagaataagctgtattggtatgtagtgaatatcatttactgaatttagtataacaaagtaaaaatataagtacctaaaagtttgtctagaggtgtcactaagaaagataaataagagttcagctatggaattaattctccttgtggtgcccctagtgcattagatcataggttcagcattgttaaaactttcagattgcagaaatcattggattattatgaagttctgttaattgaaaaattttagtaatttagttattttctcagtgccaaaaggtattattatgaaatagatgataaatgtaaacaactgtacaatgtgtttttctagaatagttttgcaaaagatttctggagttttattcagcaaataagataatattggaatttgcccagcatttttacttccactctgttgctttgcatgaattcattaatctttaaatcatgtgcagtgcaaaagtgattgtccatatagactgttcacttttcttgcttaacttataaaaacactatagagactgaagctttactttctcatgtatgtccgtgtcctttacatttaaactttagacatactacctgagaccatgaaaagctttagaataatacctgtaaactattaattatagtgatgacagaatactaatagttaaccaagtgcttactttgtgccaattactgtgcttagtgctttatgtttccccatttaatctccaacaactagattttctactcttcccattttaaagagatgaaaacacagatttagtgtgggcaagtaattcatccaagagtataaggaagagccagggcttaagcccaggtttctttaattgcagaaaccacagttaaccattatactttactctcttgtcaggatttatttaataaaagagacaaaacaaaaagaaaactttggaaagaaaaatggataaccctggttagtgagctctgctagattgcttatttgaggaccagctataataaaccttctgagtctcaaaaagtataaattcccatgtgtataaaagcttaggaaagtgtttcttcaaattgtatgtgtattaatgtaagttttaaggtctttctgtgaaaaatctattcctggaattaggcaaggcttttgagcacgtgaggttaggcccattttttttataaggaagtggaccagagaaattcattcttctttgtgtgtttgtttaaacacatagtttgggtttcttttataaaagataaatgtgttaagtgattaaagtcttgagaaaagacttttcttgcaaagtgctggaactcccactgaattaatgctcttccatgatgtcattttgaaaggtacaagtaatggttctgtcctggtgtaccatctcaccagtggtctgctacacaaagagttaagcatccactcatgtgaagtcaagtaagtatgtcattgtgatgatgacatcacaaacatcatatcagaaaaaaaattctcatagacttttctacattgagtactctgtaatatctgcagtggtgattatttgaaaagtttgaataatattcatgtccaactaatggctatgttaatcaaggatgataactaattctttgctgtgtaaagaacataagcagtagagaatgttttctcttttattaggttggtgcaaaagtaattgcggtttttgcagttttttttttttttttgttgttgttgttgttgtttgttttgttttgttttgttttttttaaatggcaaaaaacacagctatttttgtaccaactaatattgttgcacctcatttatttctcctaagggccaggctgttttctcactggatatccttacgttgccttgttcaggtttattttatttatttattttgctcaaaattattattttttattattttaaaattttttttactttaagttcctggatacatgtgcagaatgcgtgcatttgttacatagttatacatgtgccttggtggtttgctgcacctgtcaacccatcacctaggttttaagctccacatgcattagctatttgtcctgatgctctccctcccctcacatgcccccgccaacaggccctagtgtgtgttgttcccctccctgtgtccatgtgttctcattgttcaactcccacttatgagtgagaacatacagtgtttggtttttctgttcctgtgttagtttgctgaggatgatggcttccagctccatccatatccctgcaaaggacatgatctccctttttatgactgcatagtattccatggtgtgtatgtaccacatttcctctttctttttttttctttaattttactttaagttctgggatacatgtgcagaatgtgcaggtttgttacatagatatacatgtgccttggtggtttgctgcacctgtcaacccgtcatctaggttttaagccccacatgcattaggtatttctcctaatgctctccctccccttgcccctcaatccccgataggccccagtgtgtgatgttcctctcgctgtgtctatgtgttctcatcgttcaactcccacttatgagtgagaacatgcagtgtttggttttctgttcctctgttagtctgctgagaatgatggcttccagtttcatccatgtccctgcaaaggacatgaactcattcttttttatggctgcgtatttttcatttctataacgatccatcagtaggactgcttatgacaaattcaaataaagtcattttaattgttaatttgtcttatttattctttgtttaaacatcatcagaacgctgcatagcatttatttgatttttaggacatgatctgcttatgagttctgtgtatgcagagctgtccgagggaaagctaaattgacggaaaagtgcttcttgctttctgttccaaaatgcctacctgtgctgtccatagcattatttcgctgaatgcaaggctattttccttttgtgtcctatcagtgatagatcgtagagttacatatataaaatatgaatttccacttttttgtttgttttttgatacagtcttactctgtcacccaggctagagtgcaatggcgcgatctcagctcactacaatctccgcctcctggtttcaggtgattcttatgcctcagcctcttgagtagctaggactacaggcacgtgccaccatgcccagctaaattttgtatttttagtagagacggggtttcaccatgttggccaggctgatgttgaactcctcacctcaagtgatccatccacctcagcctcccaaagtgctgggattacaggcatgagccaccacccccagccagtttccagtttttttttatgatctttcagtgaaagcataagaagtcattttctgttttctgtacattaaataattgtaggtcttgtgtataaaaattctcagtgaacccttagcaaacacattatcctgagtacatgcattttcttaatggagaagggttaaccttttttttctttttttttttttttttgagttggagtttcgctcttgttgcccaggctagagtggaatggcgctatcttagctcactgcaacctctgtctcccgggttcaagcaattctcctgcctcatcctcccaagtagctgggattacaggtgtatgccaccacgcccagctaatttttgtattttttagtagagacaagatttcaccatgttggtcaggccggtcttgaattcctgacctcagatgatctacctgcctctgcctcccaaagtgctgggattacaggcgtgagccaccgcgccaggccaggttaaccttttaagtatcacagcttctgattgtgatggaaatctctgaaaagtttgcattgtcttactgtttcaagtgcattgttgtgtggtgcagcccaggtgactgtttattgccaccttacgctgttcctatacagcatctccccagatacatttacgtggaataataatgtctttaaaagctttgggcttttgaggtgcagtgacacaggtatctgtttggactctttcaggctgttattcatctcttctcttctgttgcagtgtctgtagcttgccattctggcacttctagtagtctctgcttacactgctgaatcttctctctctctctttcccatctcctcttctctcgacatttcctttcaccctgccttgtgtgtctggtgtttccttttatggtcagcactaaccaatcgaaactctccatttaatcactacttattctagggattatgttaactattaatacttcacacgtatcatttcattgaatccccactacaatcgtatggggcaggtattgtatttccagtctacagagtaagaaactgaaaattacagagtaatctgtgaaggagctagatggaattcactctgggcctttgaagcctcagaacctgaactcttcacttatacttacagtgcatgtgctgcatctcctgctaaaatacgcacataggttagtaggaatcatgttggcagtaaaattaaaatgttggctgagccaagatttgtgctaagaatttcacacatgcttctgaaaaatcaaacatgttgtcttttcaaacacagaaagttttaatagctaattaatcagagaggtattaattttaagtaaggtttattatcctggattagtcaggttatagatgtcactaaatacttgacttatacatgttaagataatatttatggttgagtaacattgaaattgattataagtgttacttgggatactaactctgagggatatactacttatcagataaatgtgaatgatcatacaaagatactccatttttatatgaatttttcctcttcattgccattttgaaaataatttgtattttatattcagagatactgcccaagagaacactaaaatcctgctttgtgtttcagttaatgcaattttagtattataatcaaaagccattaagaaaatttcacagaaatacaaaaattagctgggcgtggtagcatacacctgtaggctcagccatttgggagcctgaggtgggaggatctcttgaacctgggaggcagaggttgcagtaagttgagattgtgtcactgcactccagcttgggtgacagtgagaccctgtctcaaaaaacacaaaacaaaacaaaacaaaactttcacgatgtattataaaaatgtctgaatttattagcagtaaactcaaaacattttagattttcatgtccaaataaggttaacttttagaaagttgtttttctaccttttattaagtgtgtttttaaaaaatcataatctaaagcacttgaaggttgtatatactgtgccggggactcatgacagcagatagcacaaagtgtgtgtgtttttaaaaccatgatgttttaacttgtgatgctttatgaatatctgttgaatatcttctctatgcttataaacagagaaagcctttgaagcttataatgcaatggaagatacttagaagtaaacaaaatagagaggtatatgtagattttcttaggtcattagtttgtgtctttgtctggtaggctgaaactactgtcatatgactctctccctggccagattttaatagtcatactaatactgatgtgaatcctgataattaaactatcttgtcattacatttgtagataaagttttggttagaaatgattttgtatgtgttaggtatggtaatacagtctcaaataaaaggtcatgttaagataaaaggtcatgcttactttttaattaatttgtgtaataaaatttaggtctttggaaaacttatttttcaaataaatgaacctttcaaataaaaaagagaattagtttaacctttatctcatttcctattataggggtattgaatggacaagtttgactagttttctttcttttgctacctcaacaccaaacaatatgggattagtgagaaatgaacttcaactggttgatcttccaacaggtttgtttttaaagatccaaataggtttgtcatattgaataaacatgttgccatttataaaacatgtttgaaagtacttctttcaccttggaatttttttttatatttcatgcttatatatttattcttttattctctaataattgccctagaaaggcctcatcattgtttacatggaaatgttgttggcacaaatacatggtaaaatggaggaccattagcctgaacagacagattcattaaaaaataggataccggttctacttttaagtgcattgttatatgtaaccaactttaaaagatcgatttaaaaataactctgtcaatggactttattagagtctgtgctggaaattttggcttttataggaaacacttagaaaatttataggttaaggattgtttttaaatgctcaaatttaaaacttgtaatagtctctggctgaatgaatagagaaacttaatttgggattttgaagattctacagtaggaaacgtcccaataaggtaactttttcagaattgaaagcctaaacccagtgaatttcaaaataaagaatttgaaaatataataaggaaagagtttcaaattattttctggtgtatgcagtagtttcaaagaggtttttttaaaaataaaattgtgatgagtttctttaaaatggtatagcaacacgaatcatatgtagatgatcttaaccaatgagagcatgtgtatgtatgtgtaaaatgaattaaatcaaataaatggttgtaaatcaagtaagttgtaaataaatgaagtacatggttgcttttttatgttctccatatgtattttcaagctctcaaagatccagttgttcttacttctcagggtatgttgctgaacttccaggaatcattcccgtctttagtccagtgttgctgctctagtctcattggaagtgacctgtccactgactctcatccccaagttcctaatttgccagcagaatggtactggccctgtgtctagtgatcccagggataaaatgctgttgtctagtatcattgacttaaaaaaaagaaaaaaaatccctgttttatttgttttggtcagctcaagttcaggactgttagataacttaaaatctgctttgcacagatgtatttttaaggaacaaacatctacagtaacagttacagatttccttaagtgggatatttgagttcatagatggtagacttttatagcctgggcttctaaggagggcagcagactagtgcagtcaggacaggacatgggctgtttggggtataataatagtgagtatagtgagattccacatgatggaatctcaacaaagagtaggaaggcgtttaggccttcagttgtccttgaattgagtatgttctctcttttgtttaatgtagataaaaatctaacacaagatactaaaacatacaaggtagaatttatactttttttattcacagaaaatcatgtaacttcctttgcgggtaactcattctttcacagcatacatgaacaccgtagttattccctagtttccagtttataaagatgttttgagaggaacatgttcaaaatatttaactagtattttgcacatgggacaagaagatcttaaatacatgtttcaagagtttttcccccactagttagtatttggaaacatgggaatgtttgtattaaatattactttaaataagtagttttcgcaccagacaattgctgtaccataaatatcttaaaacttaacattgtttttttaaatttctaaaattgaattatagaattcaagaaactgtgtgacaaatgaaaatgcctttttacaaaataaatatctgaatatgtgatatattattgatcattagtttgtaacacttttaagaatattctttgaacttacattattagaaacagcttagaaggaactgggcgccgtggctcacacctgtaatcccagtgctttgggaggctgaggcagatggatcactagaggttaggagatcgagaccagcctggccaacatggtgaaaccccatctctactaggagtacaaaaatgagctggcgtggtggcgagcgcctgtaatcccagctactcgggatgctaaggcaagaaaatcacttgaacctgggaggcggaggttgcagtgagccaagattgcgccattgcactccagcctgggtaacaaagtgagaccatctcaaaaaaaaaaacccgaaaaaacagaaacagattagaagcaaatggaagaatgaataggagaacagagggtaggatgggtaggactgatcaaattacattggcgtggcttcttgtttttcatacatgttttatgcactgttctcacttttttaaatatttgcaattaaaggtaggagcattgcttttcgtggtgaaagaggcaatgatgaatctgccatcgaaatgattaaagtatctcatttgaagtaagtgtcaacctaaaaaaaaatctatggtgttatcacaatgaaatctcgtggatttttttaatctttaagaaaatgggaatgtgctggaatgcatatggaatctttttagtgatagcaaatggtgatatgcagcccaaagaaaatattttgattacaaaattaagttgctatcacttttaattctctacttctaaaaagatgaagtaacttttgcatgaatcgttatttactttcggataaagttcttatgtacttctatctaagcatggagttactgagtgaaagaactcattttctttatgtataatttaaactcattttgcttccagaaattgagtttttttgtttcaggggaaaataacatgtaaagcagtattattaaaaatagaaactgaatgaaaatcaatcaaaattacaaagaaagagtaagctttctaaagtagttttcaaacttgttttggcttttctaagatctttgcatttccatataaattttagaatcagactatcagttttatcaaaaaatcttcctgagattttgattgggattgcattgaacccatcaatcagtgaggggaagaattggtatcttaacaagttttgtaactcatgaacatggtatgtctctccacttatttaggtcttttaaaatttcagcaatattttgtagttttcagtgtgtaagtcttacatattatttgtttattttgtgttttctttgatgcttttataaatgacatttttaaatttcaattatttattatttgtatattaaaatacagttaattttctgatattgaccttgtgccttgtgaccatgctaagcttagttattacttctagtataggtgcttttgttaattctttaggattttctatagagacagtctcgtttgctagtaaagacatctttacatcttttcgatctataggccttctttttgcttgcactaattaggacctcctgtatagtgttgattagaactgagatgtcagctacgagctgacatctttgctctgatcctggaccttatggagaaagcattcagtctttcaacattaagtatgatactagctgtagattttttgtatatttcctttatcaagttgaaaaagttttattcctagtttgctgagcctttgtattatgagtaggtgttgaatttatcaaatgctttttctgtattcattgatatcatcatatggtgtgtgtgtgttattttgtttttctttttgaagttcactaatatggtgaattacattgattgattttcagatgttaagccaacatgacattcccggaataaactctagttggtcgtgatgtattactgttttgacatattgctggatttgatttattgatatattattaagagttttatgatatattattaagagtttttatatctatgttcatgaaggatattggtgtcgtttttatgtaatatcctttgttttggtatcagggtaatactgaccttgcagaacgtgttgtaaagtattctctctcctttttttttgaatgagtttgtgtagaattgatattattcttactaaatgggaaaaatttattaggaaacccatctgaacctaaaattttctttgtggcaaagtttttaaatacaaattcagttttgtttttttttttcataaatataggactatttagattctctttttttgagctttggtaattggtgtcttccaagtaatctgtccattttgttgaagttgctgagtttattaatttattgaaataagcttgttcatcatggatctatgatcagtgattatctttcccactcctaatatcagtaaattatatcaaccaattttatttattgatcttttccaagaaactacttttgattcatttgattcttctctatgatttttccattttcaatttcattgtctgtcatgcttatcttttgttcttctgcttactttttaaatatgctctcctttttttacatagttttctaaaatagaaacttagataattgaattaagttgattctctaaaatgtaatgtaaacagttaatgctatatgagcaccagttttcctgtatcctacaatttttgttatggttatatgttttcattttaattcacattataatctttaaaaatttccatggggtgttattcagaggtatattttttaacttcaaactatttgggtgttttgccaggtatctttctgtaaatttctactttctgttggggtcacacatggtcctgagtggaagaatctcagtcctttgatacagggagtacagggatcttcctactctgtcacatttcctctatgtcagccatcatttgctgataatattttagttcctcataatgcttattgagtaatcagtgctcaaattatatttgttgaattgcactcgttgatgtcattcagtacttctttcaggcttaacagaaagtgaataaagtggcatttgttgaataccaactgtagtagaatgatagaaactttacatactttttcattgaatgtttaccataatctgtatatcaattaattgaggtacatgatgagattctcctgtcatgtgtgagaagttgagcctcaggagggttaacataagttgtggcatcagggtttgaatctatgccactctttcttccaagttggactccttgcctaattgtgtgagactgtatgttctcttacaggtcacttagagctttaccttcttatgactgttaatcatggtgctaaatggtagtttaaattgtctatatttagaatgcgtcagctgagtttttcaatttactgaactttttatttgctctaattcatggtgaaatttttgcaaaaaggggcttatttagtaattttgtttattttaggcagtatttggcagtcgtattcagagataaacccctggagctatgggatgttaggacttgtacccttcttagagagatgtccaaaaacttccctacaataactgctttggtaagttacaatttaagaatttaatagcttatttaggtatatatgtatgtggtgaatgttttgcttaagcttgaatcaaaatcattactgccaatgtcatttttttggttaaaaatgtgtgttcagagaagatgatctaaataaatggagataattcttattttcttggataaatcaacctaatatcatattagtgcaattccaattcaagtttcatttggatattttgaggaatatggtaaacatattcaaaaatgtttatgaaagaataaaggtcctaaatagctaagtcatccttgaataaagaggagtaaatgtgggaggtgtgggtggggttggcccttcctacctgatattagtacatcttacaaaaccatggaaataaaatcagtattgtattggcacaagaatagaaagtgagtcaacctaataaagagctcaggaacagacccatgaatatttggggacttaatatacagtaaagtagcacaaatcaaagaggatggacagactgtgtagtagacggtgttgggaaaactgtctcactttatggagaaaaatacttgatctctacttaataccgtatagagaagtgagtgtcacaggactaaagacctaaatgtaaaaatgtaaagctataaaattgaatataacaaaatacaaaatattgctgtgacctagaggcaggaggagacatcagaagctcaaaccaaaaggcaaaaaaaaaaaagaaacaatgcatttaattaatcaagattaatgctttttgtttgatgaagatgtcaaagttaaatacagaagacattttgggaaaacaaattttccagtgtctaaatttaactagaaactcctgcaagtcaacagtgaaaaaaagcgggaaccctagtgagaaaatgaacaaagtctgtgaagagctaatgagaggcagagaaacctaaaaggccaacaagccatataaaggaatgttcaaactcatcagttttcagagatgttcaaaccatgatatggatctaccgtttagactaacaaaaactggacagccatatagtgttaagtacgggtggaacatagggtatgggaatccttgtgcattgctggtaggaatgtagaccaatgcagccattctgtaaagcacgctggcagcacttgggcaaacacagacatcttctgtgtccgctgagctcttggtcgtaaatgaacttttgcaaggatattgactggtgtgttttgtcatgatgtgagtttggagaccatctgtgtgtttttactgagagaggagacagattaacaattggctgatgcacccatggagtattacgtagcatgcagaaacaggaggaagaggacttaaatacagtggaaagagtaagaaacaggatgaagtatatatatatatatacacacacacacacacacacacacatataaacacaatactatttaggtaaattagataataactacatgttaagaacttatacatatgcgaggatattggactaaaaggctttacaataggtggaatataaaagaatatataaataaaacaagtgattttggaggaatctatggatgataaaggaccctggttcgagaactgtgattgtcttatcgtgtgcacataagagatgggggaggagacgaggaataggcaatactatcattgaattcattattttcattttgtaagtattttataaaaacatcaaaaggtcagaccttttggaagtttgccataaaagctccaattaaaatgcattcatttagcctttctctaagtaggtaaaatctaaagaacaaatgtggattcatgtgtagtaataataaatgatactgggcagtggtgtgtgtgcccagctcttctggacgattctttgacagaaggaaacctagcacttctaggtttgtctgcatttgctttacaggagtggtcaccatctcacaacttgaagagcctgagaaagaagcaacttgcaactcgagaggccatggcccgccagaccgtagtctcagacacagagctgagtattgttgaatcatctgtgatcaggtacagtacagtgtttcttgacactgtcatttgtgccattagcatcatgtctgggaagttgacaagtatcatcggaaggtgtctatggtagcaagttggactctgcttttgaacatacttagtttcatctttcagtacatacccagattactaaaaagataattttatcatttttagtattgtactatactgtttgttataactaataacatatgcagtaatattcacccatcagcatctagtagtaaatgtgctcattccgagtgcccttctactccatacacttcagcttctgaaattcaaatgaacatagcatagacatacagatagatcatattatcatttatacacaccaaagaaaatgtgttgggaatcctaaatttgtgtatcatccccatccataccaatcttacagataaaaggcttcagagataatgttgggtcactgtacagcctcccttctgttgagcacagttctatagccaaaatctctatgaattttatttttcttgtgttaagtttagatcaccatttctctctgtgcagggtaaacttcctctgatgttgtggctgttaaggagtgattcatgtttacccataattagctgggcaaatattagtttcagacttttaaaaaaatagttttggacctcctcttaatgcgtctgtactttgggcaagttaattaattatgagtatcactctaggggaaaaaaaaacatctttatcatatgtttcactatcccaaagcttgctgcaggaggcagaaagtaaatctgaacttagtcagaacatctctgcccgggaacattttgtatttaccgatattgatggccaagtgtatcatctcactgttgaaggaaactcagtaaaagacagtgctcggattccaccagatgtgagtacaaccttgattaaatcttcatcaagaagattttgttttgttggttccatatccagtgaaggcatagttaagttggaaacttcagaaaagcctaatgtaaataaactttatttaaggagatattatcgattaaacttgttccatactgctagagaataacgctgtaactattttgattaaatgtttactgtgtgctactcatttttatccctgtaataatccatgaggagttatctccattttacccataacaaaactgtgggagaataagtaactttcccaaagttatccagcttactcatatggcagagcagtgttttaaactcaggcctgtctgacttcagtatctgtcttctttccatttcaggcattaccctgaaggatttgacttacaatctagtattatttttggataatagtaatcaggttgtaagtgtaatagtattattaacatttactaacttacatatattcttatggccttgtggaatctgtaactaaagttttgccattaatcatttgtgtcagcatgcatctcatagatagtttttaatagatggatcatgaaaatgtttatgttaattaatgcaggctattataatggttaaatgaaggcatgaggggattttttaaaataggtatatttattttaaattgctatctaaaaatggaatgctctagtagaatgccaacccccataattttataggtggctttggggtctcataaagttacaatctagatgttggctgtggctacagtcttttgaagtgtaatgggacagaaggatctatttccaagttggctgcctcacaggctattgcacattaatgctggctgttgacgagggaccttagttcttcatgtcgatctttccataaggctgcttgagtgtcctcacgacatgacaactggcctcccctagagtaagtgatctgataaagcaagaaggaagttgcagagtctattatgacctggtttcagaagtctcttcaaaggcaacttcttaattaaacattctattttatggctaggaaagtagatatcttaaaatgttgcttcatattatatacagaatttcatttctttaatatttttttttattaatggactttattataatattgatttttaaatccagtttttgttttgtttcttgactattaccagagtttttacggtattcagtgtgtgtgctagtccactaatggtcaattattcaaaccactagagttttcttactttttaccatggataccatttgaatttttatgttgtacaataaatgcaaaaataaaatttcttttaataaatagagaagtaattgagcagtaatattatttaatagctaacatgtattgactatttactgcatggcaggcattgctttaaggcctttgcctttataaatttattaatactagcaacaactcaagtttcatgaacttaccctactttatggacaataaatccaagacagaaaggttaagtaaacatgcctcaaatcacataccagtttcaagctgggattcaagcccaggcagtgtgactgcagagcccaggctgctgagccctccatgataccacctctgagcatctattagaactgcaagttcctttcttcctccaagttagattgactacagcagcatttcattcttatgttgtgcttctatatgtaacttctgagcaaagctttctgtgaatttaaactgcatatgcctttagtaaacagcatctcttcaccttcatgattccacaatgttccaaaacgtgtcagtgaagctctggatccttttttcaatagaaaaatcacggcacaattagttataaaagagctttaagtttcccttggaatggatttagttatccttttgcagtgagagataagtttgagttggctctctggaaaaccttccctttacttctctgtttttcttactttaatttcccccttttttttttgaggtatttgttcctcaaaagacatcccctctctttaaatctagttccagtaactacttaatgtctatgaagttgaaatctcctatttcttcatagttgaaattgataggcaatgtagctctttgttagtgtctaaagtctgttttaggatttgatgactaaaagcatactaaagcacagccctttaaattaagttttattaaaatatttattataatgtcttatacagcatagtgaaatttatatttgtttgttgctgttgttttctagggaagtatgggtagtattacctgcatcgcttggaaaggtgatacattagtgcttggagatatggatggaaatttaaatttctgggacttgaaaggcagagtatccaggtataagccaagaatgaaatcttgttatttcattaaaaaaaagaaatgaaatctttttgttttgttttgttgagatggtgtcttgctctgtcgcccaggctggagtgcagtggtgcaatctcggctcactgcaagctctgactcccgggttcatgccattctcctgcctcagccacccgagtagctgggactacaggcacccaccaccacgcccggctaatttttttgtatttttttagtagagacgggatttcaccatgttagccaggatggtctcgatctcctgacctcgtgatccgcccacctcggcctcccaaagtgctgggattacaggcaggagccagcacacccggccaaaaaatgacatcttgatatggttccattagaggcttgtgacttggcaagaaggatcagtaaactcgtggaggtgtagcttggacccttgggtcccttcacctaaacttgggaggatgggccttgagccaagcattcttaggagatagttatctgcaagtggcccctgcagaagtcttagctgaccttaaagggcaggccctttctgtcagatgtggcccccagtcccagcaagtaaagggttctcccatcatcagacctgttagaaatggaaatagtgagagatgttagacatagcttctggtgaccagatctcactctacattgtattgatgtttttgtttctttgtcttcagaggaatacccacacaccgaagttgggtgaggaagattcgttttgctcctggtaaaggaaatcaaaaattaatagcaatgtacaatgatggagctgaagtgtgggatactaaagaggtaggccctctccatgaggataaaacgtaaataaattgttagccataggaactgtgctttgttaaaaaacttctttctgatttagaaatgaaaagtacttaatgagttcgtcaagtttcccataacaaattattttctttactttacagtatttgtgttctaaaggtaacaactcaagatttatttatttatttatttatttatttttattttttattttgatatggagtttcactcttgtcgcccaggctggagtgcaatggcgcgatctcgacttattgcagcctccacctcctgggttcaagtgactctcctgcctcagcctccctagtagctgggattataggcatgtgccaccacgcccggctaatgttttgtatttttagtagagacagggtttcgccatgttgggcaggctggtctcaaactcctgacctgaggtgatctgcccgcctcagcctcctaaagtcctgggattataggcgtcagccaccgcgcccagccgatttatttattttttaatattatcactgtctctgagacctttaaaatgctgcctatttgtggaagatagattgccagaggctgttcagttctaaacttgaactgggcctttgccacagactgtcttccttgaccatttaatctagaataataaagatcttccttttctgtctggaagtgatgcccaaattcactcttgaaggttcagatggtgagcagtttaagaagtggcagaaatgtgacctttcgtatattggatgtggactggtgtacgtcagataaagtgatcttggcctcagatgatgggtgcatcagagtcctagagatgtctatgaagtctgcgtgctttagaatggatgaacaagagttaaccggtatggaatcctaatgatagggggctttgaaacctgtctttactttgccacaagctcttgtattttggggagagagctgctgcttctgtttcatttcagtcttattttcttagaatctgagtttaagaaaatatattaacttgaagcttgagtgtttttactgctgagatgctgcaatctttgtaactatagatgtcaatcattctcaattcaggttttttaagtgccccttttgactcttttctttggtttgttaacaagataaaagatgtttatgtttataaaaatggcttactcagaatttaggcaaactcatcagaggacataaatctagtgataaggctgctggctttttaataatggccttatgtcttttgcaaccatatatcattgaaaagtcactttagaaagtgttctgagtattatgaattttgatgccaatctgtgactagtaaaatgaccagtcaagcaaattagcagattgcagtatcttgctctgttttgtatggttgttttgacattgctttttaccagaataaaaagcattttagtagaatatactccatatatgacttctaaaaaaaaaaagaatgggacaattgtgaatgcatccatttatcagtttaaaaggcagcttttggctgatgcaatacagtgttcatccttggaagatacttgatcctacttggagtggaggagggaacttcttgcctgagtattctcccagcaaaactttggtgcacactctaggctgatatgtagaaaatttcatgagacttttctgaacctttgtagagtcaatatttggcacttcagacacagtaaggttttaaaaacctggtttttcactttgtgttcatgcttgaggcactactgagttgctgctaatgttagcagggctgcctttaacttagttaggtatgctttggtttttgtcactgcccacccctgcccactgcatttgggcaccaccacttcttactatgtaactgactgccatcaggtgaagccagaattcaagacctacattcccatgtctgtccttgtgtcgtttgccagctctggggaagcaccaggatggcctcctaggaaagggcaagcattggtattcattttaaacctaaaggtattgaggacattgaaggaacttcaagggtggtttttgaaaaaattggttactaattctagataaagaagtgtggaactgctatctaaatgtttgaagagcttttccttcacttttaatataaaatttgaatctaaaaagctccaaagtcaaggtgtagcttgttcttaaattaaactgactacagaaatggagtccattgtattaacccatgttcaataccatacttgaacatctggcctgtggccagattttagatcacatgtttcttttaaaatttttctgatttttttttatattcttttcaatctctaatgttacagcctcagccagaaagagaaaactaaatagcaattgggaaaggtcatgcaattgtgtattcattccacaaattgaacttcaaattcagaacaacccttaataaatgttaaagaatgaaaactatggtagtgtaaatgtggagtgaggaaaaagacatctgtgtgttcacctccagattcatggccgatttggtcttgaggaaaaaaagtttgaggtagtatatttctattctgaggaattagaagtatatttggggcttactgacatgggataaaaataaaataggtcctaacattggtgtttcctatgttttcttcaattctccttgaaaacaagtagagaacgtaaaatattgattcacatctgtacattttcttagagcagcttagataggccacttcttcctccaataaagagggggcagtcagacaaattagaagattagaattcctgtttttgagttggagaacctttcttatcggctgcctaatatgtcagggacacaaagagccatcaaaataaatcttaatagtctttttagcagcatctaaaaggaatgcaagaatatgagactgtttaatagcattctggtatcatgcagtttccacaccctttaaatagtattgacttgatatcagggactgttcaacctaatttcctccccagtgttttttttttttaattttattattattatactttaagttttagggtacatgtgcacaacgtgcaggtttgttacatatgtatacatgtgccatgttggtgtgctgcacccattaactcatcatttagcattaggtatatctcctaatgctatccctcccccctccctccaccccacaacagtcccaggtgtgtgatgttccccttcctgtgtccatgtgttctcattgttcaattcccatctgtgagtgagaacatgcggtgtttggttttttgtccttttgatagtttgctgagaatgatgatttccagcttcatccatgtccctacaaatgacatgaactcatcattctttatggctgcatagtattccatggtgtatatgtgccacattttcttaatccagtctatgattgttggacatttaggttggttccaagtctttgctattgtgaatagtgccgtaataaacatacatgtgcatgtgtctttatagtagcatgatttataatcctttgggtatatacccagtaatgggatggctgggtcaaatggtatttctagttctagatccctgaggaatcgccacactgacttccacaatggttgaactagtttacagtcccaccaacagtgtaaaagtgttcctatttctccacatcctctccagcacctgttgtttcctgactttttaatgattgccattctaactggtgtgagatggtatctcactgtggttttgagttgcatttctctgatggccagtgatgatgagcattttttcatgtgttttttggctgcataaatgtcttcttttgagaagtgtctgttcatatccttcgcccactttttgatggggttgtttgtttttttcttgtaaatttgtttgagttcattgtagattctggatattagcccttcgtcagatgagtaggttgcaaaatttttctcccattctgtaggttgcctgttcactctgatggtagtttcttttgctgtgcagaagctctttagtttaattagatcccatttgtcaattttggcttttgttgccattgcttttggtgttttagacatgaagtccttgcccatgcctatgtcctgaatggtattgcctaggttttcttctagggtttttatggttttaggtctaacatgtaagtctttaatccatcttgaatgaatttttgtataaggtgtaaggaagggatccagtttcagctttctacatatggctagccagttttcccctccccagtgttaaaggccactgctaagcacatttttcctaagtaagcatatatagaaagaagctttctgaaatcagatttctgcacaaacctttcctcttcatctgccacagctttccacagtcattttcggtaatcttggggcattcagaaatgtctcacaatgacttgccgatgtggggaggtctggggatgctaaacaacctggaacgatctggcgcaatgaagaattgtcctgccccaaacgccagtagtgttccttagctctctttttcaccgttcattgaatcacactgaacaaaatcacaaaatatggtcctttccttcccagacttccagctcaccttaatgttgccatttccaagtggtggaggaataacttttttctactgattttcttcttggctctttgcttactgattttctgcattcctgtcatgtaggtagctaaaaacctgggtgttatgattcatacctcacataactttagcccagatggagcagaatccgtgacaaacagcaatgatgctaactgcttttgcattctaattgtgtaattttcagaggtgaatgagctcttgcatgtgagtttctccagatgtgagatgatctcctattactttttcatggctgatctttacctttcagaagaaagatttcaattcatttgagggagggaagtagttaagggtcactttcagtttgttcatgctcattgggatgctgtcaacaatattttgcttttggagaaataacatatttgttttaaaaaataaggtatttccctccttttattcagacttggtaaatgttgtcttgcttgcatgatgtaaacactcgatgctgccttctacgtggattctcttgtatcttttcgtttgttcattgattaagaaattaccacacagcatgagaactttccctgaaccattccaagattattatgtatagttaatttttttccctgacatttaccatttccaaacatactgtgatataataccaacaactatctacatgaatctacctaaaacatatacatatgctatctaaaatatgaatggggctgacttgagaattatatagattgtcgtctatgaaggatgaatagaaagaaagttaagtaagctagccacctgcatccctttcagtgttaagtgttcagtgcttctgtaggtagttagataagcctcatttttccaagatgcaatccttcctttatagcccagatgtaaaagaaaagatgactaagtggaaattaaaaaaaaaaattcaaagcaaaagaaaatctttaataagaataaacgaaagtgttcaataagcaaagccaaatacaaatgattacctggaggaaagtaattcacaagtcacagactgtctacagaggggcaaaacagataaacaaatgatgcttcaacatatgaaatgatactcaactttatttataataagaaaaatatttgacctcctactggtaaggataaaagaagaaaataattttaaaaagtaaatttttaaaaagagaaaaatacaaattaaaattgtttcttacctatcagattcaaaagcttgaaaatatactctgttggcaaggctatgaggaaacaagcactctcatccattgctaacagtaagatccctataggaaggaatttggcaatatctaacagagctacatgcacatttacctttttacccagcaatcccagcgctaagaatttatcttaagatgtacattcataccctgtgaccaaaatgcacacaaagttattcatagcaaaattttgaaaaaagccgaactgcttagccgtaggagattggttgaataaatctggggacatctgcagaatggagtaatctatgcagctgtaaaatagtgaggaatagctctgtgacctgatgtagagtgatatccaggatatgtgtaagtgaaaaatgcaagtgtaaaagagcacgtatagcctgcttgtgtacaaaggcggattttatacataggttcatgcacacgtttgcttactaaaacacacaccacacatacacagaataatccagaaaccaatgagaatagttagaagatgtagatggaaaaatggagagtatggggatagcagtgaaacttctctatctttgttatacagtttcaagttttgaaccatttatatattttatatattaaaaatacacagtgaaaacaagagtgaagaaaaagcaaaccctaaaattgaatgcaagacacagttgaaccaaactgtgtaacaacaatattggtaacataaccacacacacacacaaaaacagttcaaataactaaaacacagaacttcccattcactgcacacctttagtggtttatattctaaggacagaattgctaaggaatgttgaactttaccggggtagttgatggtgacactagtaattctgaagctgttttgtgcatgttgtagtctggaacacattagtaaccaaattgcagttttggggagccaagatctgtgctgatagaaagggagatatggatgggaaatggcggtggtgggaagaaacattccaggggtggatttgggttggtaaaaaatcatgacttcttgaacatgtatgttccctggctctgctcacagagagttttcttgcaatgacactcaatggcagtgagcgcacatagcacccagattttactttgcaagttccatttccaggctaaaaggagccagagctctttggacaaaaagtttatttcaggacagaggcacaaaaggtgcaagatgggtctggggcatcttgtggtgccagaattcaagtaaggaattgaaaaaccaaggaggacctgacataagaggcttctcctgtcaaactgggggtagtctgagcatcacgaaaactaatggtggtattgatgtaagtgcagaataccaaagaaaccctcactccatagtaatagtcacagtaaggaaacgggaagtgggcaagaagcaaaagctcaggtggacagaagaatgccagctgacaaatgcggaaagaataagattagaaaatcaccactttgcagccccgatacaataattaattgtatacacaagcaaggatcacttgtggatgtcaaatcactgagtaaaaggatgtttgagaataggaaattcaatctgacaatatttcctccacatattacttactaattaattatacagtggagaaggtgccctgataagagctctggtgaataccccttatctagatgatcagatttagtgtttcctgtaaccagacagctaacatgttccttctgatgcaatgcagtgaaaagtacacagcatcctttgttcagactctgtcaaaaatgtttaacccgaatctgataatcagaaaacagacaagttagaacgtagggcattctccacagcagctgaccaggactcttcaaaaatgaaaaggtcacataaggccaaaaccaaaaaggaagaggaccattctagattggaatagactaaagagacatgacaatgcagtgtaccagccttgactggacccgatttttaaaaataatacagctgccaggacatttggggaataacaagggacttttgaatttggactgcattttaagtgattttactgaatcaatattaaaattcttgggtgtaaaaaaaaagtattattaaaaatatttccaatcactttctggcttttaaattgaaaaatccacataaaatattttgtgtataatttaatttttatttaactacatagaataaagttttctaaagcagagttttccaatagaaacataatgtgagccacataggtaagcttaaattctagtatccacattttaaaaagtaaaaagagatgaaattgattttaattaaaattttatttaagccaatatatccaaagttttatttcaacatataatcagtattaaaagttactagtgagacattttacttttttaaaattattcattcttcaaaattctgtcagtattttacatttattgtaaaatgaattgccctcaaaatttataggacaaattttcagcacaaacagttaagctctatttagattttataaaattttcagttgaaaaagtaggcatgtattcaagttgtttcaaacatatttaaaagttatccaatgactgaatcaataatcactttttaagtttaaattagacaaacattcatttccttcattatactagccatatgttaagtgactatcatattggatatcatactggataattgcacagtccagagttgatgtggatcactgatacgatttggctctgtgtctccacccaaatctcatgtcaaattgtaatctccacaggtcaggggaggcagctggtagggggtgattggatcatgggggcagatttcccccttactgttctcacgatagtaagtgagttcttaggagatctgatggcttaaaagtgtggcacttgccccctcgctggctctctcctgctgccatgtaagatgtgccttgcttccccttcaccttctgccatgattgtaagtttgcctccccagccatacggaactgttgagtcaattaaacctcttctctttataaattaccctgtctcaggtagttctttacagcagcatgaaaacagacaaatacagtcacttaaataagccaacaccatgtataagtttgtgtcattttacataattgtgtctattcaagggatccatggataaagcctcttcaggattctggaggggagttggtagtaaggccaagttgtaaaagccagggcacccctagaaatttggagctaaggtcgagtccgatagagtgtagggtggtcagagcagagctgctgggcattgcagcctttaggtcttctgcttctttgcactgaaacatgttgacaactaggcaaatcttgcttgttagtgttctaagtaagccagctgctggatgtgggggatgctagggcctagagtctaagaagatagcccctgtgttcaacagctacctttataagtgagacctgggaatgctagtgatcacaggtggcatgatcccttcagtgacatactcaaggttgataggccatgttagttgaatagtctcggaaaaacaaaagtacatacaggtaaatatatttatttttaatatttaaaaataatgaactttgttgctatttgttgaatcattgcattgaatcctttattcaagtagtaccagagttgtataccacacaggatacttaaattttaaaggggaaaagaaggccgggtgtggtagctcatgcctataatcccaggactttgggaggccaaggtgggcagatcacctgaggtcaggagtttgagaccagtctggccaacatggtgaaaccccatctctactaaaaatgcaaaaattagccaggcatggtggcaggtgcttgtaatcccagttacttcggaggctgaggcaggagaatcgcttgaacccgggaggcggaggttgctgtgagccgagatcgcaccaccgcactccagcctaggtgacagagcgaggctttgtctcaaaaaaaaaataaaataaaaaatcaaaaaagggggaaaagaaaaatatgttaatcagatttgaatgcagagactctctctgctcttggcttgtgtttcctaagcggtgactacattgaatatactctcagttgttccagatttacctgttgctctctgctgactgctctgtaaatggtttatagctgaagcttcactgtagtataaaacttcattttatttttaaaaacctttctttgttgtctagagcctgtgtggtgcccctatctccttgttccaagggcctctcttgccttgaaagccttcttattacaccagccttggaatggacagtattctttggacatttctcatgtgtaagtttttcacttttctttttctttcataatttacttggggttgaaagacacccatgaaagtcagccatggcctgtactccagcatttaaagggaatggagcctttaaagccgagagaaggcagagacactacagaattgccaggctgcctctgggttctcgggcctttgtggaagtgtgggtcagtgaggagctgtgagggcgtgtattgctctcaggtggctgtgtgcttgtcttatggtctgaacatggatgtgtcgtgatgatgaaaaggatgcgtgtgaagagggcaatggaaggcaggagaatttggagccgggcacgttctttttaaaagcagcatcattagcttcagggatatactgtgtcttaaaaatctcaatatttgcctcattgcaaaaaaatattcacagaaactattagtgtttattaattaaattcacaaatattactgaactcctgccatgtgcagcacggatggaggatttaaaaataatgccaggaagtgtctgttctccaagcactgtctcctcagaatattcattctgcagagctctaaatgagcagattcctttagtaacattgttaagttcttcattaaaaggaatctaaacctgatagattttaaagcctgcttataaatttcctggtttcttgaaagccaaggagactttctttactcattttcttgtttttgactcaataagataaaagcagatattaaagttgattggtggggtcctgagtagattgttgttattttggtctataaccaggtttctaaccaagaactacgaagaaggttatctctatattaacacaacttttttcaggtgaagaaatacgtggttttaagtgaagagataatgaactcattcaaaattttttctttacagtgactatccagaaaatgaagaaataaagaatctcctccaagaacagttgaattcattgtctaagtaagcactccatgtttcattagaagataggaatatgagaaagaaaaatgcaattcaactttaaatgcaattcaaaattaaaataagttacgttttagaaaatattagtggcccaagaagagaccattctgtttagaggtttgcttcccgttagagtctgtgttttgcagaaaaagtacttattcagtagttacagtgacagagcatctgtcttcaccaagttcatgagcaccagctgctctgatctcacatcaaggcaggactagatgcatagtgggagcatccttgtagctcagcttgcctctactacaaacctccatgaagcctcacagcgggagacgaatcgcagggtgattctgggtctgcttcccgcttctaaaatgagttctctgtgtcaggtgctggtgtgcacaggtctggctaagaaattaatgtgctccctagagccaagggcatttaacagaatgtactgggaataagaaaggaaaaaatatgggtctacaaggagttcttggggaaagcgtaacacatttttgcaatctagaatctgttacatataattatagtatttaacaaattaagcatgatattttattgacggaaaattcaaaataattagttttttctatgcaaagattaacatttatgtttaaatgggaaactatagatttaaagaatgtcttcctttctgatttgtgaatattcagtattttactattttagaaatacgaacttataaaagcacaagccattcttccttagatactttatttttggaatagtttcagaataaattacgaatgtcatcttctttaaagtatttactgttcttgatgattttttcaacaatggcattcttgttccagtagttaggcagctaatactttcaaaaactgttgtaagcctataaaccagaaatgagagcgctgcagctccctgtggtggctgaaagctgctgcttctccaagccttgagaacactctcagcccccttcaacttttataatttcagggtcatggtaaagtaccttgtcttgtgtaaattctaaacatgttatttgactggaatttttcatttcaagagtatattgatcaacccccatgctttattgtttgattgaaaacttttgtctcacttttgtccggatttcttccacagtgacataaagaaactgttgcttgatccagaattcactctcttgcagaggtgcctgcttgtttcaaggtaatattgtttgatgtattctgtataagagacaggatttcaagttaactcatttcttttaagggtttttagttagaaacacttagattttagaaaaatgtatcagttcatcctttagatttaacttaaaataattttgacagtagtaataacaaatagggaaaaatcaaattgcattttaaatgtgagatctaggccttctctctggaaagcacttcctcctacagctttttaaaatatgtgttttaaaatatcagatacaggtatatttaaatataccaataaattatatttagaagcgataacctctatatcctgacttacagtagagtttgtcacttataaaaaagactcctctccccacagaataaatagcacattactttcataccttatctagccagttatcccagaggaacttcttcctaatgtgaatcaatggcccacattgaaaggtgtgctaatggcaaaccaggtaaataattgttcttaacacagaacagaaagatgctggagtctgaaggggtcctgtgcagtcaggcccccgtattgttgaaggcccagtagcagggcaggagaacttgctgcctccccctttcaccctgtcaggccccatgccagtatcccagtggatatgtgacaacactcccttccagtccctcagtctactctaggaagccatccaggccaggtgtgctgagtgcagtcaaaactttgcttcatccttgccaggctctatggtgatgaatcggagctgcacttctggactgtcgctgcccactacctgcacagcttatcccaggaaaagtcagccagcacaacagctcctaaagaagctgctcctcgagacaaactgagcaacccactggatatatgctatgacgtgctctgtgaaaatgcctactttcaggtagtctgcttcacacagcaaaacctttagagctgtcatcttgattacttatatctttgtcaatatcttaaacttgggaaactttcaaactaagttactgttcagtaatagaaataagcccttgaaaattagctgggtgtggtggcacgtgcctgtagtcccagctactcaggaggctgagggaggagaatcacttgaacccaggaggcggaggttgcagtgagctgagatcacgccactgcattccagcctgggcaacagagcaagactctgtctccaaaaaaaaaaaaagaaagaaaagaaagaagccctcggtacatttgcattaaaaaaaaagcctgatcaagatttgaaaagctcatagacagttactgcgttgtttactaaacattaaaattttattattaaacaggcttgtttaatttgtcttacatttttaacttggcttcattttaattctgtcattaatttcctataaataacaaatactttatacacttggtttgaatttgctgttcacatgataatttctttaacctcctgcagaatccttcagtgcacataggtttttcatccggctctacttaagtgtcagtttctgtaggcaggcaggtatgcatccaagtgataatatctatcaacatttttgctgttcaaattcttattaaatgtttggggtgctgtaaagttgattatctagtaacctgaaaagtcaaagtagtttattaaaatgatcttattaagtacagtaaaatttaaataattccaaactcttataatccaggcttaatttttcttttttttccaattctagaaatttcagctagaaagggttaatctgcaggaagtgaaacggtcaacttatgatcatacaaggaaatgtacagaccagctactgctcttgggtcaagtatgtcagtttttataactctacatgcttcattaaattgctagttaattcgtatttcagagcaatatatctgtatgtatatatttcataatattttccccttgtatgtacctccttccctgtagacagtttaggctttctttcaaaataataccaataaacctcatgagaaaaaacatatggttaaccagcttgtaatttagacttccataatgcccagtggagcccagctatttgttttgttttgtttttgtgtctgaattgactggtacaaagctaaaataggcaattactcgagcacctagatacaccagcctctggctttatgtttgtctcaaaaaagtagtgtagcacctctgtttaatgtttgtatttgtaaacaaaatattcaattgcattttttgaaaatgagtgttttcctttagttttctaccttatgaattttaaaaagttatgttggaggaaaatgttctcataattagaaaaaccgtttctcttactagacagacagagctgtgcagttgctgttggaaacaagtgcagataaccagcattattactgtgattcactgaaagcctgtttagtcactactgtcacctcgtcaggcccctctcagagcaccattaagttggtggcaacgaatatgattgccaatggcaaattggcaggtaaggcacacttgatatgtttgtcatctctctgaaaaatgagaccttgttcccagcaaagtatctgattagtagggacatttctttctcttttacatatgctgaagaaaaatagaaaaattattgctacctataaatcagatgaatataattgtctaaaccagaattaattgtttacacttttcagagtgaaagggggcactgttaataattgctgagataataggcataaatccaacaatcctaggcaaatcagaacaataaaacctgtgagagaactatgctctccctacttattctccagactgtattgtgcttcctaccctggttacttgagtaataacagtaaaactcttaatattatgtttcagaatttaaatcaagaatgtcttcagtaggtataaaatgggcacgactagataaggtcaaatggggatttaactttttaatgacttctcaaagaaggagctgcagtgtcacttaaggggatgcgcttttgtctttcagagggcgttcagttgctctgcctgatagataaggctgcagacgcctgccgctacctgcagacatacggcgagtggaatcgggctgcatggctggcaaaagtaggtggttccaagtttcaataggtgccctcaacattcgggatagaaagctcagtcctgaactttggacttatgacttagaaacattttttggcctgcaaagctgctttgcaaatactgtcttggaacctttatccttttcctattctttatgagtgtaaattgcattacttatttaaaaatggatcttgcattggtagcaattaagtaaaagcagctgcctcctctttctcccagagtctgagccgaaactacagtccagaggtatagccaggccctgggtcccgtaggcacagaccgttatcattattcagagtatgcagcagcttcagggcagtgtgctagtcaagcagagcatagcctgtatttcatagaaacagatctcactttaactgaattattattttttctttatagagtgcaggatgtttttgttgttaacacaggcgtctttctcaggtccgtttgaatcctgaggagtgtgccgatgttttaaggcggtgggttgaccacctttgttctccacaagtcaatcagaaatcaaaggctctcctggttctcctctctctgggctgcttttttagcgtggcagagacgcttcacaggtaaaccgagagttcacatgggctgctcaggcctgcccgtgagcagtcacttcatgttctctcgcggttctagcaggtcatggtactcgatgtgtaaagtgaaaggagaagtatacatttcaggtttgtcaaaaaacccaaaggagaatggaactgtccgtattcattacatcttcattcggtctaggagctatgctagtttcctactaatatgctgatcagacttaacaggcacctagtaaaagggaatttaaaagtcttcagagaattggggtccattcagctttgactagagcaactgagaggaggcccagagagcagggggagaggcgacagaaggcatggtgaggtggagacatcccgtctgaaaatctggaagaggaacaaccatcactaattgtggagcatttcatttattcaaaactaagggaggtagattacggaaatatgacaaaagattacttgtcaactctggacaggggtacatgggcacttgtcatatctctgtagatttttgtgtatttaaactatttcacaattttttaaagtattaattttaaaaagcttgtgtttggagatgtgagtattcttccctccttttttcaacaaactagggcttagaaaagtgcttgtatcttaatgcagtatgcaggtttccagggaaaatgtgtaaatgtctttatacccttcgatgctgctgcccaccagtgatgtaaatcacaaagcataactcttgttttgttctgttgagcagcatgagatactttgatagagcagccttatttgtggaagcttgcctcaagtatggagcatttgaagtcactgaggacacagatatcctttgcaaggttgtttgtagtgacgaggaagaaagtgacatgcatgggttttggaatttcccttagttgtgctgcctggacaggaactatattatattgtgaaagatccatgttctgattttctgattcaccaaagccaggaaagagggagaaattagaggacaaagaatcagataagaaggtggctgcaccatgggtgtcagctttgactaggatggagggaggcaggaaggactatagaggacagggcccccaagtcttgtctgaacttaaaaagaagatgaaggaatgatttgggaaacaggtagaaggacctggtactttgaaatagtactttttcaagaccagacattccatggaataaattttatatatttatctagaaaaaatatactggaataactaaaaaagtctcacgatcacctctagtgacaatatgatatgggacaaaatacagcacttaaagagaggtgttgctcaggccagccactataatccacccatcagccagaacattttatttcttctaaatggcacttgagcaacattggtttctttgaaaagaatgaacttgagaatgcaactcccaggaccagaaaagaatgaaactgggccagtgcttgcatggtcctgctgctgctcactgcactttgcttcaaattcttacatttgctctcatttctacatggcaggtacttggttctctctctctttctccctctttctctgtgtgtgtttataatttttttttttttttaacagagaattaaaactaaactaaaaattttttttttcctttttttgaggtaaggtctcactcttctgcccagactggagtgagtggcacgatcatggctcactacagccttgacttcctgggctcaagcagtcctcccacctcatcctccccagtagctgggaccataggtccacaccattgtgcctggcttttttttttttttggtagtaacccgggtctcactatgttgcccaggctggtcttgaactcctagttcaagcagtcctctcaccttggcctcccaaagtgctgagattacaggcatgagccacccagccctgcactgaaagttttttaaaattaaactgaaggctgagcctactcaagatcatgtacctagtcactgggaaggtgactggttcagtgtatgcattttgaggatcaaagcatcagcacagagtacccaataggctgtttaaaaaaataaaaataaataaaaaaaaaccaataggacagggctttctaaaaacccaacaaccagatatagggaacattcagaaataaatatctgcccccaaactgccagcctctcagactttcaaatggaatgaggatatgcaggttaagtttctcctctcttatcattcatcttccaatcttcagttgagtgtaggttatgggaggatgttggttgggtcttctggaaggagaagctttggactcagctggtacgaaaggtaatgatggtacagactgagacatggcctactatggccgggaatcaccctctgcccgcgaaaagtctcctgtgttcatcctgtgctgcccgctgtggacaccaggtcccttccgagcagccagcagagcagacgcgactcacccttcctgcttctgggagcctgtgaagagtctcatcacagccctttttactcttcttttccttaactatggtttacagaaactcatcactgctatatatgcagattatgcccggagtttgaagaacctcggttttaagcagggagcagttctctttgcttcaaaagccggagcagctggcaaagacttattgaatgagcttgagtcccccaaggaagaacccattgaagagtgacagcttaataaatgccagggaatctgacctggaaggcagatgggagggggctggtctggctgtggccaccgtcacagtccaggatgaagaggagtacagggtcctgtgagctgtttgaccactgttctaagactatgtgtgcccaaaagcacataagcatctatgttgagagtaagtttgtatcctgcgttggtctcagaaagaacgtgaatgcttaagattttgaaagtacataatattttatactttgggagagagctttaagagtccctggaaatactttttaatttttttaacttaaaattcaagagactgaatcacttttctcattgattaaatgtaaagattattgagaaacctatagtaaatgaaatttgtgagatgttttctcaaatatatgctgtgcctgtacttatatacagtctttcaagagagatacaaacaaggcagaaacatttaaactagtattaaaggtagtttaccaaagcattttttgttttcttaccttgaaaacacagaaccgttaattccttggtttaagcagttgctaagttttgtaattttaggctcagaggaccataggaggttttaagatttatgtttagtccgataggtgaggtctttgatattttgaattttaactccttttatgatacatcacagtaacctcatttttgaagtctttctttgtactttaatgttctctctgttctaatagttgaagtatgagatgtaactattataaactgttgctgaaaacataaatgtctgtaacttacaaacatgataaataaattaaaaattccatcca

SEQ ID NO: 1295 - DNA, 50228 bp, Homo sapiens
tttcccgcggctgttcgctgttccagtgggtcgtggcggtggcggcagcggcggttaggggatgtaacggtcgcccgcctccggcgtgacgatggcggccgtagggtccggaggctatgcgcggaacgatgcaggggagaagctgccctctgtcatggcgggagttccggcgcggaggggccagtcctccccgccccccgccccaccaatctgcctacggcggcggacgcgactctcgacggcctccgaggagacggtgcagaaccgggtgagaagctgctcgccatgtctaccccagttccaggcttcctaggtttcccctagtcccgtcctgagaactgtggccccgacatcagcccccggccagtcccctcaggttgttccctgccatgcctcgtcccctaacccccgcccctttagccacggcccctcccactttctcctcgctgctttcccggctccaccctcagcgttggagcaattcgggggttcctcgctggttcccacccgtggaaatgcattttgcttctgtaaatcacagcctagtcctgctatattttaacccccgttctatcgcctttagacgtcacgatcatagctcactgcagcctcactgccctggcccccgctgagtcattaaggtcccttcgagggttcggtccagagtgttacctgccccaactcttcctcgcttctaccccgccttctctcaccttctgcgatctctatcctttttcctcaccaaggtgggattcttaatccatattgtcactcaaaactatgagaaagacgtgagaagttatttataaaatctctgcagtgctgcctggggaggagggcgtacagaacagttccctaaatcctgagacagaaaaatggaaagaaatgatttcacagtaggtagaaggaattccattagcacagcggcaattaaaaaaattgttttccagctgtgtaggcacaaaatctgtttttataaaatggagatgataagaaccatactactggtagggcgcggtagctcacgtctgtaatcccagcactttgggaggccaaggtgggctgttcacctgagatcagttcaagaccagcctggccaacatggtgaaacccgtctctacaaaaagtagaaaaattagcccggcatgctagcgcgcgcctgtaatcccagctactcaggaggctgaggcgggagaaatcgcttgaacctgggaggcggaggttgcagtgagctgaggtcatgccactgcactccagcctgggcgacagagtgagactctgtctcaaaataaataaataaataaattatactattgcattggagggaaatgaaattttaattgtgatcttcttggcacggagtccagataaagggaggatacctggtagctgctggtggagcttgttcctgccccatgactttctcctgcactgtgattataccgcccactcctggctacagggctctggctgtacctcccatgtgctctctgtcaccaaggttcagtcacactggcctgcttttggttttcctgaggctccatattcttttctgcctcctggcctttgtgattggtgagtcctcagcctgggctttttgctgcaatctgcctgtctggctccttcccatccttcaagtctcagcctgaatgtcgctatcttgaaaggccttctcgaaccccattctaaagcaaacagccaccttcatctgtcacccagcaccctatacttcatagcctttatcttatatgttcctgaaagtgccctttgagctattaaactacatataacaatagcaaattcagagaggcgttatagcaaagtggctaagagcacagactgctgctgatggtatggttggacccaggcagcctgagcttaaactttagtcctgttcttcctggcaggttatgaacttcgctttttcttttctttttttttttttttgagatggggtcttactctgtcatccaggctgtagtgcactgggttgatctcggctcactgcagtctcagcctccctgggctcaggtgatcttcctgcctcaagcctcctgagtagctgggactgcaggcgcatgccaccatacctgactaatttttttgtgttttctggtagagacagggtctcgccgtgttggccaggctggtcttgaattactgagctcaagcgatctgcctgcctcggcctcccaaagtgctaggattacaggcgtgagctactgtgccccgccaagttatgaacttatctgtgcctcagttttcttatctgtaaaatgagaataatgatgtagaaatctctcatagggtatttgtgaggattcaatgaggttacatatcctaggcacttagaacaacactggcatatggcaagtactctattcatgttagctaatactgatattatgactgtgtatttggggtaatatttatttattttttttgtttggcagcacagagttgatctgtcttgcaaagacctagtctaaaagtgaccattcataccagggcccagtaatgctgatcgacagataagacaacatgagtgccatggcttggttgtttgtgttggaatcctggcactaccccttcctggatgggtaacccctcttggcctctgtttcctcaactgttttgttcctttttttttttgagacagagtctcactctgtcgcccaggatggagtgcaatggtgccatctcagctcactgcaacctccgcctcctgggttcaagcgattttactgcctcagcctcctgagtgcctgggattataggcatgggccaccacacctgactaatttttttgtatttttagtagagacagggtttcgccatcttggccaggatggtctcaaactcttgactgagccaccacacccagccttgtttaaattttaaatattactgttcatgtggttttttactcgttgaaaccgctcaaatttctggactgtgaatctgatgtggggaaactgtctacctttggtcactactgtgtctctcctgtacagcccaaagtgctagctttggagccagactgcctgggtttgtatatcaacattgccacttgcagatgtaggatcttgggcctcagacttcttacctgtaaaacaggggtgataatagagccttcttcgtggcttgttgggaggattcaagtcttttatacatataaaagtactaagaggccgggcacagtggctcatgcctgtaatcctagcactttgggaggccgaggcgggtgtatcacctgaggtcaggagttcgaggccagcctggccaacatggtgaaaccccatctctactaaaaatacaaaaattagccggacatggtggcatgtgcctgtaatcctagctactcaggaggctgaggcaggagaattgcttgaacctggaaggcggaggttgcaatgagccaagatctcaccactgactccagcctgggtgacagagcaagactccatctcaaaaacaaacaaaaaaaagtacttagaaacttattcacaggtcaccttctcaccgcggcattcgcccccttcccctgtgctcctaacctccttatctgctttcttctctcttgcacccatcattacttggcatctatttcacatatttgttctgctccttttctatgttctacatacccatcaccagtagaatgtgagccccccgagggcagggatttgtctcttcctcaccactctgtgcttttcacctagcgttgtatttgtcaaaggaatgttgagagaacaagtgttagctgctggtggatggcgtggccacagaagctcagtgtgggtgttgaatgtagcaggacctgaatgggtggccaaggcggctgcaccatgtggtgctggctagggtgggtgcctctgacttgggctttttctttgcaggtgtcactcgagaaggtgcttggcatcacagcccagaacagcagtggcctaacctgtgaccccggcacaggccatgtggcctacctggcagggtaagcagataagggcctcgacgtctaatcattgctagggaatttggagcttggaacctgaagccatccgtaaatcgctctgagcctcatatttttcacctgtagaatgtggagaatggggcctgcctctgagagctgtggagaggattccatagccccctctctgtctagaacagttcctggcatgtagtgagtgcaatgaaagcctttattatgactacaggggggaggtgacagcgattctgggaaagacaggtgattaaagtccacgctgtggtgtcaggtaacctggatttgtgtcccagctctgccatgtatgctgctctctgagcctcttcctctgcctctgtaaaacagagctggtgaccccctctgcttgcatagttgagaagactgaagaagatgctacagctgttcattccataaatactcatgtagcctggcactgtgctaaggacgtcccctctctgggtttgtttccttatctataaatgggcctaaatagtcgtgacctgacctggcagttgtgaggatttaaaacaattacatccctctttctctctttttgttttgttttgcttttttgagacagagtctggctgtgttgcccaggctagaatgcaatagtgtgaataacagctcactacagccccaacctcctgtgctcaagcgatcctcccatcttcacctcccatgtagctgggactacaggcacatgccaccacagccagctaattttttttagtggagatgagatctcactctgtcgcccaggctggtctaaaactcctgagctcaagtgatccctcctgccccatactcccaaagtgctgggattatagccagcttaaggtcttaattagcctagggcctgacagacattacctcagaggaagtgttggtttctatttaagaacatagcaatgttaaagtgccctagaattctcagcgtaaacacctggaggagggggaggaggaggagaccagagagaaccgagggagcttgtttatttgtgggcttttctggtgggaatagaatcatcccaggaccccaacactccccacagttgaggcacattttcctctttcttcccagctgtgtggtggtgattttggaccccaaggagaacaagcagcagcacatctttaacaccgccaggtaggctgaggcctgggcccggggcaggggtggaaccaggggcttggcacgcctcccctcccctacacagcctggagatactcatgggtaggtgctcactcattcacttacatgttggctcagcagcattcgcctgtgctgggtgctgttccgtgtgctggggacacagcagtgaccagaggagacgagaatctctgctggctagagcgagacagactgtaaactagtcagcaaattacgggctgatcatgatcagtgctatggaggaaatgatggaggatgtcttcgggcaggtttgtgggcagagaataggaggaaagccttatcagaaggctcagggaacgctgccttgactctgagacctgaaggaagcgagagggtgacccataagaagctgtagggagagcgcttcaggcagggggcacaggaagggcaaaggccctgcagtggttaagaatctccggcgctttagaagcagccagggatctgggtgcctggagaaaggagcagggaagatgaggctggaccaggcagaagccacatcccgtaggccttgcagccttgtagagggtctgcatagcatgctgagtgcagagagcagccacaggagggcaccacaggccaggaatgtgcttttcacccccagccctccagcagctctattccctgctttgcttttctccacaaaatttgctcccatctctgatatgctgtccagtttcctcattgatggtattcactgtgggtctccctcagtgtgagcactcttgagagcagggactttctctgagttcatttctgtgtccctagcaccaaagagcagtatctggcatattgatggctattttctaagagaaagacttaacatgatttgggttttagaaagatcccttcagctataagtttactggggaaggacccgctcctctgccttggggctaactgatcactgctaccctggggatgtggtcccaatagggctgtgacctttggaaggcacaccatgtccctccttggcatagctcaggctcagctcctttggcccagttctccaggtggatggataaggagtgggttttctcctgcccttatggtccctaaggtacggtccttaagctacggcaggttcttgttatctgacagaagtgcattccctcttgaaagtggctttttggaccttttgctcctaactgtgggttctgttactggtgataagggcagagctgggttccattcctggctcaagcgtctattcactgtggaatctcaggtgagacacttctttcagagccttggtctcctctgaaaataaaatagctgcctccaactgggagagcattcataaggcagcagctacaaaccagagtcacacacacttgcccaatatagtatgttttaaaggttggataagtggacaacatttcaagttttttaacacaaaaatccaaatgtcccttttgtttggagaagtgagaaattctctggcctctggggcccaaattcccctgtggcagtgaggggctgagcttagtgaaatttgtcaggcccgttgtggccagttcctcacacctgtgttgcctccctaatccctgtaggcagtggagtgggtggcctggatctatagtagatggtatgcaggtgtccgcccttggccaccagtgggtgtgcattaggaggtggtgtggccagtgtggggattttcactccaactgcatatcagaatcacctggtccctgtgcctcaccgcccccccaccgccacgcaagagaaagccaaatcagttgatctgggatgaaacttgggcattggcaattttgagactttttatattgaaataatttcagacttagaatagtacaaagagctcctatatacctatgtacctttcacatatttcacaaatgttagcttttttttcttttttttttttggacacagagtcttgctctgtcacccaggctgctggagtgcagtggcacagtctcagctcactgcaacttccacctcccgggttcaggtgattctcatgcctcagccccccaggtggctgggaccacaggcatgtgccaccatgcccagctagttttttgtgttttagtggagacggggttcatcatgttgcccaaggtggtcttgaactcctgagcttagacagtctgcctgcctcagcctcccaaagtgctaggattacaggtgcgagccactgcacttggccaaatgttagcattttaccacatttgctttatcattttttgtctatatacatattaatttgttctgaactatttgagaatcagttgtagacatgatgcccctatatctctaaatacttcacgccaggcatggtgattcacgcctgtaatctcagcactgtgggaggccttggaggcaggaagatcatttgaggtcaggagtttgagaccagcctggggaacatggcaaaaccctgtctctactaaaaatacaaaaattagccaggcctggtggcaggcgcctgtaatcccagctactcgggaggctgaggcaggagaatcgcttgaacccgggaggcagaggttgcagtgagccaagatcatgccactgcactccagcctgggtgacagagcaagagtccgtctcaaaaaaaaaaaaaaaaaaaaaaaaaacttaatcaaataaatacttcagtgtgtatttcctacaaaaaaaaatgacaatctttttaaactgtaatacatccagcaaaatcaggaaatgaaaattgatatatcactctcatccactccccagagggcaccattcaggagtcagcctttgtcccatgaatgtcctttatggccaaaggattctgtctagaatcacacattgcattgagttgtcccctcagtctctttcaggctgacgtggctcctctgtcttttcttgactttcaggatcttgacatttttttttttctttttgagatggagtctctgtcgtcaggctggagtgcagtggtgggatcctggctcactgcaacctgactccccagttcaagtgattctcctgcctcagcctcccgagtagctaggattacaggcatatgccaccatgtccggctaatttttgtatttttagtagagctggggtttccccatgttggccaggatggtctcgatctcctgaccttgtgatccgcccgccttggcctcccaaagtgctgggattacaggcgtgagccacagcacctggccacttttttttgtttttttgttttttgagacgaagtctcacactgtcgcccgggctggagtgcagtggggcgatcttggctcgctgcagcctccacctcctgggttcaagcgattctctgcctcagcctcctgagtagctgggactacaggcatgcgccaccgtgcctggctaatttttgtatttttttttagtagagacggggtttcactatgttggtcaggctggtcacgaactcctgacctcgtgatccacccgcctcggcctcccaaagtgctgggattacaggcttgagccactgcacccggccaatcttgacactgaggattgtagacgaggtattttgtagagtgtcccagcatttgggtttgtccaatgcctcctcacgggcagactcaggttctgcatctttggcaggaacagaccagaaggggtgctgtgttcttcctggtgcctcctctcaggaggtctcctatgactggtggtgttcactgggagcacttggccaaggtgttgcctgccagattcctccacttcaaagcctctcttttcacctttgtgattagcaggtatcctggggacatctttcctgagacagtgcaaatattatcttgttcctcaccaaactttcactcaactaatcttaggctttgacacttttcagatgctccccagggaaatctaatgtacagccaggactgagaactactggcttagaggtcagggctctgccctgtctggttaggtaactgcaggcaggggacttccttgtgttgcagtcacctcatctgccaagttggttcatgagagccctgactccatgaagcatgcttgaggaatcagtgcactgatggccagacagcatttgccagagggccaggcacaaggtcagggcatgcgacaggttagaggtggctacgggcaacagaaacccctccacagcatggcttaaaacccaagagcatgctcttcctgcatgtcataagtccagaggtgggcagcccaggggctgtgtctctgaacgccacattttttttttctgtctctctttttgagacagagtctcactctgttgcccaggctggagtgcagtggcgcgatcttggctcactgcaagctccgcctcctgggttcacaccattctcctgcctcagcctcccaagtagctgggactacaggcgcccaccaccacgcctggctaattttgtttttgtatttttagtatagacagggtttcaccgtgttagccagggtggtctcgatctcctgaccttgtgatctgcccacctcagcctcccaaagtgctgggattacaggcgtgagccaccgcgcccagccccacttctttttttctctagacggagtcttggtctgttgcccaggctggagtgcagcagcacgatcttggcttgctgcaacctctgcctcccgggttcaagcaattctcctgcctcagcctcccgagtagccgggattacaggctcctgccaccacacctggctattttttgtatttttagtagaggtggggttttgtcgtgttggccaggctgttcgcgaattcctgacctcaagtgaaccacccacccctctgcctcccaaagtgctgggattacaggcgtgaggcaccgcacccggcccccattccttctctcctgttccaccccatttattgtgaggcttctggtcttgaagtcacttcatggcccaagatggagttctggctgtcgtgtgcgtatttcaggaggggaactggtaggaagcagggcaaagggttccctttgacgagtatttcaggaagtcccacacagcatgtcagtttacttctccttggccagactaagtcatgtagctgtacctgcatagttgcaagcataaaactggggttatgtcagtaaggaaagagaggcgagtggatatccaggaggcagcttgccctgtttgttgcagtaaggagccacgggaagcctgggaagcaggttgacttgatgatgaatattccatgaagttgccaaagtctcacttagcgacatttacttagttatctacacaccaatttaccatctcacgtagggagacaattattagattgttaaggaacaaaggtaaaaataagattaaaagagagaagggagtagaaggaaaccatacaatctgggaacagtgaatcttgctgccagaaacctacgagctagcctgttcattcagtgcttgtgcaggctagctaggagtatcagaaacattttggctctttatggattttccagaacaccttgagtatttagcagtggagcacaggctgcaggctaccttgatgtgatgcctgccaggatcctcccatcagcaccacccgtttagttaggccaggcctgtaccatttcctgcatctctatttctcagtgttacagggtggatagggtcttaggatacccactgcggcagagggagaagaaagcagggtccgcatacagtgtctactccatttgggtttggtgtctcagggcggaaggggcctttgcatttacccccatttctctgtgtgctttgctgggcacaccagcggcactggctctgtgggagctgcttgagctcacctctgctggcctcttccgaggcttgggaggcagaagagggcagagtcctatcagagtcgccaggatggggtctggctggccaccctcagcggaaccagtgatcagctcttttctttatccccaggaagtctctcagtgctctggccttctcccctgatgggaagtacatagtgacaggggaggtgagtcgtgatcgtgactgagtgggagtcgggggctggggggtcttggaagccattccttctgctcccggcaggcctgggagtccctggaatagctccttcctgggccagaacagccctgtagcagatgggggaggtggcttttgggcacatcctgtggcaatgccatcttcggccttgacaaccctctagccctgcccagtacagagcccagcagcagtaacgaccccaccttccctagaatgggcataggcctgctgtgcgcatctgggatgtggaggagaagaatcaggtggcggagatgctaggccacaagtatggtgtggcgtgtgtggccttctcacccaatatgaagcacatcgtgtccatgggctaccaacatgacatggtgctcaacgtctgggactggaaggtaagagccgaccagcaggcctgtggcaggcagccagctgccacagcatcctatgtcttgggcacagggagagctacatgagaggacgcagtaaagtgctcactcacccaacagataacagctattgagcacctgtgacatgctgatcccttattgtagggcacaaggcaggctcccagctagaagcattatacatatttttatattgaccagctgtgaccttaggcaagtgacttaacatctctgtgagtctgtttcctcctctgttagatggatatagtagtacttatcttgttgagttgtgagactttaatgagttgataagcactggaaggctgggctttggaacagctgtggagctggcagaagtgggtaccaagtcctggctctgcccataacccactatgtgaccttgagcacatgacatctccccctctgagcctggtagggttggggagaagcgcctccctcgtggggcttttgagggattgaggaaatttcatgggttatcctgtgaagggctcagggcagggcccagagcaggagccccatctgtgacagccataggttgtgttgtccttacatcccagccgtgactgtccccaataccatgtgtgggctgcagagcttagacccttggagagagctctggaacatactgtcccatggggaccattccaagcctctgtcccttcctctgtcggtgaggaatgagcagggtgccccacataggtttccccatacagcagctccctggagggtcccaggaagacagacttggagtggggacgagcagggagttccagcctgagggcaaaggcacaaacagtccagtggaatgagtgctggcatgagcttctctgcacttattcttccagaaagacatcgtagtggcctccaacaaggtatcttgtagagtcattgccctctccttctcagaggacagcagctattttgtcactgttgggaaccgccatgtgaggttctggttcttggaagtctccactgagacaaaggtgagtttctgtccctgcccctttagccaggccctgagggagtcaccatcggtggcagcatggtctcctgtttctccctgagatttgagggcagcggtctcgggccatttggcctctcaggggcccagctgctgcttctgggcctactctcagggtgctgatgcacaggccctgccaggaaccccctgaccctgggaccagctctcattcttggactgctgctgtccagcccctctgtccagagtggcagggttctagtgttttcttcccttctccatttggaagagcttcttagagttctcctgttttgttgtgtcctatcatctggtcatgcagggcccagctgtgtggacaagtatctcactacgccctctgtgtctccaggtgacgagcacagtgccccttgtagggcgctcgggcatcctgggcgagctgcacaacaacatcttctgtggtgtggcctgcggtcggggccggatggcgggcagtaccttctgtgtgtcctactcgggcctcctctgccagttcaatgagaagagggtgctggagaagtggatcaacctgaaggtaccacctccctctctgccatcagctggacagactctttctcgtgatatgtgtctgcaggggtgctcatcagcattgaccacacaggttctgcttatgtgactagtggtgaatgacgcccactctctgagcttaaggttccacatctgtaaaatgggagtactgctgccctccccgcagagctgataaggaagtcacgtgagataacataggcaaggcagtgagcacggtgcttggtaccctgaaatgggctcaaggtgacagttgttttcccatgactatttgatctacttcacatttcttttctcctttgagcactctggctggtagaggattgcatttttttttaattaatttatttttttttattgatcattcttgggtgtttctcccagagggggtttggcagggtcttaggacaatagtggagggaaggtcagcagacaaacaagtgaacaaaggtctctggttttcctaggcagaggaccctgcgggcttccgcagtgtttgtgtccctgggtacttgagattagggagtggtgatgactcttaacgagtctgctgccttcaagcatctgtttaacaaagcacatcttgcaccgcccttaatgcatttaaccctgaatggacacagcacatgtttcagagagcacagggttgggggtaaggtcatagatcaacagcatcccaaggcagaagaatttttcttagtacagaacaaaatgaagtctcccatgtctacttctttctacacagacacagcaacaatctgatttctctatcttttccccacctttcccccttttctattccacaaaaccgccatcgtcatcatggcccgttctcaatgagctgttgggtacacctcccagacggggtggtggccgggcagaggggctcctcacttcccagaaggggcggccgggcagaggcaccccccatctcccggacggggcggcggcagggcggaggcggacccccacctccctccctgacgggccggctggctgggcaggggctgacccccacctccctcctggacggggcggctggccgggcgggggctaaccccccacctccctcccggacggagcggctggccgggcgggggctgactccccccacctccctcccggactgggcggctggccgggcgggggctgacccccacctccctccgggacggggcggctgctgggcggagacgctcctcacttcccagacggggcagctgccgggcggaggggctcctcacttctcagacggggcggctgccgggcggaggggctcctcacttctcagatgggacggccaggcagagacgctcctcacctcccagacagggtcgcggccgggtagaggcgctcctcacatcccagacggggtggcggggcagaggcgctccccgcatctcagacgatgggcggccgggcagagacgctcctcactttctagacggaatggcagccgggaagaggcgctcctcacttcccagattgggcagccgagcagaggggctcctcacatcccagacgatgggcggccaggcagagacgctcctcacttcccagacggggtggcggccgggcagaggctgcaatctcggcactttgggaggccaaggcaggcggctgggaggtggaggttgtagctagccaagatcgcgccactgcactccagcctgggaaacattgagcactgagtaaacgagactccgtctgcaatcccggcacctcgggaggccgaggctggcggaccactcgcggttaggagctggagaccagcccggccaacacagcgaaaccctgtgtttggtggagaccaaaaaaatacgaaaaccagtcaggcgtggcggcgcgcgcctgcaatcgcaggcactcggcaggctgaggcaggagaatcaggcagggaggttgcagtgagccgagagggcagcagtacagtccagctttggctcggcatcagagggagaccgtggaaagagagggagagggagaccgtggggagagggagagggagaccgtggggagaaggagagggagaggaggattgcattttttaaaaattggaggtaccattgatttaataacttttcagtcaaaaaagactacacaaaatacataaacttttatttatttttatttatttttactttttttttttttttgagatggcgtctcacttgttgccaaggctggagtgcagtggcgcaatctcagctcactacaagttccacctcccaggttcaagcaattctcctgcctcagcctcccaagtagctgggattacaggtgcctgccaccacgcacagctaatttttgtatttttagtagagacagggttttaccatgttggcctggctggtctcgaactcctgacctttagtgatccatccgtcttggcctcccactgcgcccggccataaacttttaaactaaagcatgatctatcgatacattgcagagcttctttcctttagtatctgaaggtttgagtcaaagctgttttcccatctggaatcagttgcccatttggctatccgcccgagcgttgtggtttcctctcctgttcctggcctgcctttgtgactcactctggagatcaccttcgaggttaatggcttgtggaagagttccaagttttatctctgtcctagttggttaaacatcattttctctttttcaagcaagtgaaaagctttcaatagatagatgtttatttcctaagcactaaatgactcataaattaagtccctgtagatttggaaaaactccttaaactgtatctagaggtctagcacttcctagtaggatagacagtcctttctagatactgtaacttttttctgtaccgctttggagtacagtctttatgaagttgtttgtaagcaaaagggaataaaatttaagcctaaaggctgggcgcgatggctcacatctgtaatcccaatgctttgggaggccaaggcaggtggatcacctgaggtcaggagttcaagaccagcctgaccaacatggtgaaaccccatctcaaaatacaaaaaattatctgggtgtggtggcggccgcctataatcccagctactctggaggccgaggcaggagaatcacttgaacccaggaggtggaagttgcagtgagccgagattgtgccattgcactccagcctgggcgcaacaaaaaactctatctcaaaaaaaaaaaaaaatttaagcctaaaattcaaccctgttactacaagtgacttacctgaagttgcagtctgctgaacaggtattttccatacacagctacgtttctctgtagacagcagtgacaattctgtttccgttcatgcctctgcctacctgctggcacatgtctttcaatagcagcagtatgctatatcctgatttcacaaatcttaaaatatgctaaaatgggtgtcttagacccaaggaactgtaagtcttctctggaggcctaaggctgctctgtcagtccccatatccccgggccaggccacgtgaagcaccaaatccactggggtcccttttgcccctacaggtctccctgtcttcctgcctctgtgtcagccaggagctcatcttctgtggctgcacagatgggatagtccgcatcttccaggcccatagcctgcactacctcgccaacctgcccaagccacactaccttggggtagacgtggcacagggcctggagcccaggtactgccctgtggggagagggaatgggaggggcccacccagagtctgtccactggcattcatccatgcttccagatccatctatctgtctgtccatcccacaaatacccatcatgactctcagccctgggcattacaaagcagaaaagtccttgccttccgaggcaagcctcacagtgagaagtgaggctgggtagggggaagaaacagtgagaaaacaaaggaataatatcatttcagatagcggtcagcatggtgaagaacagtgcagagcaggtgtgaatgtggcggagtgtttccatccacatggctgacccctactaagtggctgctaagtgccagccctgggctggaagcaggacatgcctattataatgaagcagcaaaatctctgcctctctgcagtatagcaagggggctcgatgataagcaagtacacgaaaaagataatttcaataggcatgagtgctttggggaacacagcagggactcgggaaggagagtgactggggtgggctgtgctgattgggtgcctggtgagaaggagctgctgtgtggagagctgggtcccagcagttgaggtgacagcacactgggcttgttacgttgcaggaatagtaagggactgtgtggccagagcccagtgtgtccggggaggatggtgggagatgaggccagtgtggggcgcctgtagtctatcctcaggtcagtgggcagttgctggggtttcgggcgttggggtaaatgaccaggccttacatgttaggtccctcagctgctgtgtcgagagtggatagaagcactaggctgtggctttcttctcctttgttgcaagtctgttttatggaattgggggctacctaaccagggggtgccaggtgcctagggctgcctctttgtggatttctggatgctagctcctgggtgccttttccacgacagggcctgaacaggggaactgggtgtcatgaaggaaaggagggggcgagcaacccacaggcagtgttgtgttgtagtagtcgggctcacagctctgctgtcttctgttgtgctctgtgaccttgggaaggtgactatacctccctgtgcttccgttttctcatgtgtaaaatacagtacctagctcttattgtggttgtgagaatttattgcaggtaaaactctcggcctggcacagtgtaaatgctcagtaaactgtagccttcatagggagaccccaggccaagggacagctccccagcctccttaggacacagaggctttttgatcatgcgttggtgaggccaagaagaggtgggacctgagatacatgcctattatctttctatgctcagagagagagcaggagcttgggttgggtgaaatgatgggcgataaatgttcataggaatcaaaaactcaattgctctcggggccaggcaaaaatttccggtttgtagcctctatatgaaaagcaaagcagaggaagagggaagagggaaaagtagaattggagcaggagagatggatggccacaaataccatgagggatggcattgccggggaggcatctccactgtcactagaggtggctgtcactactcagtgacattgatggtgattgattacccatgtggccttgttagcttcctcttccacaggaaggcggaagcagtctacccagatacagtggcactgaccttcgaccccatccaccagtggctgtcctgcgtgtataaggaccacagcatctacatctgggatgtcaaggacatcaacagagtgggcaaggtgtggtcagagctcttccacagctcctacgtttggaacgtggaggtgagccccccccccacccccttgcccctgcttggcctctgcacagttccccacagtttgggaacccattcagtaattccttcagaagatactcattgactccctcctatgcatcaggccctgtcctaggtgctgaggacacagacacaaaatccctgcccttaacaagctcacatttggatgggaaaggaaacctggaaacatcatcagtgaataacacgccaagcagcagtaaccctctgaagaaaaatgaggcggggaaggggaaggggaatgcaggtggtattctagagaggagaggggtcagggaaggcctccctgaggacatatgagcagagacctgcaggaaatcggggagtgagacctgcaactgctggggagaaccacaagcacagaggccctgcggcaggaacatgcactccacagagagctttgctgtggaggtcgtttatgtatttcactgctttttttaaaaaggagttgaagacggggcatggtggctcacacctgtaatcccaacactttgggaatctgaggcgggaggatcacttgagtccaggagtttgagaccagcctgggcaacacaagaccctgtctctacaaataatttttaaaaattagccaggcatggtagcacacacgtgtggtcccagctactcaagaggtggaggcaggaagatcacttgagcctgggatgtcaaggctgcagtgagctgtgattgtgccaccacactcccacactccagcctgggtaacagtgagaccatgtctaggaaaaaaaaaaaagttttgaagtttttattttctgagaatgaatttgtgggtttttaaaaattctctaaagttaaccaggcacagtggctcatgcctgtagtcccagcactttgggaaatcgaagtgggcagattgcttgagtccaggggttcgagatcagcctgggcaacatgaggaaaccccggctttacaaaaaatacataaaaattagccaggcgcgcctatagttgcagctactcggcaggggctgcggcaggggggctgaaaatttcttactgggaatgtttgtcctagagaaattgggttttcagtggccagattcaggatcgtgagaaagaactttgtccttttgaataggcagcattcagcctatgactctggttgaatctgtctgccttcatggggctgacgtttttgttgacagcactttttttccactcaaagaatgttttttaataacttttaaaattcctgtatgaaatttttaaaaatttgggataataggtgaaatattacagataaggctacagtccacattgatgacttccctgcccccagttctgctctctctcgccctcaccattatcaattttattatgggtgtcttcagttgattttctttgcatctccttattgtttatgtatatagctgttcaacaacagtatctgtggatagatcttttcatcagttctagaaaattctcagccaatactgcttctaccctcttctctctctttttttttttcagacggagtttcactcttgttgcccaggctggagtgcaatggtgtgatctcggttcactgcatcctccgcctcccgggttcaagtgattctcctgcctcggcctctcaggtagctgggattccaggcatgcgccaccacgccttgctaattttgtatttttagtagagacggggtttctccttgttggtcaggctggtcttgaactcccgacctcaggtgatccgcctgccttggcctcccaaagtgctgggattacaggcatgagccaccatgcccggcctattcgctctcttctaaggttctatctaactctaaggttctatctgtattcttcatgtttctgaaaataaaaatcacacaaaagatatgtagagtttatcaattattgttagcagctttttttcccccccaagacggaatctggctgtgttgcccagtctggagtgcaatggcacaatctaagctcactgcaacctccagctcctgcgttcaaacaattctcctgcctcagcctcccgagtagctgggattacaggcagccgccaccacgcctggctaatttttgtgtttttagtagagatggggtttaaccatgttggccaggctagtttcaaacccctgacctcaagtgatctgcctgcctcggcctcccaaagtgctgggattacaggcgtgagccactgtgcctggcctgttagcagctattgatgctcagttcctggacccttttatttattgagggttgcaatatggtgatattctaaatctataatttatttttattagttggactacttacgtgaagagatatttgctctcatctgccatttggtcacccagtgctatacttcatataggaaaggcaggagaaatacttgattctttccctttatttaccagttttcaagataatgaattggttccctatcctctaaaggtaactagttttatttaatatcattataaactcatatatatttaaatatatcagatatgttttaatctattgtaattattaactttattggagctcatatcatcccatctttggccagtgagagcctcttaacattggctcctgagccctttggacatgaccctagtatttcttgatagccaccttgctgcctgggatgccaatatgttccagtctcatcttgtacatttcctgtcacacatcaggaatcaaccatttctcgaaaagaccatgtttttttttttgggctgggtgcagtggctcatgcctgtaatcccagcactttggaaggctggggcaggggaattacccgagcccacgagtttgagaccaacctggccaacatggtgaaaccttgtctccactaaaatacaaaaaattagccgggcatggtggcaggcgcctgtagtcctagctacttgggaggctgaggcatgagaattgcttgaacccgggaggcagaggttgcagtaagccaagatcaagccactgcactccaatctgggtgacagagggagatcctatctcaaaaaaaaaaaaaagaaaaaagagaaagagaaggccagggtttttttttagtacaaattgggacttcagaatcacaggttgggtgttagggatgctcatcgctattgggtcgttcttccagaagcctagttcttaaggacacaggggatggtggaattagaatatccccagtaactcatttgctttttcccacattatacatgcaacagtctgagaatggacaacttttcaattctgaagatagttaaaacaattgtaatgcatatgttctctctgttctctccaatttttaaaatagttatactatatttacaggatctgaatatgtagccattatatactatagtgtctcccttttgacccctgtttattttggaatggggaattatatatgtgtgtatatatgtatgtgtgtgtgtgtatatatatatataaaatgataaaatatacatgacatcaagttcaccatttcaactattttaaattgtaccatttggtggcatttagtacacttacagtgtcatgcagccatcattactctctagtttcagaacattttcatcacccacccaccccaaaaaatcctgtatctgttaagcagtcctccccattccccactccccccatccatggaaatgactaatctgcttctgtctttatggatttgcctgttctgaatcttttcttttctctccttctttccttccttccttccttcctttttttttttttttttttgagatggagtctcactctgtcgcccaggctggagtgatgcagtggcacgatctcggctcactgcaagctccgcctcccgggttcacgccattcttcttcctcagcgtcctgagcagctgagactacaggcacacgccaccacacccagctaattttttgtatttttagtagagacgaggtttcaccatgttagccaggatggtctcgatctcctgacctcgtgatccgcccacctcagcctcccaaagtggtgggattacaggcatgagccaccatgccaggctgtttcctttcttttcctctttctttcttttttttttggatggagtctcgctttgtcacccagactggaatacagaggcacaatctcggctcactgcaacctccacctcccgagttaagctattcccatgcttcagtctctagagtagctgggattacaggcacatgccaccatgcctgatgaattttttgtattttagtagagacagggtttcaccatgttgcccaggctggtttcaaactcctgagctcaggtgatctgcccgcctcagcctcccaaagtgctaggattacaggcgtgagccaccatgcctgacctgaatattccttataagtgaaatcatagactatgtgggcttttgtgcctggctttcacttagcataatgttttcaagatttatccatgttgtagcatgtgtcagcacttcatgcctttttatggtggaataatatttcattgtacggatagaacacattttgttctctgttatcagttgacggccacttgggtttttttctaccttatggctgttgcgaataccactgctatgaacatgtaagtacaagtttttttgtttttttttttttgaaacggagtctcactctgtcgcccaggctggggtgcagtggtatgatctccgctcactgcaacctcaggctcccaggttcaagcgattcttctgcctcagactcctgagtagctgggattacaggcacgcaccaccatgcctggctaatttttgtttttttagtggagacacggtttcgccgtgttggccaggttggtctcaaactcctcgcctcaagtgatttgcccacctcggcctcccaaagtgcagggattacaggcgtgagccactgtgcctgacgtagttctttctttcagttacatcactttgtttctgagtttttgtaggttgtttttcataccttggatcattttttaaatatcttttaccttcttttgaaacagtaggcccagcgtggtggctcacgtcggtaatcccaacactttgggaggccgaggcaggtggatcacctgaggtcaggagtttgagaccagcctggccaacatggcaaaaccctgtctctgctaaaaatacaaaaaattagctggccgtggtggcgggcgcctgtaatcccagctacttggggggctgaggcaggagaattgcttgaacccgggaggcagaggttgcagtgagccaagatcgtgccattgcactccagcctgggcgacagggcgagactctgtcaaaaaaaaaaaaaaaaacaaagtaagttatagtttttatctttttttgtgaaaatatgtttctgctgtgcttttttttttttttcttttttaagagtaactattggatttgaccttggtcctttcctgttgttcatttttatgtgataccagtttttctgaaattttagaagttggtgtgcttcaggacagattttccaactacacaagaagaactctgtcttttcttttttttgtgggggtggggtggcatgttttgttttgtttttgaaaaggagtctcactgttacctaggctggagtgcagtggcatgatcacagctcactgaagcctcaacctcataggcacaagcagttctcctgcctcagcctcccgagtagctgggaccacaggcatgcactaccatgcccagctaattttttatttttggtagagatgggatctcattatactgcccaggcttgtttcaaacttgggctcaagcagtcctcctgcctcagcctcccaaagtgctgggattgcaggcttctgttatttttatactgtgttaaaatatggcagcctgctttctgatacttcctttttgtggtcctctttatctgttatgtctcttctttcgtctcaatctcctctttactttatttcttctgtccctgttgtgattggtcaatttcatttctactcttagcagtttctcttcagtgtggagctttgtcctggaaggacaaagttcacaggatcttctccagtccctttaggccttaccccttgcactcaactgctgttggggtggatgaaaccctcctactttcagctgctgttcagtttggcccagtgtgctttccaatgaacacctcttggctactttggaattatcctgttgctgggtctgtcagatgccttattacttctctgtctcccacatgcatgctgatgatatgtaggtcttgtgattggtggtggtttgtcccactcacttgtattttggggtttatgggagtattttgtcactgagttttgctataaatgttgtctgtaggtttgggttttgctatctggttgatgtttttcttatgtcgagattttgggagattaaaaaaattaatgccgctactatcatcttcccagttctcaatcttccgtattttgaaatctctttatatggtggctctttgtccttctcagcttcattctaaatatctttagttttgtctttcagttcacttaattttctcctcagttatatctaatctttggtttttaatgtttttatttttttattattttttttttgagacggagtctccctctgccgcccaggctggagtgcagtggcgtgatctcggctcactgcaagctccgcctcccaggttcacgccattctcctgcctcagcctcctgagtagctgggactacaggtgcctgccaccacgcccggctaattttttgtattttttttttttagtagagacggggtttcaccgtgttagtcaagatggtctcgatctcctgacctcgtgatcctcccgcctcggcctcccgaagtgctgggattacaggcgggagccaccatgcccggcctattttttatttttttatttttatttttttgagatggagtttcgctcttgttacccagactggagtgcaatggcgcgatcttggctcactgcaacctccgcctcccaggttcaagcaattctgctgcctcagcctcccaggttcaagcaattctgctgcctcagcctcccgagtagctgggattacaggtgtgcaccaccacgcccagctaattgtgtatttttagtagagacggggtttctccatgttgaggctggtctcaaactcctgacctcaggtgatccgcccacctcagcctcccaaagtgctgagattacaggcatgagccaccgcgcccggccaatatgtttttattattcatttctagaagctgttctgttttggtctttttcagccctgcttggttaatctttataatttctggttggctgcacacttttaatcttgtcaaaattatcttttagttcttcaaacatattgaatgtagttattttatattctgtctgataattccaatttgggtttttttattttgtttttggtttgtctgtctgtttgttttgagacacagtctcatatgttggccagagtagacttgaactgctggtctctagcagtcctcctgcctcagcctcccaagtagctgggactacaggcatgcgccacctcccctgatttaataattccagtatttaaagtcttgctagactctgttgcttctgctgcttcttgctgatggtacctcgttttcttttgtgcttagtcatgtttgattgagttccacatttcccttggaagtttatttgagggtatgtgttaaggcctaggctgaaggtgggacatggatgatatatggtagcattttgtgtcctttttttttcttgtttatttttagcatagaaggtattgcacgatacctgtttatctttaacttactttttttttttccatgaaaatgcaacagtaagtcatagtgctgtcattgagtcatcctttgccttgtcctctgggaactgtaggtgtatcctgagtttgaagaccagagagcttgtttgccatcaggatcctttctgacttgttcttcagacaacaccattcgcttctggaacttggacagcagccctgattctcactggcagaaaaacatcttcagcaatgtgagtggcttcctttgtgaaccatctttcaggaggaacaaagacctactgtaagcttgaatgcaggggcaggagagagtctgatggaccctagatgttaggttccatgagggcaagagccggcaaccaaggcaggtccctctctgcatcactgcctcttgtttctctttctcctgccccctctctgaggtggcacgctctatcctctctgattctttgccagttggctcctgctctgcagatgtgtggacgtggccactcccggcagcccaacacacccagcccaggtgaaattgcttcctaagtcttgagatggaattccctgggagagcacctgatgagccagcccattcagctgccacacagtgaggcctcacgggggtatgggcagaatgctggcgagagccatgatgggaggctgggaagaaaagtttgctgaggaaattttggttagtattgcaagcccagtgagagggcgtctctggggagctgagacctgagtcatgcattcatttattctgcagacacttattaacgtccatgccaggtgcttggctacatgctagggacacaacagtgactaagactcttctgtcctgtggcacacacaatctagtgagggccgacagtgaactgacagccgaccatgttaatgcacaatcacaagtgcgaaaagcactgtgaaggaaaatgtgcagggtgctagtaggacatagagcagcagcatgtgaacttatctgggacatccggagcagcttcccgcggaagggacagctaagttgagattgggaagagtaaagagggaaggggagagggtctatacttagggaatagcctgtatgaaggccctggggtgggaaacagctgggtgaattggaaaacctgaaagaggccagtgtgattggaactaaaaagaccctccatgcaggaggctgtagcaggtgccctgcaggtgcacctttattactcccctcattccctacccagtgctaccatcgtctcctctgtacctgtgacatacatgctgtttttggctgcacacaatagaaaaactcaaaacaagaggtaaaagttaggtttctgactcatgaaagtagtctgaaggtaaccagtttagaccgttctgcaggaagcccttagggatccaagggccttccagctctctactctgtcatttgagggagcaggctatgtcctcatgacccagtgtggctatgggggctcctgctatcatatctgagttccaggctgcaggatggagaaaagacagcagaagaatacgtgcttgctttatatttaatagttcagaatttattcacatattcttatctagctgcaggggaggcaaggaaataattattctgattggtgaaactcccagctcaaaattagagttgtattactaacgaagaagagactggctatggagggacacgatttcagaggtgcttctgagctgctcgtgctgacctcagccctgtccttcctgcagaccctgctgaaggtcgtgtacgtggagaatgacatccagcacctgcaggacatgtcacacttcccagaccgggggagcgagaatgggacacccatggacgtgaaagccggggtgcgggtcatgcaggtcagtcctgacggccagcatttggcttcaggcgaccgaagtggaaatctgaggcaagtgggccctggcagtgtccagtgtacacctcccagctccagctcaggttctcagggcagtgggcagaagccctggccttggcacctcctgctgcccattgggaatgaggggctgtgaatagtaatcccatgaacagctcccattgggaacttaagctcgtaagaggcttccagaagggctgagagcagagtaactaccaggacctcagcagctagggtgtgcagattttgcctatagagtgtacaggcaagctcacatgactctagggcagcgtgacactttcaccagccacatggtaccagtgctgaactgtcaccgaagatgccagctggaggagggtcctggtggctctgggagaggggctatgagggtgggatagctgagagttcaggctgcttatgtgccctgttgaggtttggcaggatgttaccaacccagtaggtgctagtgggacataggccctgttgctgggaccaggtttaagatgacaaatgacagctgtgaccacctgggtattggagccactggggaatggaggagagttgggggaaactagaggggacataaaggggcagcagccaccaggcagccccaggagagtaggctacaagttttcaaactttcctgttgtcaagaagagcagaaagtgccgatttttttctgtgaaattcgataatttttaaatattggcacctgttttgatatcagtcactgtatgagaccagctcagtgtgtcagtgagctgcttacattgacatggcactgtctggagtggcaaaacggtaccaagagccaacatggggatagtgctcttcccccttggtgggcgctggcctgagcactgtgttgactgatttaatcctctcactgacccctgatgtaagtgatgttattggcacaaggtgtctggagtaagatcacacgggtagaatgaagaagctgggatgactcgatgactgatttcatttggggagaatcaggaaggtctagatttgagactcttttaacaatgagagactggaatcaaatgttctcatccatagctcctatcctggactatgacctctggcccctagcccctggcccctgtcctaccccagggaccacctctgatgcagccctacgtaaacacctgcccccctagaagactgtcctagatccctggggctctgttctggcccaggcaccacaaggggctgctgcctgctgaggtgctccctggttcaacacggctccctttacgatggcaggtttctaaatgagaaaagtggttgtgcatgtctagagtatttggccatgataaggggttctcattgttggtggcctggccattctgacctattctagaagtggtagagcacatggggctggggtgtggggcttcagcgggcggtgtgtgtctcccaggatccacgagctgcacttcatggacgagctggtcaaggtggaggcccatgatgctgaggtgctgtgcctggagtactccaagccagagacgggtgagcccgcagcaggggtggaatgggggtcaggcagggaggcagcccccctggcagggccacagaaaggggtagttggtgtctggtgggactgtggatgacagctgggagttttgtgttcggtaagggcccctgtagctggaccctgagaccagagtggctgggacttcagaaagcaagacacccgcaggcaggactcagcttgacttgcccgctgctggtgccagcacccaagccaaaggggtggatgtatgaatgagtgaattgtgaatgagaagatagattgattgttaggcattattttcaaaaagtttgaagcctatagaaatattgggagaatattataatgaacaccccataggcttcacccaaattcctcaattttttttttgagatggagtcttgctgtcacccaggctagaggggagtggcaccatctctgctgactgcagcctccacctctctggttcaagtgattctcgtgcctcagtctcccatgtagctgggattacaggtgcctgctgccatgcctggccaatttttgtatttttagtagagatggggtttcaccatgttggccaggttggtctcaaactcctgacctcaggtgatccgcccgccttggcctcccaaagcgctgggattagggcatgagccaccacacctgacctttttttttttttttttttttttgagacaagagtctcactctgtcgccctggccggagggcaatgacgcgatctcagttcactgcaacttccgcctcccaggttgaagcgattcccctgcgttcaagcgattctcctgcctcagcctctcgagagtagctgggattacaggcacgcccccaccacacccggctaatttttgtatttttagtacagacggggtttcaccatgttagcctaggctgaaggctaggaccatagtagggtctccagacctcatggtcctcttcattaaaacaacagaaaattccttctgggccatcagatgagatcatgagataggagaagatttccaagtgaagatttcgtttgtttcaagacagagtcttgctctgtcacccagatgatatatggatgatatatggtagcattttgtgtcctttttcttgtttatttttagcatagaaggtattgcacgatgctggtctcaaactcctgacgtcaggtgatccacccgccttggcctcccaaaatgctgggattacaagcgtgaaccaccatgcccggctcctcaagatgttttctaggctgggcacggtggctcatgcctgtaatcccagcactttgggagttacagagttggtggagttatatcctgatgtgattttccccatgttcttctttcgttctctcatcccccatgctgtgtgccccaccaacttgtcttgaaacatatcttcactcggttcgcctctcctgatctcccctctgcctcaggtcatgttattaggcctcagacatagcaagtgaccagagtagggaaggctggtggcagatgggagtctggccacaggcagtcaataggacctgaacaaggcccaggtagccagacctcagagggtgagaggacactggttttggaagaggctgagaggttgccagggctttacccagcacagacccagcaggcaagagcgctgggctctgctggggcgtctgctgtggatgtccctggaggagcgtccatgcgcccatcgagactcatcctccctgagctggtggtgaggaggtgaaatgccagggtgtgggggctctgggaaagaccacacagagctaagggagtggcccttgccaggcttgggccaagttggctacagttgaagaaccaaagaccccttctccgaggactgggcagcttggtcacactgcccttctgggaggccagggcacccacgcagccttcaggaaccagtctcattctctcctctcacagggctgaccttgctggcctcagccagtcgggaccggctgatccatgtgctgaacgtggagaagaactacaacctggagcagacgctggatgaccactcctcctccatcaccgccatcaagttcgctggtgagcccctttcttcccgctccctgcgccttgctagctaccctgctaaaaaaggattcattctttcaactctcctgtaaaatatatatccaaacaagtgaatacagtatctgtgtacagtatacagaataatgactggggccgggtgtaatggctcacacctgtaatcccaacactttgggaggccaaggagggtggatcacctgaggtcaggagttcgggaccttcctagacaacatggtgaaaccccgtctctactaaaaatacaaaaatttgctgggcggggtgttgtttctgtaatcccagctactcaggaggccgaggtgggagaattgcttgaacctgggaggtggaggctgcactccagcctaggcaacagagtgagaccctgtctcaaaaaaaaaagaataatggccaggtaccatggctcacacctgtaatctcagcactttgggaggccaaggcaggtagatcatgaggtcaggagttcgagaccagtctggccaacatagtgaaaccccatctctactaaaaatacaaaaaaattagccaggcatggtggtgtgcacctgtaatcccagctactcgggaggctgaggcaggagaattgtgtgaacccgggaggcggaggttgcagtgagccaagattgcgccagtgactccactccagcttgggtgacaatgcgagactttgtctcaaaaaaaaaaaaaagaagaatataggccgggcgtggtggctcatgcttgtcatcccagcactttgggaggctgaggcaggcagatcacctgaagctaggagtttaagaccagcctggccaacatagtgaaaccccgtctctactaaaaattcaaaaaaagtaaccgggcatggtggtgcacacctgtaatcccagctacttgggaggctgaggcaggagaatagcttgaatccaggaggccaaggttgcagtgagccaaaattgtttcactgcactccagtctgggtaacaagagcaaaactccatctcaaaaaaaataaaaataaaaaataagctgggcgtggtggccgaagtgagtatccacagttcttaggagcaaggtttgaactaggacgttgttgatagcagagactgttctaattgctcatggtcgtaatattgttaaatacggtacttggattcaccacgtgcaggttaagaagcagaacattaccagaggcttgcaggccttctctgggtccctcccaggttacccttcctcccttatatggggctcactcccttctgtgagccaatgactcctccttgagcaacatctaatacttgtatgtcaggcctggaccctctcaaatgtcctgtcatgaaggagcatgtgtgatgtgcccagactcagagttttatatttgttctgtcatttcatcctcaccaaactgttattctgtaaagaaatgagacggccgggggcatctcacgccattgcactccagcctgggcaacaagagcgaaactctgtctcaaaaaaaaagaaatgagaataataaaagcaagaatgtttctaatgcttaccatgtggcagtccctgttccaagggcttcacatcactctccagagaaggaactgtcaccatgcccattgtacggaccggaagttgaggctcaaaggggaggcccaggttcagagcagtgtttaacagctttgaccttggcaccagagaatgcctgggttcagtcctgcccctgtcctctctgtgtgccttgggacaaggactctgtgaacctctgtgttcatgcttgtccagtgggatgggtggtgagcattcaggaagacccgctacatgcatggggcctggcccaaggctcatgtggatcttgcagttgatcctgatggcacgagcctcccagcctgtctccactggtcgctgctgcagtcctgcctctactccgctactcaagtcacctatctcaatcccagactggagagggtgtcccttctttgtccccagcctttgtttctctatatgcccttgctctgcagagcctgccttggccacagctccacctgtgccccctcacacgtacagctcataccttacagagtcccacccagacccagcacccacctcaccacctttaggaagccttgatcccagcacagttgattgatggctcttgcagtggagttccccagctagggtcccctgcccatgtggcccagccctgcctaacacacagcgtcctcctcccctaggcaacagagacatccagatgatcagctgtggggctgacaagagcatctactttcgcagtgcccagcaggtagggtggcatggcctccttgggggctggggtggggggttgtcggggcattctctgaaggtcctgccggccctgccagggttcggatggactacactttgtccgtacccaccacgtagcagagaaaaccaccttgtatgacatggacattgacatcacccagaagtacgtggccgtggcctgccaggaccgcaatgtgaggtaaggggtggccctggacccttagctggcctggtctgccttgtcctaggctgtctgctttcctccctctgttcctctggtccccaagaagctgggaaggaattgagggacccagcaggtgttccttcttggtttttttttgtttttgtttttgaggcagagtcttgctctgttgcccatgctagagtgcagtggcaccattttagctcactgcaacctccacctcctgggttcaagtgattctcctgcctcagcctcccaagtagctggaattacaggcgcctgccaccatgcctagctaattttttgtatttttagtagagacgaggtttcgccatgttggccaggctggtctcgaactcctgacctcaggtgatattgcccacctcagcctcccaaagtgctgggattacaggcgtgagccaccgtgcccggccaccagcaggtatttcttagaagctgggctctcccaagcctggcctccaggtcagcagagggctttcttctggctctccctagagccggtgtgggatgactaaggtgctgatgtggcacataaactccctcattcacccgtattccctgagcacctaactgggctggatggtgctgggatcatggcagtggccaggatagccccaggccctccttcatggagctcacagtccagtagaatggacacggccacctcacagccacagacagtgacagagtggtcagagatgggggagcccaggggccctgtggagacacctgaccccacctgcggatcaagcaggacttcctggaggaagagacaccttagcctggggaggatgtggaggagcgagccagggggaggcagagagtgagtgtgcagagggcaaagcagtgcaaagaggctctgcaccccttcccagttctttctcatgcggtgccaagcactgagcttgcagtgtgtgggggagatgaacattaactcagtggataccccaggacaacctcagcttgagatggggtttcagtttcagtctaggcatcagatggggacaagaggtagcagggggcttccaggggaggggaggacagcaagagccagagaatgaggtggtggggtaggcggggccctgttggccgcaacatgcccctacttccccagagtctacaacactgtgaacgggaagcagaagaagtgctacaagggctcccagggtgacgaagggtccttgctgaaggtgaggagttggagacccctgtctgtctgctgccctgatgggccacctattgtgacggcccacacctgagacctgtgcccttggtccttcctcagtgcaccgcgctgcccagcaccttctcaggcctggttaaacaaggatgcttgcgagagggtggggagggtgaccccagctgtgtttcctttatttacagagcccttccccaagtggggcgtctaagtgggttccattttgagtggcagcagggtatggtgggaagaatcagaggcatgaactcccctcctggtttgcccacaccagccacgggtcactcaggacaaggggggaccttctcagagcctctggtctaggacagttatgggttcaggttctgcctcaggctgactgtgtgaccttgggcaagcatcatctcttgaaatgcacacagacagcttgtctcatagacttgttctctggaggagttcagtttgcacatgttcagtgcttagcacagggcctggctactgttgttactgctgcggtggttgttaatttcttcacgtgtcgaatgggagcgggagctcctgccctgccagagtcccatgtgctgtgcatgcagcacgggggagggaggggcccaggcctcatcataaggaagaagcaggcagctggagtgacatgtgggtccctttcctggcaggtccatgtggacccctcaggcaccttcctggccaccagctgctctgacaaaagcatctcagtgattgacttttactcgggcgagtgcattgccaagatgtttggccattcaggtgggtgtgcctctctgcttgggatgcctccccacccgcccacaccctctgactccgaaggcaagtgcagcctctctgctttgtttgcagaaattattaccagcatgaagttcacctatgactgtcatcacttgatcacagtatctggagacaggtgggacatggacctttgggagagttgtggctcagataccatgagcactgcactcagcctgcctgtgtagagagcatttctaaactgcccagtttggattgtgggagtcttggtgtcacacccagccctgagttcaaataccagctctaagctgggcatgatggctcacgcctgtaaccccagcactttgggacgctgaggcgggtggatcacttgagctcaggagttcgagaccagcctgggcaacatagcaaaaccctatctctacaaaaaattagccgggtgtggtcatgtacacctctagtcccagctactcaggagggggaagatggcttgaacctggtaggtagaggttgcagggagcacagatcatgccagtgcattccagccttggtgacagagcaagaccccgtctcaaaaaaaaaacaaaacactaaaaaaacatatcccagctctgccatttattttcttgtcaccttgagcaggttatttcccctgagcctcagtttgctcccctgtaaaagacaccaccgtttacatttaccttaaaaatggtgtgatgaggccgggcgcagtggctcacgcctgtgatcccagcactttgggaggcctaggtggatggatcatctgaggtcaggagttcaagaccagcctggtcaacatggagaaactgtgtctctactaaaaatacaaaaattagctgtgcgtggtggcaggcgcctgtagtcccagctacttgggaggctgaggcatgagaatgacctgaacctgggaggtagaagttgcagtgagctgagatcgcgtcactgcaccctagcctgggtgacagagcaagactctctcaaaaaaaaaaaaaaaagaaaattgtatggtgagaaatgaatgagatgatatacatacattctttagcacatgggtggtactcaaggaagtcccttttgtcactccctttgatttaccccagttcttccccacagcccccttcctcaggtcttgaggcctccagaacaggccctggtttgctgggatgccccagacctgggcccagggtgtggatgtggcaagtccagcacccctgcactaagcggataggggtgtgttttccaggagcatctggagaatggggtccaggctgtggtgtgggtggcttcagggtcagccacggcagcggctcccatgcttactcttcctctgccttgtgtgtctctctttgacctccgcagctgcgtgttcatctggcacctgggcccggagatcaccaactgcatgaagcagcacttgctggagattgaccaccggcagcagcagcagcacacaaatgacaagaagcggagtggccaccccaggtcctggcagcccctgcctgtccaccagagggatgagtccctgccagggccccatggagtgatgctggggacacagtggtggccaagacagccctaggccctgcccttagcacactcacagctgagtaggggagacagactttgaatatgcagttacagtaatagatacaaaaaggttttgtggatttttttaattttcgtaaataatagagacagagtcttgctgtgttgcccaggcttgtcttgaactcctgggcccaagtgatcctcccaccttggcctcacaaagtgctgggatcacaggtgtgagccactgcacccggctatgagaagggtattaaagtggaaaagcaaagtgtttggcgagcctctcagcactgtgatgggggatgccccaagcggctgtgggaacagagcagtccctgaccggccagccaaggggaggggtgggtagacaggggatctgaggggagggctgcagtggggccacgtgtcctcttactcccacgtgaaagctgtagcttcacttacttctttgaatcttctaaatatatttctttcaagtctttatgtagcaaagccaattttatttgcagagaactcatgttctggtttttgatttgaggttttggtttgggtattgctcattttgagtgggaggttttttggttttcttctcttctgctgctgggtgtgtctgtttttgccattggctccatgtggctcccagggcaatgtggagaccaggccttgacatgggccactggtcctgaggtcctgaggtggtgttagagatatcttgcttttgaggctcccactccacccccaagctatgaaccagggccctggcttcagtgcctgcctcatgccaagggtgttttagtttcccgtactcgggaagagccaccatcattgctaccacctacaggaagcccagcacaggactgcagccccgctgtctgcttggctttctgtcccattgctgtggccctgagagtttgcattcgtttgtagcctggcctttgttaatctcatctattgtggtgatgtgtttctagtggggagacggcatcaagtgagagacttgccagcaccatcttgaccagcagccaagaatatgttcacatggagcttagcacagggcccagccctaggcaagtccccaccaccagcccatttgcctgtattctctccttaccatcctcattcctggctttaggcaggatacgtatgtgtccacacctagtgagattcactccctgagccctggagagcaaacagaggatgatctggaggaagagtgtgagccagaagagatgctgaagacaccatccaaagatagcttggatccaggttggaaaaggggccctattttgaactatgtcagtgtagggaatcattgctgggttttgcccatgaccttgtttacagggcctggcacatattaaaactcaggagtcgacagggtgcggtggctgatacctgtaatcccagcactttgggaggccgaggtgggtggatcacctgaggtcaggagttggagaccagcctgaccaatatggtgaaaccccgtctcaactaaaaatacaaaaattagccgggcgtggtggcgtgcaactatagtcctagctactagggaggctgagacaggaaaattgcttgaacctgggaggcagaggttgcagtgagctgagatcgcgccactgcactccagcctgggcaacagagcaagactccgtctcaaaaataataataataataataatataaataaaataaataaaattcagtaatcaggcttagcgtggtggctcacacctggaattttagcactttgggaggctgaaatgggagggtcacttgaggccaggaggtcgagaccagcctgggcaacatagcgagagcccatctatgcaaaaaaaaaattttttaaagaaattagccaggcatagtggcacacatctgtagtcccaactacatgggaggctgaggcaggaggatcacttgaggccaggagtttgagaccagcctggcacgtaccaagaccccgttcctacaaaaagaaaaaaattagccaggcctggtggtgcacacctatagtcccagctacctgaaaggctgaggcaggaagatcgcttgagcccaggaattccatgttataatgagctatgattgcaccactgcactccagcctgaataatagagtgagatcctgtctgtagaaaaagaaagaaactcaataatcatatcagtcaagactctttcagtataaaagcaaccaggcttaagtcaggaagaggattttttggtgcctgaaaattggagaggattagctttcagcatggctagatccagatagacagatgatgttaaaaggaagatttttttttgtatcttttggctctgcttttcttcatgttggctttgctgatggacagactgtccctttactaggggaaaagatacccccagcaactacaggcttataaaactccatagagaatagaacacctctttcctatagtagctcaagcagagtcttagggttgtgtggctcatgtttctggtatctgctgtacccacttctgagccagttgttgtagctgtccacatctcagcatgtgatcacttctgagggcagagactgtagtcagctccatccactcacaccacctgaccaggcatcaaagatgtgtttgaggccgggtgtggtagctcacgcctgtaatcccagcactcagggaggccgaggcgggtggatcacctgaggtcaggagttcgagaccagcctggccaacatggtgaaaccccatgtctgctaaaaatacaaaaattagctgggcgtgatggcgtgcgcctgtaatagcagctacttgggaagctgagacaggagaattgcttgaacctgggagacggaggttgcagtgagctgagactgcgccactgcactccagcctgggtgacaaagcaagactccgtctcaaaaaataaatgaacaagtaaaaataaattgaattatgttgcggatattgtccggaatctttttcctctgcaaagtctctcatctacctgtatgttggtgaatacaaagcagacgcctgcgaaattttaagttattcccctccaggtggccatttaggtttttcctgattgcacatcactgttaatgaggctatggagtggagaccactcctaagcctcctcgaaatgtgaggacttctccaggagagagtctgaggagtagcaccactggatcctggagttattttattttactttaaaaaagttgttttattattttatttcactatttttgttgcccaggctggagttcaatagcacaatcatagctcactgtagccttgacctcctgggctcaagcaattttccctccttagcctgtggagtagctgggaccacaggctcaagctcccacacccagctaaatatgtgtgtatcaggggatggtgtgtgtagagacaaggtctcactgtgttgcccaggctggtctcaaacccctggcctgaagtatcctcccacctcgacctctcaaagtggtgggattacaggcttgagccagtatgcctggcctttattttaaaagagaaccccggctgggcgcagtggctcacacctgtaatcccagcactttgggaggccgaggcgagcggatcacgagttcaggagatcgagaccatcctggctaacatggtgaaaccccgtctctactaaaaatacaaaaaaaaaaaattagccgggcatggtggcgggcacctgtagtcccagctacttgggaggctgaggcaggagaatggcatgaacccgggaggtggaggttgcagtgagccgagatcgcgccactgcactccagcctgggcaacagagcgagactccgtctcaaaaaaagaaaaaaaaagagaaccccaagagttctccaaacccagttactgccccaccctgcattgcattaggctctccattgtccccacacttttcctgccatcctttggtagtattaagctttttcacctcggtcagtctcgtgagtcaaatatcgcatcccacggtttaagtttgcatttccctaacccccggtgctgttgagccttctgacttctgggttgtggtgttgcctctttggggactgcccggttatgtatgtggcctgtttgttgggttgtttgtcctcttttcatggattctgtgtctttccagatcctcgttgcctgctaaccaacggcaagctgccactgtgggcaaagcggctggtaagtcttcagggagagggttgctcaggggctggcagaggaaacgcctccccagctctgccttctggaagccctttttcctttccatgtccctcttttccctggagaagccctgtcatccttccaggctcagtgagacagccctttgttcatgatcagtgctctctgccaggcattgttctggatgtcagggacacaacagtgagcaagggaaacaaaagtctctcccttcacaggctcacttgcctgtgtgggcgaggaacaatatccccattaaataagtaaatgacgtagtaggttgggtgctgataagtgctgtggagggaaaagaatcaagaaggaaaatacgtcagccaggtgcagtgatacgtgtctgtggtcccagctactcaggaggctgaagtgggaggatcacttgagcccaggaggttgaggctgtagggaactgagaaggcaccactactacactccagcgtgggcaacagagtgagatcctgtctcaaaaaagagaaaaagaacaggggcccagcacggtggttcatgcctgtgatcccagcactttgggaggccaaggcaggttgatcacttgagcccaggagttcaagaccagcctgagcaatatagtgagaccccatctctacaaaaaataaaaaaattagccaggcatggtggtgcatacctgtagtcccaggtactcaggaggctgaagtgggaggattgtttgggccagggaggtcgaggatgcagggagctgcactccacagcactccagcatgagcaacagagccaacactttgtctcataaaaaaaataaaaataaaaaagaaaataaggagtgttggggggtgtcagttttaagtaaacaggaaaggcctcattgggaaaatgatgtttgagcagagttgaagcaagtgagacaggcagatactgggacgaatgttctagtcataacagcctatacgtgtaaaagccacgaggccaggagctcgagaccagcttaggcaacataatgagactcccatctctacaaaagattaaaaatagccaggcatggtggtgcacacccatagtcccagctactcaggagcctgaggcaggaggatcacttcagcccaggagttggaggctgcagtgatcgtgctactgcactccagcttggatggcagaacgagaccttgtctcttaaaaaaaaaaaaagaaaaagagaccgggtgcggtggctcacgcctgtaatcccagcactttgggaggccaaggcgggtgtaatccaaggtcaagagatcaagatcatcccggtcaacatggtaaaaccccgtctctactaaaaatacaaaaattagctgggcatggtggtgcatgcctatagtcccaactactggtaaggctgaggcaggagaatcacttgaacccaggaggcagaggttacagtgaaccgaaatcatgccactgcactccagcctggcgacagagtgagactccctctcaaaaaaaaaaaaaaagaaagacaatgtggattataagagacagaataagagaggtgaatgaaggatgatcccaaggttggggcatgagtaactggaaaaaacaactgaaacagggaatctttaggaggagcaggtttgtgcagaggaaatgagttgagttgtcagcatgttaactttgaaatacctaccagacatccatacagaaatgtagagcagtcacatgtgcaattctgaagtttcagagaaaagttcatgaatcccagctgggcattcccagcactttgggaggccgaaacaggattccttgagcccaagggtttgagaccagcctgagcaacatagtgagagtccacctctaccaaaaaccaacaaaatgggctgggcgcagtggctcatgcctgtaatcccagtactttgggaagccgaggcgggcggatcacttgaggtcagcagtttgagaccagcctggccaacatggcaaaaccccatctctactaaaaatacaaaaattagccaggtgtggtggtgggcacctgtaatcccagctactctggaggctgagacaggagaattgcttgaaactgagaggtggaggttgcagtgagccaaggtcacgccactgcactccagcctgggagacagagcaagacttcgtctcaaaaaaaaaaaaaaaaaaaaaaacagagaaaggttcacgctggagatatgtacctggaagttgtttctgaatggtattgaaagccaagagtccagatgggctgtgtgaaatgtccgtgtcgctccctgcagtgagtgagcactcagccagttgcctgactgtccgatatccttcaagctaggggacgatgatgtggcagatggcttggccttccacgccaagcgcagctaccagccccacggccgctgggcagagcgggccggccaagagcccctcaagaccatcctggatgcccaggacctggattgctactttacccccatgaagcccgagagtctggagaactccattctggattcactggagccacagagcctggccagcctgctgagtgaggtacacacttccaccgcagcctggcccatagccccggcaccgtgacggccccagggcctggcgccttaggctgactcccactccatgggggcagggaggattacatgagatggtgaagggcaggagggtgagccccaggtctgttgcacagcaagacttcccaaggcagacagggagtctttggaaagtgggtcacttgggggttaagagcttggatgctagagcaggcttgtacccaagtgggggacatttgggtagatcgagccctgaccctacccattcctgttgtgtgacctggagtaagaggcttacctctttgggcttcagtcttctaaaaagtagtcataatggggtcaggggcagtggctaacacctgtaatcccagcatttggggaggccaaggcaggaggattacttaacgatcacttgaggagttcaaggccagcctaggcaacgtagcaagatcccacctctacaaaaatattttttaaatttttttgtttgttttgtttttaaatggtaataacaatctcttctgccccagagggcttttacaggaatccatgcttaagtatagggcctgggctcttagaggtgcccgtgcaactttagctctttctctactattttccaaacaaaattcatttttatcctatcctataatttgtcatcttcattgtggtataatatacatccagtaacatgcacagattttaggtatacagcttgatgaactatctgtgtaattcacgtgtgtccactaccctgggcaaaatctggagtgttttctacctcatagaaacccccttctgcccttcccagtcaggtccccgcaccaggataaccagtgttctgacctctcaccaaggactgggtttcctattcttgaacttgatataaatagacacgtagagggttgggcctcctatttttggtgccacacctcttcctcatctgtaaagggactgataatgcaggggcagaccaggacaagctggttgcgagtggagggcatggcacaggccctggttcacagcctccagcagtggggctgctggcatggttcctggcgcactgttggtggccccagccatgcctgcctcagaatggctgtgctgtcttccccatagtcagagagtccccaggaagctggccgcgggcacccctccttcctgccccagcagaaggaatcatctgaggccagtgagctcatcctctactctctggaggcagaagtgacagtcacagggacagacaggtgggtgtcctttccaccaagggagccttagttggaggaacccccagctgatagctgcatcctggaagaagtgctctctgccttcccagtgggcttgtgggagtggggacagttgaggcctggatggggcaggagcccagccttagttccctggttccaggtggggtacaggagggcctgacctgggggaaggagggggcatttggaggaggcggggaggctgtcgcagtgctcctgcaggagcagcgggtacaggtgcctaggggctccgggtggggctagctgttgagtctccagctgaagtccttgttccctctctgcccccactggcactgcagccagtattgcaggaaggaggtggaggccgggcctggagaccagcagggcgactcctacctcagggtgtcctccgacagcccaaaggaccagagcccgcctgagggtgagtgcagggcaggcagggaccctgtgacagtctgtgcgttcagccaagcccctttctgggcaccgatggtgactttgacccagtactgaagctcagagtctgtcgaggaagacacatgtggtccctgctgctgcctgaggattctgggcccagctgcctacagctgagagcccagctctgccacctccttgatgtggaacttcccttattcataaaatggggggcagctgctcttaccatccctcctccagatggggaaactgagcccagggaagggtagccctggccctggctcaccagaatggtcaggctgtgggctcctgaccccgactctgtccttcagactcgggggagtcagaggccgacctggagtgcagcttcgcagccatccactccccagctccgcctcctgaccctgcccctcggtttgccacgtcgctgccccatttcccaggtaagcaggggccagacacgcaggggactcgctgctcgggcctggcttagggccagtcacaatgtctaagcacaggccctgcacttggagcccactgagcctggaagacggggatccctgcttctcagcctgcgggcaacagggcagggatgggtggggcccgctttctccatttcaggtggcgtctgctgtgactcatggtgttggctcctcttgtccctcccctccttccctgtcaggatgcgcaggtcccacagaagatgagctgtccctgcccgagggacccagcgtccccagcagctccctaccccagactccggagcaggagaagttcctccgccaccactttgagacactgactgagtccccctgcagaggtagggccctgcctcacccacacctgccgaggccgtctgtgcagcctgggcacagcattggcgtccctggagttggctccccagcagggccaggagggtgagtggagagcaactgcttcgttttttttgagacggagtctcgctctgttgccaggctggagtgcggtggcccaatcttggctcactgcaacctccgactccctggttcaagcaattctcctgcctcagcctcctgagtagctgggattataggcatccacaaccacgccctgctaattttttgtatttttagtagagatgaggtttcaccatgttggccagactggtctcaaactcctgcctcagatgatctgcccgccttggcctcccaaagtgctgggattacaggcgtgagccaccgtgcccggcccactgcttcactcttgacctgagcctcacgatgcctcctcacccactgcccctgctcgtaccctgtgtctgtacataagggtttctggggagtgccccgctgggctgtgggctggcctagggccagggctgctcggcgggaagggttatgagggtcccctcgggatcttcccctagagctcttccccgcagctctgggagacgtggaggcctctgaagctgaagaccacttcttcaacccacgcctgagtatctccacgcagttcctctcaagcctccagaaggcatccaggtagaagctggccaagcactgcccaccctctggctcctcaacagtgccccagggcaggctgaatgagaatcatcccccctgctctcctccccacaggttcacccataccttccctccccgggcaacccagtgccttgtgaagtctccagaggtcaagctcatggaccgaggcggaagccagcccagagcaggtactggctacgcctccccagacaggacccacgtgagtattgggcccacctccgtcagggcacggggctgggaaccctgaggccttgtcctcacctcagagctgtgcctgcaggtcctcgctgcagggaaggctgaagagaccctggaggcctggcgcccaccacgtgagtgccccagtcccagacggacagtcctgggtttctcggcgagtggccggatgtccagcctagctgtggggcgtgggggccctagccatcagttctgtgtggtggagtcagtgccatctgcttccgttacagctccctgccttacgagcctggcgtcctgtgtccctgcttcctccgtgctgcccacagacaggaatctcccaacgcccacatctgcacccaccccaggcctggctcagggtgtccatgccccctccacctgttcctacatggaggccactgccagctcccgtgccaggatatcacgcagcatctccctcggtgacagtgagggccctatcgtggccacactggcccagcccctccgtaggccatcgtccgttggggagctggcctccttgggccaggagcttcaggccatcaccaccgcgacaacacccagtttggacagtgagggccaagagcctgccctgcgttcctggggcaaccacgaggcccgggccaacctgagactgaccctgtcaagtgcctgtgatgggctcctgcagccccccgtggatacccagcctggcgtcaccgtccctgcagtgagcttcccagcccctagccctgtggaagagagcgccctgaggctccacggctctgcctttcgcccaagtctcccagctcctgagtcccctggccttcctgcccaccccagtaacccccagcttccagaggcccggcctggcatccctggcggcactgcctccctcctggagcccacctccggtgagtacagccctggagcaaggactgtcccctaagctcatcctgtgtgctagttggctcagctccaaagatggatacttgacctggccacagggactgtgccattcattcattcgtgcattaacttaaatatttaatgagcattacatgttgggctttgtgctaaaccctgggacatgggacatggtggtaaacaacacagagaactgacagcttcaatggggacaatgcccagactaaacctttaaggaacccgtcatatgtatcacgaagtgacacatgcttaggagggacagaggagggcgagggagtgcagggtggggacaggggttgggattacaaaccagaagataagaagaggcttcagggaggaggctgcattggagcagagacctgtaggagtgaaggggagggagccttggggacccagagaagtgttccagacagaagtacagcatggagtccacccagtcgctctggccgctcacaccaatggaatgcagctcatcttgctcattcccttctctctaccccaggtgcacttggtctgttacagggcagccctgcccgctggagtgagccctgggtgccggttgaagccctgcccccatctccccttgagctgagcagggtggggaacatcttgcacaggctgcagaccaccttccaagaagccctcgacctttaccgtgtggtgagctaagccccagagttgggaaagggttgaggggtctcttgagaccgcccggccttggtggcccctgacaaggctggcatcccttgcagttggtctccagtggccaggtggacaccgggcagcagcaggcacggactgagctggtctccaccttcctgtggatccacagccagctggaggctgaatgcctggtggggactagtgtggccccagcccaggctctgcccagcccaggacccccgtccccaccgacgctgtaccccctggccagcccagacctgcaggccctgctggaacactactcggagctgctggtgcaggccgtgcggaggaaggcacgggggcactgagggcgcagcccctccaccgcagccctgctgcttctgaggacttaggtattttaagcgaataaactgacagctttgaggaa

SEQ ID NO: 1296 - DNA, 36566 bp, Homo sapiens
gaccggcgacccggcccgtggagccggcgcgggcgggctgctgaggtggctgtcgccggctccgagctgcggcttcccgggccgagcccccgatggaggccgaggccgcggacgctcccccgggcggggttgagtcggcgctcagctgcttctctttcaaccaggactgcacgtaagctgcgactcggcccctgccagggaggtgggggacagagtgtcaggacccaggggtgtcgtcctgagagcagcttgtggcttccgcctcgaggcggcctcggcgggagggccggtgtctgcttcggacgcattgggatcttgttatccccgtaccccttcagtggggtttgccgcaccccccaccccaccccactcccagtgtcctcccagagcgacaaggttgggccaagggtgaaagcagggagttcgcaaagggagtggtggggctgcgggggccacggaatatggggggagcagggcggtgggaaagccagtgaccaaagtgggtgtctggggaagagagacagtggccaaaagaaagagatgagaaaggagaggaagttgcaagttgacccaggactctgtagttggggcccaggaagatgagagtacaggaaaaactttcccatttgtccttgagcatctcaacgtggcatctgggcagggcctcggacaaagaggcagcctatccctgcggccaggccagcccctgtcccatccccgacgcagggcatcgtgcctgcccgctctggatggaagaaacctttggatttctttggctgttttcacatcgcccacccagccaggcaggatctccttctcggagtccaagactcttttcccgggcgcagactgctttctctccaggaaacaggagctccaccctgttgtttttgagtggatttttaatgttttacttcgatgttcacatttgggctttgagagggagctgggctgaagtgtgtttcaggcatctgcaggattctgtgacttacaggcaaacgcctgtttctttccctattttcatggaagcgagccctggggaccatatggaatcatctttttggaatgtgcaccctgagcatcaggcggggatgaccgattcccagtttcccacttcctgctgtaccagtttctgtgccttggctgctggtgactgagctacgctaatattgatccttcagtggtgtaattaaggccattatgtaccattagccaccctggcttccattccctttatgtttctgtttaaaaacacccggtgctgaacaatatgcctttgtttgaaaaacccatatgtgtaatcatgtaatcgagtagctctacagcttggttatttgagtgactttcaagtttttcttgaccacaatccacaatacgaaatatgtattgcaacatcacccaatacccataacacatacactattcacaaaatatcatgtgcaattttctgtgtcctttttttctaagctgcttgtgactcactgaattgcgttttaggatccactcatgagttgagacctgcagtttataaaaatgctggtatagataaaatcctgatgttctgtaagaaacattttgcaagagggcatggctgttgaaatgcctgggtgatgttttccttcccaattgaacacaagttaagaaagggggttagtttgcttgtaagtagtaaatgttctaaattctgctttgtaacatcattagatttgacaaaaaagggtgttaatttatactctagccattaaataacgcaaagtcccagctttctacagaaattgaataagaatgttattttcaaaacggtagggtgctttgaaagttaatttccttactccctactgttagttttattttcttggatggaagctctgctgggcagctttgccttgcctataaataaaagttcttgtcacagtcagttgctttgagccacagagggtatgacattggattttaaaataagtcaagccccttactgaatacatttaggtgtattgccatgtctttttctataaatgtaggctgaatttgggatccagtatttccaaagaaggtaggtgaaaacagcaaacccttaccagtcccctacgctcatacttcgtgattggtacttgtgctatacactttgggtactttttttttttttttttttgagacagtcttgctctgtcacccaggctggagtgcagtggtgtggtcttggctcagtgcagcctctgcctcccagggttcaagcgattctcctgtctcagcctctcaagtagctaggattacaaacgtgtaccaccacactcagctaattttttgtatttttagtagagacggggttttgccacattgcccagcttggtcttgaactcctgacctcaagtgatccacccacctcagcctcccaaaatgctgggattacagatgtgacacactatgcccagcctactttgggtacattttaaatttgattaatgataaatatttgtcccaagctctgtttccatgagtggtgattagaattttgtttctacagaaagactttatggatgaaataaggtctaagtctaaattccttgattcagagtcttttgtggccattgatcaatcacgtaaaacatcacataaaacatcactctgtgattttctcatatgtagaattcttctggtccaggagcagggcttatgtttgaaaattactttaaattgctgtcactttgcattaatgttataagactctagttacagtatttctttccttacttgcaaactttacaaacctcatttcgcagccaaacacatctatatttatgtgaaaaagtttatgtgaagaaagtttaaaaacaataacactacaaaatacattttgaagttttaagatgctctgggcttacttttccagttgctgtttgtcatcatgaatacctcagtctaggtactaaatgccagttctaagtgcacagctgcaaatgtctaacccaccagtttagctacttagcaggttggagggctgcgagacgtcaccagctaccttgtggattaaaagtttactgtagttgccctatccctgtgtcccagggaagaacaaatgtctgggtagggaaaaaaaattccagggaaaatcatgtgaccttctcttttttaggctagtgaaacaagagccttggccatccaggcttgtaatagtaagttgcttattttagtatatgcttccctgtaaagagtgaatttcaccttgccttccagagaagcacacttctgtgagtgtgctccgggtcagattctgttcatcacttaggtgcggagggcacagctggaaagagctgggtgaggattcccagctgctgaacaaagttgactttgatgtttactttcaacacaaggccaagaaaatctggattcacgtcctgtctttatctcctcattgaaaaatgaaaaattaagagaaccagattttttttaagaggcactttgattgtcctagataaatgtttagtttgtattttgtttgttggttgtgatgattgctttgtaggatatagtagaaagcagagttctccaacttgggctgctcattagaatacttgaacttcaaatccaattaaacttcccagctgagtttaatatacatccaggtgtgagagctactagtatgaagtatcaggacatttttctggaaactgatgaaaggaagcatctattaaattttacctactaatgacctactatgcctactttgaaagtgtatttcttagaccaggcatggtggctgatgcctaagcactttgggaggccgaggcaggtggattacttgaggccaggagttcaagaccagcctagtcaacatggtgaaaccctgtctctactaaaaatacaaaaattagcctggcgtggtggtgcatgcctgtaatcctcactgctcgggaggctgaggcaggagaattgcttgaacccaggaggcggaggttggagtgagctgtgatggcaccactgcactccagcccgggtgacagagcgagactccctctcaaaaaaaaaaaaaaaaaggaaaagaaaagcaaagcatgtttcttcttataagcaacaaacaaataaagttatgaaggaaagaaaaactgatttatctggtaaagtgcctctcagacaacaagaaggccccctcgttgtgttggaggtagagctttcagctattatgaatattcttaaacattcaatttttcctgttatctgcccagtgggaaaaacatgtctgctagatttgacattttgttggatgacagagctcatgcagtttcatgccccttgatcatttcacttttttttttaagttgcctttgactttttcttcttttcttttgctcttcctgcctgtcaagacatgcgtcaccatttaggaagttaccaaggatctaagctcctgcagatgcttgtttactgtacccctgaggctagggggcaaaaggcatctatttgcagacagatctgttgttagaatacctgtcgttattcccatgctgtcattatcctccacagatccctagcaactggaactaaagccgggtataagctgttttctctgagttctgtggagcagctggatcaagtccacggaagcagtaagtgtgtgtgagagagacctcagggatctgcaggagaaccagagcctccttctaggctttaatctgcggtgctaccaagctgcctatttttcccttccttagccatcaaacttagggagtcaagatttttagatttaaatataaatcgttgccactacttgctttaaaccacaagcacttagatctggcaacagtttaagtaacattttctttttatagaagaaattatttgtgtgaaatcatattattgagactttttcacatgcttatatgcacagtcattaatttttataactgtcaaacctaaaggacacttgtgacattttctttctttctttttttgagatggagtcttgctctatcacccaggctggagtgcagtggcacgatcttggctcactgcaacctccacctcctgggttcaagtgattctcctgcctcagcctcccaagtagatgagattacaggcacatgccaccaaacccagctaatttttgtatttttagtagagacggggtttcaccacgttggccaggctggtctccaactcctgactttgagttatctgcccattttggcctcccaaagtcctgagattacaggcgtgagccacctcacccagccacctgtgacttatttttgccattatattggcaccataagatactgataacattgattcagttttggaagtatttgtttgaagaaggcaacggtatcctatttacatagcccatgtcaatgatgttgaagcatgtctagtgaacactgtaaataattcactagaaatgtgacttccttattttgtcagggtgatggtttatgccatcataatagcgaacaatatacaacctttcagtttcctggaaaaaaagtggttcagtaaataatattttgggctcctactttatttgtaagatgttattgttattacaccatttttgtgaattttttgctctatgtctgtcccacattgttccctgtgggccttttccaagtggaagaaaggcacacatatgaaaagaatgtgctcagaaagataccaaagccgtaacctttgtgctcaggagggtcattaactaacttcttcctgagtacagaagtactttcctcgtcataatactgatgtccagatggttttcagcaggaaagagatccagggagcacagcaagatagggggtggggggagtacagatttaactgtgttactgtcccctcccatattggcacccctctagcaggacaagaagaattctgaagcagaagttcccaactgagaagtcacgcctttgaaatctctcagggaaagggtagatgaaaattgttcaaatattccaaacatgtttgacagagcaaacagtggagccctagggtctggaggggagattctgccactcagacagcatcagaggcagctgtctgcctttgctctgacttgcagtctagtcactagtgttttctttttcttttcttgagacggagtcttgcttgtcgcccaggctggagtgcagtgttgtgatctcggctcactgcaatctcttcctcctgggttcaggtgattctcatgcctcagcctcccgagtagctgagattacaggtgtgcaccaccatacctggctaatttttaaaatatttttagtagagatggggtttcgccatgttggccaggctggtcttgaactcctggcctcaagtgattctcctgcctcagcctcccaaagtgctgggattactaggcgtgagccgccatgccaggccactagtgttttctttactttagatatttggaaaggactctgaaagtgctccctgggagagggtaaaaagccacctggcagggtggggggcatggtggatcactgtcaatgcaagctcagagagggcgcctggccggcaagacccggagaacctttggaacctggcctgcgccgggcccagtgtcatggaggctggaatccttcttggaagtgatcaatccatgtaacctcccggctgcttttcctcccagatgaaatcccggacgtctacatcgtggagcgcctcttctccagcagcctggtggtggtagtcagtcacacaaaaccacggcagatgaacgtgtatcacttcaagaaaggcacagagatctgtaattacagctactccagcaacatcttgtccataaggctgaaccggcaagtaagtggggaaatccctcagggtttcaaagcttctgctaacgggagccaaacaaaaagatggacatctttcaagatcaatgtctgtaaaacaagcttccaattctaatgagaatgttaacactcaggccccgtgtcccgggggtattgtaaacagagtctactccaggtgctggttgtaacgttgttttccctagacctctggctcatgtttccagaacgttggtccctgactggtaggctgcaccctctccctagggtacagattgggcaccgcagggatgggtcagagctctggcttggacagtcccatgagccaccgcaagagcaccttaaatcagaggagcgactcttctggttttgccctagatagtgtcattcattgcagatgttggggcaataccactgagcaggagatgcctgagagtgaagtgggggctccctgggtcaggaaagctgcccttctcccaccacgtcctcagctctcctggaaggtctgctattcagccttgggttctcatttttctttttcccagctaacccttgaagactttttgttttttttgtagcattttctttgttgaaggattattctgatctcaaataggcaatatgttctcttttaaaatataaattcttattcagtaagtattgggggtgttagcagatttccttttgaattgctgggttttcattttgggttgttgtttctgtttttgagacagggtcttgccctattgcccaggctggaatgcagtggcacaatcttggctcactgcagcctccatctcccaggctcaaacaatcctcccacctcaacctcctgagtagctgggactacaggtgggcaccaccacgcccagctaatttttctgtatttttttatattgccagagtgtattcgtctattctcacattactctaaagaactaccggagattgggtaatttataaagaaaataggtttcactgggtcaaggttctgcaggctgtacaggaagcacggcagcatctgcttctggggagggctcagggagctttgattcatggcggaaggcaaagcgggagcaggcgtcttacgtggcaggagcaggaccaagagacgggtggggggtactacccactattaaacaaccaggtctcgtgagaactcactcactctatggtgggggatggtactaaaccattcataagaactctgccaccttcctccaacactgaagattacaattcgacatgagatttggggagggacactgatctgaatcatattacagtgtttccccatgttgcccagtctggtctcaaactcctgggctcaaggatcctccttggcctcgcagagtgctggaattacaggcatgagccaccacgcttggccaaattactgtgaaggcaggcactgtgctggtgtgttcaccattatacgacctggtagaaaaggcagtgcttggtagatacgtgctcataaatatctgtttcctgactgactgttaaataagtaaataaacaaagagattctttatgtgaccatgcagatttatctattcaattaagtattcccagagcggttgctgcattcattgaggacaatgttttcttctgtctttgtctaaactcttaagtactaattaattttttttaacaaatgagacaaataaatgctttttaaatttatgagaaggaagggattgtttctttgaattgatcaactctttcaaatgaaaatccacttaagtccacctaaagcagtgcggtgaaaaatagctggagaaagagaagtgggaccttttaagtagggagtagcaggagtaagaaagaaaagaaacctgcattcttggcaagggagggaaaggcagtttgagagttttctgattgaaggcttttagatgaaattcttgactcaggtgttttcactgaaatctgttggtagcagattaagtttcgctgctaaactttttatccttgcatatagtagtaatccgtatacaaggttaaatgtctgtttttggcacctgatgatctttttaagattgtttaggcaaatgatctgtaaagaccggaaccctcaaatagcgtctattgtatttgcttgtatgatttctctctttctgtctggtatattcattagcaaatgggacaaggaaggcctatttgagtgtccgagtctgttaacctttaggtgccagcctccccttaatataatactcattaactgtgaggttctcctcccccaccttctaaagaacactgatgcaccaggaactgtcagcaattcatggcaaagccacgaaccaagatctaacagttctcggaaccaagatctaacgtcggaaccaagatgagcatcggttcattggaaccaatatctaagagttctcccttcctttacatttcttctccgacaagaatgatttgaaacaggtctgggaagtattgggggtttgcttttcttaaaactttcaggtttgggacttaaattttggtttaagcaactcagctgctgcagcctctcttgccaggtagggattctgtggtgtccgggaggactgcccactctggggaaatgataaaggcccaaggggagtgtgtcctgttctattctgtagcactcagtctgctacttcctcaggccttcagacagcacagtttcttttttgaaaaacaggaaaaagttaaagatttggataaggtgttataaggatccaaaatcccttttatcttttttttttttttttttttttgagatagagtctcactctgttgcccaggctggagtgcagtctcagctcaccacaacctctacctcccgtgttcaagcaattctcctgcctcaccctcccaagtagctgggactacaagcacctgccaccacgcccggctaatgtttttgtatttttagtagagatggggtttcaccatgttagccaggatgttctcgatctcctgacctcgtgatccacccacctcggcctcccaaagtgcagggattacaggtgtgagccaccgcacctggccccaaatcccttttttctaagtatataggaaggaaagggccaagtgtggtcccagcacttcaggaggccgaggcaggaggatcgcttgagcccaggagtttgagtccagcttgggcaatgtaacgagacctagtctttactaggtctttactataaaaataaattagctgggcatggtggcacttgcccgtaggcctagctacttgggaggctgaggcaggaggatcgtttaagcccaagagttgaaggctgcagtgagctatgatcacgctgctgcattccagcctaggtgacacagcaagaccctgtctctataaaaaataaaaatttaaaaatttaaaaaagaagaacacttaggaattgtcatatgtttcatttttagttaatgttatttctcttgtattgaactgaggaaatatattttatggaatcaagacagctgtatgatgtatttagatttgcatacttttacagttcttttgcagtctcctcccaggggcccttgctatccagatggaggctgattggctcgaagcctctgaggccaaatctgtggtgttctagggcagatgctataaatattttgtaattgataaaaggagttattgcttataaaacctagaaaagtagatgaaattcaaagcaacagacaaggagctgagttgaaggcaagaccatggttctgcgggggctgaaaactgatagttaaaaaagcaatcagcagcatcgtgcccaccccagaagcatgctctcacacgaactaagagtgcatcctcgttccctcccagtgttttctctctgtttccctctgcgtttagtcttatctgcagccagcatgagggtgacctgaaattcagctgagtgagccgcagagcagatggtgccatcagagctcttgggaaaaaaatgcagatcagatcagatgggctagatgtagatgctgtttctaggagaggcatatgtcaaggccccgctatcccagggattgggtgtggggctgggaggggacacaagaggatatcagaaacctctgaacagaaggaagcatagaaccacgtagttctaaccacggcatgtgctggcaaaaggcacagtgattggataagtcagagaatatttcacagaggaacactcatatttatcatcaattttgagaacctgttagaatttttttaaccctcagtccccagtctcagacctacgacagagccttaggtaaaactgagaaagggctgggcacagtagctcatgcttgtaatcccagcactttgggaggccgaggcaggaggagctcttgagctcaggaggtagactaacctggacaacatagtgaaacccgggtctctacaaaaaataccaaaaaattagccaggcatggtggcgcacacctgtagtccctgccacccgagaggctggggtgggaaaatggactgagccccagaggttgaggctacagtgatctgtaatcctgccactgcactgcagcctgggtgacagaacgagaccctgtctgaaaaaaaaaaaattgagaaatgtgtttaaattttatttttctgcttggttaacactgatgaccttcatcattctgagccatggatagtcttccttggggaatagcagggcaggcttttcccaggagcagagcctgcctcttttgtgtggtattttttggtaccttcccttctagctgatgttccctggaataaaaggagctggctgagaccagtggttcttgagcctcagtgtgcatcgcaatcacctggtattcgtctaaaaacttcccaaaccagaatctccggggagagcccagggcttgctccttgggcagctccttgggcatccaggtctaagaaacactggcctgaggggagccaagtcaggcatgtgcaggggtggtcggcagctgctcagatgtgcgaggagctgcccaaccagaaatgccttcctgacacctcctcaccagcaccgatgtctgcccttgtactgggctatgcgttatattcctttaaacacccgatacatcaaccctgtggcctgttttcacttagctgagagcacagccattgggaagaggctctgaacctgacaagctttcatgtggagaggaagagaagggtctggcagcagtggggagagcaagcaccagagagaggagcccaggaaggaacagtggggacgtggggcactggggtgttcaaatggggccgaagcccttctccttttccctttgccagggctcagacagcggcccaaaagcaggcctggaggagagtctgagtagaaataagttagagctggtaattattcagagaggggtaaaacctaagatttggtgatggagagaaagcaaagaaacccatttttatataggagggagacctgtgctataaacactgaaaggcagcctgttagatggcagtggaaactacagaaggcacatgaaattgtcttacatggcacagggggtctgatcagaaagtgttcagaagtcctgttgaacgcggtggctcaggcctatcatcccagcactttgggaggccgaggcgggcagatcacctgaggtcgggagttcgagaccagcctgatcaacatggtgaaaccccgtctctactaaaaatacaaaattagccaggtgtggtggtgcatgcatgtaatcccagctactcaggaggctgatgcaggagaattgtttgaaccctggaggcagaggttgcagtgagctgagattgcgccactgcactccagtctgggtgacagagtgagactccttctcaaaaaaaaaaaaaaaaaaaaaaagtgttcaggatccctgttctaaggaaagaaggagaaggaagagagggagggaggaatggagggagggaagaaggaaggagagaagtaaaaacaatcttaatttctaataaaatttcttaagatcttgcattttatgcttgtgttcaggtggatgattacatgtgtatgtgtgtacatccataaacacaatcttcaaaatgcatcatcaaaattctgctttaggcttagaatcaagttaggactcatatgaaagatgaatgatttggatttggtcagggtctttgtaaggaacggttcggtagactgataagtctgtgtgattacagaggctgctggtttgcctagaagagtccatttatattcacaacattaaagacatgaagctgttgaagaccctcctggatattcctgcaaacccaacaggtgagctccaaaaatggaacaaatgtccctgaaatttcatgtcctggtgcttctttcccaagctttattttcctccaaattgcgaacgtgaagcagtgtttgctttttgagtcttagtgaggtttatctcgaagctttgtcttaatggcggcagattcaaattatgtcaggctgtgtgtcctgcaggggggctgtgtgcccttcattgcagtccaagaataacaacaccctttgtctgggacccatatcagcaaatgtgtcaaggcacgtaaggtagacatgtaaaagatttcaagcatctgctgttgaaaagtgtttacccctaattgttttttgtggttcgttcagtacagagtaggcgtgataattagaagcaggtttcaacttggcgtgtctgcatggccagcaaaaagacaatctgaaccataaagaatatgttttattacatgacaaagaaatctctctacttcgacgatatgctaggatattaaaccttactgaattctcgggatttaacactatttaatacattcctggtgtataagaagaggaatggtttggatttgttatattgaaatagcagatgacattatatgaattcatcaagctaggagtaaacaagaaagaattccttcattgtgtggtggggtgaggagtcagcacactggaacaacttgtacatttaatgactccagattaatatttgcagattatatttcagtttggtatcattgaacaactgcttctattatatttcagtttagtatcattgaacaactgcttctatttgctgtttctgagttatttggctttcactgaatttcaagatctatctgggtgccatccaagtcacctagactttttgaaccttggttcccttatgaataatacccatctcccagggttggctgagaattaaacaaggtaatgtttgtgaaagtgaccagcacaggaactgccatgcatgaaatacttctgatgccttctcttcattccaattctataaatggcccttggctgttgatttcagtgctttcacatttcagctatggcaaaaggatattttaaaagaacaaagctagccgggtgcggtggctcacacctataatcgcagcacattgggaggccgaggcgggtggatcacctgaggttaggagttcaagaccagcctgaccaacatgaagaaaccctgtctctaccaaaaaaatacaaaaattagctgagcatggtggcgagtgcctgtaatcccagctacttgggaggttgagacaggaaaattacttgaacccaggaggcggaggcttcagtgagctgagatcgcaccactgcactccagcctgggcaacagatcgagactctgtctcaaaaaacaatgaataaattaaaaataaataaataaataaaagaacaaagccattgaggctgttagggagttctgtgagataatgactttgaagcacattttctgaaatggaagacggtacgtgaagaagctgtgggtggtaagtttttcccttagaaatgagaggctgaaatcatctggacaagtatctattgcagacattctttgtgcttggcaccatagtaggcaccattaggcaacctcataccaggagcccaaaatctagttgtcacgagttcccttcaacagtctgtctgaggtggtctgagacaggtgcgccagcagcctttggcaggggtggaaccatgtttaactctggggtgcggacacagttgaagggagcatgtgctcttctgatcaggaatgagaggcccctgaatctgcatagagcttgaggctggcagggcctgagctgggccttcagggatttggggagggacatcgggcatgcagaaagctagaagctgcctgtggctctcagtttctctgaagagaggggagtggacagtaaatgccacttactcctcacacctgttgcacacttgacccccagaggacagggttgcttcaggactgagcaccctcccttgcaaacagatgtttctcctttttttttttttttttttgagacacagtctcactctgttgcccaggctggagtgaggtggtgcaatctcagctcactgcaaccttcgcctcccggattcaagtgattctcattcctcagcctcctgagtagctgggactacaggtgcctaccaccacacccagctaattttttgtatttttagtagagataggatttcaccatgttggccaggctggtcttgaactcctgtcctcaagtgatccgcccgccttggcctcccaaagtgctggaattataggcatgagtcagcatacttagccaccatttactcttattttttagcaaatatagttgtttttctgtagttcagaaaactcactggttgccttactttctgcagcttaaacagagagaaaataaggtttaaaagtgcagggctatttgtgttccctgttagagacagtgtatattgtttgtaaagggaatcgattttatctcaagaaaaatgagaaacaatagcagagacttcctctgtctcagataaaagaatgcctccttatgaaaggatccagggataggttgagtatttcttctgaaagaccaggagcaaactgtgtctttttagacctctgatgttctttggagatatagcccaaggtgttttaaatgctcacgtttataattatcacctcaacttctcctgagctccctttctactgcagtaaaatggagatgatcatttttagcccccagagttgccacggagagcgttacctgaggttgtggcctgggtgggcaaaggtgggtccgccctgtccatgcgggcagtcagactcactccgcagccctctctgtcccataggacagccttgcacaggtcagagctgcgcttcagtgacatgaccaggtcctcactcgggaaccttcagaggactccgccctgccaattatacattccccagaggccaggagtcgccttatctgttctcatcctctagtttattttctgaacaaagaaataagatggaaactgtgactgttgattttataaatccttgctgggtacagaaggaagacacaatcactcgtctaattgtcttcagcacacaaatcctgaatgcattttgacttcataaactacaagtaaattagctatacagagttcgcctgttgcctcacacttggtatctaacgcagctgtaaatttccttctttctgtctgtttgtgtcatgcccgttcctgttgtgtcagagattgcaggctgtttcctttaaagagcttggccagacaggggctcgaagttaatttcctgctagcacagcagtctgctctgagcagtcaagggtggaaatctccatgaaagtcctgccaactgcagacctcccagtatggaggaggtggtcacagagctgaccaccttttatgggatattgagggagcgttccataccacacagcaatgcagatcattgaacagttcatggtttcttccccagcaagacctctttcttgtttgaaaatgctaataaaagtggtataaatgcttcccttttgtaggagcatagggcatttgctgtacaaagaagatgtctttctatttttgaaaatcggaaagcgtaacctgagacattaatcaactcagagggaactgcattttataaatcactgttaacttacctaaagtttgacatgcaatactttaaataccaagatgagaatcatttagaatcatgggacttcctttgaattccactgatgatgccattggttcttgagttgagagcaggcacttcttttccagctgtagaagaattacagccaaacaattacagtggaattatagctgccagtgacttatgaaaatatgtgtcaagctataacacatccaaaagccccatcagaacctcattcctaggtagaaaaaagactggaagaaaatatgctcagatgttcagaacagtgaaaagcctctgggttttagaattgtgggtgattttttttctccttatattttctaggctttgcaaatgttctacaccatcacttttatattatacaataatatttttaaagcccatatccttccttaaaaaggctttgtgtaacacctgtaacagaaagaggagactggcagaatggcaatagccaagctaaggaaaactcttcttgcttgccttgggtggttcccaagatacgaagatacattcgtgtggctcgttggatttttctgacacttgggccatagggaagtcacagtaggcttttctggggaccttcattaagtctgtaagggtaggaaggcaggattccttgtctaaattcagatggattggtagaggtgcgagcctggaggcaaaactgtcaaataagtggtatgtgtcagagtatgcctgccctcactcttatcctttgtccctttcttgttagcatctagtgtcaaccagttctataataggtattgcagaaagttcaatattagcttagaaagtttaaacgtttcttcccttctgggaatatttatgttttaacataagactctgaagcacagctggaggtatgcgtccaaggcttctgctccaagactgcttagctctctctgccacaaagacacgcccagtattttcagagggaagaagtaagaaacgaaggcttggcatcttgaagtgttaaatctggaaagacctctatatcacggtagccttcatttcacagacaggaaacaggcctgaaagagcagcaaataactcggccagagtttcacagtacatagcagacctcagtcttgaactcatgtcctcagcctatctctaaccagataaatattcctgaaacatgccttaaaataaaatttgaaaatcttttttgagataaaattcacatcctatacaattcacccgtttaaaatgcatggttcaatagcttttggtatattcacggaattgtgtaaccatcaccacaattaattttagagcattttcatcgccccaaaccttgtacctctaagccatcactccctatgcccccagccataggcaacccctaatctactttctgtctctattagattatggatttctctattctggacattttatatcaggagactcatacaatatcggttcctttgtgactgacttctttcacatagcctaatgtttccaaggttcttctgtgttgtagcatgtatcaatactttatttttcttgctggataatattctattataaaaatatatcacattttctttatccatttatcagttgataacatttgggttatttccactttttgacttatgaataatgctgccatgaacattcatatacaagtttttgtgtggacatatgttaaatttctcttgggtgtatatgtaggagtggaatttctaggtcatatgagaactttatgtttagcttttgaagaactgctaaacgttccagagcactgccccattttacattcccaccagcggtgcataagatcccagtttctccatatcctcaccaacatttatctgtctttttcactatagtcatcctagtggttgtacagtggtatctcatcgtgtttttaacacagcctttttaaaaacatatgtgctaggccaggcacgatggctcacgcctgtaatcccagcactttgggaggccgaggcagatggatcacctgaggtcacgagttcgagacagcctggccaacatggtgaaaccctgtctctactgaaaatacaaaaattagctgggcgtggtggcacacgcctgtaatcccagctacttggcaggctgagacaggagaatcgcttgaaccaaagaggcggaggttgcagtgagccaagatcgcaccactgcactgcagcttgggcaacagagtaagactccatctcaaaaaacaaagcaaaacatatgtgctgagaaaccttcagcagttacacactgcatttgtaaggtcttaactctttagtttggtacgctagtccttgtaagatttccacagtcttcacatcttttctgccagccgcctctttgggaacccagcacacaagacaaccagatctcctgactgccttccctccccagtttcacaagactagaatcccttctgcctgcctagctgttcttgaaatttcatttggatagcaaagaattcagaaggggtgaggaattggggtttccagagcaaaactggaaatggacgagtggcctcttctaaggctggggccaggaatgaccttgtatcgccaaaggggtggcagggctgccagaacgtgcagttaaaggttccggggctcagccacttcctcccgtagctatgcatggcaagtgataagaggacagccctgctgtggactcagcaaagccagagcaggaaatgagacctaggttccaactctaaatgtttactttctttttcctttgctctccttcctcagcagattagttgaggtatgtttcagcctgacctaaagttttttcttatacttttagaagaaacccacttaatatactaacttgtaatagacgccagtcactttttttttttttttttttttttttaagagagatgtctctcttgcgtgatctcaaagtttctggtaacactttggtttctatggaattgctggaattcactgctatcatgtgcacctctattcatctaaaccattgttttgaaaatcctttacttaaatgctcccttcttgaatccccttataaataaaaacagcttatgttggttcagtggtttgatgggctgtttactcttccggaatattattgaagcatcttaaatccaaaatgtcctctttatttagtttgtctcaatgtctaggcacaccatcttgactgcagacgcagacctcaaataaacttcctcctcgggaggtacccatttcccttatcaaggcagggcatttggctcagaaattgctcggtttctttttttttttttcttaagacagaacctcactctcacccaggctggagtgcagtggcactatcttcactcactgcagcctccacctccaggtttaagcaattctcctgcctcagcctcccgagtagctgggactacaggcacatgcaaccacacctgactaatttttgtatttttaatagagacagggtttcactatgttggccagcccgatctcgaactcctgacctcaggtgacccacctgcctcggcctgccaaagtgctgggatcacaggtgtgggccaccttgcctggcctgaaatttctcagtttctaaataggttcttggcagctcctcttctccaacttgaagttactggccaacagtatataatcatctgcagaaagaccaatatgtactgacttttcactataggaagatttatttcagttttgaggaaatctcttgtaaccctagaggataatggaattggaagaaaagtagatgctgtttcagagtcctggggtaaaatgtaaaaatgagcaatatatacacacacacacacacacacatatatatatatttttttttttttgagacggggtctcactctgtagcccaggctggagtgcagtggcacgatctccactcactgcaacctttgcctcctgggttcaagcgattctcctgcctcagcctcccaagtagctgggactataggcacgcaccaccatgcccagctatttgtatttttagtagagatggggtttcaccatgttggccaggcttgtctggaactcctgacctcaagtgatccgcccgcctcaaagtgctggaattacaggcatgagccactgtgcccggcaagtctcattgtttcactgtagcaaggacgcagccagtgttaaatcaggaggtcttcccctgtgaagttgctttattggaagccttaatcagaagaatcatcagcggaaagcagttgtctgcaaagccattcctccccttgccagtaggtggcactgtagctgtactgttttcagatgccctctccagccgtgcaatctctcccttggccccaggcttctcatgttctgtttcttctttgccaggtctatgtgctctctctatcaaccattccaattcttacctggcctatcctggaagcctgacttcaggggagattgtgctttatgatggaaactccctggtaagttgacggtgacctggctgagccaacccacctgccttggctgtgtggtcatggaaggagatagataaggacgccctgccgtcgggggctggaggcggtgggagtaagcaatactggggagttgttcaagagaaggtgatactatttcccctcgggcttgctgtgagtcaacctcaccataagccagctggccaggccaagttagacatctgcagcataatgaaaaccacttgccagcagggggccagttgtctccctgaatgtgtcaccctgtcccatgccacagcctgagacagtgtgcaggtgtttcatattccctgccctctggtctctgaggcatccctgagcgggacaagattgctgtgggaagttgcctaaagatgcgtgcagggcgcgcctgcgacggcatcacactgcatcaggtgctccgttcgtggccaccttcccaagggcaggaaaagggatggaaatggagtggcccttgaagccaaatcttgattcaccagaaaatgacacacagcttacatgcagatggcctgggggacagaggaagagacagggagctggacaaaggagggagaaaggagaaaagaggaaggggagggaggtgaaatccatcttccctcctccgcagcatctgtatccatttttccttttcaccaacagaaaacagtctgcactattgctgcccatgagggaacactagctgccatcaccttcaatgcctcaggctccaaactagcaagtgcgtctgaaaaagtgagtccactcccaccaacacctctgtctgggtttcgctggatggctcctgccgtgcgcagggatgggattgaacaaacctggtgacatgaagactgactggtctctgggcccactcagaatttgtttcagagggagaatttctggcctctgcatgtgtggtatattcatgcatttgttaattcaataggccaggggcctgcaatatgcaagatacaagacactttgcatgaaaactcgtggtcttatgaagaaatgtacgtgtacatcagccgtagagacggacaaatgctacaccttataaacacagtacagtgcaaaccaaatgctttactttgctatttagagaaattgatgtcttctgcctggaataatcagagaaagtgatccaattgaattttttttttttttttgaggtggagtctagctctgtcgcccaggctggagtgcaatggcgcaatctcggctcactgcaacctccgcctcccaggtttaagtgattctcctgcctcagcctcccgagtagctgagattacaggcacatgctgccacgcctggctaattttttgtattttagtggagacggggtttcacttcactgtgttgcccaggctggtcttgaattcctgagctcaggcaatccacccgccttggcctcccaaagtgctaggattacaggcgtgagccaccacacccggcctcaaattgaaattctaagaaaccagagcagttgggtgaacacacacatgcacacacacatacacgcagagccttgggcacaggtggaagggaaaaggtagacagagggtgtttataacattttccaagaattgttgatatggcacataaataaacatgcctctatgctcaacgtggtgttcttcctcctcagagacagatgttcaaaaccaataaaacaaactcctctctaaagggacatctctgtgtaaagccactaatggttatgaaatgtccacctgctttcttttccagggcacagtcatccgggtgttctctgtccctgatgggcaaaagctctatgagttccggagagggatgaaaaggtctgtgttcaatgtcaaacccattttaaagtccccgcagaagtcccgcagggaccgctggcagctgtctagggagaggacagagagtggctctgtgccctccactcacctggaggaagtgtaactactctcccaggtaattgactcccaggctttacttagggctcagcaaaactgaaagccgagatgctgttttaacacagttcagccgtgagagtccctttttgatgtgtgtgtgggcggccggcacaggagaaatgagagagccagggagtcacaatccaaaaataatttctgatttccttccatggaaataaaggacgatgtaaagtgtgactgtttgggatcttatcggatgtaggtttgcagccagatcagtgcacagagcaactggaagattccaagatgccaggaaggcacagttcctcccttctgctgacagaggcagggctataccttgtttcttctcacataaataagactatgggccgggcgcggtggctcacgtctgtaatcccagcactctgggaggccaaggcaggcagatcacctgaggaccagcctggccaacatggtgaaacaccgtctctactaaaaatacaaaaattagctgggtgtggtggtgtgtgcctgtaatcccagctacttgggaggctgaggcaggagaatcgcttgaacccaggaggtagaggttgcagtgagttgagatcaagccaccgtactccagcctgggcaacagagcgagagactctgtctcaaaaaaaaaaaaaaaaaaaaaaaaaaaaaaaaaaaaaactatgaccctttgtgaatctttctgacattaatttctaaatatgagcaccacagtgtttaagggatctgggtctacctaggctcttcaggatacatctgattttcttataaagctgatctctgagttataaggccataactcccatttctcttgctcactgacccatgtgttgctgtgcttgtaggtatgtgacaatcagctctctagtgttcagtatggattcacaattcctctgcgcctccagtaacaccgagacggtacacatcttcaagctggaacaggtcaccaacaggcaagtactccgcggggcaccaaatgctcattaaacgaaaggagtcaggcctaggctcttctactggcatgaatgatctcttttctttctgaacacccaatcttggcttcacttgggacttcacctaagtgatggagtgtgtgttagcaaaactttggaggcatgatgcacaaaagcaaaaaactgggagccacccacgtgagttcacgtcctggctctgcctcttaggagcccagagatcccgggaagataatttagatctgtgtccttcagtttcctcatctgcaaaatgaacataacagtagtattaaatgagtctgcagatctaaagtgttcagcatcgtgcctggcacataggaagcactaagaagtgttagctgatatagctgtaaatataacaatatatttatttatcattgttgccagcagcaccactgagcgcttgggaagcacctgcaatttctcagggcttaagaagctgtctgaaaagtgaaagaaaagcctaaaaaatggataaaatctctagggaaagagtaaaaagaacttcagggcagacaatgagctttgagttacacctgtgcagaatgggggttggaaaattctggaaagatggaggagtgagaaaggagcagcccccagtgtttcataccccacggtggggggcaaggattctagagaaagagcgctttgaaaacgttaccccaacctgcagagaaaggcaggatcaggacagaaagcctactgtatctggggagttggttgctggtacccttggatggagtttcagaagaggaaggtgtagaggctgggcaccatatcacgctgatacatgctaacacatacgtaacagaggccgggcaccttatcacgctgatacatgctaacacatacatgacagaggccgggcaccttatcaatgctgacacatgcggacctcatgatccacccgcctcaacctcccaaagtgctgggactataggcaaacagccacatttatgatttcacagttctgcagcccagaatggcaggactgggtcttcttctcagcatgacacaaggctgaaagagaggtgccaagatttctctgacttgcccttctgccatctttttctgccaccagttggagaaagctatttttaaaggcatgtgtgattaaagcaagcccacgctgcctgaggtcacctgagccatgtcacatatcacagccatgggactgacgtcccctcatctctagaatccttgtctccccccacccccagtggtgtatgaaacactgggggcggctcccttctcgctccttcatctttccagaactttccaacccccaatctgcacaggtgtaacccaaagctcattgtttgtcctgaggttctttttactctttccctggagattatatccactttttaggattttctttcacttttcagacagcttcttaagccctgatcttttttggagccttaattcatcatctgttgtcatgggtttgagcactagagggcggctgagctgttaagatgccgttcaaccccaaggttccacgagtgagtgatcgcaattgctgctgcagccccgcctccactggggattattatcagagattgattttccactccaggctctcccgtttctgtctgtgagcacaggtgaccaggagcagaacctccaagctgttctgggttctccgctcaacctgtccacgggtgttcatatgtccccggcggttacggctcacacgtgcctcttcagccctgcttcgctggccagggcccttgaacgtgtctttagcacctcgtgctggtccagccgttactcttacatttggtctgactttccagtctctttcaaccaataccagtccatcctatatcatcttgctgattaatcttctgaaaatgtccctttgaacatgacacctcctcctcagacacctttattcccctttgaccttgggaatgaagtcccagctcctcccgtccccctgagtcagacctgctgcagagcccagcagccaccacccccagaacctcctcatttcctccagccacagagacaccatcccataaaacagtatgcgccacgtgccgggctccatgctcagtccccagcatccttagttctcccagcaaccctgtcagggaggttgtgatgatgattcctgtttcccaaatgaggaaatctggacacggaaacgttaaggaacctcatccgcctctcccttcctctgtggtcctggactagctcctgcctggaccatctgtgcagcaccgcatattaactgctcacgtggtttttctttgtatacacccgtgctctctcaatctggaatgcagggtctggatcgtacacctctttgtaaaccccagcccggagcacagggctgtgggacagacagtacaaggatgtctcaggatgcttcggatcacagaaccctagcagtgcacctagcatagtcactttcagatgagaacatgaaggcccagagaggtttgtccaaagaccccctagcccattggtagcatagtaaagaatacctcccagagctctgagctgcagggcgagcttcccaccaggacctaatcctgcagacaagcagcctctcagcagttgcctgctcctgggaactcatatggcaaccttggttctcaatgtgccaccctctgtgtggggcagagctgggggttgtctctcaccaacagaacagtcaccccctttgtctggcagaggccttgggatgaagttccatgactgtaggcgacatcccaggtccctttgcatgatctccatcattacacatgctgggtacctgggtgactccagggttatctacaatcaaacaccacccaaagtgtcttgcccggaggtttgctacccactcagtctggctcaggaggccttcacgttgagatctgtctgttcttccatgagcccggcacagtcccaagcttatttaatggtacctggatatcaagtccatctcactctctaccctaactctcttctggaaatctaggaatcagactagtcatcagataagccttctttaataggggaaagcagtagcattgggaaccttttaacagctttacaatggctcttctgaagaacaaacaagcccttgatgctctttagttattgccagaataatacgtcctggattgttctcagtgggcagaacattatgctaaggcacagtctctccctgctgcggggagtgtggctaatgacgcttgggtgtggagattcctgggtgcgtgtggggcctgcagcccagtcccatcgttgcctgtgcattactccctagtcgaccagaagagccttcgacctggagtggctacatgggaaagatgtttatggctgctaccaactacctccctacccaggtgtcagacatgatgcatcaggacagggcttttgccactgcacgcttgaacttctccggacagaggaacatctgtaccctctcaacgtacgtacaatgacacccactctgaacaagaccacactttcgtcaatgtatttttccaaagcacaaaaatccccaaacctgaaaagaaaaaaagaaaacttgccccaggctgggcacggtggcttacatctgtaatcccggaaccttgggaggccaaggcaggcagatcatctgaggtcaggagtttgagaccagcctggccaacgtggtgaaatcccgtctctactaaaaatacaaaaattagccgggtatggtggtgcgtgcctgtagtcccagctacttgggaggttggggcaggagaatcgcttgaacccaggaggcggaggttgcagtgagccgagatcatgccactgcactccagcctgggcgacagagcaagactccatctcaaaaaagaaaaagaaaacttgccccaaaggaagggtgagcggaatcaaacccctgcttttcctatctgacttcaatacggattctcagggggcagccagaagttggcatgggaattttagccttctggttataatgacactgtcttaaaaacaattcttatttttatgtaattatgtaaaaagcctccagatctgttttctaggttcggactcctatggggctgacagatgttttaagaagtttaaaggagtttattcaaaagttgaacatttttaaaatttcacaaaactaaccagcaaagacagtaagccaatcctccatttaccccctttctgtcttggttaagggcagagacacatgtcagagggagactgcgtcccatgtagggagctaatgtgttcactagctattgcttctcgcagggtcgcagcatctacactcacttgcctcatccacactgtcacgttcaaagacaagaaataatcctgaaagtagatcccaaggccagaatgcaaaggaatagccagaagcccagaccagatcagtgggctaagggtttgtcaaaggcagaatctggtgacagctagggtgaggggggctttgtcattggaagcgaatccatcgcccatcttcgttgtcatcacggtttatgttttccttggcccttaggatccagaagttgccacggctgctagttgcgtcatccagtggacacctttatatgtacaatttggatcctcaggatggaggagagtgtgtcttaatcaaaacccacaggtgaagagactgcttttcaaaagacagcctttcgagagctggtcgtgtagagttgtcccttcgccaagaacgacaagcttcagtgcccttgcattgatttgttcttcactggcagtctcagtggcaaacctctagtgggcaagtgctctgcaccgggctctgtgtcaggtgccctcagcatgtggtaatcatctggaaaagtgccaggattaataacacacaagatggtctccccctcagcctatgctcctaacacagccctgagctcacagtgggtgttcaaaaatattccctgccaccaggtgtggcggctcacacctgtaatcccggcactttgggaggccgaagcgggtggatggcttgagtccaggtgttcaagaccagcctgggcaacatggtgaaaccccatctataccaaaaacaaatacaaaaattagccggttgtggtggcacacacctgtagtcccagctactcaggaggctgaggtgggagaatcacctgagcctggagaggttgaggcagtgagccatgatcacaccattgcactccagcctggacaacagagtgagaccctgtctcaaaataaaaaaaaaaaaaaacctattccctgcatggaattgaaaagtgctctaccagtcatgttgactcacgcctgtaatcccaatactttgggaggccaaggagggcggatggcttgagctcaggagtttgagaccagcctgagaaacatggtgaaaccccatccttacaaaaagaaaaaatataaaaattagccaggcatggtggtacatgccttgtagtcccagctacttgggaggcagaggtggggggatcacctgagcccaggaaggtcaagactgcagtaagctgtggtcacaccactgcactgcagcctgggcaacagagtgagaccctgtctcaaaaaagaaaagaaaacaaaagaaaagcactcatgccttctgtgaacaggcacagactgagctctcctgctgtggccagggcaccagagctgccaccgccccccaccgatggctgctctccttgctagcatgtcctcacctgtgtgtactgggaagagcagaggactaatctttgtctagccaatgtaagagaaagaggccattttgacggtgtgtgactgcccctggcagttgcaggtcacttcagctcatcctggcccagcagcgtgtgggtaggtctacaatttaaacccacagagttggcgggcggatcacctgaggtcaggagttcgagaccagcctggccaacatggtgaaacccagtctctactaaaaatacaaaaattagccaggcgctgtggtgggtgcctgtagtcgcagctactcgggaggctgaggcaggagaatcgcttgaacccaggaggcggaggttgcagtgagccgagattgcgccactgcactccagcctgggcaatagagcaagaccctgcctcaaaaataaataaataacccacagagctgagcacaggcttcttcatgcttttcctttggaaggtgtcctagatatatgatgatttcttttttctttcacctcctcttgattgtcacaagtagcttgcttggctcaggaacaacagaagagaataaagaaaatgacctcagaccttccttacctcagtcttatgcagcgaccgtagccagaccaagtgcatcttcagcctccacggtgccaggtgggtggacacggggccaacaggggagcatctccaacagtgacctccctccccttctccctgcacgctccctccccttcccccttcactgttacctgggggtggagtgccctccctccccttcccccttcactgttacctgggggtggagtgctctccttgaattttttattttctcacaggtgaggccatggtaatagcctttaaacctgggaccctcaacctggcaaggcatcacacgatacggtctttttcctaacaagtggtgttaaccctttgcctcttcaaaaattccaatgaggccaggcacattggctcacacctgtaatcccagcactttgggaggctgaggccagcggatcactggaggccaggggtttgagaccagcctagccaacatggtgaaaccccatctctacttaaaaaatagaaaaattagctgggcatgttggcacacacttgcaatcccagctactccggaggctgaggcaggagaattgcttgaaccagagaggcggagattgcagtgagctgagatcataccactgcactccagcctgggtgaaagagtgagactctgtttcaaaaaataaaaactaaactaaaatttccaaagagcctgtagtcctagccactcaggaagttaaattgaggcagaaggatcccttaggctcaggagttcgagaccagcctgggcaacatactgagaccctacctcaacaaagaaaaattcaaagaggtaggatgcctcaggcatctgaagtggaaaggcaggtcaggcttaaagatggcagatggtgaggattatgacttgtcctaggcacagtacctccagggggaagacagacagcccctttgcttcctttgccctttatttgagcccccgctccccacccgccaggtcatggcataaaagcagatccccagtgcttgtttcatgtctctttcttggtttccaggttattctgaggacggcggggcgctgcgaggagaagttattcctgaacatgagtttgcgacgggaccagtgtgtcttgatgatgagaatgagtttcctcctgtgagcattaggaacccgtaactgggcggctcagtctgtgtgcttagaaggaaaccttcgcctcatacgagaggcagagtccctttccctgttttctaatctataacaactaattctctgctctagtatttggaaagccataggatatttgttgtactgtgtgcttcgaatcctacagagtaggctttaggtgtcgagctaaaccctgatggcattagagtcaccgaatactaatccagggagtcttggtggcctccctccagccagaggcctgcgatcccttactttgcttctgtagcactgactttgctgcctggaaggtaggaacacgtgacttgtctaaaacttattttcctgaggctcccatggatgcgtttgcagaatgctgccttccttgtgctggaggggatggtttcagagggctgggctgtgtgttcaggactctgagctgagttgctgcactctgtgaaccagcttgaccctcacttacctgcagctctggccggcagacccgcacctccccagcagttgcagacactcattaagaaacaagtggccgggtgcggtggctcacacctgtaatcccagcactttgggaggccgaggctggaggattgcttgagcccaggagttagagaccagcctgggcaacacagcaaaaccccatctccaccaaaaaaaaaaaaaaaaaagaaaagaaaaaattagccgggtgtggtgtcacgtgcctgtagtcccagctattcgggacgctgagatgggaggatcacctgagcctgggaggtcgaggctgcagtgagctctgattgtgccactgcactccagcctaggtgaaagagtgagactctatctcaaaaagaaaagaaaagcaattgtgtgctctgtggagggcagcaggtgcagggcaggagcttgcccgagcacctttagctgggtttcccagcaacctgctcagcctgttcccacagctagggccctcggggctggctgagtgctgggcgtggcttcttccatcacctggaactgaagacaagattccctcctgagagcctgctggggcttccttaactgctgattcttcaggctcccatctggagtaacatatagaccgctcttgtgagcttcagtcaaaacatcccagatagtcaacctgaaatcatttcgagatggaagtactgatttgttttgttttgtttttgagacggagtcttgctctgtcacccaggctggagtgcagtggtgtgatctcggctcgctgcagcctctgcctcctgggttcaagcaattctcctgcctcagcctcccgagtagctgcaattacagatgtgcgccaccatgcccaactaatattttgtatttttagtagagacggggtttcaccatgttggtcacgctggtctcaaactcctgacctcaagtgatccactcgtctcggcctcccaaagtgctaggattacaggcgtgaaccgccgcacccggccggaagtagtgtttgggccaagacttggagcatcagctcctagagccagagaggagctgccacttgggcactgaaacaatgtccattaggctttgttatggaaacttctcctgatcattgttttgtgtccattgagcttccaattgtaaaaggatggagtgcaggtctggcttctttctcccgcagatccgtggaaccctctagtgagcacatttggcttagaaaacaaagctgcggtggggccctgcatgcagggctggggctgttgttttgtgatttcccacatcggctctgcgggtcggtcgcagcgtgagcttttacatttctggctttcaataggcaggttgtcagagacgtggctggcaagtgaagtttatatctcagtggcggagagcagttgttcttaaaaatactaattataaacttcaaaacctctgttggcatgctgcctaactataaaccagttgttttacctttgggttctcatggccccaactggccttaaagggcgttcttctgcaccctcaagaggcggtggttatttacctgaagtcgaggcttccaggatccagagcactctaggtcagacaccgtggggacaaatgtgaccattctactctgtcagggtttaccacatccagacactcactaggttccgtttcactaattttggtaaaagtctgtaactactataaaatattattagattcttaattgtaatcgcagtaagccttgcaacctcttatagttacagaattggggtaatgtggatattagtatctaggaggtagttccttgccaaagaacctgtataaaataataggtaccttgtgcagatcatttatttggggtaaaaaggaaaaggggaggtgcttaattgaagaaccagtaagaaagtttgtcctgaggcctgtgtgcccattcagtgccaggaagctgggcatgagccagttgtttcttctccctcctaaggaccaaatgagtgaaagttggttgaaattgcatcaggaattcttatttatacgcaagaaatacttcctgccagtgagagtggtcactgaacaaggtccctagaacaggtgttagacccttgtgagtgtcaagcagcccctgtgtgcagggctgtgtcgtggcagccaccaacctctcagtctgccctccagcctgcaggtagatggtgatgaggggcagtgctcccactaaggcactgtctcagtagcaggcaggcttctccatctcaccatgtaaggaccagaggcatgcatgctcctgggatgctctatcaatatggcccatctcagtcatgcctgaattggcagaaatgttcagcgagggatgctagggaacttcctctctgtctccttattctgaattgtcatgcctattgcaaatctctgtgcagaattcacatctttactcacattccttaaaatcttctaggaccacaaaaggctcttggagtctcagcttggttaaaatcgcctctcttgtagtgacgaacaaacataggcttgcctgagtagtctgctacaggagctctgtgagccgctgccttaagaacgcgggtcatcactagtgatcttttcagaacacatactgacacttccctgcgtaggatcacgcttgcctccttgggatttacttttgctctgagagcagtgaaagaaaagagacttgatcatttctggtgccttagaaagctgctacattcgggaggatgagaagcttttgtttcaggaacaagccaacctgtacaagtctctgtattttgtgagactagtcccaatcttgtgagcaagagtcaggaaatcaggcccaagggtataaactgaccttcccttttttttttttttttttttttttgagatgatagagtctcactctgtccctcaggctagaatgtgttggcgtgatctccactcactgcaacctccacctcctaggttcaagtgattctagtgcctcagcctcccaagtagctggggtttcaggcatgctaccatgcccagctaaattttgtatttttagtagagacaggatttcaccatgttggccaggctggtctcaaactcctgacctcaggtgatcacccccctcagcctcctaaagtgctgggattacaggtgtgagccactgcgcccagcctaaactgacttttttttttttgagatggagtcttgctccatcgcccaggctggagtgcagtggtgcgatctcggctcactgcagcctccacctccccggttcaagcgattctctcctgcctcagcctcccgagtagctgggattacaggtgagcgccaccatgcccggctaatttttgtattttttagtagcgatggggtttcaccatgttggccaggctggtctcaaactcctgacctagtgatccacccacctcagcctcccaaagttctgggattacaggcgtgagccaccgcgcccagcctaaactgactttttaatagtgattgagcagtccatgtttacaagtaagatgagccttttaaaaatatatacatatacatataaatacatacacacacacacagagacatttttatagtcagtattttctagaactgtgtcatacttgtctacacctaaataagctgggtgaccattctgtggccatgagcgagttcagacagaaaaattccacagtgcccagcctctccctgctcactctgcatgggcacagacctgttgataatgcacctgcctaccagcctcttcctgagaagagtaaggccattctgttttgattttggtagataatcttgtgccgtggaaatcagaagggcaaaacgaagcagtcatgatgagaagcacacctcagaaatcaggacatcccccctatcaggtggttttggagaaaacaaggaaggcggaagaatggagtgcaattgtgtgagcagaaaggggggcaggaatcccgggtgctccactgcttaaaccacaggacctggttaactcctcaccaagcttcccacgaccctggttgccaatgggcgcgggagacattgtatacacatcatgctatttaaaatacgttcaaactatagtgtaaatgctaattaaccatattggtatataaccggaattttatattaaaaggggcctcctttttaaatatatgccgtgtaaaaaatgtacttataggaacatctctttgaattgtatttcttgtatattacatacttagagagagactcttttagccaggcaaagtcttttttggctgtggctggaataaatcatttattacttgggagtcccattttggacactaataataaaatcatggcaatgcatttttgaggtttttatatatttttttgtttccttgtggttataggggacaggaggaactctttaacttcttttaaatgcagtcatttcacccttaaaaggagaggaaggggattgggccacagacttatccatggactcgtctgctctgagatctggaaaacgacctaactttggtctaaatctgtgctcctcaaggcattgtttgatagaaatgtaggatttcaggatctactcgagccctactgagacggaatccggattctcacaagatcccaggtgatttgtttgcatattaaagatggagaccagtgagtacactggtttgtggaagg

SEQ ID NO: 1297 - DNA, 17432 bp, Homo sapiens
tgaattcgagttccgcctcctaccaggaagaaccggctcgggccggagggctgcacggaggaccacacggacgcctgcgggcccgccccttccgcttcacgacgttcagcctgcgtctggaactggaatggcctagcccaaagctagataacaggtagattgtttttccgacaaattatcaaacgacccatcattgcactctttcaaaatttgattctcagacgtacccattctttttttttttcctccgggaagatgagatatactcattcttgaaaatacctccgggcttgccttctgcacacttctttccctccctgtctcacgccatggtagcgtccgcctaggttgcaggcgacccgcggggtggggcacaccattcaaagaaggggagggattgaggtttgcatcaaaacaaatacccctgcctttgcaaaggccataactaagtaatccagaaaaagaaatgcaggcggagaatagcagcctccctctgccaagtaagaggaaccggcctaaaggacattttctctctctctcctcccctctcatcgggtgaatagtgagctgctccggcaaaaagaaaccggaaatgctgctgcaagaggcagaaatgtaaatgtggagccaaacaataacagggctgccgggcctctcagattgcgacggtcctcctcggcctggcgggcaaacccctggtttagcacttctcacttccacgactgacagccttcaattggattttctccatctagcggagccgggggctgcctggaaagatcgctccaggaaggacaaaggtccggaagttgtgggaccttagcagcttgggctccccggatcacccccaaatgatcatttcggaatggagccccagttttcactaggatgccatgggctctaaaatatacagctatgagttctcaatgtttcgagatccaaaagtctcagacctcaatgctttgtgcatcttttatttcagggattccctacgcccagcaccgggtggatgtgcaaagaagtacgctttaggccggctcaaggttccccaaagctccactcctctgcctaggcgttcaactttgagttcggatggtcctaacatccccatcatctacacccaggtctcccaacaatgcaactcctatgatgatccctctagccaagcttccatcccactcacccccaaactcgctaagtccccactgccccacccccagccccagcgattttcccgagctgaaaatacacggagccgagagcccgtgactcagagaggactcatcaagttcagtcaggagcttacccaatccagggaagcgtgtcaccgtcgtggaaagcacgctcccagcccgaacgcaaagtgtccccggagcccagcagctacctgctccctggacggtggctctagacttttgagaagctcaaaacttttagcgccagtcttgagcacatgggaggggaaaaccccaatcccatcaacccctgcgaggctcctggcacaaagctggacagtcgccatgacaagtaagggcaagtaatccgcctgccggaggaagcaaaggaaatggagttggggaggagggtgcagagtcaggattctcgccgacctggtgccgtagatactaacattttggggtggaaaattctgcaagccagagctgtgagggcagaattggtggaaatcattttggaggaatcctgcattgtgtcaaatatgaagggtggaaggaagaaagcttttgcgtttgctctcagctggatcctttcttctcatcagttaaaatgtcattttttaggaaggctttccgtaatatcacaccctaacgttttctcccagatactttatatcacaccatcttatttaatctccttcacaacccttatcactctgataagatttatttgttcattgctttcagtacatggaaacgtaagccttatgaggatatagaatttttctactatcttattcattgttgtattcctgagtgcctatatcagtgctgggtagcaagtaagagctcgataataaatattttttgaatgagggagacaggtctgaagcctggagaatgagatgcagaagaggtgcaagacctgctgcgccctctgcaggcggcgggggggcggtgcaggtgctttaagaattaccgcgggactcggtagggggagcgtaggcgcttctcgccaagatagaagcgttcagactacaactcccagcagccacgaggagccctagggcttgatgggaacgggaaaccttctaacctttcacgtcccggctccgcgggttccgtgggtcgcccgcgaaatctgatccgggatgcggcggcccaatcggaaggtggaccgaaatcccgcgacagcaagaggcccgtagcgacccgcggtgctaaggaacacagtgctttcaaaagaattggcgtccgctgttcgcctctcctcccgggagtcttctgcctactcccagaagaggagggaagcacaggtgggtttctttagctctgcgtcggatccctgagaacttcgaagccatcctggctgaggctaatctccgctgtgcttcctctgcagtatgaagactttggagactcaaccgttagctccggactgctgtccttcagaccaggacccagctccagcccatccttctccccacgcttccccgatgaataaaaatgcggactctgaactgatgccaccgcctcccgaaaggggggatccgccccggttgtccccagatcctgtggctggctcagctgtgtcccaggagctacgggagggggacccagtttctctctccactcccctggaaacagagtttggttcccctagtgagttgagtcctcgaatcgaggagcaagaactttctgaaaatacaagccttcctgcagaagaagcaaacgggagcctttctgaagaagaagcgaacgggccagagttggggtctggaaaagccatggaagatacctctggggaacccgctgcagaggacgagggagacacgtaagtggtgatggcagtggagtgtggagtctggggagatgaagtgtgaggtcgatctgtcctctggtcctgagacccacttctccaggcctctgccccctttgcttggcgacccaggtttattgtcccccatcttcctttcagcgcttggaactacagcttctcccagctgcctcgatttctcagtggttcctggtcagagttcagcacccaacctgagaacttcttgaaaggctgtaagtggtaaggataacaacggggcagggagctgaccacccccgagattttcactgtaaaacagtccagttttctaggagagggatgccccagagctgggagaagcggcacgtagcccttttagactgagcttacattttatctagcagtttgtgtcttctacttccctcaaggattcaggggggcttacctaccccagaggcaggctcagccctagccctacacttgaaaagcataggtctggccagctttctaactctcccctgtttctagggctcctgacggttcctgcatcttgaccaatagtgctgataacatcttgcgaatttataacctgcccccagagctgtaccatgagggggagcaggtggaatatgcagaaatggtaaggactggggctaactgcctcttcatcaatgctgcacatttaagtccttcgtggagatggaaaaagtgtagtccaagtgtttcctgttcacaaacgggactgtttttcaagacgagtttccacatgtagcgttttctgccccgaattctgaagttatttagagagaggtttcccctttctttaattaggaatctgtgttttttgctaaaaagtagtgaatttcttgtggcagcatatatatatttctatttcttatttttttgagacaaggtcttgctctgtcacccaggctggagtgctgtggtgtgatctcggctcactgcaacctctgcctcccgggttcaagcgattctcctgcctcagcctcacaagtagctggtattacaggcgcacgccatcacactcgactaatttttatagttttagtagagacggggtttcgccatgttgggcaggctgatatcaaattcctgacctcagaggatccgcccaccttggcctcccaaagtgcggggatcacaggtgtgagtcaccgtgcctggcttatagctatttattgattgactactgatatatgttagtcactgtgctgggataaagtggtggacaagacagatgaagggctggtttgctttctgtgtgggagacagacaacaaacatgtaaaccagcaagcatcaggaccaagatgatgataaatgctctgaaggaaatacacagaatgaagagagactaactagaggaaagcacattgcataaaatggtcaggaaggagctctctgaaaaggaggcatttgagctaagacctgaaggaggataagggatcagtcatgtgaaggcttctggaaagagctttccaggaactggcaatgatactataaacacccagaactgggaaatagctttgtgcgttaaaagaccagaaaggccctgcatggtggctcacgcctgtaatcccagctactcaggaggccgaggtgtgcagatcacttgaggccaggagttcgagaccagcctggccaatatggcaaaaccccatcgctactaaaaataccaaaattagacgcatgtggtggcacgcgcctgtaatcccagctacttgtgtggctgaggcaggagaatctcttaaactcaggaggtggaggctgcagtcagacaaaattgtaccactgcactccagcctgggcgacagagtgagactccatctcaaaaaacaacaaaacagactgggctcagtggctcacacctgtaatcccagcactttgggaggctgaggtgggcagatcacctgaggtcaagagtttgagaccagcctggccaacatggcaaaacctcatctctacaaaaatacaaaaattagctgggtgtgatggtgggtgcctgtaatcccagctacttgagaggctgaagcagaagaatcatttgaacccaggagatggaggttgcagtgagccaagatcatgtcactgcactccagcctgggtgacagagtgagactccatcccaaaacaaacaaacaaacaaacaaacaaacaaacaaacacaaaacaaaaaacccagaatgctggtatagccagactgaggcaagtgagggggacagaggggtgaggacagagaagagcagccacgtcgtgttggttcttatgggtaaggcatttggagtttatttgggaagtcatgagagaggtgttttttttttttttttgagacgagtcttgctctgtcgcccaggctggagtgcaatggcgtgatctcggctcactgcaacctctgcctcctggattcaagcgattctcctgcctcagcctcccgagtagctgggattacaggcacccgccaccatgcccagctaatttttgtatttttttaaatagagacggggttttaccatattggccaggatggtctcgtactcctgacatttgatccgccggtctcggcctcccaaagtgctgggattataggcatgagccaccgcgcctggcttaatttttgtatttttagtagagacaggttttgccacgttggcctggctggtctcaaactcctgacctcaggtgatccacctgcctcagccttccaaagtgctaggattacaggcgtgagccaccatgccaggccatgagagaggttttttttgtttgtttgtttgagacagagtcttgctctgttgtccaggctggagtgcagtggcaccatctcagctcaccgcaacctccgcctcccaggtttaagtgattctcctgcctcaaccttccgagtagctgggattacaggcatgtgccaccacacccggctaatttttttgtatttttttagtagagatggggggttcatcatattggccaggctggtctcgaactcctgaccttgtgatctgcccaccttggcctcccaaagtgctgggattacaggcatgagccactgcgcccggccaagagagttttaaaacagaagagtgaatggtttatgggtgggcaagagtgaaatccagggccaggcacggtggctcacgcctgtaatcccaacactttgggaggctgagatgggtggatcacctgaggtgaagagttttagaccagcctggccaacatggtaaaaccctgtctctactcaaatacaaaaattagttggggctgggtgcggtggctgactcctgtaatcccagcactttgggaggctgaggcaggtggatcacctgaggtcaggagttcgagaccagcctggccaacatgatgaaaccccatctctattaaaaatacaaaaaattagctgggcgtggtggcgggcgcctgtaatcccagctactctggagtctgaggcaggagaattacttgaaccaaggagatggaggttgcagtgagccaggattgcaccactgcactccagtccaggcaacagtgtaagactccgtctcaaaaaaaaaaaaaaaaaaaaaagattggctatagttttctcccacccatcctaatcaggttctgcctccatcgcttcctgaaagtgctcttgtcaaggtcactaatgtcctcttgggtcattctccttttttttttttttttttttttttgagacagagtctcgctctgtcacccagctggagtgcagtggcgccatctcagctcactgcaagctctgcctcccgggatcacgccattctcctgcctcagcctctcccgagtagctgggactacaggcgcccgccaccacgcctggctaattttttgtatttttagtagagacggggtttcaccatggtctcgatctcctgacctcgtgatcctcctgcctcggcctcccaaagtgctgggattacaagcatgagccaccgcgcccagcccctcttgggtcattctctaaattcgcctcactgcatctcttagcagcatgagtcactgtctccacctccctgcgctggagcactcaggcactcagggctctgctgggccttctcctcctccatcagcactctttcttttttttcttttttttgagacggagtttcaaaaaatcagacccaccaaggcatgtggcagttgtgttgctctttgctcggtacccgctagaggtctgttgccattaatttgaaatgagaccagttagtgtgactgtgcatctttcctggcaagttaaatgactatagtttctctgtttgtaaaatggggatgattataatagcacctgcctcacagagttgtgagaattaaaataatcagtaatgaattaaagcacttaaggccgggtgcggtggctcacgcctataatcccagcactttggggggccgaggcaggtggatcgcctgaggtcaggaattcaagaccgacctggccaacatagtgaaaccctgtctttactaaaaatacaaaaattagccgggcttagtggcgggcgcctgtaatcccagctacttgggaggtttgaggcaggagaattgcttgaatccaggaggcgaaggttgcagtgagctgatcgcaccactgcactccagcctgggcaagagagcaagacttagtctcaaaaaaaaataataaaattaaaaaaaagtacttaaaacagcacctagcatatagtaagtgttcggtaaacactagtagtcactggtatcagttgtgtgcaagccaagaataggaggatggtatggttgaggtttaccaggagagaaagacaagggtatcctgagagtgtcttcaagagtgtgcatgccatggtggactagaatctacagtgggtaaggaactggactgtaaataagtttttgatgaagctgaataaattgtcatggtagaaatagcagagcagggtcaggcctggtggctcacgcctgtaatcccgacactttgggaggccgaggcgggtggatcacctaaggtcaggagttcgagaccagcctggccaatatggtgaaaccccgtctctactaaaaaagatacaaagttagccaggcatggtcgtgattatgatattaatgattataatattaaaacattttaaaaaatatatcttgcaatacagatagtcaatttgttttctttttttctttctttttttttttttttttttgagacagagtctcgctctgtggcccaggctggagagcagtggtgtgatcttgcctcactgcaacctctgtttcccggttcaagcgattctcctgcctcagcttcctgagtagctgggattacaggcacgcaccaccgcacccggctaatttttgtatttttagtagagatggggtttcgccaagttggccaggctggtctcaaactcccgacctcaagtgatccacccatttccgcctcctaaagtgctgggattacaggcgtgagccactgctcctggccagtcagtttgttttcaaaagatttttgtggctggtgtggtggctcatgcctataatcccagcactttgggagaccaaggtgggaggaatgcttgagcccaggagtttgagaccagccttggtaacacagccagatcctgtctctatcaaaaaagttgggcctatggtcccagctacttgggaggctgaggtgggaggatcgcttgagcctgcgaggttgaggctgccatgacctttgattgcaccattgtactctagcctgggcgacagagtgagactctgtctcaaaacaaacaaccaaaacctttttgtgcttttttttttttttttcctgctagtgtaccagttctatcgcaacctctctcattaggtattttcatttttagtgtctacaagcttagcatttgaaatagataactttttttttttgagatggagtcttgctgtgtcccccaggctggagtgcagtggcgcgatctcagctcactgcaagctccgcctcccgggttcacgccattctcctgcctcagcctctcgagtagctgggactacacgcacccactgccaccacgccaggctaattttttgtatttttagtacagtcggggtttcaccatgttagccaggatggtctcgatctcctgacctcgtgatccgcccgccttggcctctcaaagtgctgggattacaggcgtgagccactgcacccggccttaaatagataaaatttgtataggtcagaaaattggggaagggtgtatttgggtatttccatatacttgtgtgtactgagtcttcttcccaatatagtttctcgggttttctcctttcttttccaccttttcacagaactttctgcaagtctcatttccagctccccagcgtctttcctgagtacttgccctgccccgtgggtcttgcaggaagcctttactcctcgtcttgccctctccaggagacactttgcatcctctgtaccctttatctctcagggtggggacggggaatgtcctcattcccaaatgctgtagccacacaattgctctttcgtctttgtgaaacttttcccttgaggcttatgctgattctctctcccgctgacgacgttggcactgtacagccttccggtgctctcctgttcgcccgccattttggtgacctcaggtatccaagccaaaagccagggtctctctcatcctttaatctttaatctccctgttcctaacccctcacatccaattacttcccaaatcccatcaagtctgcctaatcttcctaatccacccacatctgtccctcccactgcctctactttaattcaaggtcctattattttgggccttatgttgctgaaacagtctcctgcctccttttgctcattaaaaccgtatttgttgactctgcttattctgcaccacgtgttggggaagcagtggtgagagcgaggcagatgtgattccctccttctctgataggtatgacggaaggggagtgaggagcaccaggggctataggaaagaggaacaggggcgccttgcttagctggaggggttagggaagcgttcccagaggaagaagcatctaagagacctgaaggatgactaggattcagccaggaggagtcgttgggggagatgaaggaagaatattccagacttggagcctaggacatgtgaaagccagtgggttgaaagtgtggcgagttggcactttatgggacctgagagtcaaaatggcgggactcagagattttttttttttttttttttttttttgaaatggagtcttgctctgtcgcccaggctggagtgcagtggcgcgatctgggttcactgcaagctccgcctcccaggttcacgccattctcctgcctcagcctcccgagtagctgggactacaggcgcccgccaccacgcctggctaattttttgtgtttttagtagacacggggtttcaccacgttagccaggatggtctcgatctcctgaccttgtgatccgcccgccttggcctcccaaagtgctgggattactggcgtgagccactgcgcccggtcaggactcagagatttttatgggaattagcagatagagataagccttgagaggtgggtcgggggtagcacgtggtaatggaagactaggaggaggaactggcaagatttggtattgggttggaccaggagtggaaaggaagtgaagagtggtagcagtcaaggctggtgctcagatttcaggattgagcactggtgtggagtccaggaggaacagcaggtttgatggtggtggatgccgggcctattatggacaaattgagtttgaggaacctgtgggatgatcaagtggcactgtccaccaggcagttggatatatgggttcagagtatagaggtggacactgaagtcctggctggttgacatcagcctgaggcccagaagacaactgacgaaggacagtgtccagactatttatctctcacaaatcagtaagaaaaagacggctgggcatggtggctcatgcctgtaatcccagcactttgggaagccgaggcaggtggatcacccgaggtcaggagttcaagaccagcctgaccaacatggcaaaatcccgtctctactaaaaatacaaaaattagccgggtgtggtggcaggcgcctgtaatcccagctactcaggaggctgaggcaggagaattgcttgaacctgggaggtggaggtagtagtgagccgagatcgtgccactgcactccagcctggggacagagggagactctgcctccaaaaaaaaaaaaagaaaagaaaaagaaaaaagagaagaaaagaaaaagacaacaactggtcaggcatggtggctcacacctgtaatccccactttgggaggccgaggtaggcagatcacttgaggctgggagtttgagaccagcctggccaacatggtgaaaccccatctctactaaaaagtataaaaattagccgggcgtggtggcaaatgcctgtggtcccggctccttgggaggctgaggcatgagagtcgcttgaacccaggaggcagaggttgtagtgagccaagatcgtgccactgcaccccagcttggggaacagagaaagactctgtctcaaaaagaaaaaaaaagaaaaagaaaatgggcaaaatttatgaaaaggtgtacctaactaaatggccagtaaacatagaggaaatatctaatctctcttatagtaatgatggaaatacaaatttatgctgtaatgaaataccatttcaccaccttcaaattgagaaaaatgtaaaagtctggcaataccaagaagataaagaacaatagacacttttttttttttttggagacaggatcttgttctgttgcccaggctggagtgcagtggtgcgaacatggcacactgtagcctcaaactcctggggtcaagcagtcctcctgcctcactctcccaaacaggtgggactacaagtatgccaatatgcctgactaattttttaattttttgtaaaactggggtcttgctatattgcccaggctagaatagagactcttatacactgctggtgggagaggacattgggacaagtgctttgggaaagaaattgacattatagtatcttacaaagtttgcaaagtgcatagcgtagagaccagtaattttactcttcagcagaaactgtagagaaacccttctacatgtgtacagaatgttaaagcacactagccaaaaaacagaaaaacatcagtgattctaaatagaagaagggtagatcagtttgaatatattcatgagtagagtactatacaccagtgaaaatgcatgaattagagcaaaatgtgtttccatggttaaagcttgctatcacagagggatgtatatgatataataccattactgttaagtctaggccgggcatggtggctcatgcttgtaatcccagtgcattgaaaggctgaggtggctggattgcttgaggccaggagttttagaccagcgtgagcaacacagacccctgtttctacaaaaaaataattttaaagattagccgggcaggctgggcgtggtgtctcatgcctgtaatcccagcacttgggagactgaggtgggtggatcacgaggtcaggagttcaagaccagcctggccaagatggtgaaaccccgtctctactaaaaatacaaaaaaattagccgggcgtgatagcaggcgcctgtaatcgtagctactcaggaggctgaggcagagaattgcttgagtctgggaggcagaggttgcagtgagccaagattgtgccactgcattccagcctgggcgacagagcgagactccgtcaaaaataaataaataaataaataaataaataaataagccaggtatggtggcttatgcttatattcccagttactagggaggctgaggccaggggattgtttgcttgagcccaggagtttgaggtttcagtgagatgattgcgccactgtgctccagcctaggcaacagagtaagaccctgtctctaagaaaagaaaaaattaagtctaaagacctgcaagacaacgttagatactgttttttttcccatatgaatatactcctaggctgggcgcagtggctcacacctgtaatcccagcactttgggaggctgaggcagaaagatcacttgaggccaagagttcgagaccagcctggccaacgtggcgaaaccctgtctatactaaaaatacaaaaaattagctgagcatggaggtgaactcctgcaatcccagctactcgggaggctgagacacaagaattgcttgaacctgggaggtggaggttgcagtgaactgagatcgtgccactgcactcagcctgggtgacagagtgagactctgcctttaaaattaaaaaaaaaaaatttatatatatatatatatttatatatatatatatatttatatatatatatatatatatatatttatatatatatatatatatttatatatatatatatattcctaaggaaatgtatgacagtgataaattcaagatagtgtttacctctgagggagagtttctgttaggaaaggggtttaaacatatctttttgttcagctggatggaggggtcacagggctgtttttttaataagatactttgtatgtttgaactgtttaattttttttctttatttttgtaaggaggtttttttgtttccatttttgtatttttgagacagtgtttctgttgcccaggctggagtgcagtggcaatgatctcagctcactgtggtctctatctcctgggctcaagcaattctcatgcctcagcctccctagtagctgggactacaggcatgcactaccatgcccagctaatttttttttcttgtagagacagtgtttcaccatattgcccaggctggtcttgaactcctgggctcaagtgatctgcctgcctcagcctccctaagtgctgggattacaggtgtgagccactgtgctcagccgataatttttttcttttctttttcttttttttttggggggcactgtctctctgtcacctagggtggagtgcagtggtgcgatctcagctcactgcaacctttgtctcctgggttcaagggattctcctgcctcagcctcctgagtatctgggattacaggtgtccaccaccacgcctggcaaatttttgtactaatatttttttaaaggatcaaatggcacctagcatgtactcagtaagtatttgaataattggttggttctttgtctctgggttgaggtattattatttgtttcttcctctctaagtgtttataaagaaaaagtataaggcccggcacggtggctcacacctgtaatcccagcacttttggaggctgaggcgggtggatcacctgaggtcagaagtttgagaccagcctggccaacatcatggtgaaaccctgtctctattaaaaaaaaaaacaaaaacaaaattagccaggcatggtggtgcatgctctgtctcaaaataataaaaaaaaaaaagtatgaatctatatggcttttggtggctaaatttgacattaaagtctgagctcacccttgaacattgagacagagtctgtgctccatatatacaccccatctgccacaacactgctagaggcacgcgcctcagactccttttccctccgagtgactcagccattcccccgtctctgtataggtccctgtccttcgaatggtggaaggtgataccatctatgattactgctggtattctctgatgtcctcagcccagccagacacctcctagtaagtaatgtttgcctccctgctcgccgccccaccacccagtttcaagcagggcctcttgggagagtcaagggctgccaggggtctttggaggaggaaggcttggcatgcttatcagaggggctggtcagttggcttcctccccttcctttttttttttttagattgagtctccctctgtcacccaggctggagggcggtgatgcagtctcagctcactgcaacctccgcctcccaggttgaagtgattctcctgcctcagcctcctgagtagctgggattacaggtgtgcaccaccacacccagctaattgtgtatttttcatagagatggggtttcaccacgttggccaggctggtctcgaactgacctcaggtgatccacctgccttggcctcctgaagtgcttggattacaggcatgagccaccacacccagcctcatttttgtatttttagtagagacagggtttcaccatgttggccaggctggtctcgaactcctgacctcaagtgatccacctgccttggcctcccaaagtgctgggattacaggcatgagccactgtgcccggccattcctccccttcctttgacagcaccggggtttcagtgtccatgtctctctcagcgtggccagcagcagccgggagaacccgattcatatctgggacgcattcactggagagctccgggcttcctttcgcgcctacaaccacctggtagggaccgccatactcagccccagcactcgtactggcccggctctccttccttgagggcagctgaggctttgcaagacctgttttcagccctttccttcccccaggatgagctgacggcagcccattcgctctgcttctccccggatggctcccagctcttctgtggcttcaaccggactgtgcgtgttttttccacggcccggcctggccgagactgcgaggtccgagccacatttggtaagcatctgtgcctccaagggaggaggagagggaagggcactgccacctgcacaggggccttttgtgagccgggggccacctgtgggggttcacgccgtcctctgtacggccccgggagcaggtgcagcccagtcggcagaggagcaaacaggctcagagcaggtaggaaaccttcccaaggccaaccagctggtcaaaggactgcttccttcctgaactcataccctgtcagctgtggagcttttggtctctgaaatctttctagaaaattgttgataaagctgattccgttttcctgtaggccttcaacttgcatctctccaaggaagaactgggatttgagagggatgaagtggggcttgggcatttaggtcctttgggaggatagatgtggggagcatcagaggtctttgtcctgcttgtgacagacagcatgggggggatgttgagtccaagcatgttggtgctgggacgggagacagacctctgcttagcctggttagtgccaggagccattgccccctcccccactttgttccttccctctctagcaaaaaagcagggccagagcggcatcatctcctgcatagccttcagcccagcccagcccctctatgcctgtggctcctacggccgctccctgggtctgtatgcctgggatgatggctcccctctcgccttgctgggagggcaccaagggggcatcacccacctctgctttcatcccgatggcaaccgcttcttctcaggagcccgcaaggtaggggtcacaccctgagagcccaaagcagctgggcagcggggcaggagcagggatgtagtctgcagtgtaggggaatgggtggggatggggaaaaaatcccaagctgaaggagtgcctggagaccccgagggaggcagggacatccagggctttgggggtgactccaggtcctgttccttgtctccaggatgctgagctcctgtgctgggatctccggcagtctggttacccactgtggtccctgggtcgagaggtgaccaccaatcagcgcatctacttcgatctggacccgtgagtggctgtgactccttcctacacagggccctgataagcctaggaatgccagagcccagctgtagggtcccagtccctgggtgtgaggggttcctgccccaggggtgaggcctctgccagcaaatctctcctctctctcgcaggaccgggcagttcctagtgagtggcagcacgagcggggctgtctctgtgtgggacacggacgggcctggcaatgatgggaagccggagcccgtgttgagttttctgccccagaaggactgcaccaatggcgtgaggtcctcagttcaattccagagatgttggggcttgggttggggagggaggtgaatcccagagggagcaagtgtcctcactgaaggcactgatagaccctccccatctctccctcagcctgcaccctagcctgcctctcctggccactgcctccggtcagcgtgtgtttcctgagcccacagagagtggggacgaaggagaggagctgggccttcccttgctctccacgcgccacgtccaccttgaatgtcggcttcagctctggtggtgtgggggggcgccagactccagcatccctgatgatcaccagggcgagaaagggcagggaggaacggagggaggtgtgggtgagctgatataaaaaggtttttatgata

SEQ ID NO: 1298 - DNA, 60778 bp, Homo sapiens
ggctttccttcgctctcttttctactcatccctgctcttcgtcccacctcctcctcctccacccctctcctcttgcctttcgaccctccccacttcccctcccccactctgcgggcaaatcgctgctgaaaagaggtaggggccgaagcggcgggctcgtgtggagccgtgaggcgggattgactggcgctcgggccaatgagagataggctcatggcgcggctgtagctggaactgaccaataggagggcgggctgggggcggaggcccaggttccaaacgctccgcggcgccatgggctgaaaactcaaccgagatggaatctcccagtctgaaccggtttcaaccggttccgagtttgaggcactaggaggagggggagaagcggctgcagcggccgcggcaggagcagcgggagctacagcatcagcaagagcaacagtagctacagccccggcggcggtgcctgttccagtctttgctgctgcagtccgtgcaaccacccagagggggaggggggaaccaccagtcgctgaggaacaagagaaggggggaaagtttaggcgagccttgggggggggggggccagcgccggagccgcgtgagagagggagccgtgttttggtaggggggagtcggactgcaactggcagcagagcgtctccccggccgtgtggactctacaccccctactcctgccgcttctgctgctgcctgtggctggagggtccccctggggctgaatctttgggacttgaccccgttccctcccccttccctcactccccagccgggcgggagcatttattccccagattaattccccttttgggggggggcgggtgtgtgtgtgtgtgtgtgtgtgtgtgtgtgttgggggaagcgtccctgaaatagtaaatattattgagctctttttgcccttttcctgtccgtttttttaatttccttttttgaggtgggaaaactgaaacccaccttgattcgtcccctctcccccctccccaccttccctcgccctaatcccccaacgaggaaggaaggagcagttggttcaatctctgggtaagtcgactgtgtcttcggggccgagggtcgggcggcggcgcggccgggcgggcgggaggaggccggcgtggggcgcggcggcggcggccgcgggaagcgagcccgggaggcggcgggcgggccgggggcgcggcgggcccacagcggagcctgcgattgaatggagccgcttttgccgctgggggatggaggcggggaggcggcctcgggaggggagcgcttgctgggtcattcgcgtgtgcgggtggcggtggaggaaggcgaggagtgtgatagtgaagcggggccccgcgcggggtgggaggggttccccagcccctggggctggggagaagttggggtgatttcaggaacatctctgtaaattattaggagtggaagtttccagaaatatttagtgcagcagcattgaaacgtccgcctgcatcacgtggccccctcggtggagagcttgggatgggggagggaggggctgccgactccctgttcctccagcaaggaaactcgaaagctctccggttttgcagagtggcatgtgaagtaggaaagatcagtttttcaggggcctgcacatgggattccgtcttgtagttccttttcaggggtttgaatgtgataagttggttaaaccatttactgttggccttgtacagtggaggatgccctgattctccttcattccgatgtctgtgagtttgggttgggtgggaggaagtggtgtagtagaggaagcattcagtactggctcagcccggacctcctctgatcacgccgaggccatgctgcatagagaaaggggcggtgaacttaaggcgcctggtctaaatgcctcctccgagtaagggcggggtgagtgcgtgctcctgtgtgctatagttagaagggctgcaaatcggttcgggtgggaagcgaggggagggcgggccctaatgaggtgtgtttttcctgaatgaagcgggcgattgcccacacaacctaaggagcagtctttcgccttgtagcgacttgtttttcacctagtgtgaagttattaagcaacggttatgattttctgggttttgtttaggaattggcattgggtgtcacttgtagagtcacattatccattaagctggataatccctagtgtatgttatccagtgagtggattttaggattgaagagcccaatgggaatgagcgttcgtggttacacctctcgcactatggcttgtttgctgtctgattgtatatcttaagtgtgggacactgctgttagtggaaagaatgttttggaagcggtttgatttgggggactaaatgtgcttggcattgaccacaaagccgccatttctgtactatgtacagttcaggaataggtaggtgatttcgaagatagccgctagttctaaggatggcaaactactgtatttaaatccttctattctaaatctcgtttttcacatcagtctagttcggagaattttataagaacagtgtatttgaaaatgaaacttgtaagagtcattttcttaatccttttttgttttagcattcaactatggtagtaaataggtgaaaagtttgttcaatatttaaccgaaatatttgaaaacttttgatacatggatcttggtgctttgtggacattgcttttaagcctcaaataattaagattgttctgatcttttaaattttatggtacttgaaggtggaggagagtttacacattcatttgtggaatatatatttcctctcagtatttagatcttaaggtttttttgtggtgtgtaacaagtattctgctgtttaaaaacgtttgtttaatgcctactacgaaacgttttgaagtctcatcagttttgtcaataatggaccaattcttgaactcctaatttcttgagttttacattatttttacatcatatcaatcataggtgactcatcttttggagttctaatctgttgtaacagacgttatatttaaataagacaattgcattaaaatagaatttgctgccattattgttatggacatttttaagctgttataaaatagccaggaattaatgactttttttccgccctgccaagctagtttgtctaaatataatgtaaagaaattagctactcattttctggtccacgaaagttcctaaaatgggaagaagtggagatctgaccttgttagttctaaatacactaaactgggagtgccatggatggctttcaggatgtcctgaatcctctataattgtatacaaaatcgtgagtttttaaaaactgggttagagctattggttcctcagagtctcaggcatcttagacccccaaaaaggttaaggactactgacttaaccaattaggtttgagtggcattggctttgaagaaaagcagaggaaagatatattttataattctgggcaacaaaaaagtggatgtgtgccagcatcttagagtagaatcctcttaaaaggatagcactgcatatgaactagtaggttttaaccagtgcatatttaggcgaagtagctcatttttctgttagaattcttttttatttgggaatgggcaagcttttacagcttttaccttgccaatgaatacctggaatttaaaaaatcttgttaggcatattgcccataaagttttttttcctagatcatatattcagtaaatatgtttgtagctttatttcaatcccccaattcattgagggttgaaacaatttgaatggtttgagtgtagaagctaagttatttctgtagaggctaagggcatttataccaagatatgttagacttgtggttcctgctaaccattgctgtagacaataggaattactgtatatccacattttaatttttaacatcattctgtctttgtttgtttgtttttgagatggagtctcattctcttgcccaggctagagtgtggtggtgcatctcggcttactgcaaactccgtctcctgggttcaagcagttctcctgcctcagcttcccaagtagctgggattacaggtgcccgcctccatgcctggctgatttttgtatttttagtagagacggggttttgccatgttggccaggctggtctggaactcctgacctcaagtgattcgcccacctcggcctcccaaagtgctgggattacaggtgtgagccaccacgctcggcccattctgtctttatagcattatttttataaagttaagataatgtgaagtgagcttttactgagttattcagaagaccctacttgggaagaaaagaaaatcacattcacttgaacttaatcctacttgcttaaaaagttttgacatcaagatactgaactgtatcacgttttaggaccataaaatcctaatagtggatgcgtttaaataataggttagcatactttataaatgttagtagaataggaaagtcttcctggtgtataaactaaacactagaaaagttgaatggaccataataatttatgtaattatcaaatagctaagtaatttcagcttttgttacttgcttttactatctcagttttctgtaattaaagtctctaaagtattcattaaaatatttgtaataacatggttgaagtaaaataacttgtaggaagtttttgataataccaaaacttgataggcagcttcaattttttttctttattttcagtaatctatgccagcaattatgacaatgttagcagaccatgcagctcgtcagctgcttgatttcagccaaaaactggatatcaacttattagataatgtggtgaattgcttataccatggagaaggagcccaggtaaagtagccaaccaaaactttataacattatgacagtgtaacagagttgttgggtttagaataaaattttaaattatcacctttaaaaaagatattccatagtttgcattaatttggaattctgtattaaccataatgaaaattggtttggagaaagaaattgcatgtttgacatggttagagtgggttgttttggaatattatacttgttttgtccttaagagccaaatgttattaaatactttgtaggtattaaaggttctctgtacttttatatatacttaatatgtttggcactaatacgattcttctacttttaaaacatttacagaagtacttcacagatatgtttgtttaaataaaaacaggaataccaagtatttttatgttagttgaattttgtgcacttttcaaagtggtactgttaatgtagggaattatcttaaacataaaccaaattttgatcagtttaagatttttggtttttttgaacccaactaaaaggtgaaacagaaatgtgtgtacaattttaaattgtatatgtcacaagaaaaaaaacttgattttttacctgtggggccaaacttttttttgagacagtctcgctctgtggtccaggcaggagtgcagtggcgctatctcagctcactgcaacccctgcctcctgggttcaagcgattgtcttgcctcagcctccctggtagctgggattacaggcacacgccaccatgcctggctaatttttgtatttttagtagagatggggtttcaccgtgttggccaggctggtcttggaactcctgacctcaggtgatccacctgactcggcctcccaaagtgctgggattacaggcatgagccaccgcgtgctggcccaaacatgtttttgaatgagtaaaaagttttgcagttgggtcagaaatcttttttttttttcagatggagtcttgctctgtcaccaggcctgagtgcagtggcacagtctcggctcactgcaacctctgcctcccaggttttcaagcaattcacctgccttagcctcccgagtagctgggactacagacgcgccaccatgcccagctaattttttgtattttagtagagatgggtttcatcatattggccaggatggtctccatctcctgacctcgtgatccgcctgccttggcctcccaaagtgtggagatgacaggcatgagccaccgcgcctggccagaaatcttttatggtagttttgttgccagaacagtagatttctggttagataaatgttcagctagtagatgggaggttacttatattgtcaagatatttatatttgcataattaagaaactgagtgccggccgggcgcggtggctcacgcctgtaatcccagcactttgagaggccgacgccggcggatgacgaggtcaggagatcgagaccatcctggctaacacggtgaaaccccgtctctactaaaaacacaaaaaattagccaggcgtggtggcgggcgcctgtagtcccagctactcgggaggctgaggcaggagaatggcgtgaacccgggaggcggagcttgcagtgagccgaggttgcgccactgcactccagcctgggcaacggcatgagacttcgtctcaaaaataaaaataaataaataaaataaaataaaaaaacctaaacctgagtgccattacactttctgaaaatatataaggtggatacagtactatcttttatagtagtccaaaaagcatcatgtataaatgtttccattcccttatgaaatgcaacagtactgcttttactatagtagaaacttgaaaaaggtccatggaaacgctaaaagtagaaaaaattactcttgcagtgattctgtaagcttgttagcccaggtttatacttttagggcgttttgatcagtatattatctcctaaagcattcttgaaaaaattaaccatccgtatttattatccctgtcatttagttgttactcatgctatacattcaacatgaagctttaagcttcatttcttctagcatggatgcatagaaagcagctgcttttggaggaagctatgaaagtaaggttgggttcaactctgaatgtaatattggaagcacaggtctgtagccattgggaaaaagggcatttaattttttccgcatagattcagctactaatactgtttaatcttcacactaaactagttcactacatctaaaggtatgataaataaaccaacatagagcagtgttcttcatggcttgtaacagaattagtggcaatttttgtaattgagaatatattacagcaatactgcttttaataatgtttcatagtattaagaaatttaatggtttgttttaaaattgacttgttaataaaaagtagattaagaaaagtgtttctaaatttttttgtttgtaaggacaataggttaactttcccaaagtaaaaggattttgtctgcagtagttaatagatcatgtgacaaaatcagttgcgtagaaataactagcaaacttattttgtattataaatgaagaaacaagatttagagcttaaagctggttaaggagtccttttggtctctaaaagtcctatgtcgttagttcagtctacttttcgtttaccacctccttgggggtcttatttcaaaggaaaaggagtagtagtagcagcgagctgctatagtggaaaacatgatttttagtgttagacgtcttaatttgattcttggaagctctctctagtcattgcttaagtcccatgtacaaatatgacctgtcctacaagagattggagggttagttatgaggtttaaaagcacctattacagtgcttgataggtagaaggcactcagcttaaagggtacatttagcagtataatgaaaatgatttagcatatgtgatactcattgcttaaaattaaaaaaattttttttttgctactcataaaatatgcactaatgacaagaaaaatttattatgctaattaagcttttaaagtcaactgggaaaaaaagctgtaggtaggtttttttttttttaaaggaatgtgtaacttgggggaggggaagaaattatttacaagggtgacttttaatctgtagacagaacttctgcatacatggttagtatagtaggatatttagcagtgtaacattaggactaccctctaccctctgttatcagcatttttctatttttagccaagtagacagctagaaaaaagatgcgggaagagttggatgttttctccaatattgtgttctgttaaagatcttgaactctattgcttagcaactaaaatgctttcaccattcagttagtagtacaagggagatgctaggttttctctctttagtttgcttttgtgtcttttttttttaaacccctgctggggttttaagtttataaagaacattatgtaagaatggtgggattagaataaatcagaatgcaaatactagaagtagcatcagagagtaaaattacaactaacaggaaagaatattatttatgtagcgattgatgtgagtggtgatagtgtgggaagtatttgattctgtgtagaatgcttatcacttcaaagcatctgacaaaatggtaacttgaccaagtaacttttactgtgtgaggatctttgatacaacttttcctctagttagataaggttatctagctagatattctcagggagaagaccaaaacactgctaaaatgtgctttggccctagataagccacatcattattctttcggccttctgtcatttctcatatgacacattatgcccatcagtcctttaatgaaatcaaatagaaatgtgtatgattgtattttaaagtatacacattaactcttgtaaccacagactcacaatggaagcaggcgtctgatcttttcaggcaaccacagtggttctggtgggtttctgggtagagaacaaccatataagttattgagtgtgtagcagtgtgttttcctgattgatgtatgggatagtcatgaatgtggtattgtatttcctacctgaggaaaaggtcatgattaaaataaagcatcaaagccaggataagcatataatttctttctttttttttttttttgtaatgagacagagtctcactctgtagcccaggctggagtgcagtggtgtgatctcaaatcactgcaacctccgccttccgggtcctggttcaagcaattctcctgcctcagcctcctgagtaactgggattacaagtacgccccaccatgcccagctaatttttgaatttttagtagagacggggtttcaccatgttggccaggctggtcttgaacttctgacctcgtgatccacccaccttggccacccaaagtgttgggattacaggcgtgagccacggtgcccacccgagcatacgattgttttaaaaaagactagaataaaagccaagctaaagattataaggtatctttgtcagaaatggttgtgagagtgcttcctaccctgtttttgatgctttattgtttataaccatagaattaaacccatgataaagtaaagtataagagaaagataactgacagattttaaagtcatcaaacttttttcttgctctgtcacacaggctggagcacaatggcttgatcacagctcactgcagccttgacttcccaggctcaatcttcccacctcagcctcctgagtagctgggaccataagtgcgtgtcccaccacacctggctcattattaatttttctttgttgcccaggctggtcttgaactcctgggattacagacatgagccaccacacctggtccaaactttttgcttacaacttttaatagaaataggtaaaagaaataggaaggatctaattgagttataaaacaacctttaaagatacaaaagtgaaaaagattaagccattgctttttgtcaatagaattaaaagctgttggtaaaaatattaatgtatgaaaaacttattgaaatgaaaaaactatatatatatatatatatatatatatatatatatatatatatatataaataaaatgtcgacatggctggatcttaaaaactgtcaaatgaaaaaaactaattgcaggaaagattttttttttttttttgagagggagtctcacgcagtcaacccaggttggagtgcactggggcaatcttcctgattcttggggaatcttggctcactgcaacctccgctcctggattcaagcgattctcctgcctcagcctcccgagtagctgggactataggcgcacgccaccattcccggctagtttttgtatttttagtagagatggggtttcgccatattggtcaggatggtcttgaactcctgaccttgtgatctgctcacctcggcctcccatagtgccaggattacaggcgtaagccaccgtgcccagcctaaaagatttttaagtatactattaacataaaatttggtagccgtacaaccctattcatgaaatttacacacatgccgtgaaaatgtggacaggaaaagacacactaagttcatgatgaaagccattactttttaaagaaggaacaaaggtgtaatcccagcactttggggaggctgaggcaggcgggtcacgaggtcaggagttcaagaccagcctggccaatacagtgaaaccctgtctctactgaaaatacaaaaattagccaggcgtggtggcaggtgcctgtagtcccagctacttgggaggctgaggcaggagaattgcttgaacccgggaggtgaaggttgcagtgagtcgagatcctgccattgcactccagcctgggtgacagagcaagactccaactttaaaaaaaaaaaagagagaaaaaaggaataaaggaaggaaatggcactagggaaaggcacaaagatgacttccataaactttagttattttatgctaaaagaaaatctgatacaagcacaagatgatgactacgtagattagtatttctgggttgcatgttaaaaatatgaaaataaaaacggaaatagtttccaaaacaaagattttatatatgaaattagtgaaatttcagaatggagaaaggatggttacaataaatgttaggagccctctttaaagagctcaaatggtatgtaagtatttgggatttgtggtttaattagacctagttttcagcagtctttccatgaaatgtatttttgtatttagagagatcttggtaactcttgtaaagcagagtgtcctgctacattacataacttacctaagtaggtgtgcttttttttgtttttctagagacagggtctctgctctttcacccaggctgaagtgtagtggcaccatcatagctcggtgcaaccttgatttccagggctcaagtgatcctcccatctcggtctcctgagtagttaggactataggtgcaagccaccatgtgcagctttcttttttttttttttttggagagtcatggcctcgttacattgcctgtcacctagactggccagctggtcttgaacccctggcctcaagtggtcctcctgcctcagtctcccaaagtattgggattacaggcatgaaacactgctactggcctagataagaatttttatattgtttttggttgatttaagtgctgagaacttatttgcttcagaatagatctttggttgaaatgcagttcagttttgagactaaaaaataaaccagatttactcccaaaaatgttactgtttcaaataagtaaaatatttgcacctttaaagattaggagttggctgggcatggtggctcactcctataatctcagcactttgggaggccaaggcaggcagatcacctgaggtcaggagttcaagaccagcctggccaacatggtgaaaccccatctctactaaaaatacaaaaattagctggctgtggtggcacctgcctataatcccagctactcaggaggctgaggcgggagaatcgcttgaacccaggaggcagaggttgcagggtgctgagatcgcaccactgcagtccagcctgggtgatagagccaagactctgtctcaaaaaaaaaaaaaaaaaattgggagtcatatttatataattttatttctatttctgtaaggtctaatttttgagtatttctgaacatcaataatagaatctctgtccaattagaatttgtgccttgctcagtagttttcattttaatgaatgattcaaaagaatacattagcttaagttttgttttttttaataatattttagcaaagaatggctcaagaagtactgacacatttaaaggagcatcctgatgcttggacaagagtcgacacaattttggaattttctcagaatatgaatacgaaagtaagcaagtggtggttttaaaatctgttatttcttttcttccagtcataaactttgaggaaggtatctcatttttagtattagcatttgttatctcaaattattttatattgttaatttgtttcaaaatttagtcttaagcatataattaattcttgcaaatagtcctaagaattatgaatgaagttttgtaatgggactagtatgcaaggtggcttttttggttgtctgattttgtttttttctttttagtatatgtatacaggtctaagtagcataaattctgaatgttattcagagattaaacataacattaaggaattattttgggcaagtaatcaatataatacaggccaggcacctctgacaccaagttgtgtggacagcttaaaaccctactccatggcattgggcttctaatgggacagcactcagtttttatttacaatggaaaatgttataattctggtccttttttaagtttgaacagaagggttgatcaaaatgtgttttgtctgttttaggcttgatgattcacgcttctctttaaactgccttaaagtaataaatactatggcattctgtttaatacacgaaaggtttccacttgatatacattgtgttaaaacagaagatagccatattcacatctgtttctgaaaccagactttgttaattaacagttttaaaatattaattagttttgacatcttgtaaattttaggtcaaaaatacagtccagaacttcctcaaagtgctaaccttaagtaacataacagtgtttgcctgtttgcttgcctggtaaattttgctttttatactgacagacattactaatgtttaagttgatttatcaacagtatttttaaaaactcaaatttgtcttgtgaaaaatgagatgattagaggaacagaaagaaagcaacaggtaaagaattcttcaatttacataaattacaaatgatttggtgctaaatttatgcactatgacatttggcttttatgcaatcatttttttttctttaaagatgttaacactacctgatattaatcataatgttccattatgttgattgcttgtaataggaagaaaaggggtgtcttcctgtgcaactgacacagctaggctttgacggcaggcctccacaaggtctacccttttgattccctttaactgaattctgttcatcaattgtttttgtttcatgggcggtgggaggggaaaggggaattcaatgcataaaataagtatttctaagggctcagtagaaatttctaccatagggatcatttcatgcatttattttttcatttagtctttgctgttatctgtccctcatcttcataactcagcagtggatttctcaagtttggagatgtaaggcaaaagtataattcttcagaatgtttggattgtagtgatttatcattggctttcagatttgactgtcacttcagatttttgagcaaaaatactaaaaaaaaaaagaaaaaaaattctttgaagagacaggacctctgttgcccaggctggagtgcagtggtgtgattatagctcactgtaacctcaaactcctgggcttaagtgacatttctgcctcaactttctgagtagctagggctacaggtgcgtgtcaccatgcctcgctaacttaccaatttttttatagaagtggggtctccctgtgttgctcaggctgatcttgaactcctggccctcccgccttggcctccccaaaatgttgggattacaggcgagggccactttgcctggccccaaataacattttttcaaaggaatgtaaattttttttgttttagtttcataggcaaagtctttatgtctgggagagattggattttaggatattatagtaacagatgtattcctttgacctaacctgggcaaagcatttattgggctccctgcttcaacccccttggcagaaagatgaaatatgaattgtatcttcatcaagcttatgctacctttatacagttgtagaaaatacaggttagtaaatagtaattttaggtaacagtatcaaataggaagaagtaaataaaaaagaaaggacagtgtctttccattaaaaatgtaaaaaagtttggttaaataagatgaagttatctttaagatttttatttgtaactatatttatggtgggttttgtttcttagtgttttaaaggctttttaattgatttttggcaagaggatatattgtaagcagtgcattgctttgacttactgagtcttgacaatctgattttgtgcctataaaattaaagaaaatgcttagggtagtatgtttttaaaagctaattaagaacttcaggcatttggacaactctcttttttttacatatttctcagacctagacataataaatagatatgtttttaaaagtgaacaggttagaaagcatcactatttactgctgattatgaaacattttaatagcatcaaatttgtaattttagaattttgctttggccttgtttttattttgaaagtttttaaggaatgttctgcaaatgtagtactttagttgaaatggcaaaattttcttgaagagtgtgaaatgttaaaatgaaagaaaacagcaaaaacattcactgtttgagcacaatgtagtttgggacagtctatattgtgctttggataaaatgagcattcacatgatccctttggttgaaatactaatgctcctattttattgtgtaatgactaaccattttaaagatgaactcttattctcagccaaaacttgcaatctgaggttatatgtctatatatgaatgagcttacctttcagatattatagctgattcttccctaattctctcagttgaaatgtaccacaacggttttgtcccttttcttcctcctgcctatccacactaattggtcatagtaattcaggtagtaactcctggggctttataaattattataaatattgttgactatttagagtgagtaatcagcaggagggacaaaatggcttgaaagtggtatctctgttttttaattttttatacttttagttataactttcagtatttaggaagaaatacctgaaaggtagatacagattgcaacatgcgtttgtgattattttgactgtgcacaaaagtttatctttaaattagtagaaatagcaactataagggtggggttaaaatataaaataaacccatgggttgtcttgctgctccttaagtaacacaccagtgatgcttgtaaacactttctatagaaagtatctgtgacaatactttaatatttggccaaaagcttataactcctagaggatggtaggaagcttgatagcatccaagctgctaaattcttaggagcctgttcgtgttaaagtacgtgagcctatgagcagtcatttatgctgtgaattcatatctggctgctacttttccttcgacagataagcctatttggctgctaaagggctttttatttggttcttcctcctggtgtgagcatgtataaacagcaggacgttatatagagtagcaaacaataaaatgaggaaaatgcatgaaaactcagtatatgggtgaatagatacttgtttaatatgtgtaattaaacttggtagcataatgtttttgaaactttagatgtaaatgtgtgaatgtctgtccatttgtgaatcctgagagttgccagtcctataagcaatatattcacatgcttctattctccaattttcagtactatggactacaaattttggaaaatgtgataaaaacaaggtggaagattcttccaaggaaccagtgcgaaggtaggaaaataaagaattataaattcagagttttgtttttcctggcatttttattgtagttgactgtttgagggggcatgtaatgaatctttagtatattttgctctaatggagcttattgcttttatcatgaagcaaacaggtctgtttgtattggtgggtacaggaaggccacttacaggttatcttttgggagaaagaggagactggactgttgaaaactctgacaataaatattctagttaaaaatatgggctatggcacagtggcccacgcctgtaatcctaacacttcaggaggccgaggcaagtagatcgcttgagtctgggagttctataccagcctaggcagtatagcaagacctcatctggacaaaaatttaaaaaattagctgggtatggtggttcatgtctgtggtcccagctatgtgggagcattgcttgagctcaaaaggtcgagactgcagtgagccatgatcctgccactgcacttcagcctgggtgacaagagtgagaccccatctccaaaaaaacatatatataaataaaatatgggccgggcacagtggctcaagcctgtaatcccaggacttcgtgaggctgaagtgggagggtcatttaaggccagaagtttgagaccatcctgggtaacatagcgagaccctgtgtttacaaaaaatttaaaaattagccaggtattttggtgcaggtggcggcggggacaggggtatcagtggggtgaggtaggaggatcccttgagccaagaggttgagactgcagtgagccatcattgtgccactgtactctagcctgggcaacgagcgaaactccgtctcaaaaaacaagaacaacaacaacaaaaaaaaccatatgtaaggttaactcgggaatggaaaagccaagtactaaagatcacaaagctgttttgccttttgtggttctgggaatgccttggaagaggttggcttctgaaatgaagaaagatcagaaaatgaaggtgtagtgatacctgttaatgagtaatttaacttttctgtctgtgctaccttgaggaatgtagtcatattttgagaaacctgaggcaacattagtttcttgggattctttgatttagctaatttcagttatgatacactgcctttttacctactatatttcatttatctctgaaaaatagaaatttttttcttgactttattatggggcacatgatacttctagtagtattttcatttaaaatatgtctaatttctttgattatttgtcttttaagtattgtccttcacctgcattctcttatcatcattatggtagaatagtgacatggatttacttagctaatctgacttaaaccttgacaaagtttgagcacatttagagttgaatgtgatgagattttaatgccagtgtctttttttaagaatattaagtatattcagtggcaatatctttaatacatcataaatcatagattaagagtgatagtgcaggagcaaataatgtgccctaaaagaggttctcatttctttaaatgttttattatggtttgaaactattttagatcacgttctgtgatggactgagaaattaataagcacaatttgactatgtggtccaagtaggtccttcatactttattcttcagggatctttagtgtagtcattccttgtttctttactactattgttttactcatgtgttatgagccccagatttaattttggccatggtctgccgtaccaagaaaaggtgatttacttctgtcccattttactgttgtataattttaaatcctccttttgttcttaaatctgcatctctgttttttatcacatttgatggttctggaagatgttttccaggttgaaaatagatatgattatactagtttatcaacactgtagttacatttgttacagacaaaattaatttaaaaaatttttgtttctttctttcttctttgttgagacagattctcactctgttcctcaggctggagtgcattggcaccatcactgcagcttcaaatagctgcggtcaagcaatcctcccacctcagcctcccgagtagctgggaacataggcatgccccaccatgccctactaaattttttttttttttaatgttttgtagggatggtgtctcgctgtgttgcccatgctgctggctgctgggcttgagcaatcctcccaccttggcctgccagagtgctgggattgtaagcatgagccaccatacttagtcaacatgattacctttttaattttaactgggaggcttctctaacctaaagatttatttcacaaaatacactagaacttctgaacattaattttccttcatctttaagtaactttggtattggaaattacataaattaatttaaaacattttatttcctttttctgtaagtgtcctgtcttttaaaggtattcgctttgctttttgctgtagctataccctttgtccaactaccatagcatatatatttgttcacctggggtgcatattgtgcgtttcctttgtaccgattactactaaatattaaggttataaaaatatacatgtacatcaaagtgctgtatgtcacagtgttatagttgggaagacaaaacacatgtaaaagaggaatcataaatcagcaaattaggtgtatataatgagtgcttcacaagctaaaagaacagaatgatgtctaagtccggccctttagctaagtttcattcacataattggaaagaaatgcctggtatattttaaaggaaggaaaggtttcactgcataagagtatgccaaaattagattcctgcattttttttctgatgtagaatttgttttatctgcttttaggttcttgtccacagcatgttaatttttacgtggtgtttttttttttttttttttttttttgagacggagtcttgctctgttgcccaggctggagtgcagtggcgcagtcttggctcactgcaagctccacctcctgggttcatgccattctcctgtctcagcctcctgagtagctgggactacaggcacccgccaccacacccagctaattttttttttttttttttagtagagatggtttcactatgttagccaggaaggtctcgatttcctgaccttttggtcctcccgcctcggcctccatgcctgttgagattacaggcatgagccactgcctggctaacatgttcttttaaattaatgacattttcaatttaggcctcttgtataaatactgtcaggaaaatctcatgattcttgagtgggttagatgtctcttgctgtgttatacgttactgtatcctgtaccagtgggtcacaggagaataaaattttaaagagcaaaagataggctcagcacggtggctcacgcctgtaatcccagcactttgggaggccaaggcaggcagataacgaggtcaggagtttgagaccagtcttaccaacatggagaaaccctatctctactaaaaatacaaaaattagccgggcgtggtggcacatgcctgtaatcccagctactcaggaggctgaggcaagagaattgcttgaacccgggaggcggaggttgcagtgagctgagatcacgccattgcactccaacagagcgagacttcatctcaaaaaaaaagagcaaaagatagacataattagaaagtaaggatgtttaaaagaacatttaattttccaaaagatatttttatagcaagagaaatggcgagataataaaacatttaaataagttgagatttgttatataaaatttattacatttctctggattttcatttagctttaggccgtaagtgtgtgtctatttgtttgtgttttatgtgttttgtccctcacaccccacattacacttggctgttttagtcactttattccccatccttcaaactataagctccttgatattggggctcagagtgtctttttttctttggtttttttttggtctgtttttgtgtttgtttttgtttaagacagagtctcgctctgttgcccaggctggagtgcagtggcgtgatctcggctcagtgcaagctctgcctcccggtttcacaccattctcctgcctcagcctcctgagtatctgggactgcaggcgcctgccaccacgcccggctaactttgtgtgtgtgtgtgtgtgtgtgtgtgtgtgtgtgtgtgtgtgtgtgttttgttttttgttttttgtttttttttttagtagagacggggtttcaccgtgttagccaggatggtctcgatctcctgacctcgtcatccgcctgcctcggcctcccaaagtgctgggattacaggtgcgaaccaccgcgcctggctttttctttgttttttaaagatgtagggtttcactctgttgctcaggctggagtacagtggtgcaatcatggttcactgcagcctggaactcctgggctccagtgatcctcttgcctcaggctttttttcttttttttttgtgagacagagtccctctctgtcacccaggctggagtgcagtggcgcagtcttggctcactgcaccctctgcctcctgggctcaagtgattctcatgtgtcagtctcccaagtagctgggattacagatgcacaccaccatgcctggctaatttttgtatttgttttagtaaggacagggtttcgccatgttgaccaggctggtctcgaactcctgacttcaggtgatcctcaccctcccagagtgctgggattataggcgtgagccattgcatcctgccctcttgcctcagccttgagagtagctagcactgtaggtccgcaccaccatgcccagctaattaaaaaaaatttttttttttagagatagagtctcactgtgaagcccaggctggttttaaactcctgggtttaaagcagtcttcctactttgccgtcccaaattgctaccaagcctggctgggaaattttaatatgtcaaatggaagaattccctaataaagagtggttgctattcatggtagtcttttatttattcatttgttttgagacaagatctcactgtatcacccatgctggagtacagtggcacaatcatagcacactgcagccttaaactcctgagctcaggcagttaccacgccttagcctgccaaaatagctaggactacaggcatgtgccaccacacccagctaagtttttctaattttgatagagacacagtttgcctatgttgtccaggcttgtcttgaactcctggcctcaagtgatgctccaacctcagcatcccaaagtgctggggttacaggtatatcaccactcctagccatcactgaagtcttaaaggtcctctaggactgccagtggtgttgattctttatcagagtcatgattcagataattccccatccctttttaaaaatggcatttaggctgggtgtggtggcttacacctgtaatcccagcactttgggaggctgaggtgggcagatcacctgaggtcagttcgagactagcctggccagtgtggtgaaacccggtctctactaaaaataccaaaattagctgagtgtggtggcagatgcctttaatcccagctaattgagaggctgaggcaagagaatcggttgaacctgggaggtggagcttacagtgagccaagacagcacgactgcactccagcctgggcaacaagagtgaaactctgaaattaaaaaataattaattaattaattaaaaatggcatttagataattcaaataaaaaaaaagaggaagcctcctttgttcctgttggggggaaagatgatgctatataaaggtatttctgtactttttatttaaaccaagggattgttttaatcagttaatgtgtatggcttatagatcatttcattgattgataaaaacttactcacaggcggggcatggtggctcatgcctgtaatcccagcactttgggaggctgaggcgggcagatcacctgaggtccggagttcgagaccagcctgaccaacatggagaaaccccatctctactacaaatacaaaattagccaggcgtggtggcgcatgcctgtaatcccagctattggggaggctgaggcaggagaatcgcttgaacccgggaggcagaggtcgcggtgagctgagatcgcgccattgcactacggcctgggcaccaagagcgaaactcagtctcaaaaaaaaacccacacttggctcacattgaatagagaagaagcgaatttatgaaaaaagtaatccaaagtggaaagatcgtaattacaaggtttgattttttttttttgtttggtttggttttttcgaggcggagtttcgctgttgttgcccaggctggagtgcagtggctcaatctccactcactgcagcctccgcctcctgggttcaagctattctcctgcctcagcctcccgagtagctgggattacaggcatgtgccaccatgcaaggttggttttgttttgttttgtttttttttaattttgcgacggagtttcgctctgtcgcccaggctggagtgtagtggcgagatcttgggtcactggatgctcagcctcctgggttcacaccattcttctgcctcagcctcctgagtagctgggactacaggtgcctgctaccacgtctggctaattttgtgtgtgtgtgtgtgtgtgtgtgtgtgtgtgtgtggtttttttttttttttttagtagagatggggtttcaccgtgttagccaggatggtctcgatctcctgacctcgtgatccaccctcctcggcctcccaaagtgctgggattacaggcgtgagccaccgtgcccggccaggttggattttataagtagttgggccactaaaatttctgagttgtacagtttcatgtctttagttggcagaccaaagctgatccactcataaaattttatttagtgctctcctttgacgtgagacacgtggtatatttattggcaccgtaatactggctacattatttgacctcatatttcagtttgtgttgcaaggttttgggcattagagctaatgtataggaagccctgtgcttacatatgctgagtatgagtaagtagtgggttaccaactgtttttgatgaaatatctgcatttcaccaaattgccatataccagtctcaaaatatcctgaaccttctgaaataccttcctaagtgagctcactaacacctacttttctgtgtcctttacaattttttcaccacaaagtctcaaagtttcagaaacggaactaatagggtcacttctgctgaagatctcctgtagtattgaagatatttaacatgtttcctttaattgatattggcctttgagaatttttgtatttgccttatttattaggtttaaagtgtacagttggataagttttatcttgtgcatgctcctgtgaaactacctctgtataatcaagatctgcctctatccgattactttcaccttcactgcccctcttcacatgtgcttgttgtcacttgcttggtaagagtggaatggctggattgtgtggatttttttttttttttttttaagacagtcacactactctgtcgcccaggctggagtgcagtgtcatgatcttggctcattgcaacctctggctctcgggttcaagcgattcttgtgcctcagcctcccaagtaggtgggattacaagcatgcaccaccacaccagcataatttttgtttttgtaatagagtttcgccatattggcctggctggtctcaaactcccgacctcaggtgatctgtccacttcggcctctcacagtgctgagattatactcataagccactgcgcccagcccatatggatgttttggtgtatgtttaagcatccaactgtattccaaagtggtcatgtcagtctcaccagcagtgtataagtatgtttcacatctcggctgacatttggtatagacaatgtttttagtttggctattgtagtgcatatacaatagcatctcatggtggttttaatttctttcttttttttttttttttttaaagacagagtcttgctctgtcgcccaggctggagtgcagtggcctgatctcggctgactgcaacctctgtttcccgggttcaagcgattctcctgcctcagcctcctgagtagctgagactacaggcatgtgccaccacacccagctaattattttgtatttttagtagagacgagctttcaccatgttggccaggatggtctcgaactcctgacctggtaatcagcccacctcagcctcccaaagtgctgggattacaggcatgagccaccacgcccagccttaatttccatgtggagtagtgttgttctgtgttccatcacatatccttacatgttctttgccatgccagtatgtttttggtgaaatgtctgttcaaaaattttgctcagttttttttttttttgagacggagcctggctctattgccccagctggagtgtggtggcacaatctcagctcactgcaacctctgcctcctgggttcaagcgattctcctgtctcagtctcctgagtagctgggattacaggtatgcaccaccacgccctgctactttttcgtatttttagtagtagagatggggtttcaccatgttagccacgctggtctctatctcctgacctcgtgatccacctgcctcagcctcccaaagcgctaggattacaggcgtgtaagcccaccatgccccgccaattttgcccagtttttattgggctattcccttattgagatctaagggctctttgtattctagtcaggagtattttgttaactgtatattttgcaagtgttttgtctgtggcttcctgtttaatttttgtaatggtgtcttttgcagagcaaaaatttcagattttgattaaaatcagtgttgatttttttttctttatatagttgatgttttttgtgttgtattcaagaaatctttgtcatgcaaaggtcacttaagattttctgtaagtttttggctgggcacagtggctcacgcctgtaattccagcaatttgggaggccgaggcaggcagatctcttgaggtcagcagttcgagacgagcctggtcaacagggtgaaaccgcatgtctactaaagatacaaaaattagctgggtgtgttggtgaattgcttgaactggggaggcagagactgcagtaagcctagatcacaccactgccctccagcctgggtgacagagcaagactctctctcaaaaaaaaaaaaaaaaaaaagatattctgtacgttttcttatagaacctttatagttttagcttttgcattaagatctgtgatttggctgggcacagtagctcacaattgtaatcccagcactgggaggccaaggcaggcggaaacaatacaaacaaattagccaggcgtggtggcatgcacctgtaatcccgactgccaggaagctgaggtgggaggaatgcttgagttgagttcgggaggtggaggttgcagtgagccgagatcatgccactgcactccagcctgggcgacaaagaccctgtctgaaaaaagcatcatgtgattcattttactcaatttttgtatatgaggtgaggtaagggtcaaggtttatatatttatttgagacagagtcatgctctgtctcctggccagagtacagtggcgcgatcttggctcactgcaaactccacctgccagattacaggtgcacaccaccacacccggctaatttttgtatttttagtagagatggggttgccccatgttggccaggctggtctggaactccagacctcaagtgatccgccagtctcagcctcccaaagtgctgggattatgtgtgagctaccgcacccagctccccaactttgtttctaaaaggtttggctattgttggttttttgctgttccataaaaattttagagtgaaatctggcaaatttcaacaaaagctgtcctgaaatttttattgagattgccttggatctgtggatgcatttggagagaatgaacatctttaatgtcaattcctgattatttcttgctaatatagagaattgccattgttcacttatctcttgaacgtgtagtttaatccagctagtcaaagcccagttcaaactcactttcccttcctgttgtgagaaaacacctcaattttgcaaaagctcttggaatttaacatttctgctgcttttccctgtatgtgtggtgtttagtcttttcatagttcgttgactatggaattcagagcagaaaccctatttcctaatttccttgggaagttttcagaactagatgataatgtaagtttctaataagttgatagtgttactcagaggtgattgtttcatttatgattttgaaaagaaaatgtaaatattagacttaagtccttgcatctaaaacaaattcatgagaaatcccacagaatacaatgttagagatgggagcaaaaattatcagtctaatctcagagagttgacaggcattccaaatcgttttttgtcagtatttaaaccatggtaggataatgtaagaaatatacttaatgcctggtgcgatgtctcacgcctgtaatcccagcactttgggaggcctaggcaggcaattgtctgaggtcaggagttcgagaccagtctggccaacatggtgaaaccccgtctctactaaaaatacaaaaaaaattagccgggcatggtggcgtgtgcctgtaatcccagaatcccagctactcggtaggttgcagcaggggagttgcttggaccagggaggtggaggctgcagtgagctgtgatcatgccactgcattccagcctgggcgacagagcaaggctccgtctcaaaaagaaaaaaaagaaaagaaaaagaaatatctgtaagctataaattatgtttttcatttctaaaaaaaacaaggcaggccaggcacagtgattgaggcctgcaatcccagcagtttgggaggctctcttgagcccagaaatttgagatcagccaggacaagatagttagacttctctctactaaaaatacagaaaactagcagtgtatggtcgagtgcccctgtagtttcagccactcaggaggctgaggcgggagaatcatttgagtccaggcaggaggtcgagccctgattgattgcaccactgcactccagcctgggcaacagagtgataatatctgaaaagataggctgggcacagtggctcttgcctgtaatcccaggactttgggaggctgaggcaggcagatcacctgaggttgggagttcgagatcagcctgaccaacatggtgaaaccccatctctactaaaaataacaaaaaaattagctgggcgtggtggcgcattcctgtaatccctgctactctgaaggctgaggccggagaattgcttaaacctgggaggtggaggttgcagtgagccgagattgcgccattgcattccagcctgggcaacaagaacgaaactctgtctaaaaaataaagaaaagaaagcagtattttcaggcacattgtatatgattgataggaatagtatttccatttctggttaatgtaacaatttgccccattccaagtattttgattacaggcctccatgaaaggcctatacttgatacctaacagtgtttgatccctagcttacatccatgtaacttttttttttttttttttttttgagataaggtctcacgctgtcgcccaagctggagtgcagtggcgggatcatggcttaactctagcctcaacttccggggctctagcaatcctcctgcgtcagtctcctgcataactgggactacgtgcgcatgaatcatacctggctcactgtttctattttttgtagagatggggtctcgctatgttgcctaggctggtcctgaactcctgggctcaagcgatcctctgcctcagcctcccaaagtgtttagattacagtcaagagctactgtgctcgacctgctttcaccttttggctatcatgagtgatgctcctgtcaattttaataaaattttaatcttttagattttttgtccagtgtgtttgaggccataaacatccatttaagaatggcggatgtgcatatagatccatttctcttaacattatcaaagcaggttaaattatagattatctgtgggaaccctaacttaactcctgctttagaattattgttagctgtttgtcttccatgtggcattgttcttattaatatttcattgagagaacagtagtaacaatatcctgtatacccttgtgtaagtaaagagagcagatcactattttattgaccatctttcaaaagatcgattttgtgtgtttttttgttttgttttgagatagtctcacattgtcgcccaggctgcttggattgcagtagtacaatcttggctcactgcaacctctgccttccgggttgaagcgattcttgtgcctcagcctccagagtagctggtactacaggtgtgcaccaccatgcctggctatttttttgtattttaatagacaggtttcaccatgttggcctggctggtctcaaactcctggcctcaagtgatccacccacctcggcctcccacagcgctaggattacaggcttgagccaccacatccagccaattttgatgttttcatggactgatacttgtaataaacatttcaattatatatagcattgatgtagaaatgtaccaaatttacatttttttagcttatggaataaataaatgtttaaactgaaattgattcgaaactagattgaacttgcctttttcctatttgtaatttacatttttaatagtgtatcaaaagccttaaaccattttctgtggtgcaggttgactgcctcttgctggaaatgcttgggatgagaagtgttccagactttgggctttttcagattttggaatatttgcattatgctcacgagttaagcattccaaaactgaaatagcccaatgagcatttcctttttttttccttttttttgagacagagtttcgctcttgttgcccaggctggagtgcgacggcatgatctcgactcactgcaacctctgcctcctgggttgaagtgattctcctgcctcatcctcctgtgtagttgggattacagtcatgcggcaccatgcctggctaattttgtagttttagtagagacagggtttcttcatgttggtcaggctggtctcaaactccaaacctcaggtgagccgcccgccttgtgttgggattacaggcgtgagctatctcacccaacctgagcatttccttttagtgccatgttggtgctttaaaacttgcagatttggggttgggcgtggtggctcatgcctgtaatcccagcactttgggaggctgaggcaggtgggttgcctgaggtcaggagttggagaacagcctggccaacatagtgaaaccttgtctttacctaaaaaaaaaaaaaaatcagctgggcgtggtgacgggcacctgtaatcccagctactctgggaggctgaggcaggagaatcgcttgaactcgggaggtggaggttgcagtgagcggagatagcaccattgcactccagcctgggccacaagaatgaaactccatctcaatcagtcagtcaatcttgcagatattggagtgtttcagatttcagatttggggtacttaaactgtacgtgaaaattagctgctggggaggagaggaattggaatatgtaacatggactcccacattttaaggatttttctaggactgcatctttctcttaataagtcagatccttatttggttgaaaatgtttactgcatgactatcactgactatgtaagatgctgatgtacaactctatgacttgaagattgagttgcttctatgggaatatgacaccatttgaattaatttgttctcaatattttaaagagttttagtgaattctgttcatataaaaatcaggttcaataatgcgtgctttttacgctatcattgagtatccagtgtttacaaggtgtttctgagggataagattattattgctgtgtaaagaatttggcagatggtgtgtaccttctaagttagcttgaggtttatttaaatctcatctttttagcttgctgaagttgatactatgcagttgcaagtttatattgactatttgatattgctgtgtttttatttgaaatgggactgttagacacatttttctttatattgagcaatagagctggaatattaaagatgtatgcattaacccttgcatttggaacatttacatgtcataagctgcctttcagtaagtggttaggcatttctacgggtgtgtattatattttgaataaattttatatggctttccaagaaacaattagagcatttgacccaccgactttgttgtttatttttatttttttgagatggagcctcccgcagtagagatagagtttcactatgttggccaggctggtcttgaattccgcctcaggtgatccacgtgccttggcctcccaaagtgctgggattacaggtgtgagccaccatgcccaacctgacctaccaactttggatgtgaatttttttcatttatattgagaagaatagggtcttgggccactagattgtaccagtgctaagtcagtatctgaatccattgaagatcctgttggcaacgtcaggacttatcaaagacacacaacttcaatgagaacctttctttggaattaattaattaatgatatggagccttgatctgtcactcaggctggagtgcagtggcactatttcagctcactaggaatgcatctttctcttctctttctccacctcccaggtttaagcacttctcctgcctcagcctcccgagtagctgggactgcaggcacaagccaccatgctgagctaatttttgtatttttagcagagacaaggttttgccatgttggccaggctggtctcgaactcctggcctcacgtgatctgcccacctcagcctcccaaagtactgggattacaggcttgagccactgtgcccggctgccttgtttgatttttttttttaaagagacagagatcccctctgttgcccaggctgaagtgcagtgacacaatcatagctcgttgtaacttcagtctcctgggtgatgggtagaattctgccacagcccaagtagctaggagtataggcacgaacgactgtgcctagctaatttttttattttttgtggaaatggggccttgctgtgttgcccaagctggtctcaagctcgtttcctcaaaccctcctcccatgtcagccttccaaagctccaggattacaggtgtgagccatcgtgcgtgacttgtttttgatttttgtatcgttttcttcactcttttttttttttttttgagatggagtctcccgctgtcacccaagctggagtgcagtggcacaatcttggctcactgcaactgcatcttgggttcaagtgattctcctgcctcagtctccccaagtagctgggactacaggcgcatgccaccacgcccagctaaatttttttgtttttattttttgcatttttagtagagacgaggtttcaccacgttggccaggctggtcttgaactcttgacctcagatgatctgcccgtctcggcctcccaaagtgctgggattacaggtgtgagccaccgcgcccggccttcttcaccttttgtatcaagctttttaaggaagagcttagaaagccagtttaaaggaattgaaatgtgttatgtaaatgtctgttttgcaactgagacccactaatttatttagaacaaaaagtcagagaccagtaatgggtccttttctgtcaaatttcaagctgagctgtttctgctacttagaaacatttcgattttctacctagatatgtattatatcattgctaattatttatttatttatttatttatttatttgaggtggagtctcactctgtcgcccaggcttgagtgtactaatttatttttaagtgcagtttaacattggatttttttttttttttttgagacggaatcttgctctgtcgcccagactggagtgcagtggcacgatcttggctcagagcaacctctggctcctgggttcaagcgtttctcctgcctcagcttcccaggtagctgggattacaggcatgagccactgctcctggcctacagttggaattttttgttgttgtttttgagacggagtcttgctctgtcacccaggcttgagtgcagtggcgcgatctcagctcactgcattgtccatttcctgggttcaaatgattctcatgcctcagcctcctgagtagctgggattataggcgcgtgccaccatgcctggctaattttgttgtatttttattagagacagggtttcaccatgttggccaggctggtctggaactcctgacctcaagtgatctgcctgcctcggccttccagagtgttgggattacaggcgtgagccatccgtccggctggaatgctattcttaattgacctgcatttatttatttatttatttatttggcaagccttgaggaagggatttggggaatgaacaatggtacttgatcaaataatccttgtactaggcaatcacagtttctagggccactgtacctggccatgggggttttattgataataatctgtaaggaacaaaagggttagtactatcggaatttttgattagatgtagtgagcattaaggacatatggaaagtagtttgaagtaaaatatatacagtataagagtcagaatcagccaggcgcggtggctcatgtaatcccagcacttcgggaggccgaggtgggcggatcacctgaagtcaggagttcgagatggcctggccaaaatggtgaaaccccatctctagtgaaaatacaaaaaaaagccaggtgcggtggctcacgtctgtaatctcagcactttgggatgctgaggcaggataatcgcttaaacctggaaggcagaggttgcagtgagctgagatcacgccactgcacaccaatctggggtacagtgaggctctgtctcaaaaaaaaaatacaaaaaaagtagccagacatagtggcatctacttgtagtccagggtactcaggaggctgaggcaggagaatcacttgaacccaggaggcggccgtgtcagtgagcctagatcacaccactgcactccagcctggaagacagaggaagactccatctcaaaaaaaaaaaaaaaaagtgagaatgttgcatagattacccaagttaattcttataatttagtgttcatttaaaaggaaaattgatttcctactttttgtttttaaaaatagtattaggctgggtatggtgggtcaggcctgtaatcccaacataaaatgtggccaaggcaggaggattgcttgaggtttggagttcaaggccagccccagcaacaatgagaccaggaaaaatcagccaggcacggtgctaagcacctgtggtcccagctagtcagctagctgaggcaggaggatcgcttgagtccagaagttcaaggctgcagtgagctgtgatggcaccactgcattctagtgtgggcaacagaccaagaccctgcctctaaaacaaaatgtaaaaaatatattttccatttccctattcattttatgtatttgtagcataaatgttactatgcatattgacacttaacaccattagatttctcttacatgtattacgttgctttactgcattagtaatatttttttcgtaattaggaaagtccataattactgttacagaaattttttatttgggatattgtgggaaatggctagtgttgtcatagttaataaaaattatataattaagtgccattgaagaaccatagtttgaaagtgaatttaatacattagctcatagttatacaatctcacaagcattttgctgccttcaggttgtcagtttcctgctaatgctaatgactaaattttttatttttcttttcaacgaaaatttcactcagttctatatatgccagatgaggcttggaacatacagctctacaacctttaactgcttttccaaaaatctgaacgctatgaaaatgaaaaatcttcataatttaactgatttggtgacaaagcgtaaagtgaacagatgtgagagtatttgtaattgttaattttacgtagtaggaaatagtaatttgttcaattagggttgctacttcatatccttttagtgtttcaatataggtgtaccacactacttttcctttaaaaatgttctcagaatttaacattctgcaacactcttgaaccctgtgattttggagaatggaacctatagtagatgctcagcaaattctacatgatgcaaattaaaatcaaggatatgagtatcatgtcttaactgtttaaagagtaggttttactatgaagagatccataagtaaagagcatttgaaatgaaaactttttcctaaacttccctcttttttttaacattgtgtgtgtgaagttaatgttgtatttctaatatgagcttaatgttgcaattaatgtatagtggaaaataataacacgtatattaattcatttttgagacaagagttcgctctgttgcccaggctggagtgcagtggcatgatctccgttcactgcagcctccgcctctaggcctcaagcgatccaccggcttcatccttccaaagtgctgggattacaggagtaagccactgtgcccaagccatcaataaatttttatgggttagaagtttgggccaggcctggtggctcatgcctataatcccagcagtctgggaggccaaggcaggtggattacttgaggtcaggagtttcagaccagcctagccaacatggtgaaaacatgtctctataaaaatacaaaaagtagctgggtgtgctgggcgcagtggctcacgcctgtaatcccagcactttgggaggccgaggcaggcagatcacgaggtcaggagatcgagaccatcctggctaacacggtgaaaccccatctctactaaaaatacaaaaaaatagccgagcatggtggcgggcgcctgtagtcccagctacttgggaggctgaggcatgagaatggcgtgaacccaggaggtggagcttgcagtgaggcgagatcgcgccactgcactccagcctgggcgacagagcgagattctgtctcaaaaaaaaaaaaatagtagctggatgtggtggtgcgtgcctgtaatcccagctgctcaggatgctgaggcaggacaattgcttgaacccaggaggtggaggcggaggttgcagtgaaccaagattgcacctctgcactccagcctgggcaacagagcaagactgtctccaaaaaaaagaaagaaaaggccgggtgcagtagctcacacctataatcccagcactttgggaggccgaggagggcggatcacttgaggtcaggagttcaagatcagcctggccaacatggtgaaaccttgtctcttattgaaaatacaaaaattagccaggcatggtggttgatgcctgtactcgggagcctgaggcaggagaatcacttgaacctgggaggcagaggttgcagggagccaagattgtgccactgcactccagtgtgtgtgacataacaggactccgtctcaaaaaaaaaaaaaaaaaagaaaagaaacacatggaaccaaatcaggatgaaagaaactggaatagcagtttgttataggctgggcttgttggcttgttcctgtaattccagcactttgggaggcccaggcaggaggatcacttgagtctatgagtttaagaccaacctgggcaacaatgccagatcccatctttaaaaatatgaatagcacattaaattcattgattttttttttttaagtcttgctctgttgcccaggctggagtgcaatgacgtgatgtctgctcactgcaacctccacctcccggattcaagtgattcccctgcctcagcctcccgagtagctgggattacaggcacccgccaccacgcccagttaatttttgtatttttagtagagacagggtttcaccatgttggtcatgctggtctcgaattcctggcctcaggtgatccacccacctcagcctcccaaagaattgctgggattacaagcgtgagccaccgcaccgggccggaatttttttaaaatgccaatactggtgacaggattagagtatattaactgattttacttagtctttccattcccacattaattagttctcaaaatttatttgcatgctacaaaagagctcaacaatttttttattacgtgcaatttttttaataggaataaaaaaatacgttgttggcctcattatcaagacgtcatctgacccaacttgtgtagaggtaagagtttattttggagcttattgggagagcataaaatcatttagatattgagtctgactacaacctaattctgtcaagacacatagtcacacatatgcacagtcagtcatttacagtagagctgtaatcatttgttaggattgtctggttatattcttatttatacttacctcaggctctcatttaatcttttacttttccttagaaagaaaaggtgtatatcggaaaattaaatatgatccttgttcaggtaagctttaacttaactgttttccttagaagaattatgcttattatttgaacaaaatgttcgacctacttaggaaataaagtatactaatattttgcagaagtagtgatagtattcttataataataggtaacctactgtctagtacttgaatgttaatttgctgtggcagtaatcatcaaataacgttaaagccatcatttatgtggctgcagtgtggactggactctgttggattcttatttatcttttcttttcttttttttttttttttggagacagtctccctctgttgcccaggctggagtgcagtggcatgatctcggctcactgcagcctctgctacccgggttcaagcgattgttctgcctcagcctcctgagtggctggaattacgggtgcttaccaccacgtttggctaattttttgtatttttagtagagacagggtttcaccatgttggccaggctggtctcaaactcttgacctcaggtgatccacccacctcgacctcccaaagtgctgggattataggtgtgagccgctgcacctggccggattgttttttaattttctgatatgcctgtgcatatttcctttgcatgtatgtctctgagtcctttgatttcctcgtccttctaattgatttccatgcttagtccttaaactgtctatgtagactaaatttataatttttatgtttatctgttttctatagtaatatcataaaattttttccagagaaccctggtatgtgtgggggaaaaaacagtaatttctatttaaataagacttagaaacatccaagcttccaaaaattttagtgtattcagtaattaactccagcttttattatactttagagctttctgttagcccttctctgagtggtgagagagaggagagaatataaagaaggttaacatgtatttttataatctgaaaaatcccttgtgtgtgccataaatagtccagacttgcatacaaatataatgcagttcatgaggcttttggttaaaagtttattcaggccccgattgcagtgcgtcctctcttttaaattcatatatccaaaccctactacatttcaaggctcaaattgcatccaataataagctgtcttaaccggtcactttttatcaccaatggttaattaaatccttgagtctcctaggataatttcttcttttcttgtttgaaatggagtgtcgctctgtcgcccatgctggagtgcagtggcaccgtcttagttcactgaaacctccacctcccaggttcaagcaattctcctgccttggcctccccagtagctgagactactggcccgcgccaccacccctggctaatttttgtatttttagtagagacggggtttcaccatgttggccaggctgctcttttttttttttttttttttgagatggagtctcatcctgttgcccagccttgagtgcagtggcctggtctcggctcactgcaacctctgcctcccaggttcaagagattctcctgcctcagcctcccgagcagctgggatcacaggcacacgtcaccatgcctcgctaatttttgtatttttagtagagacagggtttcaccatgttggccaggctggtcttgaactcctgacctcgtgatcctcctacctcggcctcccaaagtgctgggattacaggcacgagctaccacgcccagcctggccaggctgttctcagactcctggcctcaagtgatctgcccaccctggctccccacaaagtgctgggattacaggcatgagcaaccgcgcaaggcctcctagaataatttctacatatctatcaggcagatactaatacacagacagacccattagacggattggacctttcattaggataattgaaaagggtcctgcggtgattaagataaaagactttgtgttttgttttctacccagtagggtgaagagggtggcacatttcttcctttaataaaggaggagaaaatgaaaagtgatttatccttactcctgcctttatccattacataatttctttgaagtttgttttatttgcctttgagaaatgaagtgcgattaacatttcatgtcttgttttagatactgaaacaagaatggcccaaacattggccaacttttatcagtgatattgttggagcaagtaggaccagcgaaagtctctgtcaaaataatatggtgattcttaaactcttgagtgaagaagtatttgatttctctagtggacagataacccaagtcaaatctaagcatttaaaagacaggcaagtaataattatgttttagaattttaaagtgatttctcaaacaatttcaagcagtttggatgtaaattgtagatattttaaggaactatgatcagtaatatgttaaattgcttgtagtggttttcaactgcagattaagaaatagtcctagacggggcctaataatttacctctgaaggttgaaaaatgaattgttcaagacacacttcaggaattgttttgtatggtaactagtttaataggttctaagcaaatgatttgtgtccaaacatacgtattagttattttattttattttgagacaagtcttgctctattgcctggggtggagtgcagcagcgcaatcttggctcaccacaacccccacctcctggattgaggtgattttcttgcctcagtttcccaaatagctgtgactgcaggtgcatgccacagagcctggcctcaaatcagttattgtctctgcttcttttcagttccccaattgttaacaatagtgttctttttaaaacaaaacagaaaactagatttgcctctaatagtaagcaactggtataaactatagttatacttccattaagttttaaacatttgttgtagtcattaggaaatctttttccccttgggttgcccaggctggtctcaaacaatccttctgccatggcctcccaaagttctgcgattacaggcatgagccactgtactgggctttaatcatttttattagtattatagataactgatacttatttctgtgtcttctaaatctgatatttttgtgtgtttttttttttagcatgtgcaatgaattctcacagatatttcaactgtgtcagtttgtaatggtaagtgtttttaatttcatttttaaaaacaataataggaaagcaattatttacaagtgtgttttgttataggaaaattctcaaaatgctccacttgtacatgcaaccttggaaacattgctcagatttctgaactggattcccctgggatatatttttgagaccaaattaatcagcacattgatttataaggtacagtgaatacatttcagttatttgtcaccggatagccacatatattcttttcacatgtaaagctctcatctctgcattctaaaccttattcaaccttgtttctaacacgaggacgctgctcaggagaaatttcccatattcacacctagtaaattatttaaagtgagtttcaaatctgattctgccacttagaccatgtaattttatgaattcattttgaacaatggatttgattatattgcttttagtttgagtaagttacagtgaggtaagtcaagtgctatttctgaaaaatgaaaagttcatcttttaactgataatttaaaattgataccatgttatggcttaagttctataatggtttagcctgggcaagttggtgaaaccggtctctactaaaaatacaaaacagccaggcgtggtggtgtatgcctgtagtcccagctactcgggaggctgtggcaggagaatctcaaactcaggaggcagaaggtgcagtgagccaagatcgtgccactgcactccagcctgggcaacagagcgagaccctgtctcaaaataagtaaagttctacagtggtttatccagagataatcactgttaccagttggttgtattatattttcagatgttttcttgactgatataatgaataaattaagtatctaattggaacattataacttgacctcttcaacttcgtagtttagtttggtaagataatatggatttatagtatttgaatgatcagtttattgcttaattatgtaaaaacctttctattgtcaacagtcctacagagaacattctcagacataagatattatgcaattgtccaaacattaatttatttaaatattttaatgtttaatcaccagattattaggtatgtttaattttaaggttttaatgccccctgatttccaaccccagacgataactgtttatcttctcaacaatagaatatataagccaattttcccatattcttattactcttagatacattgaccatttcccaaaattctaagcaatcacaagttttaggtcctgtgtaattacacagaaagtataacattcctaaaagtcatatcacagattctaggaaagttgttaaggagccttgttattttaggacacatcaaaagaaagcagtttaggccgggcgctgtggctcacgcctgtaatcccagcactttgggaggtcgaggtgagcggatcacgaggtcaggagatcgagaccagcctggcccaacgtggcaaaaccctgtctctactaaaaatacaaaaattagccgggcgtggtggcatgcatgtgtagtcccagctatttgagaggctgaggcaggagaatcgcttgaatccaagaggtgaggttgcagtgagccgagatcaagcccctgcatttcagcctgggcgagcgagactctgtctcaaaaaaacaaaaaaagtttgctcctaaagcatttactgtatactaggtaggcaataaaattccctctcagtatatctgcatgataaaatatgttcattcacttggcctgtttttgacatctacccctatatttaattgttaaagcctttttccttttaattgtgaattttaagtaaagtgtgtatcaggccaattaattttatggttccctccccccttttaaatagttcctgaatgttccaatgtttcgaaatgtctctctgaagtgcctcactgagattgctggtgtgagtgtaagccaatatgaagaacaatttgtaacactatttactctgacaatgatgcaactaaagcaggtaatataatactatcttgaaaattggctgaataattttagtgccttagaaaataccaaattccaaatgagttattttagaacgacgtatcaaagataagccataatcttttgtttattacataaaatttgtagtaagctacaaatttttatgatgtttccaaaaatttcttaaaattcaggtttggggtgtgttgtggtaatttatttctgcacactttaggagcttggtcttttgggagatacctgaccagacagtgggaaacctgggacttgttcctaacattgtgtctgaaggaattcttttcagccctagtttgattggttatctattaaatgatctagaaggttattcataatactgtgttcatggccaggcatggtggttaatactgtaatcccagaactttgggaggccagaatgggaggaccagttgatgccaggagttcgagaccagccaggacaacataaccagaccatacctacgaaagatttaaaaaatagctagctgtggtgttgcacacctgtagttccagctactctggaggctgaggcaataggatcgcttgagcctattaatacaaagttaaaatgagctatggtcacactattgcactccagcctggatgacagggtaaatccctgtctcttttaaaaaacaaggaaagatagattactatgtatgtttgtgatctgaatgaatgaattgattatttttacatttttcaatgtcagtgagaaatactagaaaaatttaaaggctgtgatagcggcctttaatttatttgagaagagtcaaaatctaagtcctagagatataagaataggtatactggacctaggagttctgtatgtggtttaatattagcaaaagggtgttgggatattagggcttaaaaataatagtgttggctgagtgcaatagctcagacctttaatcccagcactttgggaggctaaggtgggaggattgcttgagccaggagtttgagaccagcctggacaacataacaagataccgtctctacaaaaatgttaaaaataagcttagtgcgatggcacatacctgtggttccagctactcgggaggggctgaggaggactgattgggcctaggaggtggaggctgcagtgagctttggtcataccactgcactccagcctggacagagtgataccttgtctcaaaaaaataataataaaatattaagtgtctttagttgttttataaaatgcgaactgatcgtcccttttaaaatttgcagatgcttcctttaaataccaatattcgacttgcgtactcaaatggaaaagatgatgaacagaacttcattcaaaatctcagtttgtttctctgcacctttcttaaggaacatgatcaacttatagaaaaaagattaaatctcagggaaactcttatggaggtaagatatgtggagcttttgctcctaaaattctgctctgcctactaataactcttaaaagtgcctttttctaaaatgtatgtaccttttgagatttcttattacttaatatttgatcagtacattatatatattctcaattctgaattacagttataagcccagttttctgattttatgttctccataaagctaggactaaaaatttataatcaaaattaaattactaattattatatcatttctaaggttaaaatttcaaagaccttattttaaaatttcagttttaattcaaataacatgcatttgttcatttaaagatatacaattcatcgtgtaatcccagcactttgggaggcggaggtgggtggatcacttgaggcaggagttcgagaccagcctggcctacatcgtgaatctctgtctctattaaaaatacaaaaaaattagctgtgcgtggtgtcacatgactgtaatcccagctcctcaggaggctgaagcacaggaattgctttagcccagtaggctgaggttgcagtgagccaagatcacagtactgcactccagcctgagtgacagagcaagactctgtctgaaggaagaaaatgtctctctctctctctttatatatatatataaacttaagtatatatatatataaacataagtatatatatatatacacacacacacacaattcagtggcatattagtatatatacaatgttatacaaccattaatacctagatccaaaacattttcatcacccgaaggtgaccctttacccctaaaacagtcactttctcctttgttctctccccaacttctggcaaccattattttggtttctgtctctgtagatatatctattctgattataccatataaagggaatcatgcatgtgaccttttgtgtctggtttcttttatttggtgttgtgttttcaatgttcttccatgttgtaacctgtatcaatacctcactttttatcatgtctgaagaatattctcattgtatgaatattcagtattttgtttgttctctcctctgtgatggtacatttgggttgtgataccacttattggcacccaaggccttttaaataaatgtcgttccattaggagacatgataaaaatacatattgatcaactactatgtgagagatttttgaagtgctttagggcatgtcagaagaagcagagttactccagagtttgctgtctatttgataagtattgaaatctgagttgtgatgaataaaacatgaatttttattttcccttaaggtgtaacaagtgaaaagcaatttgaagttggtaatgtttaagaattattttaacagttttggtcttctgtgtaggcccttcattatatgttgttggtatctgaagtagaagaaactgaaatctttaaaatttgtcttgaatactggaatcatttggctgctgaactctatagagagagtccattctctacatctgcctctccgttgctttctggaagtcaacattttgatgttcctcccaggagacagctatatttgcccatgttattcaaggtaacagagcggttggttgagtgttcttcctgttgcatactgtggttttgaggtctgaatccaaatacttctaatctgtgtaaataaattagctataaaaagagaacccaacaacttctccatgagtgtggaaaactagaacatgaaaggagttgagtctagaaccttgattctcaagagtgtggtccttctctcagtatcaacattggttgtgatttcgttaggcaaattcattggccacctgccaatctactaaaccagagtctaggaatgagacacaggaaactcctgtaacagaagttggttaaaaaaatcacattaaaacacacttaaataattataaagccatttttgtagaattacagtgaaaaaaaattttttcttttggagacagggtcttgctctgtggctcaggttggagtgcagtggcgtggtcatagctcactacaatcttgaactcctagactaaagcaattctcttgtgtcagcctcccaagtaattggttgcaggcacacaccaccatgcctagcaaattttaaattttttagttttacttcatttatatttacatagttttttctgttgtgctttaagccccagtatttttattgttttagagattgggtgtcattttgtgttgctcaagctgctctcaaattcctggccacaacagttctttttgcctcggccctccggaatagttggaattataggcatgaatccctacacatggctggcttgtggtttttttggttttgtttgtttttaactaagcttctacactaatgatttcagtgatctaacgatttttttcttgattgatatattgttgagtataggtccgtttattaatggttagtcgaatggctaaaccagaggaagtattggttgtagagaatgatcaaggagaagttgtgagagaattcatgaaggatacagattccataaatttgtataagaatatgagggaaacattgggtaagttaataaatactgttaatctttacctttataaatctattctggggtggaaatacattttaggaaatgtacttgtagtttctaaatattttctaaatgtattgttactcatcaataaaattctgctcattatttgcatttgaaaccatgtttttctttgtagtttatcttactcatctggattatgtagatacagaaagaataatgacagagaagcttcacaatcaagtgaatggtacagagtggtcatggaaaaatttgaatacattgtgttgggcaataggctccattagtggagcaatgcatgaagaggacgaaaaacgatttcttgttactgttataaaggtatgcaagggataggtatgaattagaattgctaaataagtattatgttgttacaataaataatacaaatttgtcttatttacaggatctattaggattatgtgaacagaaaagaggcaaagataataaagctattattgcatcaaatatcatgtacatagtaggtcaatacccacgttttttgagagctcactggaaatttctgaagactgtagttaacaagctgttcgaattcatgcatggtaaatctctttctttactatattttgcttttatttttattgaagaaaataaatgaatgtttttgtcttgttagagacccatgatggagtccaggacaaaataaatgaatatttttgtcttgttagagacccatgatggagtccaggatatggcttgtgatactttcattaaaatagcccaaaaatgccgcaggcatttcgttcaggttcaggttggagaagtgatgccatttattgatgaaattttgaacaacattaacactattatttgtgatcttcagcctcaacaggtatgttaagcactgagcatatgttatttttagaaagtaacacttgtatcaatctgtatgtatcaatggaaataggagggcaactattggatccaatagaagtgtttctgattaaattttctttcttttttccttgagacagggtcttactctgttgcccaggcttgagtgcagtggcacaattacggctcactgcagccttgaactcccaggctcaggtgatcctcccaccttggcctcgtgggtagctgggactacaggcatgcactgccatcacactcagctaacctttttcccccccttggtagagatggggttttgccaagtggcccaggctggtcttgaactcctagcttcaagcgatacgcttgcctcagcctcccaaaatgattttatatgtgtgagccaccacgcccagcctggttaaattttcatagtgagacagattcttgaccagaagattgttaggctgttgtcctatgtaaaattattccgaacaaacaaaatcaggtgttttttgttttgttttgttttggggtgtgtgtgtgtgtgtgtgtgtgtgtgtgtgtgtgtgtttgttttttgagatggagtttcactctgtcgtccatgctggagtgcagtggcgcaatctcggctcactgcagccttgcctcctggggtcaaacgattctcttcctcagtggctatgattaacaggtgcttgccaccacgcccagctaatttttttatttttagtagagacggggtttctccatgttggtcaggctcatctccaactcctgacctcatgatccgcccgcctcggcctcccaaagtgctgggattacaggcgtgagccaccaccatgcctggccagtttgggttgtttgtttgtttgttttttgaggtggagtcttcctctgtcacccaggctcgagtgcagtattgcaatctcggctcactgcaacctctgcctcccaggttcaagcaattcaaacctcccaagtaactggaattataggcacctgccaccacgcttggctaatttctttgtatttgtagaagagatggggtttcaccacgttggtcaggctggtctgcaactcctgaccacaagtgattggcctgccttggcttctcaaagtattgggattacaggagtgatccactgcacctgggccaaaatcagtttcaagacgtttgtgaattgcttgtgtgtggttttccttattagggtgtataacataaacgttaaaatgtctgctttttaaaataggttcatacgttttatgaagctgtggggtacatgattggtgcacaaacagatcaaacagtacaagaacacttgatagaaaagtacatgttactccctaatcaagtgtgggatagtataatccagcaggcaaccaaagtaagtatttctaccttttcttaaaagttttcatgggatttaacaagacgtgttctttacaaatgtattgaattcaagccttttaacatgtatgtgtgatccataagtgcttttatgtgtgtctttctataatttattatctgggcgaggtgtggtggctcacgcctgtaatcctggcacattggaaggccgaggcgggcggatcacctgaggccagaagttcgagatcagcctggccaacatggcaaaaccccgtctctactaaaaatacaaaaattagctgggcgtggttgcacatgcctgtaatcccagctactgaggaggcttaggcaggagaatcacttgaacccaagaggcagaggttgcagtgagccgagattgagctactgttctctagccgagacgacagagcaagactctgtctcaaaaaaaaaaaaataaatgaaaaatctgggccgggctcggtggctcacgcctgtaatcccagcactttgggagaccgagacgggtggatcactaggtcaggagattgagaccatcctggccaacgtggtgaaaccccgtctctactaaaaatacaaaaattagccaggcatggtggtgggcgcctgtaatcccagctactcgggaggctgagccaggagaatggcttgaacccaggaggcggagcttgcagtgagtcaagagcatgccactgcactccagcctggtgacagaggaagactctgtctcaaaaaaaaaaaaaaatactgtaatttccattctcatttgatattaaaataggaataggctgggtgtggtggctcatgcctgtaatcccagcactttgggaggccgaggcaggcggatcaccaggtcaggggatcgagaccatcatggctaacgcagtgaaaccctgtctctactaaaaatacaaaaattagctgagtgtggcggcgggcgcctgtaagtcccagctactcaggaggctgaggcaggagaatggcgtgaacctgggaggcagagcttgcagtgagccgagatcacgccgctgcactctagcctgggcaacagaacgagactccgtcccaaaaaaaaaaaaatagaactatattacttcattcttaagtagatgtagacaaaaaggcgtttgtgttcgtttttaccatttgggattataaatatggtttagggtaagggaagcgtaatggcttttgctttggtaattatgtggattttttttttttttgagatggagtttcactcttggtgcccgggctggagtgcaatggcgtgatctcggctcactgcaacctctgcctcccgagctcaagcagttctcctgcctcagcctcccaagtggctgggattacaagcaagcaccattgtgcctggctaattttgtatttttagtagagacagggtttctccatgttggtcaggctggtcttgaactcccgacctcaggtgatgcacccgactcagcctcccaaagtgctgggattataggtgtgagccacctcgcctggccattatgatggataattctttttttttttttgagacggagtcttgctctttcgcccaggctggagtgcagtggtgcgatctcggctcactgcaaactccatctctagcgttcacgccgttctcctgcctcaacctcccgagtaggtgggactacaggcggctgccaccacgcctggctattttttttgtatttttagtagagacggggtttcaccgtgttatccaggatggtcccgatctcctgaactcatcatccgcccgcctcggcctctcagagtgctgggattacaggcgtgagccactgttcccagccgtggataattcttatatgataaatggaatttgctttttttcctccaagaatgtggatatactgaaagatcctgaaacagtcaagcagcttggtagcattttgaaaacaaatgtgagagcctgcaaagctgttggacacccctttgtaattcagcttggaagaatttatttagatatgcttaatgtatacaagtgcctcagtgaaaatatttctgcagctatccaagctaatggtaggtgattctgatttcttacacaatgcagtataaacaaaccacttctcttctactgccttaagtcaaacatttgatgttttttacagatttaaatcagacctcccatttcccaaatgaccctagacatatttaaaacagttaagtgtacctttcccttttaaaattagtcttaaagcttattttcccaataaattttgtgaacttttggctttaaactttttaatggtaaaatggaattgcatctaatgtacacctgagtaccactgtataagtttagtggtaaaattagattccatttgattctgttttgtaggtgaaatggttacaaagcaaccattgattagaagtatgcgaactgtaaaaagggaaactttaaagttaatatctggttgggtgagccgatccaatgatccacagatggtaagtgagagatgctttgcttttgatttctagtgttgatgctgtgttttatggaatatgctatactctattatgtgcattttgctaatttaaagcatatcaactttgtggttattttatggcattttatttattgtagtccttacgttaatatactaatagctgtattccatcttcaaaagaaactgctgttaatcagtagcgaagggtggtgatatgtaacaagatagctaagaaaattgggtcattttatgtttccatagataggttaggaggatttaattaatggagtaccggtgcagtttttgcattcctcttgatttttagaacaattgctagagctacaaagttgtcattactttacctctttagcaaagtgattgcttcccagattaaaggcctgaaagtcttttttacaccctttttcctaaatgatttgcagaaaaggaaatcattttcagtaataaaaaccagctgcgtatgcctcaacttgtaaaattgtgaattagttttaggttttaactgtatcgtttcattcttgttattcaattgagccttgggagagtccaaaaaattctaatactactattacttggaatagtgttggttttttgttttttggtttttttttttacaagtgtgctagttattttcatagttttgaaatttcagtattgtttcttgttaaggaaatacttttcagtaaacttgttctgaatataattcttgtggaatacttaagttggctaacctaaatatcgaaaggttctgaacatgcgtattatgtgaacagaactgtatttaaaatttgaaagcagaaagtaagatgtattgaaggaattgtgatgtttgtaatttacaagaagcttgagcacgtgtcgggagcacagtgggaataatacaaagggtatcatcttttgtaacattaatgttaaagtttgggatatttgttcacatgaaacattgtgtttattttccttgtcttggcttttcacggtggctcatgcctgtaatcccagcactttgggaggccgaggcgggtggatcacttgaagtcaggaggctgaggcaggagaatcacttgaaccccagaggtggaggtgacagtgagccaagattgcgccattgcaccccagtctgggccacaagtgggaaacttcgtctcaaaaaaaaaaaaagaacaagaagttactctttaagtataactcagtttacttagaatcatgaaaatcttactgggcattgtagcatgcacctgtaatcccaaccaccagggagggtaaggcaggcgaatcaccccagctcaagtccagtttaggcaacatggcaagattcagtttcaaaaaaataatagaaatccatagtctttcttattttctgagagtaattgattgatgttatttctgcttgtgaaaatactcaccagttagcattcattagattaaaacattagtctgagttgggtggatcacgaggtcaggaaatcaagaccatcctggctaacacggtgaaacaccccgtctctactaaaaatataaaaaattagctgggcgtggtggcaggtgcctgtactcccagctactcgataggctgaggcaggagaatggcgtgaacctggaggcggagcttgcagtgagccaagatggcaccactgcactccagcctgggcgacagagcaagactccgtctcaaaaataaaaagacagtattgagggctcgcttgctgccatcttacatatacagtatacgtagaatcctgattctgccacctaagttggagacacccactgaattttgagcctcacttttcttattgtgagagttttgtagctgggcatggtgctatacctatagtcccagctactcaggagactgaggcacaagaattgcttgaacctgggaggtggaggttgcagtgagcagagatttgccactgcactctggtctgagtgacagtgagactgtctcaaaaaaaaaaagtcttgaatgacagtgtgtccatgagacttcccaacccattgtgatttcctgctttcttttgctaaaaactgttttgacgtaggaaaccctaatacaaacacaagattttcctgttttcagtagatgatcatgctacatctcatagacaggaataaccttgttgtttaaaatagtcaccatgtacctaaattaaaacataacttttttttccctccccaacaggtcgctgaaaattttgttccccctctgttggatgcagttctcattgattatcagagaaatgtcccagctgctagagaaccagaagtgcttagtactatggccataattgtcaacaagttagggggacatataacagctgaaatacctcaaatatttgatgctgtttttgaatgcacattgaatatgataaataaggtgtgtaatatttcagttatgtaagggggaaattctgcaggatagccttaattcttgaaagctaaagtatgtctgtggatataacataattttaatgccatggagtttaaatatttaaacttgtatattagggaaatactttcttggttttcaagaacttacttcccaggagtttgaaaccaacctgggcaatatagtgagacttcatctctacaaaaagttcaaaaagtaaccagtcatggtggcatgtgccggtagtcccaactactcgaaaggctgaagtgggggggggggtcacttgagcctgggagttcaagatggcagtgagctgagattgcgccactgcactccaagaagaagaatttactacacagaatcttgattggtaaaaagtaaatatggaaaacagattttagcattcacatggtatgtagcatttattgaaacctcataggtcggggcatccttttatgaacgtagttgtattaattggtttgaataaatgagaaagtaagtctgcatgtttcaattataaaagtgtagtatatgcttataagaaactgaaaaatgtgttaacaagagaaaataggctggccatggtggcttacacctgtaatcccagcacttcagaaggccaaggcgggcggatgacctgaggtcgggagttcaagaccagcctgcctaacgtggcaaaaccccatctctattaaaaatacaaaaatggccaggcgtggtggctcaacacctgtaatcccaacactttgagaggccgaggccggtggatcacctgaggtcaggatttcaagaccagcctgaccaacatggtgaaaccccatctctactcaaagattaggctgggtgccgtggctcacgcttgtaatcccagcactttgggaggccgaggtgggcagatcacgaggtcaggagatggagaccatggtgaaaccctgtctctactaaaaatacaaaaaattatccgggtgtggtggtgggcgcctgtagtcccagctactcggagaggctgaggcaggagaatggcatgaacccgggaggcggagcttgcagtgagccaagatcgcgccacgcactccagcctgggtgacagagcaagactctgtctaaagaaaaaaaattagctgggcatggtgccgcatgcctgtagtcccagctactcgggaggctgaggcaggagaatctcttgaacccaggaggcggaggttgcagtcagctgagattgcgccactgcactacagcctgggtgacagagtgagactgtttaaaaagaaaaaagagataaaagatacgttaagtggacacatttacacggtaacttaaatttttttgtaatctgtagtggtgatttcaaattaaaaacaaaagtgatagtagtagtcttatggtaataatggtttagatgagttctctattaaaaaggttgtctttctccttcaatttgataactcatgtgcgtaacgggacagtttcattttccgtgagaggtggattgtattttacttgggtttacctttcaggaggcattctatcttctgtggtttattgaaaactccaaatatttatactggattaagccttgcttttcccctcctgtctagcacaacaaagacactgaaacattattttgtttccaccacttatttttaggactttgaagaatatcctgaacatagaacgaactttttcttactacttcaggctgtcaattctcattgtttcccagcattccttgctattccacctacacagtttaaacttgttttggattccatcatttgggctttcaaacatactatgaggaatgtcgcagatacgggtaaataaaagatgttcttttattcatttgcctgccaatccaaaaatacaaatatagttaattgtacataggaaggtattacttgttcagagttttgagtgtgtgaattacatatatgaacatctgagaaaatcctataagcagtttaatcaactgttccactccactccaagtgagtccataggcagaattgagttatggggagagcggcctagtaataattggtttgcgtaatacaaagttctactgggtagtgatgttgtagaagttcatatagaatcagctgagctttcagaaatggtgaaagggtggtaatagtcataacttagattgtaatttttttcccataggcttttaaaaaatattcatgaggttctttttttatttcaatagtttttggggaacaggtggtttttggttacatgaataagttcttcagtggtgatttctgagattttggtgcacctgtcatgtgagcagtatgaactctactttatgtgtagtcttatccctcatgtgtatgaactccaccttatgtgtagtcttatccctcacccactcctgcccttccccacaagtccccaaagtccattatatgatctttatgcctttacatcttcacagtttagctctcacacaacttattataatttataagtaagccagcattggatatagttgtattccattattaatttaagaaaccttatgcaagtaattattagtcatcatcccaaaaaaaagggagaacagggttagattcagaatactttgataagagctaaatactatcatgagtgctgtcagtctgtagtaactttccattggtattctatgtcttttaggcttacagatactttttacactcttacaaaatgttgcacaagaagaagctgcagctcagagtttttatcaaacttatttttgtgatattctccagcatatcttttctgttgtgacagacacttcacatactgctggtaagaatttaatacgatttaaatgttaagtgccagctgggcacagggcctcacgcctataatcccagcactttgggaggtcgaggcggggagattatgaggtcaggagttcgagaacagcctggccaccatggtgaaactgtctgtactaaaaataccataaaaaaataaaagatacaataaaaatactgggcatggtggcatgtgattgcaatcccacctattcgggaggctgaggcaggagaatggcttggaccgaggaggcagaggttgcagtgaactaagattgcgccacggcattccagcttgggtgacagagcgagactccgtctaaaaaaaaaaaacaaaacaaaaaaaaacgctaagatctatagttatattacattttggagttaataattttcttcttatcaacaggtttaacaatgcatgcatcaattcttgcatatatgtttaatttggttgaagaaggaaaaataagtacatcattaaatcctggaaatccagttaacaaccaaatctttcttcaggaatatgtggctaatctccttaagtcggccttccctcacctacaagagtaaatataccttttaataaacgtagaatgttcctggtcgggcacagtggctcacacctgtaatcccagcactttgggaagcctaaggtgggaggattgcttgggcccaaaagttggagaccaacctagacaacaaaacaagatcccgtctctacaaaaaaaaaagtagtcagaagtggtatgcatctgtaggaccagctgttggagaggctgaggcgagagggttgtttgcatcctggagtttaagactgcagtgagctatgatcgcaccactgtacaccagcctgggtgatagagtgagaccctgcctctttaaaaaagcaaaaaaaaaaaaaaaaaaaaaaaggccacgcacggtggctcatgactgtaatcccaacactttgggaggctgaggtgggtgaatcacaaggtcaggagttcaagaccagcctggccaagatggtgaaaccccgtttctactaaaaatacaaaaaattagttgggcatggtggtgggtgcctgaaatcccagctacttgggaggctgagggggagaactgcttgaacccaggaggcagaggttgcagtgagccgagattgtgccactgcactccagtgtgggtgacagagcaagactgtctcaaaaaataaaaaggctgggcacggtggcaaacgcctgtaatccaagcactttgggaggcctaggcgggcagattacctgaggtcaggagtttgagatttgcctgaccaacatggagaaaccctgtctctactaaaaatacaaattagccgggcatggtggtgcatgcctgtaatcccagctacttgggaggctgaggcaggagaatagcttcagaggttgcggtgagccgcgattgtgcgattgtactccaacctggtaaacgagcaaaactttgtctcaaaaattaaaaaaaaattcttgattaaaaaaaaaaaacattattgggacgctgaggcaggagaatgtcttgaacccgggaggcagagattacagtgagcagagatcatgccactgtactccagcctggtgacagagcaatactctgtctcgggggaaaaataaatcattatttaatcattgtgttttgatttgcagtgctcaagtaaagctctttgtgacagggcttttcagcttaaatcaagatattcctgctttcaaggaacatttaagagatttcctagttcaaataaaggtatgtatttatttgctcttgcagaaatattaggggtagatgtgaccacttttatgttacattgtagaatttttatcacttgatttgtcatgccaaataaatggggtttcaagataatacgtttacacaatctctgtaatcaaaaaacctgagactggtaatacagtgaaaaactaaagtccaataaggatagatatgtttgagatgttattcggataaacttattactaatgtaattcattttaggtagtcttaaatgtataatggaatattgggtaagaaaaacgttggtagttctttttataattttataccaattttgttagttgagggaacttgtgaaagttactagatagaatgtctttcttctgctgttatacagtgctttattcatacttttgggaagggtttttctttgaacatcttgctttaaagaaatttggaagtactgtgaaaccctaagtagttgatgaatagtttatccatgattgttgaataagaattagtctcttagctcttaaatattttctccaaaatacaaaggttttttttttttactgtaaaaatattagccaatttttaaaaaactaatgaaagttacctaggctgggcgcagttgctcatgcctgtaatcccagcactttgggaggccaaggtgggtgggtcacctgatgtcgggagtttgagactagcacggccaacatggtgaaacccccgtctctactaataatacaaaaattagccaggcgtggtggcgcacagctgtattcgcagctacttgagaggctgaggcaagagaattgcttgaacccacgaggcaaaggttgcggtgagccgagatcacgtcattgcactccaacctgggtgacaagagtgaaacttcatctcaaaaaaaaaaaaaaaaagttaactgatagctacgaagtcaatgataatataactaaacttaatttaatgacagttattaattagccttaggagaaacatctttcttggtatcttggcatatgaagaatttttagctgggcacagtggctcacacctgtaatcccagcactttgggaggccgaggcagacagatcagttgaggtcaggagttcaggatcagcccggccaacatggtgaaacctcatctctactaaaaatacaaaaattagccaggtctggtggcaggtgcctgtagtcccagctactcgggaggcagaggcaggagaatcacttgaacccaggaggcagaggtttcagtgagctgagatcataacactgcacgccagcctgggcgacagagcaagactgcctctcaaaagaaaagagaaaaaagtgtctgggtgcagtggctcatgcctgtaatcctagcactttgggaggccgagacaggtggattgtctgagcttgggagtttgagatcagcctgggcaacatggtgaaactacgtctctagtaaaaatacaaaaaatgagccagatgtggtggtgcctgtaatcccagctgctggggaggctgaggcaggagaattgcttgcatcttggaggaagaggttgagataatgtgctggggctacagaacaagactctatcacaaagagaacaaaatttgtgtgaatacatagtaggtgtatatacttaggggatgggatgcatgagatacttcggtagaagcatacaatgcataataatcacattgaagactatttactgtaaggtatcacaccattttttttgttttttttgggggggcacagtctcgcttttatcacccaggctggagagcagtggcgtgatcttggctcactgcaacctccgccatgcaggttcaagtgattctcctgcctcagcctcccaagtagctgggattacaggcgcctgtgccaccatgcatggctaattttagtaatgacagggtttcaccatgttggccagggtggtctcctgacatcaagtattcttcccgtctctgcctcccaaagttgggattacaggcgtgagccaccatgccggggcccatgattcttttgtaatcttcccccccaccagttaacaggtttgcagttcattcagctatgtagtatactgtgtcactatcctataatttaaaacccagccactttatggataatttatattccttccttctctaaaaaggaaattgctcatctatgatttctttctttgcaagttgaagtttattgcgttgacatttcaactatctgttttcacaggaatttgcaggtgaagacacttctgatttgtttttggaagagagagaaatagccctacggcaggctgatgaagagaaacataaacgtcaaatgtctgtccctggcatctttaatccacatgagattccagaagaaatgtgtgattaaaatccaaattcatgctgttttttttctctgcaactcgttagcagaggaaaacagcatgtgggtatttgtcgaccaaaatgatgccaatttgtaaattaaaatgtcacctagtggccctttttcttatgtgtttttttgtataagaaattttctgtgaaatatccttccattgtttaagcttttgttttggtcatctttatttagtttgcatgaagttgaaaattaaggcatttttaaaaattttacttcatgcccatttttgtggctgggctggggggaggaggcaaattcgatttgaacatatacttgtaattctaatgcaaaattatacaatttttcctgtaaacaataccaatttttaattagggagcattttccttctagtctatttcagcctagaagaaaagataatgagtaaaacaaattgcgttgtttaaaggattatagtgctgcattgtctgaagttagcacctcttggactgaatcgtttgtctagactacatgtattacaaagtctctttggcaagattgcagcaagatcatgtgcatatcatcccattgtaaagcgacttcaaaaatatgggaacacagttagttatttttacacagttctttttgtttttgtgtgtgtgtgctgtcgcttgtcgacaacagctttttgttttcctcaatgaggagtgttgctcatttgtgagccttcattaactcgaagtgaaatggttaaaaatatttatcctgttagaataggctgcatctttttaacaactcattaaaaaacaaaacaactctggcttttgagatgacttatactaatttacattgtttaccaagctgtagtgctttaagaacactacttaaaaagcaaaataaacttggtttacatttatttttcctttattgactcatttattcctatattaatgatagtgggtatttgtgtttaagcatcaagtaacattttaaatgaagtt

SEQ ID NO: 1299 - DNA, 29558 bp, Homo sapiens
cctcgatcccctcgccgcggtcccatggaggaggaggcgagccgcagcgccgcggcgacgaacccagggaggtaggttgtcatgggactcggccggccaccctggcaattccagtcaaacggcaagccagactcgctttgccggtcccttcctctcctgcccctgcagccgccaggaatggaacagtcccgcggtggggactgtgggaggcgcacgcgcgaggagtgtagggtgggggtgctggcggcggctgctttggcggcggttggtggccgtgcgggcggggagggagggggaggagagaagaggaggtggagaaggcttgggctcgcgccgctgaaggtacgcgtgagggcctgcgctggagccggcttgacagggtctgagggggagtggagaactgggcgaggaggttcccgtgggtgagcgcgtacgggatggctggctcgcaggacggccgaaggtggtggttggtgggagcagccagcgacgagcccgtagacactcgtacgcgtgcgggctgacgtgcgcgctacatggccggagtcgggcgaagcgggggaccgtggggaagaacgcgaggagggaggagtgggaggttgggggtgtcgctaggcgcccttagctccctccctctggaggagctgccgcggccactctgctgccgccgctgccgccgccattttgggttcgctttgcgaggggaaacgatcccagtgtcggttgcgggatccgcctcctctcagtttgcccctttagccctccacctttcccttctcctctctcgcatttccgccagtcggcttacccgctggccgcctcctgacaagcgggagggatccgcggtggacccagggaagcggaggagcctggcggccaccccctcttcctcacttccctgtactctcatcgctctcggcctccgacacggtgagtagaacgatttgggccggcattcgggcctaagcactctctcagcgattgaatcctgggctttctgggagccactgtcatctcccggacctggacctctgggagagcagtggtgaagatgggggaggggagagcagggagggggatcctgagcctaccgggaagtccctccaggcggggtgaaggggtgtccctgacaggcagactcccggagggggctgggaagtaagcgagtggaggcggagtcggctgtgcccctgacaggttagtttgtgtttgtaggcatgatcggagcctcccccatagtccagtttgtgtgtgtttaattaagggataagagtggtcgaggacacgatcttgagaggggattttacctgtgtgacaaggtctgtggtgtccctgccgcgttgaacggtatgtgggaacgacaggatgatctcagtgttgtacgtttaataaatgtcactggttagtttgtacatggaaagagatgtttttggtctagcagacagatggtctgttggtgtgtagcggctgtgttggtgtgtgtatgtgaggatggcaagtgtttccgtaagagtttgcctttatttgtgtaagtgtaatggagttccccttataagttagcttatttcttgaataaatgttgggaggttccttgcaggttgatatgtgtgtgtattttagggattgggagcccctagttacttgttgggaaagagcggcaatggtagtgttctgtacagcatgtgtctgtgaggtcagggaggggagaaacttggcatagccagttgtggtcttaagaatagtttgtgcctttggttagagtgagttgtgtaaatgtgaagggccaaaatatctttaacagaatcattgctacaaagctgtaaagaatgggtggccttatttgttgtcgcgggtttatagtaatagtttacaatacaataagaaagctctttcagtttctttgtgatactgaatctctgtgaaaatggtaggatgctttcttccattttacaaaataggaaatttaggcataaggagagaacttctccaaggccgcatgttaaattggtgacaaagttggaactgtaactcccatattttcactactactgcagcagtatattcagcataccatggtgcctcaggaagtctttgtcggcaaatctgagtatgctggaaagataggagcacataagactggttggcttgtatttgggggagaccgattgtgtcagatatgtatgtggaacgtagctgtccttgccgagtctgacctgtatgaaatgcatatccatggctatattattttggatttatggaggaagcagagcatttctgacacttaaggttgtatgcgtgagggagaaggctttcacagcttaacttgtaccagagcagctgcatgggtgctgacagcttaacttgaaatctgtgggaggaaggatcctttttcactcattcaacaaatataaccattcaatgaatggtccatgccttgaggtgaggatcatcaaggtgtctctgtaaatagcctggatgcaatctgaggggagttgttttgacggtggtaggtattaagttgagggaggcagtgtggaattaaaaccagagaactgtttttgggtactggtaattgttaatatatgtgcctgtggatgttggaacttcttggctgggctgaaggaatcctttgaaagactgatttcggcagggcgcggtggctcacacctgtaatcccagcactttgggaggccgaggtgggcggatcacgaggtcaggagatcgaatcacgaggtcaggagatcgagactatcctggctaacaggatgaaaccccgtctctactaaaaatacaaaaaattagccgggcgtggtggcgggcgcctgtagtcccagctactcggggaggctgaggcaggagaatggcgtgaacccgggaggcagagcttgcagtgagctgagattgcgccactgcactccagcctgggccacagaggagactccatctccaaaaaaaaaaaaaaaaaaaaaaaaaagactgatttcatgtagtaaggatcccgtctatgaactctatgaatatgaggtaagaatgcatgaactaagccaacttagctgtattcttctggaaaatgggatgtttcttgataggctagattagtggttcttaaaagttttttggggtcacttatccttcagagaatcggatgaaagacactgggccctcaagttagaagatgagcataagcgcaatcacatgatttatatatatgattttaggaacttaaactgtaatgaaatagagccaatttatatttagatctcatttgaaaacctttcattttcattgttcgggtgtgtggatgttagtatgagtttaaggtgaaggagtctatgttagtatttgaacatgttgacaggatccatatttttaatttattctttttatcgtctgcaaacatttctgcagtattagtaaatgactctgtatttggtaaaaagggaagctaatgtcgcacaagtatctatggctttgttctttgtcagtatctttttgttctcaaactctgagaagcgtctttttttcagttttggattgggcctgaggtgatttgaagctcctgtcttggagtttaacttagttataacaaacactgagttaatcctatgcaggagacacaaagataattaatatatggtctctgtgcttgaagagacgctaattttctgtggttgaagagatgctgtgaattgtgtgatagtggcagctctcaaaaggacaaggaagagggaaacatattcctagaagctgaaattttattacccaattgcaaagactttttgtcactacttattcttaggaataaccataaagtgtttattttattctgtatggaactttgtactttaaaaaaatatgttttgtatcatctggtgtttttgtataaaggaactgttggtttgaaaagaaggtaaacatcatttatattccttaccttgttttgggatgtatctctacagtgagtttatgtaaaaaggtcttaatgtcatttttgggtatacatacatgtagaaagccctcctgatataaaatccagtagctatttgacagactacccattaatttattactggaacttaaaaataattactgtacttttaaaagaacaagaaattggtcaggtggggtggctcacgcctgtaatcctagcactttgggaggacgaggcggatggattgtcagagctcagaagatcgagaccagcctgggcaacacggtgaaaccccgtctctactaaaatacaaaaaattagctgcatgtgttggagtgcacctgtagtcccagctactcgggaagctgaggcacgagaattgcttgaaccaagaattgcttgaactgggagggggaagttgcagtgagctgaaatcatgccactgcactctagcctcggcatcagagcaacactctgtctcacaaaaaaaaaaaaaaaagcaagaaatgtaaaaaggtgttttaataggacagattataggattcagtgagataatggagaagttttaggaaaaattgtctgatagtcctttctttctattgacatggcccctgtataagaatgctatgtaaatttgtgaaaagtttaatattttctctaatttttaacgggtagtaggttcatggtgttatttttctcaaaacgtacatgtgatatgtgtgtgtagtgtgcatatatgtgcatgtatgtgtatacaatttctttatttttttaattgagattaggtctcgctatggttttttgtttttgtttttgtttttgagagagagtttcgctctcctcgcccaggctggagtacaatggcacaatcttgcctcactgcaacctctgcctcccaggttcaagtgattctctttcctcagcttcccaaatagctgggattacaggcgcgtgccaacacgccctgctgatttttgtatttttagttgagacagggtttccccacgttggccaggctggtcacgaactcctaacctcaagttctccagccgtctcggccttccaaagtgctgggattataggagtgagccactgcacctggcccaggtcttgctatgtagatcaatctggtcttgaactcctggcctcaagccatcctcctgtcttggcctcccagtttgctgggattacagatgtgagccagcatgcccagctctttttacctgcttaccaaatccaagattttctccaaaatgaactggaatagccttcttactgtgttaattttgccttggtggggaagcctaagtcttggaactaaattggggtggttatgacagttctctttttaaagctgatcagtatttcagtatttcacttgttgttgttttttttgttttgttttgttttttttgagatggagtcttgctctgtagcccagtttggaatgcagtggcaggattttgactcactgtagcctctgccacccggattcaagtgattctcctgcctcaatgtcctgagcagctgggtttacaggcacgcaccactacacctggctaatttttgtattgttagtagagacagggtttcaccatgttagccagtagccaagctgttctcatactcctgacctcaagtgatccacctgcctcagcctcccaaagtgctgggattacaggtgtgagccaccacgcctagccaaacccatctctttcattaaaccacctcattttggttcagaaacaagactgccatgtatgtatttaatgcttattatgtgccaagcactattccaggtactaagatacagtgatggacaaaacaagatcccttctcctctatctcaggacttattaatttgggcattttcattttccaatataggatcttttagtactggtataggattcctgaaggaattcctgaaatataattatttttctgctagagcaaatcaattttgttttttgttttttttttgagatggagtttcgctcttgtcgcccaggctggagtgcaatggcgcaatctcggctcactgcaacctccgactcccgggttcaagcgattctcctgcctcagcctcccaagtagctgggattacaggcattagccaccacgctaggctaatttttgtatttttagtagagacagggtttcaccaggttggccaggctggtctcgaactcctgacctcaggtgatcctccaggctcagcctcccaaagtgctaggattacaggcaggagccaccacgcccagaagagcaaaattcttctgttgacaaaaatttctttcctctgaggaagagacactgtgtgcctgtgttttatccaggaattccattggatagtttgtcctttgggatgtcagtggattaaatcctccattaagaatcaaagtacttggctgggtgcagtggctcatgcctgtaatccctgcactttgggaggctgaggcaggtggatcacctgaggtcaggagttggagaccaacctggccaacatgatgaaaccccatctctactaaaaatacaaaaaattatccaggtgttgtggcaggtgcctgtaatcccagctactctcgaaaaaacagaaacaaaaactctgacatgtagagtatgtagatgtagagaaaaaagtaaaatgattgttgaaaaaaatgtctattttttatcttctaaatagctttgtgtgtcagagatcagaacgctcattttacatgatatcaagaaccagaatgctagatagctagaatggttgttaacttcctagataaccattgtagaggaacacataaggtaaaacaaatgaataaaaattaaaaaaaaatgagatagccaaagatttgaagctctttacccattaacatgataatcatttcgactttgaatatttgtagaacaagagtcagaactcagaacaaagatctctgaggaaataaaaaaaaatcaagctgcctcctaatttctcatttagtctgtcattgggcattgtcaaactgtcaaactatatttagagattctggttttcatctggagacttagtgagttgtgtaatatcttgaatacacatataagatcttgccaggtggggtggctcatgtctgtaatcccagcactttgggaggatgaggtgggaggatcgctggagcccaggagttcaagaccagcctgggcaacatagcaagtccctggctctatttaaaaaaaaaaaaaaaaaaaaatcctcaatgtagaactttaaatttatccttacgtgttacatccagttgatttgagaaaatatgattctgaattttccatcaattggattggcagtccctttcagctttacagctttacatcatctacagatttgttaagtatgttctcttggtcttctaattcactgatggagtttttgaataggtcgggtccaaagatagagtcctatgaaacactgttggaaacttgtctctgtctgtctcttttttttttggagacagtgtcttgctctgtcgttcaggctggaatgcagtgggacggtctcagctcactacagcctctgcttcttggactcaaagagattctctcacctcagcctctcaagtatatgggactatatgcatgtgcgaccaagcccagataaatttttttttagagatatgttgacattttgcccaggttgggagacttgtctcttgattccattcagtattgtgtgggtttggataggccatctaattataaaatcattgggctggtcatggtggctcatgcctgtaatcccagcactttgggaggctgaggtgggcggatcacctgaggtcaggagtttgagaccagcctgaccaatatggagaaaccccatctctactaaaaacacaaaattagctgggcgtggtggtgcatgcctgtaatcccagctacttgggaggctgaggcaggagaatagcttgaacctgggaggcggaggttgcagtgagccaaaatcgtgtcatcgcactccagcctgggcaacaagagcgaaactccgtctcaaaaaaaaaaaaaaatcatctagctcacattttctccttgtcttcttcctattagaatttaagttcaatgagattagaactctctctctctctcattctctcatatatcccaagcatctaaaacagggattgaaacatagtaagtactcaataaatgtttttgaataaatgaatgaaggatagctgggcgtggtggctcatgcctgtaaccccagcactttgggaagccaaggtgggtggatcactggagctcaggagttcaagaccagcttgggcaacatggggaaaacccatctctacaaaatatggaagaattagccgggcatgacagcacactcctgttgccccagctacttggagggctgaagtgggaggatcgcttgagcctgggaagcagagattgcagtgagccgagatcaagccactgccctccagcccgggtgacagagtgagaccctgtctcaggaataaggatagatatgaagaattcgtcagatgccttgttgaaaacatcatacattgtctacatggaattcctccatattgtaaaatgaatctaatttataccaacaacgtttggcttttttgcagaaaaggaagcaaatgagctgatggaagatctgtttgaaactgtgagtaatgatcctcaagtgagaacatgggattgtaagttggttctccaacaaaatgtgtcctttgatctctgtgatgctccttctagaagagggactgaaccaattctccttttagtctacctgggaaagaatataatgacaaaagaaatttgctaactgctagactcttgattatccacatgtaggttattcttactaaaattttccttgaagctttttttttttttttttgaggcaaagtcttgctctgtcacccaggctctggagaatacagtggtgaaatctcagctcacagcagcctcgacctccagggctcaaaacaattctctcatctaagcctcctgagtagctgggactacaggcacacacctacaggcccggctaattattttatttttttgtagagacagggtcttgccatgttctggaactcataggctcaagtaatcttcctgcctcaacctcccaaagtgctggaattacaggtgtgagccagcacatcttgccccttgaaaacttttgatggcttcccctactgtcatttggtgtgtccttaaagattgccaactagttttaaagtattttgcacacaaataattaccttttccataaatttgtctaaaaagatatttctgtttaagaaattgatcattttgagttatcctagctctgtgcttactgatacaagttgactggttgagcaacttctttcctggcataatagtcattccatatgtgggtttgtaggagtcctgaagtgagaaaggttctgatgtaggctctttctgggtgccagcattattaaagtattgtttatagttttcacttttccttcccaacactggagcaacattcaaaagcccattccccaggaaaaccctccctttcctttgcccacagttccaagatgagatgggattctccaacatggaagatgatggcccagaagaggaggagcgtgtggctgagcctcaagctaactttaacacccctcaagctctacggtaggctagttgaagaccttgagatttggaatagaggaagagtttatttctgaaaaggttttcagaagttgcagttaacaatttttcatccccagccagcttctgttactgatgtaaggatgcagagtcctgtcaggagttaggtgtcaagtgaagtctccttgttatggggcagtgcagctgtaggccaagctgtatctgtttgggaagggagaaaaaacagtagctggcatccatatccacttctccgggtgagtggtgctggagaggtatgtaggactcaatgtggccagccacacaaactaccctatattgtaatatccagtctgtcccttttgttctttttatgtgccattaatatctgctaaatgtgactgaaaatttgttagtcacctaggcattagtggagcaaaccctgaagcacctgcagtaaggagtctgaaacatacgtgctgacctttttgcctaaagttggcacttgtgttacagcatccagaaagtagaggctttaattttttcctcattttgtggtggatttgcatctgcactttattctgttgtagcagcatataatcattaggtcgatggcgagaggtcaggatgcagtttgtgccataagtggaacaaagcaaagagaatagtccctgtaattagtcctgtgtttgaacttaacagcactactaagcagagagcttgggttccatctgaaagctagacctttagggattttccaatttagtgaaaaaagataagataggccaaccaatgtcttaaaaactagaactactagtcattctccattacaacaaatatcacaatacaactacatcaaaaatctcaagattgctaagtcagtatttgacccattattttaatttatagttcatagaacaaaattctggtatagcagaatggaaccattcatcctgggaacgtataataggatctgattaataaatattttggttttgctgatcaactctttataacttcttaaaatttggaaaatatagaactaatttaaaattcctgttagaatccagttaccttctggtattcaatggaatatagtcatatatcatctcatggtcataccctctgtgaaatctatcattaaacgattcatcattgtgtaaacatcgtagaatgtacttacataaacctaaatggtttagcctactgcatacctattgctcccaggctacaaaacctgtacagtgtgttactgtactgtactgaatactgtaggcagttgtaacacaatggtaagtacatatgtatgtaaacatagaaaaggtacagtaatcttatggagccacctctgactatgtggttcgttattgactgaaacattctgtggcgcatgactgtacttgggcagcttctgcttctctttcgattgcaaatacaaacctgtttttgttttaatctttgactaaataaaaatccctctgtaagtccatagagagtaagcacatcttaaaacacaataaggaagagagaggagaaaaagacagtcaaaacaaaaactctggggcttcccttatcaattacctaaataatccttgttaaaactaagtgcaggctatgtttccattttctacttttttatgcttcttctcttctgttccttcagtggtggtagcgcggatgttcaaattttcagttctcagtaaagattgtatagacagtcccacggtcttcaggtttttactctgtgctacccaaacctacagtaaatactataaaagaaaacttattcaaacgtaatctttatctgcaaaaactattgaaaaacgttaccatttaactattgctgtaatatagggggttccttgaaatatgataacctgcttgttatagctacttcagcagatcttatcctgttgcatagggtatcagcatatgcttaatcatttaggtatattattctccctttatttctttctatgtaaacatagaaaaggtatagtaatcatacatagaactgacatgctaggtattggaatttttgcttcagccctgcaaacaatctttcaggagggtatggatgggaagttagggttaggaaccttggaagaggaatttaaagggctaaaagaagatagccttcatggataatattttaactaacttctccgttctgttcatttgaactaccatgtacttcagttattttggtatatccttttcctgcttcatgctagaaagtctttgacttgttaagaaagcagggcagtgcagcctgagtagataggataatgggacaagctggacctgggatgggagtaacatcccagggagtaacaagtaatgagagaagaaatgagaatgatgagttcccaccagctccttggctgctttcttacccatatatttctctgtccctagttttttgtttaattttttcttcatttgtatattatttggaagaggaattgtagaggaatgggatggggtgtaatacagaatcatttgatgcatgctaactactttgggaaaagatttgtgtaaggctgggagtttgactgttggctaaagtgaaaaggggggattagtagggaatgaaaattgttcaggctctttgctcatcattgcaaagaattggatgtgttgtggacctaggaaaacactcaaattcagtcatccccgtttgggataggtttgaggaactactggccaacctactaaatgaacaacatcagatagcgaaggaactatttgaacagctgaagatgaagaaaccttcagccaaacagcagaaggaggtagagaaggttaaaccccagtgtaaggaagttcatcagaccctgattctggacccagcacaaaggaagagactccagcagcagatgcagcaggtaacactttccttggtcatattaatattgaattataccaaggcctaactctgaggctttggtataatctaaaattagcagctttgtaaatgtcagagatagttaccttactacgtattaaaaccgtagtatcttcacatcagttaggagcttgagaagtcatcatgttcatgtcctgtggctcagggaagacagcacataaggaccctaatggtattcggaattacagatttcaaagagtcctcagtaatctattctgaaatttaaccttcactgtgacaagtagttttttttcccttttcccttttcttttttcttttttttttgagacgtagtctcgctctgtcacccaggctggagtgcagtggctcaatctcagctcactgcaagctctgcctcccgggttcacgccattctcctgcctcagcctcccgagtagctgtgactacagggactcgccaccacacccagctaattttttgtatttttagtagagacagggttcactgtgttagccaggatggtctcgatctcctaacctcgtgatccacccgcctcggcctcccagagtgctgggattacacgcgtgagtcactgcgcccggccttttccttttctaatctcagttcctcctctgtttagaggttaaacttcctctggttctgtcattttgttcaagggaacatgtctgagaaatttatgccaagatcctacgttgttctcacactctttgcagaaagcaaaatttgtgtcataaagttgcaaacatcttagttaatgactctctggtggctgggtgcagtggctcacacatgtaatcccagcactttgggaggctgaggtgggaggattgcttgagcaggggagttcaaaagcagcctggacaacatagtgagactctgtctctacaaaaaataaaaataaggctgggcacagtggctcacacctgtaatcccagcactttgggaggccaaggcgggtgaatcatgaggtcaggagtttgaggcaagcctggccaacatggtgaaaccccgtctctacgaaaacaaaaaattagctgggtgtggcggcgggcacctgtaatcccagctactcgggaggttgaggcaagagaatcacttgaacctgggaggcagaggttacagtgagccgagatcacgccattgcactccagcccaaaagtcagtgcgagactctgtctaaaaataataataataataataataaaataaattagccaggcattgtggtcacagctacttgggaggctgaggtgggaagattgcttgagcacaggtggttgagagggcattgagtcatggttgcaccactgcactccaagctgtgtgacagagcaagaccctgtctccagggggaaaaaaaaatatctctgggctcctgaaatggcagtgtcataacatatcactgcattattttctttctctccccagcatgttcagctcttgacacaaatccaccttcttgccacctgcaaccccaatctcaatccggaggccagtagcaccaggatatgtcttgtaagtttccaaattgccgtaattctatagactagaatataaaattagcttggcaggttatttctcacagttattctctcaggtatttttgattgctgtggcttcctatgtttgctgagtgaacataagccactgattcacatgaaaggacaaagagtgtattcaattttttcttttcttttttgagacagggtcttgctctttcacccaggatggagtgcggtggaacaatttcagttcactgcaacccctgcctcccgggttcaagtgattctcctgcctcagcctcccaagtagctgggactacaggcgggcaccaccacgggtaattttttttgtatttttagtagagacagggttttgccatgttggccaggctggtctcgaattcctgacttcaagtgatctgcccacctctacctcccaaagtactgggattacagccatgagccactgcgcctggcctgtccttctgatatttttattgggtcctcctcctcatctttagattcaccctgacttcttaggtttttggtaccgctattcatttcatagatgttgaggctgggcatagtggctcacacctgtaattccagcactttgggaggctgaggtgataggatcacttgagcccagtggtcaagaacagcctgggcaacatagtaagacccggtctgtgttttttttgttttgttttgttttaatttaaataatgaagtaaatatacatgtagatgttgaattcattatccattcatgaagctcaatattagtgttttatgtgtagagctagttttgctcatgacgttttgaggtattttgagctttttttttttttttttttttttttgagacggagtctcgctctgtcgcccaggctggagtgcagtggcgggatctcggctcactgcaagctccgcctcccgggttcacgccattctcttgcctcagcctcccaagtagctgggactacaggcacccgccactatgcccggctaattttttgtatttttagtagagacggggtttcaccgttttagccgggatggtctcgatctcctgacctcgtgatccgcccacctcggcctcccaaagtgctgggattacaggcgtgagccaccgcgcccggcctattttgagattttaaatttgaaatttggccaggtatggtggctcatgcctgtagtcccagcactttggtaggtcaaggtgggaggattgcttgagcccaggagtttgagaccagcctgggcaacatagtaagaccccatccctaccaaaaaaataaaaaataaaaaaattagctggggatggtgccgagtgcctgtagtcccagcaacttgggagactgaggtaggaggatcacttgagcctgggacgttgagactgtagggagccgtgcttatatatcactccagcctgggtgacagagtgagaacctgtctcacaaaaacaaaaccatactttacctcataaaaattgcctcaaacttttggacaggtaatgataatactctcagcttcttcagtaagtcttctttggattttgaagagtacatttgctagtattctaaaacttccttggtgatcaacaggatgtcttcatctcttactgtattcagaggaggatgaggagtacttggttgtaggcattattctgagaccaaaagacaaaacaattttaaaagtaatggtcctggtcgggtgaggtgactcatccctgtaatcccagcactatgagaggccgaggcaggcggattgtgagcccaggagttcgagatcagcctggccaagatgggaaaacgctgtctctgcaaaaaatacaaaaatcagctaggtttggaggtgtatgcctatagtcccagcttctcaggaggcagtgggaggatggcttgagcctgggagggggagtttgcagtgagctgagatcatgccactgcagtccagcctgagcggcagagtgagaccatgtctcaaaataaattaattaattaaattaaagtaatagtccccattcttgagactcttaattctagctcgggagctagaccatgtattccttagtgagaaacagtttaaaaataaaacaagaatataatccctgaatatctgagaactcaggcataatcttaacagtagtttattgtgaaagactttatgattatttttacctgtttttatcctgtagtaggaaggtcagcttctcatttagattctgaaggctattggtattaattgtctggaattgtcttagatcttccttgtgtcgtgttttcccagaaagagctgggaacctttgctcaaagctccatcgcccttcaccatcagtacaaccccaagtttcagaccctgttccaaccctgtaacttgatgggagctatgcagctgattgaagacttcagcacacatgtcagcattgactgcagccctcataaaactgtcaagaagactggtaggagacagatgtgtcagctttaagtttttacttgcggtgagaggtggtgggaatcttatcccatagataacttcctaggatacttgcctaggaatggaggacacaggacatttgtaatttcttccttctctcttttatcctccctttgtactcattatccaagttctagaattacatgataatctccgggcctgggtaaggcatggaggcagtggacagtataggaatatgggaggtagagatctgaggctcagtgctaagaattggactacagcaatatgaggggtaagtattaggaatcagatcaagataaactggggcctggtaaagatgaaagtcaggtggtaaagttcggtcatgtttagctttttattctcttcattaagatcaactaactttatttaccataatgattgtagcataggtgatatctccattctgaatgaaatgttgacttgcaagttaggcgtaaattagagattgtacatttgccgtgttcagtattttaaagaaatttgccggtttagattctaccttgcattggtttagtattttttgagaaaatatttgctatttacttaagccaaatatttacttctgatttgtttgctgacttagcaaattagttgtggtttgttctggatttgggtttgtctttggattctattttaaatccctaagtcttatcattacattgaatgtagttgaatttaagtgtactatatcatagacacagatcccaaactactttaatagctatattatatgaaatggtaatgaaaacgtgatttaataccaaattatagtattatcttacacatctagtgtcctgtgtttttcttctggagatataaaaatgacacttatggaaggagaaatatggatatagtagttttgtctctagaaatgcagaggtgcctaaaattgagaggctgagagagggagacagaaatgaatgagactgaattgtctcattccttttatggttcttttgttcccaacctcaggaggaatctgggagaacttaatgaaagttaagaaagaatgaaataaaagtaaaatttggaataccaggtttgtgagggagattaaagaagttggaatcttttttcttttttttttttttaagatggagtctcgctctgtcacctaggctggagtgcagtggggtgatctcggctcactgcaacctccgcctcccaggttcaaacaattctcctgcctcagcctcccaagtagctggaattacaggtgcgtgccaccatgcctggctaatttttacatttttggtagagatggggtttcactatgttggccaggctggtcttgaactcctgacctcaggtgatccacctgcctcggcctcccaaagtgctgggattacaggcgtgagccagcacgcctggcctggaatcttatcctggaagaaaaaagcattgttgaaggtctgttatccttcagagatttaaaggggaaaggaggtaaaacatttttgagcatacactatgtgacaggtattactaggtactttttaagtgtttgttttactttgtgaataaagtgttacacgtaagaaagagtaagagaggccgggcgccgtggcttacgcctgtaatccaacactttaggaggccgaggctgtcggatgacaaggtcaggagatcaagaccatcctgtctacagtgaaaccccgtctctactaaaaatacaaaaaatcagccaggcgtggtggcaggcgcctgtagtcccagctactcaggaggctgaggcaggagaatggcctgaacccgggaggcggagcttgcagtgagccaagattgcgccacgcactccagtctgggcgacagagccagactccgtctaaaaaaaaaaaaaaaaaaagtcaacttttattgccagtgaatgggactccctttagacctaatgttagttgaggaaagactgtggaaactctttggggagtggtaggcagatgggagggaatcaagttagataaggacagctctacctaaatgcaaaaatgcattcacaggctttttgaagccctcttttttcctagaagttgatttatcagagatttattttcttatagccaatgaatttccctgtttgccaaagcaagtggcttggatcctggccacaagcaaggttttcatgtatccagagttacttccagtgtgttccctgaaggcaaagaatccccaggataagatcctcttcaccaaggctgaggacaagtaagtgtttactctgggggatcaaatatcccaaggagaagatgtagttcctttgaggagtttaggggaagtaagacttgtataataagacatggacacaaaaggaaaagcagtatagatgagcagagtcctctagaacgtgcttgttctagcagtgccaaatactgctttttggggggatgttacacacatttttaaaatgttttagactggacatggcggctcccacctgtaatcccagcactttgaaaggccaaggcaggaggttggcttttctaatgttattatttatttagagacaggatcttactctgtcacccaggctggagtacagtgttgcaatcacagctcactgcagccttgaactcctgggatcaagtgatcctcctgcctcagcctccatggagtagctgggaccacaagcgtgtgccaccatacatggctgattttttttgtacaggtgagggtatctctgtgttgcccaggctgctcttgaattcctgacctcaaatgatcctcccactcctggcctcccaaagtgctgggactataggcataagccaccacacccagctagattatgaacatttttatggccctttgtgtgtattgccacactgttaacagcaaatatgtatatatgtaaccatgattatatatgttatgttagagggtagtattggtgccagtttaatttgtctgacggggtacctattattcattttatatttgttttattagaatcattctccttcccatgtattctctttgaacttcctttgtgttgttaatatacagctcatcatgatctgacatttattgatgatttatgactagtttctcttgctcctacttaattgtgaactatttgattcttattcatagtacttaatcactactcactaaatacctgaaattttctactgagtagtcaccaacttgtagtagtcactacaagaattagttgtagaaaaagtagattggccagccatggtggctcacacctgtaatgacgacactttgggaggccgaggcaggaggatcacttgaggccagaagttcaagatcagcctaggcaacaaagtgagaactggtctctacaaataatgaaataaaacattagttaggcatggtagcaaacgtttatagccacagatactcaggaggctgaagtgcgggaatcgattgaacccaggcattcaagactgcagtgcactgtaatcatgccactgctctccagcctggacaacagagcaaaaccctgtctgaaaaaaatgaaaaagtagattgggccacacgccatgggctcatgcctgtaatctcagcactttgggaggctgagactggagaatcgcttcagcttaggaagtagcagctgcagtgggctgcgatcacgccactgcactccagcccaggtgacagagtgagaccttgttttaagaacaagtaagaaaaagtagattgtaaaatgtgttagtctggggaggccctttagaaggaaggactgtgaagtgagatttagtgttattgctcctttctcagtttgttagctttaggactgaagcattttgaagggactgagtttcttaaccctctaatcagcaagtaccttctaacctgcaagactgcccgccaactgacagtgagaatcaagaacctcaacatgaacagagctcctgacaacatcattaaagtgagtgtttcctgcatgcactatccaggcacctcaccaacacatatctgttcttttctcttgttattctcaaagaaaagaagaaccttcttttatctaaagctaatttctcctacttatatactagattaattcccctgttgccttttcagggacattgattcattcattacgttcctctggagtatcttcatcctcttaaaagattccacaaatccatgtttccctgtaataattctctttcttgaactttctagaaatgatatgcagtattccacttacatgctttgggtttttgttttgttttgtttttttggtcagacataatcttgcactgtcacccaggctggagtgcaggagtatagtggcatgatcttggctcactgcagcttccgcctcccgggttcaagtgattctcctgcctcagcctcccaaatagctgagattacaggcgtgcccaccacgctcagctaattttttgtatttttagtagatacgggtttcaccatgttggccaggctggtcttgaacttctgacctcaagtgatccaccagttttggcttcccagaggctaggattgcaggcataagccaccgtgcccagcctatatactttttctcaattttgtgtttgtatgtatgcatgtatgtgtgtgtgtgtgtgtgtgtgtgtttgtgtgtgtctgtgtctgtatgtatgtatgtatgtatgtatgtatgtattgagatggagtttcgctcttgtcgcccaggcccagcctatatactttttctcaactctttttacttattgattgattgattgagatggagtctcgctcttgacccccaggctggagtgcaatggtgcgatcttggctgactgcaacctctgcctcctgggttcaagtgattctcctgcctcagcctcccttgtagctgggattacaggcccctgccaccatgcccagctgatttttgtatttagtagagtcggggtttcaccatgttggccaggctggtctcgaactcctgacctcaggtgatccatctgcctcggcctccctaagtgctgggattacaaatgtgagccattgcccccagccttcttttttatttagatatttatttatgtttttttttttttttagagacaggttctcactctgtcatcctggctggagtgcatgggcacaatcataggtcactgcaacctcaaattcctgggtgatccttccacttcagccttccaagtagcttggactacaggtgcatgccaccaaggctagccgattattttattttgtgtgaagacagggtgtcattttgtttcccaggctggtcttgaagtcctgacctcaagcagtcctcttgcctcagctcggcctcccagagtgttgggattacaggcgtgagccatgatgcccagcctttggtttcattgtgtttttgtatttttcttgagacaaggtcttactctcctgcctaggctggagtacagtggtatagtcatagctcactgcagccttgaactcctaggctcaagcattcttccaacgtcagcctcccaaggagctgggattatatgcattagccactgtgcttggccattaaatttatttatttatttattttattttatttttttgagacagaatctgtctctgtcacccaggctggagtgcagtggcacaattttagctcactgcaacctccacctaccgggttcaagcaattttcatgccttagcctcctaagtagctgggactacaggcatgcgccaccacacctggctaatttttatatttttagtagaaacataatttcaccatgttggtcagtctgatcttgaactcctgatctcaggtgatctgcccacctcggcctcccaaagtgctggaattataggcgtgagcctctgtgcctggcaaaaaactttttttttttagggatggggtgtccctatattgcccaggctggtcttcaatttttggccttaggcaattctcctgtctcagcctctaattggtactgcctggtgtattggatttaggccttacttattaaccataaaccacggaagccgaagatttacctctctcctcactcccttactcccaccacaaacatgcacattttctgctctccaaactcctcactagtagttatggtagaattttggttagattgtattcagggtttacattgtaagattttaaggactgttggctgggcgcggtggctcacgcctgtaatcccagcactttgggaggccaaggcaggtggataacgaggtcaggaaatcgagaccatcctggctaacatggtgaaaccccagctctactaaaaatacaaaaaactggctgggcgtggtggcgggcgcctgtagtcccagctactcgggaggctgaggcaggagaatggtgtgaacccgggaggtggagcttgcagtgagccgagatcgcgccactgcactccagtcttgccagagcaagactccgtctcaaaaaaaaaaaatagattttaaggactgtataaatgctcttcacagctcagctatgttactgtgttaccttgcctttcctgctgaacattttgtttcccagatcatcttctttcagtgtgttcaggtattctagatattctgtcactttcatcttgaagaaattgctccctgagccctctgacattattccactttaagcgtgttgctctccatgttgctgcactgatgtcttcttgggctttttcttcaccatcatcccaggaattccttttgcctcatactgtgttagatcctcttatttcctgaattccacatctttgcttttgcattactttttttttttttttttttttttttgagacacagagtcttgctctgtcccccaggctggatctcggctcactgcaacctgcaaccttggtcttggtcttgaactcctgacctcaggggatccacccacctcagcctcccagagtgcggggattacaggcgtgagacaccacgcctggccttgttttttgttttgttttgcttttttttgagaccgagtctcgctttgttgcccaggctggagtccaaaggcgcgatgatcttggctcactgcaacgtccgcctcccgggttcaagcaattctcctgcctcagcctcccgagtagctgggattataggcacatgccactacgcctggctaattttttgtatttttagtagagacagggtttcaccatgttagccaggatggttttgatctcctgacctcttgatccacccgtttcggtctcccaaagtgctgggattacaggcgtgagtattacttctttactttagtggaacacattctagtagcttttttttaaaaaaaatttttttctgaattttaaaaaattgaggtgggggggtctcagttttttgcccaggctggtctcagactcctgggttcaagtgatcctcctgcttcagcatcccaaagtgctgagattataggcatgagccaccctgcatggccccattccagtagcatcctgagggagagtgcttgggaagggaattttcacatttaaaccatctccggggccgggcgcagtggctcacgcctgtaatcccagcactttgggaggctgaggcgggtggatcacgaggtcgggaaatcgagaccatcctggctaatgtggtgaaaccccgtctctactaaaagtacaaaaaaattagccgggtgtggtggcgggcgtctgtagtcccaggtactctggaggctgaggcaggagaatggcgtgaacctgggaggtggagcttgcagtgagccgagatctcgccactacactccagcctgggtgacagagcgagactccgtattaaaaaaaaaaaaaaaaaaatctccattcatggtcttttgattgtatcgatgtcagtttcctcgtttttgtttttgttttattttttttctttttttgagacagagtctcactgttgctcactgcagcctctgcctcctgggttcaagcgattctcctgcctcagcctcctgagtagctgggattagccaccacacccagctaatttttgtatttttagtagagatggggttttgccatgttggccaggtgatctcgaacccctgacctcaagtgatctgcccaccttggcctcccatagtgctgggattacaggcatgagccaccacatcctccatgtctggccagtttcctggtagtaatattgtactgtgtaccttgtttatatgtatagctcttgtttctatgtaacataaaaacattatattgggagaaactggttgaagggtacatgggacctcttggtactattttttgcaatttcctatgaatataattatttcaaaataaaaggaaaaaataatactctcctctgtcactgtatctagaattctagataggaaataatttttttaagaagcttttaagggcctcacttcattttcttctaactcctagtgtggtgttaagaaatttcatgccatttaactttttttttttttttccgagacagggtcccaccctgttgcccagtttggagcgtggctaaatcatggctcactggtgtctccaacccggtgtgcaccactatgcccagctaattttttttttttttttttttaagacatggtctcgttatgttggccaggctggtctcaaactcctggcctcaagtgctcgtcctgtcttggcctcccaaagtaatgggattataggcatgagccatggccccatttaactcttgagtctttgtgtaacacctgtttttctcaacctctgacagcatgcaggatttttcctttggcttcaatattttgaaaatgcatgataatatgccttagtatttgtctatttttatccatggttttttaaaaagtactttctttttgtttttgtttgtttgtttgttttgagacagagtctcgctccattgcccaggctggagtgcaatggcgtgatcttggctcactggaacctctgcctcccaggttcaagcaattgtcctgtttcagcgtcccgaggagctgggactacaggcgctcaccaccacaccctgctaatttttgtatttttagtagagacggggtttcaccttgttggtcaggctggtctcaaactcctgacctcgtgacccacccacctcagcctcccagagtgctgggattacaggtgtgggccaccatgcctggcgtatccatggttttaaggcacacgtgataaaccttattcttctgcagaaataatttttttttttttttttgagatggagtctcactctgttgccaggctggagtgcagtggcgtgatgtcggcccactgcactctccacctcctgggttcaagtgattctcgtgcctcagcctcccgagtagctgagattacaggcacgcgccaccacacttagctaatttttgtatttttagtagagatggggtttcaccatgttggccaggatggtcttgatctcctgaccttgtgatctgcctgcctcggcctcccaaagtgctgggattacaggcataagccaccacgcctggccagaagtaatttgtgtttaagttttagttttgtgtcatttttcgtgcacacctttgtacttttgttgggggatggggcggggtgtcggggttggagtcttgctctgttgcccaggctggagtgcagtggtgcagtcttggctcactgcaacctcttaattcctcagttcaagtgattctcctgcctcagcctgccaagtagctaggatcacaggcgtgcaccaccacacccagctaatttttttttgtactttattagagacagggtttcgccatgttggccaggctggtcatgaactcctgacctccagtgatccatcctcctcgttctcccaaagtgctggcattacaggcatgagccaccatgcccagccctttgtacattttttaatgtaggatgccatttgtccacttgactctcccactagtctgtaagctccatgagagcaggaattgcttcccttatgtgtgtgcttagcttttagcacagtgcctaggatatagaaaacatcttatgttcatcatgttggatgaacagatgcttattgtcatggtttaagttcagttcttatcttctttttttttttttgagatggagtctcaccctgttaccaacgctggagtgcagtggcatgatcttggctcactgcaatctccaccctaccacccccactgccaggttcaagcgattcttttgccccagcctcccaagtaactgggattacaggcacccaccaccacacccagctaatttttgtatttttagtagagatggagtttcaccatgttggccaggctggtctcaaactctcaatctcaagtgatctgcccgcctcagcctcacaaagtgctgggtttacagatgtgagccaccaaggccagcctatttactcttaaaactgaactgcctcggtctttttttttttccttcccttctgatgcccttcacaccatcatttgcttaaagtctttgatgtgtccattttatagattacgatgctgtctttgcagctgttgagcaggaacaaatcttacataagattgctcttagcatctgcttccttttctctctgtgacctaaactctccccttcctggcaaccagaatggagatcatcagttagaaaatattgaatagggctgggcgcggtggctgacgcctgtaatcctagcactttgggaggccgaggcgggtggatcacgaggtcaggagatcgagaccatcctggctaacacagtgaaaccctgtctctactaaaaatacaaaaaaatcagccgggtgtggtggcgggcacctgtagtcccagctactccggaggctgaggcaggagaatggcgtgaacctgggaggtggagcttgcagtgagcggagatcgcgccattgcactccatcctgggcgacagagcaagactccgtctcaaaaagaaaatactgaataactataaaatctttaaatagagattagtttaatttgaaatgtacaagtattcagcatatgctattcgtatatgtgtgttcatggatgtttgtgtatgtggtcttgtgtgtgtgtgtgtgtgtgtgtgtgtgtgtgtgtttctcttgatccaccaccaccccattcaccagcctgacagaagacagtgtttccagaaggaatgtaattcatgcgcatttttttcatgttaagttttataagaagaccaaacagctgccagtcctaggaaaatgctgtgaagagatccagccacatcagtggaagccacctatagagagagaagaacaccggctcccattctggttaaaggtacagccctcttcctcgaagtctgtaggaggcagaaggtcactgaaagttctgagagaatatcaaggacttccttaatcgtctaatgctttagttgtagaactaggacttcaggaatcttcctgattcacctttcttcccttacttttctgcccttctccgggtgattctacaacattttcaaaataatgggtaaaatggtaatttgctaaaggaaattcagagaagagtttctaaagtgtataattggactgtggtctttgtagaaatttcatatgcagagtcccttggaaagatgccttgagcttgtctcaggtccctaaacttagaaagtcctattctttttcccaaattctgacatgtgctggatcagagtgttctcatttccaataggccagtctgccatccatccaggaagaactgcggcacatggctgatggtgctagagaggtaggaaatatgactggaaccactgagatcaactcagatcaaggcctagaaaaagacaactcagagttggggagtgaaactcggtacccactgctattgcctaagggtgtagtcctgaaactgaagccagttgccgaccgtttccccaagaaggcttggagacagaagcgttcatcagtcctgaaacccctccttatccaacccagcccctctctccagcccagcttcaaccctgggaaaacaccagcccaatcaactcattcagaagcccctccgagcaaaatggtgctccggattcctcacccaatacagccagccactgttttacagacagttccaggtgtccctccactgggggtcagtggaggtgagagttttgagtctcctgcagcactgcctgctatgccccctgaggccaggacaagcttccctctgtctgagtcccagactttgctctcttctgcccctgtgcccaaggtaatgatgccctcccctgcctcttccatgtttcgaaagccatatgtgagacggagaccctcaaaaagaaggggagccagggcctttcgctgtatcaaacctgcccctgttatccaccctgcatctgttatcttcactgttcctgctaccactgtgaagattgtgagccttggcggtggctgtaacatgatccagcctgtcaatgcggctgtggcccagagtccccagactattcccatcgccaccctcttggttaaccctacttccttcccctgtccattgaaccagccccttgtggcctcctctgtctcacccttaattgtttctggcaattctgtgaatcttcctataccatccacccctgaagataaggcccacatgaatgtggacattgcttgtgctgtggctgatggggaaaatgcctttcagggcctagaacccaaattagagccccaggaactatctcctctctctgctactgttttccccaaagtggaacatagcccagggcctccaccagtcgataaacagtgccaagaaggattgtcagagaacagtgcctatcgctggaccgttgtgaaaacagaggagggaaggcaagctctggagccgctccctcagggcatccaggagtctctaaacaactcttcccctggggatttagaggaagttgtcaagatggaacctgaagatgctacagaggaaatcagtggatttctttgagctaggagaataagagtctggagactgggagccttcacttcggcctccgattggtggcgcatagggtgtaaccaataggaaacccctaaagggtacttaaaccccagattttgcaactggggctcttgagcagcttgctttagcctgctcccactctgtggaatatacttttgcttcaataaatctgtgcttttattgcttcattgtttcattg

SEQ ID NO: 1300 - DNA, 64627 bp, Homo sapiens
actccggcgcgcagtgccggccggggcggggatacgccgtgtgcgcggccgggggcggaacggaggaggaggcggtggtgtcccggctgcggggtaggagtccgcggcagcctccgggtaagccaagcgccgcgcagtgctgagttcccgcacgccgcagagccatggagatcggcaccgagatcagccgcaagatccgggtgaggcccgtgccggtcgggggtgggaagccaggtctcggcgagcgggcggttgtcaggagtaacggggactgtgggcccgggtggacgccgcggcctggcctccgctggacgctcctggcgggctgcggctcctcctcgtccaggccgcctcggccctggggacatttgcggcctcggagcgtggctgcggctgaagtagccgccgggaaatggaaggacaggcgcaggcccggctggagccaccaccgcggcgcacggcgccgctttggatccgctgcgggaggtgggcgccgcggggctggggctggagctggagtggggtgcggggtggggggcggtgcaggcgaggctcctcccagcccccgcccgggggatccgaggtgcgcgcaccagcaaagtggcctcagccgctgcagagtccggtcttgttttcctagagccgcctttctcacatgcacgtttgctctttttctctcagagtgccattaaggggaaattacaagaattaggagcttatgttggtaagtgtttttttggttgttagtcttacagaatttagagtttgcagctaatagaattttagtgaatgcgtatttctcaccgtactttggacattgggagagactcccttctaccttcttcaaatcttatactccctggttacttctttatcatctttttgcaaccttgttttttttctcccaaacctccttctgttatggtgttttgaaatttagtttcctccgttaaggctctgtttgaccgaattttattttatgtttttcctattctctctctctctcattttaaattctagggacgggtctcgctacgttgcccaggctggtcttaactcctgggctcaagcaattatctgaccttagcctccctaggtgctgggagtgcggggattactggtgtgagccaccatgcctgtttaaagtttcctattcttgttactttcctcttgacatttgtttttagaactctgatgttggatgtgaatgtttgatgctttctggcatttgcttctgtaatggttcagtgagttttattttccgatctctttatgttttccctctctctctgaaacagtaaggctttttccgtctctttattcttttataatttgagtgtttactctgggtcaggtactgtgcttaactattgtatatgtattaactcaggataatccctacgagaatcctggaaggtaagtggcagtatctttgactgtgtaaacaaggaaactgaggctttgcctacttgagcaaggttttatggtttgcccccaaagctggtgcctcctataaaaataatagctaccactaatgacagtggttctcaaagtgtgggagactccaagggcctctgaagtcaaaactgttttcatattaatactaagatggtatttgttatttttcactgtggtggtggtgtttggattgtgtaaaactaatggttgataaaacttgtcagcatagtaacaccataatgaaatcatattcaaatcactccccccttgtagtttttttctttttgagccaattacacttaaaatgtcattgatgaagatgtgaagtccagggtttacaaaatattttttatcttcttagtattcagtgcgaggaaatagaaatgctcataaaacatttttattgtatactgaaatacgattgttctgaggaaaatcattttagttgagaactaagctagccacctctttcagggaacatcatttttaacttcaaagtactgacaaactggttacatacactaggatatttggcagatatttacttgaaagtgagcaaagaaaagaatccatagtctttgttgccaatcacatgtgagctttcaaatgaaaattagaattttggaaaatctgagcctgcctccatgaatttcacagcttcccagtacttaaaaaatttctgattaaataaatggtgatttaaaaaaaatttgttattattattattttttttgagatggaatttcactcgttgcccaggctggagtgcagtggcgtgatcttggctcactgcaagctctgcctcccgggttcaagcgattcttttgcctcagcctcccgagtagctgggattacaggcatctgccactacacccagctaattttttgtatttttagtagagacagggtttcaccatgttggccaggctggtctcaaactcctgaccttgtgattcgcgtgcctcagcctcccaaagtgctgggattacaggtgtcagccactgcatccggccaactcaatggcgatattaaaaaataattattttatactgcataatgaaatatatcaacgtgtcagtggtttttgtagctaagtgaaccaatcttttctaaataaccaatgcataatattacaaaattatgcagtggattaaagatttatttaaactctggggtgggtcagtggatttttgtgcaacagttcaaaaaggtcattgacgtatttgacattccacgttgctttaacatttaataagctaccacttgtttagttttggtgtagtgtcacagaagaatatccaccttatctgaaaagactatcagaatactcctttttcaactgcatatctgtgagaccagattttttcatattcttcagtcataagcacatagaacaagatatataaaaatatgaaacaaggccagtctttgcagtaaatttttctttttcttttttttgagatggggtctcactctgtggttcgggctggagtgcagtggtgcaatcttggctcactgcaacctccgcctcccaggttcaagcaattctcctgcctcagcttcccgagtagctgggattacaggcacctgccaccaccccgccccccccccccggctaatttttgtgtttttagtggagacggtgtttcaccatgttggccaggctgatctcgaactcctgaccttaggtgatccacttgtctcagcctcccagagtgctgggattacaggtgtgagccactgtgccttgcctaaatttttttttggaaaatttaataatgttacttgtgttaatataattggatttgtgattaacatgtgatggatttattttttaatgaattaataaatactttttaattaaaaatgatcagttctaattttgaacaccataaataatagaacctgcataaaccaaagaaggggcccaagaccaaacagtttgagaattggtaatttatggagtacttaccaccatttgctgggcactttcataaacgatttgttgtcaggattgttggaagactaacagatgagagaattgaggctcagagaaaataaagctgaaccaagatttatttattcttttattctttcaacacttgaactgcattttttatagttttctttgaaacaaaaaaagtacttctgaaatgaacctttctgcctgcatagaaatattacaagtatttaaggtattaaagaaatttgtcacagcatggtggttcacgcctgtaatcacagcactttgggaggccgaggtgggtggatcacttgaggtcaggagttcgagaccagcctagtcaacatgctgaaacctggtgtctactaaaaatacaaacattagctgggtgtggtggcaggtgcctgtaatcccagctactcgggaggctgaggcaggagaatcgcttgaacccaggaagcagagcttgcagtgagccgagattgtgccactacactccaacctgggagacagagcaagactctgtcgtaaaagaaaaaaaaaaaaaagagaactggaatggagttttgagggtcagagattagagttcctgataacagcttttgcttccttatcttcttagtgaggtttttgtttttttgttcttttaaatcctagacctcactctcataatcactgtaggattaccactaggagggtgttttttggcttcttttatttattttatttatttatttttttttgagacagagtcttgctctgttgcccaggctggagtgcagtggcaggatctgagcgcactgcaagctccgcctcctgggttcacaccattctcctgcctcggcctcccgagtagctgagactataggcgctcaccaccacacccggctaattttttgtatttttagtagagacagggtttcactgtgttagccaggatggtctcaatctcctaaccttgtgatctgcccaccttggcctcccaaagtgctgggattacaggcatgagccaccgcgcctggccttttttcttttttttttttttttatcctagacctcacccttataatcattgtaggattaccactgtgagggtaaaaccgtgcattgagttgacattatttaatgttaaaattgatttttttaaatgatgtggagcttttgggtctatttgtttattcgatgttgctacaagtttgttactgtgagtaattgaaacctgcctttagcaagggtaaagatgttcacttgagaaatgagtgttattttgaaactttgcaaattaaaactaaacaaaactcaattctttttcttggggaatgttcaaatatttcccataagcttctttgaaattaataagcattattaaaaagattcaaggaagtgaatgcatgctcaagtttgaccctataattcagaatgtttagttttgtaagtatcaattattcttaatttccattcttctagtatttgaaatacctgtggaatgaagagaaaaaaattaaagctaagccatcttgtccaatgtaattccagtagagctctgcgactctaaagcttagagctacatctatattttcaagcacatcaactttaagaagaaagttttgaggaaacaaagttttgatctacctttccttttaaatagatgaagaacttcctgattacattatggtgatggtggccaacaagaaaagtcaggaccaaatgacagaggatctgtccctgtttctagggaacaacacaattcgattcaccgtatggtatgtttctgaatttttgtgcctcagaccaaagtttggcacaagcctgagttgatattctgtccaaagagaggttcttgacacttgagttaggtttactttggagaggcagtttgtgagtgatgagagcacagcctctgtattagtccattttcacagtgctatgaagaaatacccgagactgggtaatttctaaaagaaagaggtttaattgactcagagttccacatggctggggaggccccaggaaggggaagcaagcaccttcttcacaagtcgacaggaaagagaagagtgaaggaggaacttccagagacttatataaaatcatcagatcttgtgagaactcactgtctcttgagaactcgggaactcactgtctcttgagaactcactatcatgagaacatcatgggggaaaccacccccatgacccagtcacctccctcccttgacaggtggggattacaattcaatataagatttgggtggggacacagagccaaaccttatcagcctctgaagccagacagccaaagttgaatcctggctgtgtcttgccttggtttctctagctataaaatggaaatagtacagccacttgctttataaaattattattgaggatcaaatgggctaatatgtgtaaagtacttataggtgtccctagcattttcctaaggaattcttagtatatgtcggctatacttaatatgtttcttttgtaaacttctatatctttttttttgagacagggtcttgctctgtcaccaggctggagcacagtggtacaatcatggctcgctgcagcctcgatctcctggtttcaagtgatcatcccattgcagtcccctccttcctgaactcccatgcctgactaatttttaaattttttgttcagacagggtcttagtatgttgccctggatgctcttgaactcctgggctcaagcagtcctcctgccttggccttcagaagtcttggggttataggtatgagccactgcacctggccagcttctgtatcttatagttccttttcccccaccaaaaccagttacagatgtttttttgaactgggttggcttcttacattgccttttacaatgagttacctttagagggcaaggttttctgtttctcacttttctgtttcttactttttaagctttttgttaaactcacaccttcattttgagtaataattgtagtgtaatgttacagcatattttgagattataagtttttttaagtttggaattttaaaataggcaactttgcttttatacataaattactgttatatgcctttagttgagaatactgactagaagagtaagattcaacttaagatgctaggtcctggtaccaggtttgaggtaaagtgaggatgagggctggaggataatgatgtagctgagaatagacagacgaaatactttattaggcttctcaggctaggaactaccagttaccgtgaaaggtgatgatgtagcagaagtgagcaagtggcctgccgaatttgagtgcaagaggaggcactgagtggggagatgagcctggttaagttcttgcctttataccaaaggtcgtcttcaaggtgtttttgcccaagtaggcaactgtatgcttatcaaccgtcttgaaattctgcacagaattctctgggtttatacattgcacaaatttgaagaacattgtatagtggtcatcagttgttatgatacactgctgcctcactgtgggtgacccaacccatttgttacaatttgtccccagaggttattccctcccagccccccacaaaaaaagactgtgggtcttttgactgggaaaattaccattattgtgagtactatttttttttctaaagcgaccgagtagatccttttctccgataacttgatagaatacttagatttttaaaacagactaccaaatgaatttaaaaccaaattaattcaacattctcatctggccataaattgagttctttaacatgtagtgaagcaaagggtgatgtccccattttggcactttgctttcttaagttagtgttcattaacaccagccccaaacagactattgtgattatttggagccttgaagtaattgtgtccgtggggacagtagcatgtgactagggttctcattgaaacatgaggtttctggcatattttgagaggtactgggaagggatgtaaggcaaagtacctcatttataactaccaaaacaggttatgttacaagcaagattacagccttacagcatcagttttgaaagtaatagagtgaaatgatatagcatagtttgagattataacttgttttaacctctcagaattaagttgtccaagacaccatctagtttaagcagttaatataagctgcttaaatggtggtaataataagcaatattacatgtttatgatacttgttttactgtaagctacagtaaatctttagtacttacaaacagggtgacatattttgtagactaagactggtcagatgatattctttcccatatttttgcagaggctagatgttgaaaacagtgaagaaaaaaatacaattttttattgacttctgtaggatttatacaaagcccttttttaaaaatgtgaagtttgaaagttcataccatttattcactaaatacagtttatcagtatttatctcagctaggtgcggtggctcacgcccgtaatctcaacactttgggaggctgaggcaggtggttctctcaagtccaggacttcaagaccagcctggacaacacagtgaaaccccatctctatttaaaaataataaaaatataaaaaaatttaaaaaattatctctgaatataatgtcataaatttagagtgacagttgaaatgaaatctttcttaacagaaggtttatttttgttttttgtttttttcctcaggcttcatggtgtattagataaacttcgctctgttacaactggtaagattcataacttttttttttaatttctgcttgctatggcatatgatttgtttctttctaaagtcatagtgctttgggaaaaacccatcaatttcaaaacggttcatttgaacttttttagaaagcacatacttttatgaacttaagagcagtaaatttaacataattcaaagataatttaagtgtgggagagggagcagtgcactttatccgaaggaaataattacatatatgtgcaaagatttagcctcaaggatatttcagtattttataattgaaaacaatttaaaagttcagtcataataaacgaaattgttgtattaccatgtgtggaataatatttaactattaaaaataatgttgtggaagaataacagaatatacacgcataagatacatgttttaaaaaatgtgtatatatgctcttcccccgaaaaatcacctttgagataattggtgatttttattatatttttaaaattttctacaataaacatactgcttttgaattggtgatgaggaaggaaacgacttaaagtaataaaaatagatggccgggcacggtggctcacgcctgtaatcccagcattttgggaggccaaggtgggcggatcatgggctcaggagatggagaccatcttggccaaccaacatggtgaatctccgtctctactaaaaatacaaaaattagccaggcatcgtggcacatgcctgtaatcccagctacttgggaggccggggcaggagaatcgcttgaaccagggatttggaggttgcagggagccgagaacgcgccactgccctccagcctggcgacagagcgagactccatctcaaaaataaataaataaataaaaataagaaataaaaatagattaaaaggactgtatttttcttttcagaaccctctagtctgaagtcttctgataccaacatctttgatagtaacgtgccttcaaacaagagcaatttcagtcggggagatgagaggaggcatgaagctgcagtgccaccacttgccattcctagcgcgagacctgaaaaaagagattccagagtttctacaagttcgcaggagtcaaaaaccacaaatgtcaggtaagagtctggtgtagacctgctgggggcagatggctctgtgtatgtgacatttatattagtttttatatctttcagtttgctgttctcagcaatttttagaaacaatgaagtgatcgtgagtagttttttgaataaaataatggataagatctaagtatgattatcttttatcacaaatttagtaaatcaaagttgaaagaaagtgcaatttcaaagcagttttgaatggaatatgtaaagggagtatcctcagttttttcattgaaatttttcaagtaaacattctttaaagatttggtgataattgccctaatttggctgtaatacattttgttgttcttttaaatagacagacttacgatgatggagctgcaacccgactaatgtcaacagtgaaacctttgagggagccagcaccctctgaagatgtgattgatattaagccagaaccagatgatctcattgacgaagacctcaactttgtgcaggagaatcccttatctcagaaaaaacctacagtgacacttacatatggttcttctcgcccttctattgaaatttatcgaccacctgcaagtagaaatgcagatagtggtgttcatttaaacaggttgcaatttcaacagcagcagaatagtattcatgctgccaagcagcttgatatgcagagtagttgggtatatgaaacaggacgtttgtgtgaaccagaggtgcttaacagcttagaagaaacgtatagtccgttctttagaaacaactcggagaaaatgagtatggaggtttgtatgtacttttaaattctggcttaggctaaaaatcggcagttcttgataccaaataatatatgaagtaactaaacacatattccaaggctgggcacagtggctcacacctgtaatcccaggactttgggaggccgaggcgggtggatcacgaggtcaggagattgagaccatcctggctaacacggtgaaaccccgtctctactaaaaatacaaaaaattagccaggcatggtggcaggcgcctgtagtcccagctactcgggaggctgaggcaggagaatggcgtgaacctgggaggcggagcttgcactgagccaagatcgtgccactgcactccagcctgggcaacagagcgagactccgtctcaaccaaaaaagaaaaaacaaaaaacaaaaaaaacacatattccaaatttattttattttattttactttttgagaaggagtttcactcttgttgcccaggctggagtgtgatggcgcgatctcaactcactgcaacctccacctcctgggttcaagcgattctcctgcttcagcctcccgagtagctggtattacccgccaccatgcctggctaattttttgtatttttagcaaagacagggtttcaccgtgttggccaggctggtcttgaaatcctggccctgtgatccacccaccttgatcttggctcactgcaacctgtgcttcccaggttcaagtgattcttctgattcagcctcctgaatagctgggattacaggtgtgtactaccacgaccagctaatttttgtatttttagtagagatggtgtttcaccatgttggaccaggctggtcttgaactcctgacctcaggtgatctgccctccttggcctcccaaagtgttgggattacaggcatgtaccatggcgcctggccccaagtttatttttaaattgttttatctgctgtttctcatgctataccagattttcttccccatggcttgctcctagagttcttttgtatcacatctgtatacctttttgggatttccagcatttgagatattaatcttaaattaatttggggggtttcaatcaattttagattgttcatggtaattgctagtgagcaaccaattaactctgttttattagtttcctcaatagcactatatgcagctgttgataaaataaatgtaaagttctaatttttgttttagctaaaggttgactgttagggataatatttatatttatagtatttatttatttatttattttgatacggtgtctcactctgtcgcccaggctggagtgcagtggcatgatcttggctccctacatcctccacctcccgggttcaagtgagtcttctgcctcagcctcccgagtagctcggactacaggcacatgccgccacgctcagctaatttttgtatttttatagagacagggtttcaccatattggccaggctggtctcgaaatcctgaccttgtgatccgcccacttcggccttccaaagtgctaggattacagatgtgagccaccacacccagcctcatatttatatttttacataaaaccaagaaatactctgtgaatttctcatattactgtgtactgtttttttcttaaaatggaaacattttgtggtagaactcttgttattttctgagattaggtaagcataaattttatctgattgcaggatgaaaactttcggaagagaaagttgcctgtggtaagttcagttgttaaagtaaaaaaattcaatcatgatggagaagaggaggaagaagatgatgattacgggtctcgaacaggaagcatctccagcagtgtgtctgtgcctgcaaagcctgaaaggaggtaccttgaacatggctgtaaattaatctttaactgccttggtggagtcttcctgatttattgaagagaataatcacgaaaataatttttgtttgttttttgagacggagtctcgctctgtcaaccaggctggagtgcagtgccacgatctcggctcactgcaacctctgcctcccaggttcaagtgattctcctgattgagcctcctgaatagctgggattataggtgtgcactaccatgaccagctaatttttgtatttttagtagagatggtgtttcaccatgttggaccaggctggtctcgaactcctgacctcaggtgatctgccctcctcagcttcccaaagtgttgggattacaggcatgagccaccgcacctgacataaatatttaatgtaataccgtgtaagacttttccattgggttttgagaaacacgttaatgagagaaattgcttaacattggagaggattgcagagaatattgactaatatggtggggtgaggaggaacaacatcaattaagattcagatttattatttaaaaaaactaaaaggggcctaggcatggtggctcatgcctgtacctagcactttgggaggctgaggcaggaggattgcttgagaccaggagttcgagaccagcctgggcgatgtaatgagtctttgtctcttaaaaaaaattaaaataaattagttggtcattgtggcaggcacctgtagtcctggactggagaggtggatgtggaagcattgcttgagcctagaagtttaaggctgcagtgacatcacactccatcctgggtgagagagtaagagtctgtctaaaaaaaaaaataaggttccagtgtagttggcattttctaaaaactgcagctagtctgtttaaaacctagagaaggttgtggtaaaggcataatagatggctggcctgtgaggaactgaaatttaaagtttaataaaaatacctttcttaactcttttagaccttctcttccaccttctaaacaagctaacaagaatctgattttgaaggctatatctgaagctcaagaatccgtaacaaaaacaactaactactctacaggtaatttaaatgtattatgtttacacttggtaagacatttctgtaattcttgagtaaggtgaaaatgattgctccttaaattgtaaaataaaggtgcctgtcagatgtcaagaccaagatgaggttcccatatagaaaaatggctttaaaaggaaattgacaagtttgagaaacttcgccaactgttattggactgtagtttttcaagcaccatataatgccttttatatctttccaatgtgtgtaaaatatatagtacgtaaatattttgaagagaattttgatgaagtaggactttcatattagtagcattagattcaacattagatatgaatttacgatgtgtaaaggggagtacaattggacaatgataggtatctgaagttatagaaatttgttaaacagtagtatataaacaaggttggtttcttcccttttggcggaactcattagtagaatataaggcagagaattgactcatttgtgatgttcctgctccaattctagtggaagtactgaataattttatgagagaatataaaagtattacgttttcaaaacaggagatgaatcagctgtaagctggtcttacggaaagctgattctgaaatgcaaacaactgatgggtgtcattttgtgttgtcaaattctgtactctctggccgacctgttgtagccaatgtgtaaacttgtgttaagaagctgatggtaatgagctactctaaaaagatttaagttttgctgtggatttggtgggtgtacttacagcattgccctgcttatccactctctcgcttttttttgtgaccccccttcctaaaatgaggtaaactgtagccatcagtttttttatttgttttctttttttgaggcgaagtcttgctctgttgcccaggctggagtgcagtggtgtgatcttggcttactgcaatctctgcctcctgggtccaagcgattctcctgcctcagcctcccaagtagctgggattacaggcgcccactaccatgccaggctaatttttttgtatttttagtagaggcggggttccaccatgttggccaggctggtctcgtactcctgacctcaggtgatcacctgcctcctcggcctcccaaaatgctgggattacaagcgtgagccaccgcgcctggcaccatcagtttttgatcctgatacttgtctgtcctcttggttctcctcatccctaatttaaccttgaacacaaaattcaacaggttttggcatatagaataaagattatcaggcaaaggcgcactcttgacctaatgatatatctacatttcatttcctgatctatcagcaatattaattgtctagaatgatgagaagtttagagaagttccatgactttgaaattttctttctttacctaggttatctaaattacaatttgaaactcatataagatcatgaagctaagcttaaataaaccgcattttgttgaaaatgaatacatatgtactatattgtattcatggtatgtggttgtatggatattgtttacatatgtttggataaataggttcaggtatctatctcagtaacgtaagaaaaaatgaatggtatctatggattgaactcctcatatatatgttcttttcttttctttttcttttttttttggagacagagtctcactctgttgcccaggctggagtgcacagtggtgcaatctcggctcactgcaacctccgccttccgggtttaagcaattctcctgcctcagcctcctgagtagttgggattacaggtgtgtgccactatgcccggctagtgtttgtatttttagtagaaacgaggttttaccatgttggccaggctggtctcaaactcctgacctcaagtgatccacccaccttgcctcccaaagtgctgagattacaggcatgagccactgcgcccagcctgaactcatatgtcctaaaccaaaggaggcatttatatttaatatgacatagtcactgtggagttttgacgtattactgcatttgtatttctatcttttttgcttttatgtgaaagttccacagaaacagacacttccagttgctcccagaactcgaacttctcaagaagaattgctagcagaagtggtccagggacaaagtaggacccccagaataagtccccccattaaagaagaggaaacaaaaggagattctgtagaaaaaaatcaaggtaataacttaaatgatgtttcactctttactacagttttttcatgaggcattgaatattttccaatggatttttatgaaatattacactatgaaaaaagtgatgattaagcccagaaatagaatgagaagaataccatgaggaaggttcataccaacacttcagaaaaaaattttttttttaaagaggtagggtcttgctgtgttgcccaggcagtcctcaaactcctgggctcaagcagtcctcctgcctcagcatccttagtagctggaggtgtgtacaagtgtgtgccactgcacccagccctttctagaaatttttgaaagtctttttattgtggaaatttttaatattctcaaaaatggaaaggctagtacagtgaactctcatgaacccagtcattaagccttagttattatcagaattttgctggtctttagatagctccttcttaaagatatatttatttctgcattctttctttttctctttttgttgatcctgcccgtttacctgaacttgaaattttagttacctttaaatctcccgtctcttaagcatcctgtctctgacctcccatatgtgtcccagcaaccctaatttatcccctcgtgcctaacatacttcagtttgcttccaggttttttttttttttttttttttttgcttttttctcagctttctcccccaattcctatacaatcttttgactttgaaagtgtgtctctcatcttctgactcctttgtgaaagtatctctcccctcctcctcattacccagaactaacgctattagtttggacttttggtgtctgttatctgacccctgggcctgcacagcccttctccatgactcttcagaccttttgtctcttttgtcgtcaagaaggattcttttttcttctgtttctttttctactaagatttgaattttaagaccccaccaaaaaaatctatatgcttattatgttatttctcacatacttttcaagaaccttggaatatattttttcatttcttcaaaactgtcctttaaattgttccaggtttcatgaaaccttatgatttcagaattgtcaattctgtatttgtttcctcattgtgtctctttaaaaatttttgactgtattgttcagtttgccatgacagcgttatatactattctgataattgataggcctgaggacaagacctgtttggtccccaaacagcagataggtaccaattggaaaatgtgaatgggccaaattgagaagaggagctgaaactgaggagggattttgctcagtgcagtggcagatgaggctgatctaaaaggactgcagtggtctactccctgtggagtctgtagtgtgttgcaccaaggttttcttcaaacacaggactctacgtgagagtcttggagtggaatcagatggagcagggaaacagacaatagagaaaaggaaagaatgtcagataaaaataggagaggaaaacaataggaaatctcaaagcaaggtgccatattttttaacatcacaaaatcaacagaagaaggttgttgattctgaagttagaatagctatccaaagcaaactttcccctaaaatgaacaacagaaaagtatcaaggtcaagtcctgtgccgaattaaaagataaaagggaataaaagacaaaacagcattgtttcaatgaaagcatgctgaaaggtataccaaaaagaaatacaatttcaaagtgagctagaagacattatttaaataatacaagacaaagccaagaaaaacataaaacagaagaactttgaggctgggtgcagtggctcatgcctgtaatcccaacactttgggaggctgaggcaggaggatcacttgagactagcctgggcagcatagcaaaaccctgtctcgacaaaaaataaaaatattagctgggcaaggtatacacctgtagtcctgtctccttgggaggctgaagtgggaggattgctggagcccgggaggctgaggtgggaggattgctggagcccaggaggctgaggttgcagtgagccacgatcataccattgccctccagggaggctgaggtgggaggattgctggagcccaggaggctgaggttgcagtgagccatgatcatgccattgccatctagtttgggcgatagagtgagactgtgtctcaaaataaatgaagactaaattagaaagaactcgaaagaattagtgcgtcttaataaaataaaacatgcgtgtaatcccagcaatttgggaggccaaggcgggaggatcacttgaggccaggagttgaagatcagccagggcaacatagcaaaaccttatggctacagaaaacagcaatttaaaaataaataaaattaaaacatcttcagagaaattgaagataaaagacaagaacattttaaaagtctaaaagggctcatgagaaagtggcaaatattgataataggcaatagaaatacagtgtttttatagtaggaatctccaaagaaacaatattcagaggaacagagcaaacattaactgtctttcaagaaaactttcatgaagtgaaaacatgtttgaaactgttgtctgaaaaattgtacagtatacctgagaatatttacccagaaccataacactaagatgtattatataattaatgaaattttaaaaagaaaaaaaatgatttggacattcaggcaaaaggggcacatgacttagaagaaaaggaaaggtagattatcatcaaacttttcaacagcatcacttttgtgctggaagaaaatggactagcatatttaagatactccagaaaagaaaatgtgagccaagaatttaatgtccagcaaaagtgacctttagaagtgatccagcaccaactgttatctatatgcagaaattcagagactcattcccatgaacttttcttaggaaatctaatggaggatgagcttcagacaagtaaaagcctgttgtcctgaatttacattggaaatgtttcggaactcacagtgtattttatatataaatacatttttttctagttctgtctactagaaggcatagaaacattcatcaacccttagcatcatctgtagttcccagattgtggtcttggaatacttcctatttaaaaaactaggcttcttgggctgggtgcagttgctcacgcctgtaatcccagcactttgggaagccgaggtgggcagatcacctgaggtcaggagttcaaaagcagcctggccagtgtggtgaaaccccatctctactaaaaatacaaaaaaattagctgggtgttgtggtgtgcgcctgtagtcctagctactcgggaggctgagccaggagaatcgcttggatccgggaggcggaggttgcagtgagccaagattgtgccaccgtactccagcctgggcaacagagtgagattccgtctcaagaaaaaataaaaataaaaaaacaaagaactaggcttcttgagaaatgtctttttccaggtctggggcaggaaatgttaacatgatcctggaatggctcaacatcccagatagcaaagaagctgtcaatgaatggtagaccacgtccaaaggatgcaggcgccaacttagaggtttccattggccaaaaatggaattatttgagattcagtaggtgtaaatatcgcggtgaattaaagcccatttaaatccacaatttcataatgacattttaaaaaaataagctctaactagtcaccttctggaaggtagtagataatcattcattgtcttgaaaactgggtaaataaaataattgaacatttatgctgtcttttctgtgagaacgataccactgggtaaccccataggacaggagttggcatctgttggaaccaaaccgtgcctattcatgtatgtattgtccgtggctactttcatactacagccttagttgaatagttgcaacagaccatatagcttgcatagcctaaaatagcctaaaagatttgccaacctctgatatagtagatgagagaaacattttcttttaaaatgatttcagctgataagagaacaagatggtaggattagagttatgcttttaagagtgaaaaccagttgttttgtgcctcttgatacaaaagaacagaacttttgtcttgccaaaaatgtaaacctaagtcatcaagctcccagtccagcagtcagtttgcaagaagttgcagaggccagaggagtatgttggttgagcttcaccatgagtgtgcagccggaaaaatagtgtttgggacactgtgggttgaatagcctgagaaattgagattaaaaggcaaatcaaaggaaaataaaaggagcaggattaaattgtagtggctagggatacccagtgtgtgtgaaattataaagaacctctaggcgttaatataaaaagcacatagtggttgcttttgaagaggaccgataaagatggagcacacagagaggcttctggggtggcagatgacgttctctcttttgacttggatggtagtcagaagggtgttttgccttacaaaaattcattaagctatatgtttgtgtggttttctatactgtgttttaaaaggggataattgaaatggtgtcaggtacctttgctgatgaggagtttggtattactagatatattcacaagtgtgaagtgatactgcaagcaactgttatctgttaatgtggttactcactgttgtacggtataatctggggcaggtttttaaaatataaacatgcactcgtattggcataagttgttaattttttttcttcttttgtttgagcagatagcattctctcatttctctggtgtctttatttttactagcgcacccacctcataatatgtgtactttttgctttttgtcttgccatcagtctgtcactagaagtttattttgccgatcttttcaaagacttaacaacattattctggctttattgatttttttttttttttggtgtttttgttttctatttcattgacttgtgctttttttttattttttttttttaagaggcgaggtctcactgtcacctaggctagagtacagtggcacaattgtagctcactgcaacctcaaatgcctgggctcaaatgatcctcccacctcagggaccataggcacacgccaccacgcccagctaatgtttaagtttttttgtaaagatggagtctcactatgttgcccaggctggtctggaactcctgagctcaagcagccctcttgcctcagcctcccaaagtgctaggtttacaggtgtgagccactgcacctggcccgacttctcttttaatttatccttccatattttaaaaattatttacctcaggctgtcttcttctcaaatgtaagcatttgagaagaatacatatgacaggttttaattcatcatgttttcattatcagagtgtctttaatttccattataattttcatcattgaaagtgtgttttctatacagtatttggaagtggtatgtgtttttgtcttttaatcctttttattatagacacctgacttaattgcattgtggttagataatgtaatttttacaatgcatagtttttgaaaattgttaacacttgcttagtgcataatcaagtttatgcatcttccacatgcattttggaagaaagtggactaattattggatggggaattttacatttattcagtagataaagctctactgttaacattattcaaatcttgaccttgctgagtttttgtgctgcttgacttaccacttgagaaagggtgttgaaattgcccaacatgatgacagatttatcttaatttctcttgtacttatatcaagtttttgctttatttttaggctgttatatactattaggtgcatacatatttaaatttgttatatcttctctgcaaattgaatcccttatcttgatttatgaccctctgcaaaaaagatgtttttatctcaaagtcagttttgcctgatattaatatagccatttaattatatttgctttatatatctggtttccctgcctttgttttcagttttctctctcatgctttaggtatatacagttgacccttgaaccagacaagtttgaactgtgtgggtccactcatacacttatatgtggatttttgaaaataaatatattggaaatattttttgagatgtggcaatttgaaaaaacttgtagataaactatatagcctagaaatagtgacaaaattaagaaaaatttaggtatgtcatgaacacataaaatatatgtagctactagactaacatttactatcttaaaacatacacatctattatgaagtttaatttatcaaaatatatgcacacaaacacagactttacatgataccgcttgtagttgagagaaatgtaagcaaacataaagatgcagtaatagctacataagatttactatagtacatactgtactactgtaataattttgtagttacctcctgttgctttatggtaagctaaggtgttttgagtgtccacttaaaatgctgtgtgatgcaaccatctctgcgacagttcagctctccagtaaattgtgaattgcagtgaaaggtgatctcgcagttcttgcatatttttcatcatgtttagtgcaatactgtaaaccttgaataacaccaggggacccataatgtgctactggtgatgctggacatgctcccaagaagtagagaaaagtcatgacattacaagaaaccattgctcagtatgtaccaaagatacatgttacaactgtggctgcagttattcaccatttctggataaatgaatttaacataagaaccatggttaaaaaaaaaagaaaaagaaaaaaatgtatgaagctgccactgcagctacgttggcaacagtaagtagttaaatgtttgggaagtcaaaagttgtatgtgggttttcaactgttgttgggggattggttcccttagccctcatattgtttaagggtcaactatatattatatcttaaatattataaagctggattttgttttttaatctcatctgagtttgccttttattggagagtttagaccagtcacatttattacaattactggtatagttggattactttctgtcatcattgctgatttgcatttgcctgcttttctgttttttctcatgttttttaaggttcattaattactgttattgttgacaaccctaaccctggttctacaattttaaactagtttactgtttaaaccttccctttctgttctttttttttttttttgagacggagtctcactttgttgccaggctggagtgtagtagcgcgatctcggctcaccgcaacctccgactccttggttcaagtgattctcctgcctcagcctcccaagtagctgggattatagacgcccaccactacgcccagctaatttttgtatttttaatagagacgaggtttcaccatattggccaggatggtctcaatctcttgatctctgatcccctgaccttgttatctgcccgcttcagcctcccaaagtgttgggattataggtgtgagccaccatgcttggcctcatttctgttcttttagtcgttaccagtgaaattttaccacacaaatttaatttagtattctaaaagttaatatcctgaccccactctcaaacagtaaaaggacttttgaatacctatgaagagcttcagtctttatcctcctcatttacttgtttccagtgtttcaatttgatcttttttaaaatgcacaagttgggccgggtgcggtggctcatgcctgtaatcccagcactttgggaggctgaggcgggtggatcacctgaggtcaggagttcgagaccagcctgaccatatggtgaaaccctgtctctactaaaaatagaaaaattagccaggcatggtggcacacacctgtagtcccagctactcaggaggctgaggcagaagaatcgcttgaacccaggaggcagaggttgcagtgggctgagattgcgccgctgcactccagcctgagcgacaaagcgacactccttatcaaaaaaaataagtaaaataaaatacacaagttggacaacatttttgtaattttttccaggcaatgttttttgaggtttacctcctgtttatcattttacttattcttaacatctctgagtgttatttggggatcattattttccaatattttgaagtatttttgaagtatttttttggaagtttcactgaaacatgtctgttggcaatatattttccaagagtctattcacctgtgagtgttttctttctttgtgttcttgtgcagtagttttgctggatacccaaatctaggttgttagttatttgctctccacaccttatatatattattatcccactgtcttctgctttccattgttgagtggacttctatcattctaattgtctgtcgttcctttgtaggtgatctgtcctttctctctggctgctttcaagatcttctctttgtgtttgatgttctgcagtttcactacgatgtgtctaggcgtggatttccttttatttttcctgtttggtataatgtatggaagcatcccatatatttgaaataaaatgcattatgaaatacatgctcaccatagaaaatctggaaaaagaaagcatatcaatgtaatatctcctgatagatgagaaaataatcaaatagtataaaaaagattaaaaataaaaagcaacattccttacttcattcttctctatactagtcccactccgcagaatcccccacttttaaatgcttctgtttctttctccgtgttgtaataatatgctttatactgtttcttcattgaccaactagatagtacctgttgatttcttgctgtatgtcaggttctagcccatttatacttttcccttgcttccaagctcatacagcaaaatcaatttttaattcatttattggttactttagtaattttaagtagtaacttaaatatttcttgtctggttatatttcagtatattttgacttctgaaagatatgtatccttcaattcctttttttttttggaggtagagtctcacttttgtcacccaggctggagtgcagtggcgtaatcctggctcactgcaacctctgcctcctgggtttaagtgattctcctgcctcagcctccttagtagcttgggactacaggcacaccctgccacacctggaatttttaataaaatttttagtagagacagggtctcaccatcatgcccaggctggtctcaaactcctgagctcaggcagtctgcccaccttgtcctcccaaagtgctgggattacaggcataagccaccatgccaggcctctctttcaagtcttatattttctttcttgccgccacctacattctgtcctgcctccaccttctaaattgtcacctgttcttttatattgtcaaagctgatcaaatttacattttgttccctactttagttaagacttagtcgattgactctaagttgagaaacagtaagcatttacactgttaagactatttagtctgggcatggttggtggctcacacctgtaatcccagcactttaggaggctgaggtgggagatttgcttgagcctaggaatttgaggccagcgtgggcaacatagcgagaccctcatctatatatatattttaatgttttttaattagctgggtgtgatgatgtgcacctatagtcatggctactctggagaattgcttgagcccaggagttcgaggttacagtgagctgtgattgtgccagcctgggtgacagaccaagaccctgtctctaaaaataaaaaaaaaattttaaagactatataaatattacaaggccaaatttacattctgtttcttgtacagttttgtgtgggaactctctagagtttttttaatttttcccccttttttgtttcccttaggttcttcttttttcccttctttcattgcctacctgtactgtagcctaaaagtcttatcactctgtgctttgaaatctttgggtttcccactttttcttaggtaccttcctcctggagcctctctcctccttttctgacctcactgcttgctctaggcctgctcaaggccatcatcccgaggcgccctcctcccctgagtcggctctgcaattcctgaattccattttgtcttctcagtgcatttctccgttttgtaatcacgtcacaaagaaactccttaagaaagtatagaaggtaaattttctgagttcttggaaatctgaagctatccttgtacttgtttgatactttgactaggtacagaattataggttgaagtcattttcttcagaactttgaaggcatagtttcattatcttgaggcttcagtgttgatgctgagaacttggttgcccatcttattccattgtgtaatacctgggatttttttctccgggaacttttttttttctatgttcctggtgtctgaaatttcactgtggtatgtctagatgctagttaggtacattaggtacccttttaatttgaaaattcattctcttccgtgtgggaaatactcttgcattatttgttttaaaatttgctgtccttgttttcattgttctctggtggaaattctgttagttggatgataagcccttactttaatctgtcagttgtatattttttctctcttgatttttgacttgatcttgttggtctactcttgaatacttgcttgacttgatctttagtctccttactgaacattttaaaaatgtaggcaagcatattttttaatttccacaaactttttcttgttctatttttcatagtatcttactttgtggatacagaatcatctcaactgtctgaagatcctaattaaagggattttttttttcttttcaaggaattcactcttgtcttctaattaatggagtcagagtcagattttatgctttttttcttgctctttcgattatggaatttttttcaaaaacatctgcagatagtggttcctagtttaaggaaaggtagtgcagaggcttacctagaattgtgctgtgggctgagcttttctgcaggcaggtttagctttcaatgaagcagacaaggagctgcaattggccttgcagttgtagaggaatttcttgggggagcaggttggtatgcttacactcctactggttgtctattaaaaatattaaaattttgtcttttaaatgtctgtctctggcagtaccattcacaagccttcttctctgccttacatccttcttggtttttactcattgctgcaatctctcacagttggatggccctttgtttcatccaaattcaaggcttgatatatcatctctgcactgtgactctcacatttttatatctccagcctggaccttgccctgaattcctcatttctgtccaaccactttatatttcttcttggaggtgtaataaatcatttcaaacttgtccaaagctcaactatgaattttcctctcctgtctgttcttcctgtagtcttcctcattttagtttattggtgacttcacctttccagtttctgagacagaatcctgttgccattctttttttctctccttctcctttccttcctcttccctctctacctctgtctccctccttcccttgttccacctgtcagcctctacctccagatttatagaattcactaccgtttatcacttctgcctctaccacccatcaaagtcactgtctggccgggtgcggtggctcatgcctgtaatcccagcactttgggaggccgaggcgggtggatcatatgaggctaggagttcgagacctgcctggccggcatagtgaaaccccgtctctactaaaaatacaaatattagctgggcatgatggcacatgcctgtagtcccagctactcaggaggctgaggtacgagaattggttgaacctgggaggcggaggttacggtgagccgagatcatgccactgcactctagccttggtgacacagtgacactctgtctccaaaaaaaaaaaggcaaaaaaaagtcaccgtctgtgatttgccttggttacttgattattggaatagtgtgttcttacaaggtgtgcctgctttcaaacttgccttccttcagtccatcccacacagcagcagcagtgatcctttacactgtaaattagatcatgctactttgcagcttagaaccccccaggggctccctgtcacactgtaagtcacagtgttctgccttctcatcacccacctgcctccctctgctctggctccccgtgcttgctgctgctcctgcacactggcctgcttgtccttcaggacgttggaagagctgcgcgtctcagatgcttttgccctctcctgagaatgtttactttggatgttctcatatctcatccatgtgtcatctttgaggccttctctggccccatccccacactccctcttttctgaagctttatttttccccataacgtttgtcaccatcaaatacatattttatgtttttgtagtttaggtatttttatccgaacgtaggtctttatgttttaacgtgaattgttttcttttagcatgtatttttttgggggtcttgagagctacctccttccccgtctcaacagagtctgtcctttttgagcagggatttatgtgtttgttctgtatggctgttactgagtgcccagagcagtgtctggcatatagtagcaggagctcagtcagtgtttgttgtctgagtaaatgtcactcctgccttgcatctaacctgcagttttcacaggggctcatttgtggttttgcctgctgtgccttacagccagtatttgtccatatattttctattacccagagattgttgacatctcatctgctgcaccttgtaacccccatctctaaaccagtgatctccatcatatttttgacctgaaaatttttgtacagtagccatttttaagtatgtataccaatatatgtattttacttacgtacacatgctgtattgatatgaatattagaaaacataagaatagaaatctgccgggcttggtggctcacgcctgtaatcccagcaatttgagaggctgagacgggcagatcattaggtcaggagttcgagaccagcctggccaacatggtgaaccgccgtctctactaaaaatacaaaaattagccgggtgtggtgatgggtgcctgtaatcccagctacttgggaagctgaggcaggagaattgcttgaacctgggaggcggaggttgcagtgagccaagattgcgccactccactgtagcctgagcgacagggtgagactccatctcggaaaataaaataaaaaaagaacagaaacccaaagatcatagggtagagatgtagatattaagttctttaattcacttttatggactcttcagaaggagagattataattgtatatgcttgatacattgtgttggactggaagcactgtgaaagattcttagtcaaggggagattttacattcaaagaaaatggaaaatccccctgctttgctcggagggaagaactgcacttaaaagtttgatgtgtattggtgtcgtcttctaggcatttcttatatctgtgaacatgtgcaccctttgtatataaagtggaattacatgtttacttacgcacacacacacatgtacatataaagcaggaattatactacccagagttctctgtgacatttttgttccacttaatgtatcatgggagagtccttgagtgtggacctaggagccagactaccgaaggtgcagaccctgcagtttactagttgatttaacctttctgtaccctagtttcctaatctataaatgaagaataacggtagcatttacttcagagttcttggtaggagtaaatgttaaaatacataagctttctctgctgatgaatatttacactggagtcttaggaagggtccttgcttattttctattctaaagttgggctggacatagtgggccatatgggtgccatcagatgggctcttgtttctctgtgacccgttctgttagacctctttcctgcttttttccttgaggttgtttatctgtcctctagtgaaccagctggtttgcaggtggtgcttttctgagagtgtcttgctgttaacagttactatggatgtcatatgccagctggttctgttaaaaaaaagtctgtgaatccaaagccttgaattttgaacattattttctgtctggaattttgaagaactgattcataaagtggagaaatgaataaagatttttattttacaaattccagcacttagcattttctttattctgttactgtgacatctatttgggaaaccaaagactaccattctttataaggattcctttttttttttttttttttttttttttgagacagattctcactctgtcacccaggctgcagtgcagtggcgcagtctcactcaccgcagcctctgccttcccaggttcaggtgattctcatgcctcagcctcccgagtagctggaattacaggcatatgccaccacgcctggctaatttttgtatttttagtggagacagggttttgccatgttggccaggctggtcttgaactcctgacctcaagtgatccacctgccttggcctcccaaagtgctggaatgacaggtgtgggcctctgtgccaggccaggattcttcttttaagagactatagtgagcagcatctaccaacttgcatccttgtatgttgcatatcttatttgtttgcttggggagtaaaccaaagtaaaaacgtcctttgtcaaattaaggaccttacaagattttctgtgttaatggattggaagtctttactattctttttttttttttttgagatggagtctccctctgtcgcctaggctggagtgcagtggcacgatctctgcttattcagtctctgcctcccgggttcaagcgattctcctgcctcagcctcctgagtagctgggataacaggcgtgcgccaccacacctggctgatttttgtatttttagcagagacgggatttcgccacattggtcaggctggtctcgaactcctgacctcataatccacccaccttggcctcccaaaatgctgggattacaggcatgagtcaccacgcccagcctagatgtctttactattcttaagatggcagtagtccccaagttgatctatggattcaactcaatccctgtttaaaccccaaattgcttttttttgtagaaatcggcaggctgatcctaaaattcatatggaaataaaaagggactgagaatagccaaaactattgaaaaagagtaacgttggcaaggttatgttgcttgatttcaaaacttactacaaagctagagtaatgaagactgtgtggtactggcataaggatgaccatacagacccgtggaccggaattgagaatccagaaataaatgcatactttcacaacccatcaatttttggcagcggtgttaagacagtttattggcaaaagaataggtttttccacaggtgatgctgggacaactgaatatccacatgaaaagaatgaagttggaaccttatcttatgtcataaacaaaaataactcaaaatggatcaaaaacctaaacttcaaaactcttagggaaaaaaatagatatgtcttggattccagaatgatttcttaaatatgacaccaaaagcacaagcaaccaaaggaaaaaagataactcggacttcatcaaaatttagtatttttgtgtttcaaaagatactatcaaaaaaaaaaaagacaacaaaatgggagagaatatttaagaaacacctgtctaataatggtctagtattaagccaaggctgagttcttatttccccatccttaagtttacacgatactatattagtgaagttgaattctgtcattaccacatgtatcttgaaagaagtttgtgtggatcacgggtccagttactttctccgccctttccctccagaggatttgtcactctcaataatgttatatactaatttcaaggggaaatacaactcaaaacaaatcagaaatctgaagcttaaaaatgttatggtttagatgatgaaaagggaaaagtacatttaattcatatcatatttagatgtaaagcacttaatgttatattgcttaacctataaagtagcgcttcagtgctctcatcatatgaagtaaataatagaaaattctttgtgtgacacatgtctgttttcagccaatcagaaaccaggattattttgtatgtaataatagggtttactggaagaggagctatacagatggtacttagaggatgtagggccctacgtattagggcttcttagttgtagcgaagagcaattggtctggtacgtttagctttttcacatttagttttgaattctgactctagaaatgtacaaccccatcttttgaattacaggttttaagatgttatttgctcttaatacgtcttaaggtaacagccttgatcactgcttttactttcgatgaaataacttaatgagctgtgaagaaaaaattatcagattttaagggagagaattttatgaaaatgtctttgaggttcctgtcacctttatgagaatgtcttcaaagtttccatcaccacctctaccaatttttcttccaccggagccagtggacttaggttccataacaagctcctcttgttcactgaatgagctagacaatatttcccaccttttaaggaaaatatcagctgatatcaatgaaattaaaggaatgaaagcagctattttgacagtggaagcaaatctttttgatctaaatgttagagtgtccaagaatgaagcaaaaatttcatctttggaggttaaaatgaatgaatattcaacaacatatgaatgcaacagacagtttgaagatcaagaagaagatactgaatcacagtcaagaactactgatgtaaaaataatcggcttccttagaaacgttgagaaaggtaaactcttaatatatgatatgttctaggtacccatcctttgatctgtatctttccacgtatgttgactgtagctctgatgtggagggagcaagttacagagaacttgaatttttcatggacctttaatgacaaatttggattctgcttgatttagcttagcaatctagaattgatcagaattccatcctctttaatggagctctctaaaacgatgttttgaaaagacagatgaacctagagcaatgaagcaaaacttgaaatgtggaagtgtggtctttcatgtgtcttgtgaaattattttaaaatgtctcattctttcatcatgtactgttgatgtgaaggagacctgttgcagtatttggatggaaagagcattcttcctgtaacttttcacctcagttttccaagcttcccacaggaatgcaacttgacctaagtgtcatcttcgttacagttcctcagaatgtgtgtttttttatggtaataattctggaaggaattgacttttttgggacgcaccagtaaaatttcatataacttatgttttaaaggaaactaactgatacaatttcaaatcgagtataggttttaaaatttaaaaacaccttttaatgaaatgtggtgcttggtgggagatggcccacttaacatctttgcactgagtaagcaaagcctgtccttgtgaagccacctgtaatggatatacccaaaatcagcatgtgggcatcttagtaagatttcagtatttgcaaccctatcagttacatccctttgtacactgtagtgcagtaccttataatgagcaagtgagtgcctgatgtctgctaagcgctgtgggggctacagaaaagtgtgacattctcccatcctcaaggagcttaacatcaaatcgaggatggaaaaaaatcagttctttgtccctattttgtgcagtcagactgctgggcatattattgttaggaatagtgaacctaataggaattaatgttaggagcctattttagaagaaataagtagttgaacatcttttcttgtggaagaggcaaagaattattatcatgctttgctaacatagggtgtggattgtagagctgagtgtcttattgttttctttgcatgcatcgaagcccagagtttgtcttttaggaactcttgtttagatgatgagagtgttttgttttgctatttcgattatcttcaaaggtcatgagtgagtcgtgatggtaagagctcaggtgatggagggaggtgcttgccatgcttattgtgcagttggctgtgatgcgagctgctgggccacaaggtgccttttcctggattttccacccgtttgccacctttactttccccgcagaattcaaattcaggaaaactgatgtcctcatagagggagaaccaggagtgttttaaattggcatttgtggtttaaccctgagtacagccttttttgtcttacaggatatgtctttggtctataaatactattaaattgaattgttgaagctttaagttacttttaagacttcaagttaagaacccagaaggattgatttttgggaaccacatgctggtattgtctgtgttgtaagcttagtgaagttttaaaatttatattctaggaactcaacagaggcaattattatcccgactgcaaatcgacccagtaatggcagaaactctgcagatgagtcaaggttggtaatgtttcaagttgtactgtaatccagccatttcagttgccatttccatttcttacaccccatttaacgtatctcggatctcttagatcctgccctaagatgttatatttagatctgtgaaaatattttagggccaggagataagatctgcatttctttcatgttatatagtgttataattttttgcctcattggaaaactttgttcctttcacaccattccaagtgtgtccctagcactgtcggctgtcactctcctgctgtcaggagtgacctgcgtttctgatttaccctcccactctacccagcttttgtcattgccatgagtggcttttgtatcctgtttttcacctggttagccttatcctcttgtacttcattttggagtcttatcaccagggccacacctggaacttgttgttctagtgttctagagccactctagtttgcctgtctcctttcctctccccacagacacacatgccaggggctactccaggactggagctgacgccttcatttttattatctctgtcctcagtgcccagcccctgccagatgcatgttcaatgtcttaaaaatgactgcaggataaacacaggcaaccatgagagacccggaatcatctcagtccttctgtttcccctaagtctgtcttttgtgggaagctctggtccctagacccctctcagtcaggactccacagtcagtcactctgttccccgaccctcccccagctttccagctcagaaagtgtgcttttcctccctaagggtcagcctccaccagaggccagatcccactgggttggtgagccactggcatgtcacccactcctccaacttcattctctgcctcctgtcttctctctgtagaggtgttcagacattctctgcccgtgattttgctctctcatctcccagcagtccgtcctgcttcctccacaggagtatttgaaaaggttgacagccgagatctgtgtgtgggatccacttcatcagctcttgtgcatgttttctcttctgcctccttcagcttttcattgtacccatggtgcacgcagtttgaaatagcaagtagttctgtgaggcttatgaatgactgcagtccttagctcctatcacattttttattctaagatccctttgtttctgcatattctattaattttctaaaaacatactgattttgtgtacacaatactctttgttatttctctgtggtctgaaaggtggttttgacatttttcccctccctgcttcgtcttgttttctctaagtggtctgttttggctgtcttttatgctggaggttcccctctgatgtctggggatcctaggtggtcttacatttaagagtggagcactcagaaggtcactggtattctgggttcatgagttggggcatggggcactttgactttctgtttgaaactagaccctgtggtggaaagtgatttgtcctgcctgtctggtttgtgggcaccctgatgtcactgccttcaagactttcctctcaggctggtcagcttctccaaaacaaagtttttcaagtaatagcctggtagtcagagttctgcgagcttaagtggggaaagaaggctgggggaggcacctcaccattaattattatgtaatgtttatttaaccctcccccaaccattgtcagtccagtacttctttcatcatggctggtgtctcttggtccagggactctgttcttatcctctgaagagtctaaagctccactttctccaagggagaatgcatgcagtgggtaaagatttatcaggaaatctaattgcctttaaaaatttttaacagtgtaccttcaggtgattttgtcgtagcatctttctggcagagaccctaatgcttcatccataggcctctccgaagattatctacaggaaagcacatcaccagtcatcccaggtgtcttcagtgtagaggtcgggattggtgtggcaagcatcaaaaccaagaaaacagtggccaggtgcagtggctcacgcccataatcccagcacttggggaagccaaggcaggcagatcacttcaggtcaggagttccagaccagcctggccaacatggcgaaacccaatctctactaaaaaatacaaaaattagccaggcgtggtggtgcacatctgtaatcccagctactaaggaggctgaggcaggagccttgcttgaacccaggaggcggaggttgcagtgagctgagctcgcaccactgcactccagcctgggtgacagagcaagactgtctcaaacaaagaaaacagatacatggaattagagttgaagaagaactaactgcttcttggacacatctaatacacctcttttttgcctgccatttcttccatttcttcctaaggtccttttactgccagttcctgagcctttggagaatcttgtggtctgaattggattgcttcattattgccttagaattcagcttttacagatcccctgagttcttaatcatctgttttccactttgaaaatttctttttacacttattttctttgtgagtttatgctttcaaaacaaaaacaaaacccttattgacatttctgtgggctttcaggagggaacaaaaagtaaatgcatggggtcagcctgtggtctctactcagaagatgttacttactcccccgtctgtctggtctccatgtgacctgggctgctaacgttccgcttgcagagaggtgtgcgggagggaccggtgcacgctttcctcaaccctggagcatgttacacttgggttcccatactttctccaagctttgacctttcggcttccagttcactctgtctttattcttctcattccctttcattctcatgtgtcagcgcatctcctccattcctcctcaaaaggttagctttgctctctcccaccttcagcattattttcatctcttctgtgttcacccaacctatgaactggtagaactccttcgtctcagaaagtgcagagtggtgggaaggagtgaagcagcccctgggccactgttgggacccacctttgacagttgtgagacctcggtgaatcatttaataacttggagctgcaaacagtcatctgtaacatgggaggaaaccgactttgtaggctttgagtgaggattcagtgagagacggccaccctgaatatgttaaacacttctgtcaccttcggttttgactcagcatcttatttctgtccccccacctacaggtcaaatctgaattttctacttcctcttaaacatgggagagtcccacaaagactttaaatctaacatggaaatgtatctttgccccttttaactttgctctttttcttttgctaagtttctcatcccagctttctcttccgcctgtctccctttaccatctgtactgcccttgctggggaaggcgggcacgccccttcccaggatggagcatgtcttctcttcctgtcaggtgtgtgagaccaggacagacagcagagaatcttttcattcagagcctcaccctctgtcccgggcaacagcaggtcgagaactctggttcttccttaacactgtttttctaaaaaccagtttgatcaggccacttccttccttaggaacctctcttgatttcttttctcttttttttttttttggtttgagatggagtctccctctgtcactcgtgctggagtgcagtggcacaatcctgctcattgcagccttgacctcctgggcccaagcacttctcccacctcagcctcccaagtagctgggactgcgggcatgtgctcccacgcctggctaattttatttatttatttattttctggttgatgggaggtctcactatgttgcctaggccggtctcaaactcctgggcttatggaatccttgtgccttggcctcccagaatgttgggattacagacatgaaccgccacaccaggccacttgatttcttactaattatagaccagaatcgagagtcactgagacatagaagaacctttattatatgtgtcagccttccttggtatgtactgctgagcccaccacacacacccttccagccattccacattctaacctttctcagatgccttcggccttgtgaaagcccctttccttctacgtgcgttttcctctgcctgaagtgctgtgttcgtttctccgagtctctctccttgtttattcctgcttgttcctttactgctgacttcagatgttcctccttgctaagcttttcgttggttcttggctggagtgggctgttctgtattctcagcaccttgttcacatcccttttgggtcatgctattctgaaattgtatatgtgtctgtttttctttttttctttgtgtatctagctcagttctcttagttgttcagtaaatactcagtgaatgaacataaatgaataccctgtaaattttggtctctaagctttaaaagaagtgtattaacttcagtccgttgatggcgtattgataggtcagccattctgggttgtaggtcttggcatattttataaaatagtagatgatgtgagcttatggttatttgcattaaaggccagtgtttttcttgatacatatgtttaagtgtccattcacctttcagttaccttttaaagtagtcctcggtttataaccaactggaaattataccacttgaattctttttatcaggacatgattctaagtggtactgtgcgaagtgaacaaaccagattttggaaaagtggttcagcagtctgtgtattctaattatagggagcattaggactcaaattctccaggtttttagaaaagatttttgtactttaagggtatattgttaatatctgttgagatgcctcacctgagaacctttctctgctgtggttagggagtgttaatcagaatcacttgtgccgtgccctacgcgagaaggactccttgagttctttgaaaacatgtttggaatagaattatagccctgttttcctgagtggaaccagttgtgattttcctttgaaataatttgaatatataaaagattgacattcttctcacatatataatgttgggaatgtaaggtatattcaaaagtaaacatttgtggccaatttttttggctcagattactatgacatggaatccatggtccatgcagacacaagatcatttattctgaagaagccaaagctgtctgaggaagtagtagtggcaccaaaccaagagtcggggatgaagactgcagattcccttcgggtactttcaggacaccttatgcagacacggtagatggtttctttttcttgtgtagttaatttgtgtgattagatagtaaaggttaaccattcgtttgcagcttccctcctccccgccctaaccgctagcgtagagtgctttcattgattcagtagctagcccatgaatagttagccaaattcagttttcaagaattccagttcatctttcttgttcagaaatccattaacctacaaattacaactcagtgtatgatttaactctattaaagattcttttctttatgcaaattcaggaaatgcaagtttaaaagccagctgaccataatcaggtcagctctaaagagagttggcagatcaggtttgggtgatttttcccttagaaaattgactgtttctataaaagaagaaacatacagataattagcataaatgctgctggcccttgtgttctgagcattgatgctaattttttggtttgtttccatgttgaccctatgaagatcgaatgggtgatggggtcaggcttgaggggagattgtccttagtaagtacaggctggagggtcactggtgatgccactgtgactgttcatggccatcgtgtgttagcagagaacccaccagtgctgcacctggtagccctacctagtctttttttattgaaccaaacgcaaagccaagggagtgatagttctgctgaagagcactttagggggctcagcgttttgtgtttgtttccctaattctatggtattttttatctgtctggcagagatcttgtacaaccagataaacctgcaagtcccaagtttatagtgacgctggatggtgtccccagccccccaggatacatgtcagatcaagaggaggacatgtgctttgaaggaatgaaacccgtaaaccaaactgcagcctcaaacaagggactcagaggtctcctccacccacagcagttgcacttgctgagcaggcagcttgaggacccaaatggtagcttttctaacggtgtgttgagagctcagattttcagggtgctgtcattgtgaagggaatctttgacttgtttctctaccttgaatgaatattggttaaaggccttgcttttatttatattcagtaatggccttttttcttctttcagacaaacccaccaagtacatttcagactctttttcctgtgtctttttcataggtgggctgttactccagtttgaaaacggagttcagccatggaacctgagagacctcttccgcttatgctggctaaaggatgaaccaccattcttgttgccttctttacctttgtattttcttcagaaactgtactgccactttgcccttttatcagcaatagtctcttgcaattaacttgagagaaaaatttagatttgatgctatttctacctcagtgaaatttctttgaaaggagtttctcacctaatctatcaagatcttggaactgtttaaattaatgttgaagagtaatatttagcagaactcagatgaactcatttcagatagcaccatagtttttggcaggtgacagtttcttatcaccgtttctttcactgggtatcagtggtagctgcaacgccactgatcatttccattcatgatagagaatggtaattatgttccttatatcttctaaaatatttagaagcacctcttcattggcaggagggataattactcaatcttaaaagcgtacagattcaaaggaaaaacagtaatggattttgaaacatttccttgagtaatcctcttcttggaagagatatgaaaatgtattgaatacctttctcgatcattaaaaatagaatagacttcagagggaaatcatatgttagtggagcaataacacttagctttattttaattggttgcgtttcctactgtgaatcaatgacgtagtgtcgtggttttgattagtggagggagttgaaaatctgaccctatcaacaggaagaaaaacttaaaaaatagtaaaagctgcagtaggcagtcccgatttattgactctgtatgttttgtctaaagagaagactccagtgttttcactactcttgattttcaatttggtaccttaattttttggtctattaggatctggtttcatttaaatgtaggtgtccatatgaggctttatggggtatacatgtagcagcagtgacaccataaataatatgttagtaaaaattcttgccagtgctgtggccattgtgctgacagccatgatgagtggtgagcctcctttcccattgctttgactggggactcagtgtttccctgctgctcaaggatgaagctttgtaagattagcataggggtgtggctggagagactcctgcagaacagttctcaggagtctctagtctctgcaccacttcccctgtgagcagggagtttgaaactgcaattgcttctggttggttttatgttgggttgtttcaaggatgctaccaacaacaacatctgttttaacctgctgtcttttcactcactgtcatatggcagcacagattttatagcttgctttctttgttttttttttttttgagatagagtctctctgtcccccaggctggagtgcaatggagccatctcagctcactgcaacttctgccttccaggttgaaagccattcttctgcctcagtctcccaagtagctgggattacaggcatgcaccatcacacctggctaattttgtagtttaagtagagacggggttttaccatgttggtcaggctaatctccaactcctgacctcaagtgatccaccaacctcggcctcccaaagttctgggattacaggtgtgagccaccgtgcctggcctatagctttcaataaaaggtgaatttgcctcttaaaatttgaacagaaagttttaatagtttacaaagtcggtgtcagccagtgaagactaggggcatgaccttcgtatgacttaatgtttttaaaagaaagataaagtttctttgtaaggtattattgtaataatcacatttctttgtaaagtattatattgttcctgagtatctagctactttgctttccagctaggcttctcttgggtattctcttaatcttttatttgtactgggttcttgtgtatatattatagtctgctgtgtgtaatttattataggaaaagggtaagacacatttactttgcggggatgacacaaaaaacctgtaaaaattagagaaacttccagtcatctcacattttctttggaaccgattattcttgtatcttagaactaaaatgacttatactgttttgtttttagaaagggtatccctcctgttgcccaggctggagtgcattggcacagtcatggctcactgcagcctccacctcccaggctcaagtgattctcccacctcagcctcctgagtagttggttactacaggtgcacaccaccatgcctggctaattttttgtattttttgtagagatggggtttcaccatgttgcccaggctggtctgaaactcctgagctcaagtgatctgcccgcctcggcctcccaaagtgctggggttacaggcatgagccaccacatcctatttaaagcttaaataggacttttactatttttaaagtagcatagaaaactgtttgtatcaggcatagtcataattgctctttgatgctgctcctatctgggctgcatgactacatttgtgtgccttgttctcctgtagtgaggacagaatgtgggtcactggaacagtaagtactcatagaactagctgctgctgctattacgactggttgcctgttttgcattttttccgtttaatcatcagactctaaggaagacattattttctctttgtatagatgaggaaacagaattccaaaaagttagctaacatttgcacagagtgtctggctgagcaactaagtggcagagtcagattttaactgacctctggcaagaggactagaggaatacagttgaagtgatacttgctttcatgaacatgaatgtgaaccataatacataatacccatgatgctattttgtggggagtttaaggtgtctcagtccagaaattagcagctgattattgcctgtagctgtaattttacttattcagtgttatttaataaattgccagcattacaatttcgatgaaggcagatttttggcttactgaaacaggataaaaatctggcaacaggggtcccactttgccctgtcatagtaatcgaagctgtgattggatgtggcacagggagtggagtggatgggtgtgcacttgctttccaggctgctgctccccgtctgtcccttattgcatttatcatcttcagcccagtcagtcttgctgttaggggaactgcccagtctctgtaagtgatggcatttgtgaccccattgtaggtaaaaatgttttcccctttttagacattgctggctgagcgcggtggctcatgcctataatcccagcactttgggaggccgaggtgggtggatcgcttaagtcctggagttcaagaccagcctgggcaacgtggggaaaccctgtagccaggcgtggtggcacgtgctacttggtaggggctgaggtgggagtatcacttgagcctgggaggcagaggttgcagtgagccgagattacaccactggcacaccactgtactccatcctgggtgacagagcaggaccctgtcgtaaaaaaaaaaaaaaaaaaaaaaagtaaaagacattgctgagtttcgcacctggacttacagctcagcaggtgggaatccttttgtatttgggccactcatcatcttgctggcgtgtgaggattcacatctccttatcaccttacctgttttcagtttttatttaattttattagttccccacttgacgtccttctctatttttaattcagctatgaattagtattgagaattagaatttttggtgaaaaatttggccgtagttgcagagtcactgtcctctttccttttcacagtgagaactgttgtcttcttcctggcaaccttttataggattctatggccagtgttaatcccataatttgagctcacttattttatatgactgtacatttaacagaagattctaagacaggtttgagggaaatatgttaaaggtgctgtgtactgaattgatcataatgaatgaaatacttttatttcctttccctttgtagctgagatgagtgaactgagtgtggcacagaaaccagaaaaacttttggagcgctgcaagtactggcctgcttgtaaaaatggggatgagtgtgcctaccatcaccccatctcaccctgcaagtgagtaccatccccccatctcaccctgcaagtgagtaccatccccccatctcaccctgcaagtaccatcccccatctcacctggcaagtaccatcccatctcacccagcaagtaccatcccccacatctcaaccctcaagtgagtaccatcccatctcaccctgcaagtaccatcccatttcaccctgcaagtaccatcccccatctcaccctgcaagtaccatctccccatctcaccctgtaactaccatcccatctcaccctgcaagtgagtaccatccctgcatttcaccctgcaagtaccatctcatctcaccctgcaagtaccaccccctcatctcaccctgcaagtatcatcccccatctagccctgtaagtgcgagtaccatcccccatcttaccctgcaagtaccatcacccacttcaccctgcaagtaccatcccccacctcagcctgcaagtaccatcccccacctcagcctgcaagtaccatcccctatctcaccctgcaagtaccatccccatctcaccctgcaagtatcatcccccacctcaccctgcaagtaccatcccccatctcaccctgcaattgagtaccatcccccatctcaccctgcaagtaccatcccccatctcaccctgcaagtgagtaccatcccccatctcaccttgcaagtaccatcccccatctcaccctgcaagtaccatcccccatctcaccctgcaagtatcatctcaccctgcaagtgagtaccatccccccatctcatcctgcaagtaccatcccccatctcaccctgcaagtaccatcccccatctcaccctgcaagtaccatcccccatcttaccctgcaagtgaataccatccccatctcaccctgcaagtgaataccatccccatctcaccctgcaagtgaataccatcccccatctcaccctgcaagtgaataccatccccatctcatcctgcaagtgaataccatccccatctcaccctgcaagtcatagccagctgattttggctttcagtttagtgtctgtatcttacaccttattttgtttttgtttttctgtggacaagtttttagttttataactaaatggagtgacaattaccatggccctctccagagtagcgtatttcttgttcatgtatgtttgttgagaggcaagggtgggggggctttgtttgtgcctcggacctgtgagatactgaaatacctggggttccttaagaattctgtacgtttaagcagatgggtatatggtaactgccccagtttgtatgcattttggccacacgcagtatacacagattttgaggagttgagggaaaagttagttatgggtaatgaaaacattttggacttgggttaaatttttccttacaagctggctggctcaatgtaatgagctttatgagatggctttttggggcttcttttttttgccgggggtaggtcctatggatggaatcttcatttttaattcttttaaggaaatgatgtgggaataatacagctgtacatataaggagagtatgggatgagtctttttgtatcacaaagccttgcatagaggatgtgtttattgtattaatgagttcactgcataaaatatataccttttttattaagtggtgtgatttttatcacaaaagcttgtctttcttggtggcttggcttgagttaaaagcctgtgtttgtgttatcccaagctttggaataaatgattgtgtcctattttgatatatggtcttattttaaaatattctttttgttgctgttttttttgcatttctcaaaacaagtagtgatggggagtgtaaagagcccttatacacagaactaataatgcattgagaagattgaatatgaaatatgctttttttttgttttgtagagccttccccaattgtaaatttgctgaaaaatgtttgtttgttcacccaaattgtaaatatgatgcaaagtgtactaaaccagattgtcccttcactcatgtgagtagaagaattccagtactgtctccaaaaccaggtgagtgagtgactgtgctactacatttgggtaaaaaatataaaatggcattttgtgactgtaaatggaattgaacaaacaaaagatggtttcagaaataattttggcaggatcagttaatccaaccagtctttaaagagcaagtgtgcctatctgtagtattccgaagtattttgactagtgaatatataaaccttaccattctaatttaaaaatggttttcactttcaaaaaaaacatcagtagactgcattaaaaatgggttttccaaacagattggagatcagtcctggtttttattttgttagcagttgcaccaccagcaccaccttccagtagtcagctctgccgttacttccctgcttgtaagaagatggaatgtcccttctatcatccaaaagtaagaacttctattttctcaaatcaatttagtgacaacatctcaatttcctcatttaacttcttttttgtcagagttactacattggtgcaaaagtaattgcgatttttgccagtaaaactattaagttgttcctcgtcactgaacctccatctggccccttaggccaagtggtctgaaactgttcaatgttagtatcccaagcactcagtggggggaagcatatctttgctagtcacattttccattattccctgcatttaagtatatggatgggttttagcgggggctggggggcagtttgaacctaatgtcagaactgagatgaagaaatccagtaggtactgcttaaaaccatccaaacttgtactgatgatggttgatgaatctccagatgtttagttggtcaaaatgaattatctccttcttgccccggtagcttgaggaccatatgaaggccttcacttgcccccatctgtaactgggcgtagatgagggtactcagtgaagagtgtaagggataattagaagtttttgtggtatgctaaactaccttttgaaattgtacttgctgtgattctttgactagaattttgtgtctcaaggttaagtccatttttcaaggcttcactagtattaaaatggtccttatagatggaatctcttactctgttaatggttagggtgggctggttattgtctcctaagttgtatgttggccaggtgaggtgggtcaggcctgctatcctagtactttgggaggtagaggcagaagtggaaggatcgtttgagcccgggagtttgaaaccagcctaggcaacatttaagagaccccatctcttaaaaaaaaaaaaaacaggcttggtagcacacgcctgtagtcccagctactcgggagactgaggcaagaggtcatgccacttcactccagcctgggtgacagagtgagaccctgtctcaaataataaaataatgtgtttacttatattagccttgtggatattgttgaagctctgttatctctattcagcattgtaggtttaacactcaatgtacaagaccggactgcacattctaccatcccaccattaatgtcccaccacgacatgccttgaaatggattcgacctcaaaccaggtaaacattcaaattcgtttttctcatgtcagttcaaattcttttttctaatttgcagtttctaaatttataagcacacaaaattggaaactagactgttactttgaatttttttctttgctgtttaattatagaaggctcctttggcaaaataatttactacatgggctaaattttacattatccagtggttacttttttaacctagattatcttgctctgttgcccaggttggagtgcagtcacactatcatagctcactgcagcctcaaacccctgggttcaatccatcctcccacctgtagctgagactacaagcgtgtgcctctatacctggctaattttttttattttaagtagagatggggtcttgaactcctgagctgaagcgatatccttccaccgtggccttccaaagtaccaggattacaggcatgagccaccacacccagccagattttaacttctcattatatactacgcaaacatatactaaggccagcaggagtatatatatgtgtactgtacttgaatttcacatccattttcttcgacattagcaactgggagatactgaaaggaagtttcaaaatattttagtgtggccagaaaatttaattacatatggtattatcttttatctacctgacataattgaattatttttaaaaatctgccatttatattgtaatcttatgaccaaatatttattgcttaaaactagtcaactttttaaactgagatatatggtatatatggatacaaagcagataattaaaacaatttttggttctgttcattcagcgaatagcacccagtcctgcctggcagaagatcatgcagtttggaagttttcatgtactgatgaaagatactctacagaacttgtcaaatctttgaaacttggaatatattgctttcataatatgaagttttattgcctatctatctgaagtgtctaatttttcaagtttgtaagtttattatgtggttttaacattgggtgtttttgttttgtttttactatgaaaagacagcttaaggaagagctaaattctgttaaaatatttggggcatgtttgtgcactgctgttgtgaggatcagcatatgaaattgacatcatggttagtcatggtactgcagcttagggggctacacggttgctgtgtgagtggagagatgcagtgaggcagttgtcattattctaaaaattgtactactttcacttttcccaaagattatataatgttcataatccaccatgaaaacagcattggccaaaggtactgaggctgcttaaaatattcaattctgctttttaatttttaagtgaatttagtttgaaaagcatgattatacaggcctctcaggctgagtgctactttggtaaagttcccagttttcctgccttctgtgacaggatgaatgaggtgggtatggacagtggaggcagctggaatggcaagtgcagaaaataggaacagttctatacagtgctctcatttactaataacataatgccttctaaataatttttttgggaaactacattatcacaaaattatacaaatttttttacaagtatttacatactgtatctgaaaacagactttaaagtcacaagattataaatgtacatatatattctcacattctgaaaaataacattctcagaatccacagaaaatatacttagttactactgaagataatttttgaaatgtaaaaattagatttaaatagtatattttaaatgacagaactataattacagagatcagatcagataggtaaactgcaagatagataggatgaaacttttggcctactgtattacttacagagtttttttgtgtgtggtttttaaaactgttaaggcaagaagtgtcaaatgctttagagttaaataacagatcactgatttcaaagacttggtgtatagtgttaaaaattaaagcttaaaaggtggttagaaaagtggattaatgcaaaaggggtaataaagactgcaacattctcaggaccaaattaaactgctaaaaaaaaaaaaaaagttcattgacttgcttagtcgtatactcaaatgatgataaacctacatgtgcaaaggctcacgtttaagattgtcaagccagcagtctactgttgtgttgccattgcttttccattgggagaagaaagaattaaccagtcattaaaccatttggtaagttgcactttgctgtgctgatcccacaggaaaggcttgaaacacgagaagcagcaaagacagagcacacaagtgcataaggctgttgtcttcggcttgggtgaaatgacagttcctcttcattctaaaggtttactccattgaatttaaggcatttgttcattccagtgttgagatgctttgcatctctgcagaagaaatttattttaaattgtttaaatatctggaaatacttttagctatcatttataaagatagttttgttctcagtttcactataaattatagaacaaatgggaaacaagggtttaatttagttcagccattttacaaggaaataataaaatactaaaatctgattgttttttgctatttaatagccactgcccagacacatatttaagagtttaatctttcagttgctatggcttatgaacaagctaaggttgaccataaaacatttgttggatgacgtggtttaaaatgatcaccacaaaaagggaccacaaaaaaaggaaggaaatgagcatggttggcgattggaagcaagggtaccagagggcacagtgtgctttggcatgcattttatacataaaatgaatggaacaaaaggtgccagaagtcccaggttacacaatcaggagcttagatactgcacacaaaaataattatctgggttaaaaaagtaaacatagggcagattctatatggcctatcatgtttcttcaccttcccctcgttgctggctgatacagcgaggtggtcagctgatgactacttagtcaatatgacctttagtcgtgaaactgacagcagcagtgattaaggctgacttaatcaggttggccactttgaaggacagaaatgcagtggaaacagttttattctatgtagtttacatgcttaaggttacagagtttctacctgcactgtaatggaaatataatttctctgtagccaaaagctggcaaacttgacccagagggaaaatttaaaactgcagcaggctcaaatgtagagtatttttctttttatgggcaggttgttcagggatttttttcctcctttaatttattgactgactgtaaatacatgagtagaaacttaatagtcatgtatttcaaaatttggcttaatttaggagaatccactgatgaacaagtaccaacttacgtttcaagcttcttagccccataatcagtccttcagccacagctatttagagctttaaaactaccaggttcaatcactggttatgctttctgtgatgtaatttagtcatttctatttttagtattaaccaagtattagacacagaaaataggtattaagaatcttcatatatcctgtcagaccaaatgggattccaggaacctaaagcgatctattatgctataaagataattaacacattaaaaactcatagggtcaatacagcatcttaaacctcacacttagaaaaatatatttttaaatagcagtctacataattttcaatcttcaggaaactacagataggctagacagcgaattcctgaatgatgagtagtgatctttggcagcatttaaagtgaaaagaaataaggatctaagaattcagccctaatccactaaaaaaaggaattctaactgacaagtttttacaaatggagttgggctcattcattttggaaataaacctatggagtggcacacatctaaacaaattttcccaatagaaaaaaggctataaaaattttattccaagagtgattaaattgtataatgttgtatatgtgaatttaacacttttgtttacatgttaaacaaatgtgtatatattagactacattaaatatgcaattctttcttccagttaaatactgttgctccctaaaacccttacattgtacaccattgggaatgattgttcatcatactacttttccattagtgaggctacagttatgttttaaatgtgcgattacagagatggcatctgaacataaactgatggctcgaaaatgaaaatggaaatgtagcagccatatactgctaactttggatctgttcctgaattcaaaactactaggagaaaagtgtcctttataaaaaaggaccttattaatgcctaaaaaacatcatattctctaggaaagcttgtgtctgtttccttagggaaaatgtttgccttttaaaaactgtgatcctttaggatgatcatgactttccctttccttatggaaatgcaagaataaaatatttcattaaacaatgaaccttgaaaataaaatataaacattaagaaaccattttgctaaaaagataatgaaaattatccaaattgggtttttgagttcttctgtaaagagtgctctaccctaaattttcccagcaggtctgccgaaatcacacacttcccaatacagggggacttggcctttaccatcaagtattcgatccttccttgaaatggcattatctggcagtgtatggattacggattatacccagtgcatatagcaaatattttgaacagatcagtctttcactattttgatgattctgggcatttctccctgttacagtcttgggttagcaccacttgaccatgcagggttgggttttggtttttcttctctgtaattctggtctcaaagttaatttctgtagtcatctcagcatctctcagtgaggtgtatgtacacatttccagacaaataagctgcaatcagagaagaaaattgcagggagttaattatgtttttagattttcataacagtttaatatttttcagttgtgctttcaggttacatgtgtaatatttttcctctttaactccttttattctgtatttgcataaatatgagattctgaagagccatctggttatactaccttctactaatgttgactagctgatttcataaaccaaagctgtaggagttgttgtattaagtctcttaactagtaacatagtctgctcttcatgggctgagaaagttactaacctgcagtcatcacctccagcactaacaacatgtcgatcaccactggtaaatcgaatatttgtcacatggggcgaatgacccaagaaccttttgtgttttgcctaaaaaacaatgacagacaagctcagggcatttggtgcacacagaagtcaaaggctcttattaggaactataatctctatgacaagagctgtggagagagtagggagttagcaccgcagccagtgattagaatgcttttcagcatgagtagtggatctgcaaaaccaggctgtgtgggcagtcagatgtctccaggtactctgaccatttttctctaaggaaaagcatttgaaatttgataactgattataggtttggtgaaaagctaattacagcttttgtaggatggttccaaagatggtattactcgagggagaggatttgtttctaatagcttttatttcaaagtaaatagatttagaaagtttggggaaaaatttagaaattaggacaaaacattttaaatatatggggaaaagtgctgatgataagacatcaaaattaggagtaaactgataatagtaaacaaaacacaaacttacaaatttttctggacatgggaagtcaaataacttaaccatgccaaagtcatctcctgtaacaagactgattcctgaatgagatacacaggcacagttgacatcagctttctcagcatgtctggaccagattcccaaaacctcatctcctagaatactagagggaaggaacaaaagaaaactcatcatggcaagtgcgggcaggttgactatattcaaaaagtttcttggcaattaatctctaagtaccctatcatgttacttaaaatacaggaagtaaattatggtaagttgtttggagacctgaatttcatcaggatatcaactcctgccttttaaaaatgacattttataatttgaagggtttctagattaatctttttaagattaaagtagtactttatgaaaactgatagaactattttttctttttttttttttgagacggagttttcgctcttgttacccaggctggagtgcaatggcatgatctcggctcaccgcaacctctgcctcctgggttcaagcaattctcctgcctcagcctcccgagtagctgggatcacaggcatgcgctaacatgcccggcttattttgtatttttagtagagacagggtttctccatgttggtcaggctagtctcgaactcccgacctcaggtgatcacccccgctcggcctcccaaagtgctgggattacaggctgagccaccgcgcctgactgaaaactgatagaactatttttcaaattaaaagtgctacttggctgggtccagcagcacataccagtaatcccaacattttgggaggctgaggcaggaggactgcttgaggccaagagtttgagaccagcctgggcaatattgtgagatccctatctctacaaaaataaaaatgacttatgacataggaattaaaaaaatttcagagatggggtcttgctatgttgcccaggctggtatcaaaacttctaggctcaagtgatcctcccacctcggcctgctacatcagagattacaggcatgagccactatatgcctggctgatacaggaatttgatggcatttttcattggccaaaaaaatggatagtcatggttacctgtcatacagccaggaaatttgaacaaatttggaagctttgacttctaatagattcaagatagcattcctttagatagagaattaataacagttgcttaacagcacccaatacctttttgccagtcattaaatttagcattaagaaaaatatcagggtatctttaaagttaaaactttgatttccttaaaaaaaaaacttgataaatcatggaaactgataaaacatggaaatatattcaataaaaaggggtcccaacatgaacataccatttcaaaatatggtaacaaaaacttgaaactcaattactattccttattggaatggctctaacagttcagaaataggattttctaactggccttcaaagtcagttcttgccttgtgaatatataagtatttacctagtccatgtagcccaagtaattctgtcaatagcggcatgatccataagatgttttcctgaaggcacttcatagacatgccgtttatagcagccactagagacctttttcatcagattaaaatgggacaagaattccattaggtgagagacaaaatccacagggggtttacagaatactagcatattgctacttgatttacatgtctaacattattaagtatgcaaaagatcactacaaaaacttaataggagaaaagctctgataagtgggggaggaaaggggagctgtaggtcagaaggtacaaagggaggagttgagaagctggagctctggagctcaggaactttaaatgcattcactaacacgaaatgtaaaagcagaagaacttgccacctgggtatacagtattggtactgtacctggagataactgctatctgcagagaagtccatttgaatgacaaagcttggaatgtctttgcagtagctgattctgttaagagtggggcccagcgttaggtcataaaaatccactgagttctcactagaacctactgccagataccgggaatccggactaaatctgaatcaaaacaaaacgtaaaaagtattagaccacatgaagtattataaatacttaagatcagtgacttttcctttctagttcttaaaagtaacgtgtgataaggcctcaaatagatttacctgtcagacacaactgatcatgtatactgagattgtctgggttacatgaaataaggaagctttatattttacttaaattttaaatatttccccaattgtcatctcccaattcctttaaaaacgtctaatggcttaaaaaaactttcttaggccaggcccagtggctcacacctataatcccagaactttgggaagcggaggcgggcagatcacctgaggtcgagagtttgagaccagcctgaccaacatagagaaaccctgtctctactaaaaatacaaaattagccaggcatggtggtgcacgcctgtaatcccatctactcgggaggctgaagcaggagaatcgcttgaacccaggaggcacaggttgtggtgagctgagattgcaccattgcacttcagcatgggcaacaagagcaaaactccaactcaaaacaaaacaaaacaaaatttaattttttaaatagaggcggggtctcactatggtcccaaactcctggcctcaagcaatccttcccccttggcctcccaaggtactgggattacaggtgtgagccacaacacccagtcagaacatctcagcttttaaaagccattagcattacataattaataagctaacaattcattaagatagttttcttccatctggaaaaaacgttgtcttaatattaagcaaagaacacagcccagcttaactaacctccagttattaaggtgaaatgacacaacttgaatcttggaagaagaattttttttttttgagacgaagtctcgctcttgtctcccaggctggagtgcgatggcgcaacctccgcctcccgggttcaagcgattctcctgtttcagccccctgagtagctgggattacaggcgcctgccaccacgcccggctgatttttgtatttttagttgagatggggtttcactatgttggccaggctggtcgagtactcctgacttcaggtgatctgcctgcctcggcctcccaaagtgctgggattacaggcatgagccaccgcgcccggcctgaagaacttatttaaaagacaaagtgaaatgctatttgcctagcaatctttggagtcatatgggacaattcagtctcttgaaatggcccatgagtcttactgaggtacgatagagacatgtaaaagctaagggaagccactgttactattttatatattgaagttctgaggaaggtttcatttgtaaaaggattttactgatgaaaagtgtacaagcttttgacagacctagattcaataatcttatctactgatcacacggaagtactccgtaaatggtagccactgttgaaaaatgcttaagcactgaaaaacaaaggtttaagaaacatttaaattaatttggattctggaacatttaatcaataggtattgattaaattaatgaactacatattcccaaactgaggttactaagagaagatatgtttgaaatcacaactttagttttccagggtgacaacttttgaagggcagatagctctcttgtattacagtgggagatacctcttggtgggatgaacttaatggacatggctaagtgttaacatgaattcatcaaacattacctactagtacttgctattatagttggtgcccagtgggtttataatttagcaagaagaattaagtagtatacaaacagccatattttagcatacaatttataatacgggaaatgctacaggccctggggacctctttttgaaggcaaggctatggaaaattttacaaatggaagttaaatcaagtatatactagaaactctattccatttgttcactaacctgatatcatggattgcacatctcctgtctctcttctttccccatatttttagagaactcactagtaaaatgataaattctccatttttcattccaatagccaccatgtccccttcagggctgtaacacacagtacgagcagcatgtcccaaattcactttgtttaacatcttctgcatttaaaaaaaaaaaaaaaaagagtcataggaaacattaagtgaagtacttctaaattataccagtttcccctcaaaatgctcaacagaattctggcagttctttaagtactagcaatttagaacttccaacttttctttttagaagttgtaacctcttttaaaaaaattatctgtacttactttatcagcaatatcccaaagtctcactgtcccatcttctgcagcagaaaggaaaaaatccctggaaggatgtgttgctagtccccagattggcccatccacatgaccgttaactaaaatattacaagctgcatttttctctccaacttcgattatttcagcattccttgtcccaacaaggatcttgccctgaaacacaagcaggaccaatacagtgaatgtaatacaacagctgcttttcttcttcataatataaaaatgaccctattgacctgctttcagagaactttttgctttgagctaatctagtagcaaggcagtcattagctcatgcaaatttttctatgactacaggcacacatctatctgtaagcacaatgggctagattacatattagagtccatgctacagaatagaacttttctgtggcagtacacctggattcttcaataatcaaagtttttatttgataatcttaggatttccaaactggggtcagtgcagtgggatataggaaaaaataatagaatttattttttagttaaaaagtaaaagcttaactacaatttaatatgcaggctgaagataatatccgtatgatttataaatacacttaataagtacaaacacgctcaaaaattttcataggagttgtagttttgaatttttattttgaaattgacacataattatacatatctatagggcatagggtaatacgcataaccatcacctcagacatttatcatttctttgtgatggaaactttcaaaatcctctcttgtaaatacctgaaaatacataaatacgtgattcttaactatagtcatcctacagtactacagaatactaaaacatactattcctatctggctgtgtaaacttgtatcctttaaccagtccttccctatccccctccccctcccccttgtccgcctccagtaaccactattctactctccacctctgtgggatcaacttttttagtttctgcacaggagtgagaacatgtatttatctttctgtgcctggcttatttcacttcacatcatgtcctccagtctcatccatgttgccaccaagaatgacagaatttcattattttttatggctgagtagtatttcattgtttgtttactgcacgttttatctagggaatgtgtgtttttttaaaaaatggagacagctgtcctaatatgagtcaactgccaagggctttcaattatgtctactagagttgttaaattggcagattctagaaaatattggaggtttacatacagtatttagacagaatagcttcctagcttatgcaccacactggtgctaactttggcaaagaaagcagcaaagacagagtaatgttggcaagcaaatccatcgttatgcattattaagtattgttcattaggctgcaaagggtgagggaatcacagtaataaccactttctgttttctgctgcactgtatcagctcatggaacatcttactttgcctctgcacacagaacgaacacaatctgtggcttgtcctgtctcaagcctgaaggcacggcaccgcctcagttcctgatcccacagtttaaccgctcctccttcttttgacctaagtaaataaccaagccagagtaagtgttcattattggctactataatttttattataaacaaataccaagttataagcagaatcttttttttttaaaaaggccctgatatttataatttacctctaatattcttgtaaactttctatggcaatttgaggatatactatatctcagtcaaaataaacatccagtttcagtgaattttattttgagaaatactctttttttctgacatgagcataattttatttagcctctacaatacattacaatacattatcctctctcataatacttttttttttttttttaagatgtagtctcgctctgtctcccaggcttgagtgcagtggcatgatctaggcttattgcaacctctgcctcccaggttcaagcgattctcctacctcagcctcccgagtagctagcattacaggtgtgcaccaccacacccagctaatttctgtatttttagtagagatggggtttcaccatgttggccaggctggtctcaaataccttgacctcaggtgatctgcctgcctcggcctcccaaagtgctgggattccaggtatgagccactgtgcctggcctcataatacttcttgattaggaagatgtaaaaaaacaattttattaaaaggataatggaaatgtaaggcaaaataatagaattacaaatgctatgctacagagttgatttatttatttttttgagacagagtgtcgctctgtcacctggcctggagtgcagtggtgtgatctcggctcactgcaacctgtgcctcccaggttcaagcgattcttctccttcagcctcccaagtagctgggattacaggcaccatgcctggctaatttttgtatttttagtagagatggagtttcaccatattggccaggctgatcccaaactcctgacctcgtgatccgcccacctcggcctcccaaagtgttgggattacaggcgtgagccactgcaactggcccagagcttatttttgaaggccaaaacagaagcatatttattccctatcaggtgttaaaatatctcactggaacagtttagcaggcttctagtgagtgggggtgtgcaggagtaaatgacgtgggaaatacaagtgttggaggacgaaatagagcccatttatggattttattcctggaagggctgaaaaatgtattccttccttttctgctagatgaattgcttgtctgaaagcatgcctatgtgcattcttcctttatgtaaaaggcacaaattctgcgcttgtgtttaattaacatatgtgggttctttcaatcctgtattgaaatgtacttcttagtcaactatatgtcacatttttttttgtttttgtttttgttttttaaatggggtctcactctgtcacccaggctggagtgcagtggcaccatcacagctcactaaagccttgacctccccaggctcaagtgatcctcccacctcagcctcctgagtagcagggactacaggcatgtgccaccacacccggctaattgttgttttttatagcgatggggtttcaccatgttgcccaggctggtcttgaactcctgggctcaagcgatccacctgcctcagcctcccaaagtgataagattacaggtgtgagccactgtgcctggcctacatgtcatgtttcaacatgcatatgactatgttggtgacaaatcaaatcataagtatctggttactgttgggagatttgaaaatcactcagaagagacctcttctcaaattttgaggtcttgtataaaacagtttaaatttgcctcaagcaaaaggaaacaaggcagttctctctagttccctcatccttttctaaagcaacaatgtgcattctactccttagaatccattctgaacaaaaagagagcaggcagtcaaaatacaaccctggctccagattcccccatgggcctcctactcagcaaatcatacacaggcatacagacattaagaaaagtaactcaacttgtaggacaactacctatccacacctcagaaaaagtatcaccccaacatgaaaaaaattggaagtgaattaagaccagaaatgagaatcaaatagaaggcacataaaaggtaataaaggagaagcatatgaggaggaaggtcggagaggacactctgtgtagcctagaaacaactagaataattaactgcaaacctcaggtaggtcacaaatgcataaatattctgtgaaaagaaagaggactcacggcctttcctttcccccagtcacgataagtccatctcgcagggtggtgtacatggcaaacacaggcccgttgtgagctctcgccacgattctacacaatatgtgatctttccacacacagacatcaccactgatggtacctgtaaacgtcaagttattctgaaaaggagtgggggagggggagacaaactcatcaaaagttcaaatagagtttaaatagataattttctatgtatgtgtaatgctgtctcacccttgatacaaagagcatgcatcgtgtagtggcagcagcactgaattcacgagtcaggaaacctgaacgggaggcttagctttgtcaggaccttttcctttccaagtctgttgcttattagctagaataaccttagacaattcttcccttccaattctaacatactataattctagggtttattttttatttttttgagacggagtttcgctctttgttgcccaggctggagtgcaatggtgcgatctcagctcaccacaacctctgcttcccaggttcaagtgattctcctgtctcagcctcccaagtagctgggattacaagcgccagccaccacgcccggctaatttttgtatttttagtagagacagagtttcaccttgttagccaggctggtcttgaactcctgacttcaggtgatcttcccgccttggcctccctaagtgctgggattataggtgtgagccactgtgcccggcctgagccacggtgcctggcctggtcttatattaagaatacccaaaatgttcaactgaaatttgacatggcacaaacatttcaatagtctttttctcaaaaatgtaagtgtacttaaatattctaaaattataacttttcctataagtattgcataatcacaaaaacaaaaaatgcacttagtttttcgatgcaccaaaggatttatacagcctagccaatgcaggatattaaaggaaagagatgtggattggaagccacaggtccagatgagatggaataaagtgagaggagagcaggtctcctgaacacccttctgtcagggccaggaattgtgctatttccttctgtctcactacctccttcttccctcgaagtagagacactggcccagagcacttccagctgtatgataagcagtgtgttaaatgataaaaagcaaaggaaatcctaaaccctagtaccaccttaaatcatttgaaaatcatgtttcttgatttacctttctctctgacaaatttttaggactatgaagaactactaggaagacagaaattttaggatatttagggtgacaattagaagattaaggaaggcttttgagtataacagtagtccaaggaatcaaatgttcatcagaatccttattatggtggctcatgcctgtaaacccagcactttgggaggtcaagatgggaggatcacatagcttaggagcttgagaccacctaggcaacatagcgaaaccctgtctctactaaaaatgaaagaaaaattagcctagcatggtggttcctgccctgtagtcccagctactaaggaggctgaggatcacttgaacctgggagatggaggctacagtgagctataatcgcaccattgcaccccagcccaggcgacagagtgagatactgtgtcaaaaaaaaaaaaaaatccttttccccctctcattaacattcttttcactccctaatttctgaaagaactagatttttgaaagatgaaatatatgcttgaccagggcatgtaatgattagcagatcacagtatcatctcaacaacattcatgtggctgatgatctaaggcaagagaatgtaaagtagtcaaagtcacactatgtgcattttaagagacatactgcaccaaatgcaatagcgagcatggtctgcatccgggcatcttccagtgtgctcagtagcccttttttgctaagaagagctcttcctgccagggtccagaacttcacatgttttactcccactgagacaaactgggtatctgaatctggtcggaattctgccacaaaaatacgttgattgtgaccagctctgctggcaattttggcacctgacaagatacaacaaaattatctaggttattacaagaaccaagctaatcaacagcatcaaacaaatatgtaaaatacatagttcaaaaaacaaaggcttagaagagaggccaatggcccctgctctactacctagcaatacatgatttacaattatttgtgtattgagtccttttcacttatcttcgctccattaacttttctttatataacgtaaatgttttgtctaaagtgtggtaggtaatattatcctgctgatctgccattatcattagaaatatacataattttcataagaatctccaaaaccaatcaaatcattaataataaatacatagtttcttgctggaagaaaatagcagtgaatcatttataatgctaataatggtttcattaatttatctgttttgtgaggttacagttccactgggcttttaaagtgaaatatacctacagtaccactgtgtacagtatattgcataggcctccactgaatgattgtttcaaccaccaactttaagacaaatattaaatacagaattcctacta

SEQ ID NO: 1301 - DNA, 18 bp, Artificial Sequence
  Description of Artificial Sequence: Synthetic oligonucleotide
cctcagtgaataggcttg

SEQ ID NO: 1302 - DNA, 18 bp, Artificial Sequence
  Description of Artificial Sequence: Synthetic oligonucleotide
catttcctcagtgaatag

SEQ ID NO: 1303 - DNA, 18 bp, Artificial Sequence
  Description of Artificial Sequence: Synthetic oligonucleotide
tccttcatttcctcagtg

SEQ ID NO: 1304 - DNA, 18 bp, Artificial Sequence
  Description of Artificial Sequence: Synthetic oligonucleotide
gtgtctccttcatttcct

SEQ ID NO: 1305 - DNA, 18 bp, Artificial Sequence
  Description of Artificial Sequence: Synthetic oligonucleotide
gaaaggtgtctccttcat

SEQ ID NO: 1306 - DNA, 18 bp, Artificial Sequence
  Description of Artificial Sequence: Synthetic oligonucleotide
accatgaaaggtgtctcc

SEQ ID NO: 1307 - DNA, 18 bp, Artificial Sequence
  Description of Artificial Sequence: Synthetic oligonucleotide
ctgtgaccatgaaaggtg

SEQ ID NO: 1308 - DNA, 18 bp, Artificial Sequence
  Description of Artificial Sequence: Synthetic oligonucleotide
gggcactgtgaccatgaa

SEQ ID NO: 1309 - DNA, 18 bp, Artificial Sequence
  Description of Artificial Sequence: Synthetic oligonucleotide
ccctcgggcactgtgacc

SEQ ID NO: 1310 - DNA, 18 bp, Artificial Sequence
  Description of Artificial Sequence: Synthetic oligonucleotide
ggtctccctcgggcactg

SEQ ID NO: 1311 - DNA, 18 bp, Artificial Sequence
  Description of Artificial Sequence: Synthetic oligonucleotide
aggagggtctccctcggg

SEQ ID NO: 1312 - DNA, 18 bp, Artificial Sequence
  Description of Artificial Sequence: Synthetic oligonucleotide
cagaaaggagggtctccc

SEQ ID NO: 1313 - DNA, 18 bp, Artificial Sequence
  Description of Artificial Sequence: Synthetic oligonucleotide
gtctccagaaaggagggt

SEQ ID NO: 1314 - DNA, 18 bp, Artificial Sequence
  Description of Artificial Sequence: Synthetic oligonucleotide
ccagggtctccagaaagg

SEQ ID NO: 1315 - DNA, 18 bp, Artificial Sequence
  Description of Artificial Sequence: Synthetic oligonucleotide
gggccccagggtctccag

SEQ ID NO: 1316 - DNA, 18 bp, Artificial Sequence
  Description of Artificial Sequence: Synthetic oligonucleotide
ctccagggccccagggtc

SEQ ID NO: 1317 - DNA, 18 bp, Artificial Sequence
  Description of Artificial Sequence: Synthetic oligonucleotide
agtgtctccagggcccca

SEQ ID NO: 1318 - DNA, 18 bp, Artificial Sequence
  Description of Artificial Sequence: Synthetic oligonucleotide
gggtcagtgtctccaggg

SEQ ID NO: 1319 - DNA, 18 bp, Artificial Sequence
  Description of Artificial Sequence: Synthetic oligonucleotide
gccaagggtcagtgtctc

SEQ ID NO: 1320 - DNA, 18 bp, Artificial Sequence
  Description of Artificial Sequence: Synthetic oligonucleotide
ctggagccaagggtcagt

SEQ ID NO: 1321 - DNA, 18 bp, Artificial Sequence
  Description of Artificial Sequence: Synthetic oligonucleotide
gcagcctggagccaaggg

SEQ ID NO: 1322 - DNA, 18 bp, Artificial Sequence
  Description of Artificial Sequence: Synthetic oligonucleotide
gtttagcagcctggagcc

SEQ ID NO: 1323 - DNA, 18 bp, Artificial Sequence
  Description of Artificial Sequence: Synthetic oligonucleotide
tcagggtttagcagcctg

SEQ ID NO: 1324 - DNA, 18 bp, Artificial Sequence
  Description of Artificial Sequence: Synthetic oligonucleotide
gagggtcagggtttagca

SEQ ID NO: 1325 - DNA, 18 bp, Artificial Sequence
  Description of Artificial Sequence: Synthetic oligonucleotide
ccgcagagggtcagggtt

SEQ ID NO: 1326 - DNA, 18 bp, Artificial Sequence
  Description of Artificial Sequence: Synthetic oligonucleotide
cagccccgcagagggtca

SEQ ID NO: 1327 - DNA, 18 bp, Artificial Sequence
  Description of Artificial Sequence: Synthetic oligonucleotide
gcaggcagccccgcagag

SEQ ID NO: 1328 - DNA, 18 bp, Artificial Sequence
  Description of Artificial Sequence: Synthetic oligonucleotide
gcccggcaggcagccccg

SEQ ID NO: 1329 - DNA, 18 bp, Artificial Sequence
  Description of Artificial Sequence: Synthetic oligonucleotide
tatcaatgacccaatatt

SEQ ID NO: 1330 - DNA, 18 bp, Artificial Sequence
  Description of Artificial Sequence: Synthetic oligonucleotide
ggccttatcaatgaccca

SEQ ID NO: 1331 - DNA, 18 bp, Artificial Sequence
  Description of Artificial Sequence: Synthetic oligonucleotide
ccaggggccttatcaatg

SEQ ID NO: 1332 - DNA, 18 bp, Artificial Sequence
  Description of Artificial Sequence: Synthetic oligonucleotide
gaggtccaggggccttat

SEQ ID NO: 1333 - DNA, 18 bp, Artificial Sequence
  Description of Artificial Sequence: Synthetic oligonucleotide
ctcaagaggtccaggggc

SEQ ID NO: 1334 - DNA, 18 bp, Artificial Sequence
  Description of Artificial Sequence: Synthetic oligonucleotide
gcaacctcaagaggtcca

SEQ ID NO: 1335 - DNA, 18 bp, Artificial Sequence
  Description of Artificial Sequence: Synthetic oligonucleotide
gtggggcaacctcaagag

SEQ ID NO: 1336 - DNA, 18 bp, Artificial Sequence
  Description of Artificial Sequence: Synthetic oligonucleotide
ggagtgtggggcaacctc

SEQ ID NO: 1337 - DNA, 18 bp, Artificial Sequence
  Description of Artificial Sequence: Synthetic oligonucleotide
tcacgggagtgtggggca

SEQ ID NO: 1338 - DNA, 18 bp, Artificial Sequence
  Description of Artificial Sequence: Synthetic oligonucleotide
aggggtcacgggagtgtg

SEQ ID NO: 1339 - DNA, 18 bp, Artificial Sequence
  Description of Artificial Sequence: Synthetic oligonucleotide
catcaaggggtcacggga

SEQ ID NO: 1340 - DNA, 18 bp, Artificial Sequence
  Description of Artificial Sequence: Synthetic oligonucleotide
aggcccatcaaggggtca

SEQ ID NO: 1341 - DNA, 18 bp, Artificial Sequence
  Description of Artificial Sequence: Synthetic oligonucleotide
atctcaggcccatcaagg

SEQ ID NO: 1342 - DNA, 18 bp, Artificial Sequence
  Description of Artificial Sequence: Synthetic oligonucleotide
gcccaatctcaggcccat

SEQ ID NO: 1343 - DNA, 18 bp, Artificial Sequence
  Description of Artificial Sequence: Synthetic oligonucleotide
gtgcagcccaatctcagg

SEQ ID NO: 1344 - DNA, 18 bp, Artificial Sequence
  Description of Artificial Sequence: Synthetic oligonucleotide
cattagtgcagcccaatc

SEQ ID NO: 1345 - DNA, 18 bp, Artificial Sequence
  Description of Artificial Sequence: Synthetic oligonucleotide
tagctcattagtgcagcc

SEQ ID NO: 1346 - DNA, 18 bp, Artificial Sequence
  Description of Artificial Sequence: Synthetic oligonucleotide
aaaggtagctcattagtg

SEQ ID NO: 1347 - DNA, 18 bp, Artificial Sequence
  Description of Artificial Sequence: Synthetic oligonucleotide
gggcaaaaggtagctcat

SEQ ID NO: 1348 - DNA, 18 bp, Artificial Sequence
  Description of Artificial Sequence: Synthetic oligonucleotide
ctgaagggcaaaaggtag

SEQ ID NO: 1349 - DNA, 18 bp, Artificial Sequence
  Description of Artificial Sequence: Synthetic oligonucleotide
ggaagctgaagggcaaaa

SEQ ID NO: 1350 - DNA, 18 bp, Artificial Sequence
  Description of Artificial Sequence: Synthetic oligonucleotide
tggaaggaagctgaaggg

SEQ ID NO: 1351 - DNA, 18 bp, Artificial Sequence
  Description of Artificial Sequence: Synthetic oligonucleotide
tacagtggaaggaagctg

SEQ ID NO: 1352 - DNA, 18 bp, Artificial Sequence
  Description of Artificial Sequence: Synthetic oligonucleotide
ggctatacagtggaagga

SEQ ID NO: 1353 - DNA, 18 bp, Artificial Sequence
  Description of Artificial Sequence: Synthetic oligonucleotide
catcaggctatacagtgg

SEQ ID NO: 1354 - DNA, 18 bp, Artificial Sequence
  Description of Artificial Sequence: Synthetic oligonucleotide
aaacacatcaggctatac

SEQ ID NO: 1355 - DNA, 18 bp, Artificial Sequence
  Description of Artificial Sequence: Synthetic oligonucleotide
tagcaaaacacatcaggc

SEQ ID NO: 1356 - DNA, 18 bp, Artificial Sequence
  Description of Artificial Sequence: Synthetic oligonucleotide
tcacgtagcaaaacacat

SEQ ID NO: 1357 - DNA, 18 bp, Artificial Sequence
  Description of Artificial Sequence: Synthetic oligonucleotide
tacactcacgtagcaaaa

SEQ ID NO: 1358 - DNA, 18 bp, Artificial Sequence
  Description of Artificial Sequence: Synthetic oligonucleotide
gggcgtacactcacgtag

SEQ ID NO: 1359 - DNA, 18 bp, Artificial Sequence
  Description of Artificial Sequence: Synthetic oligonucleotide
gcctagggcgtacactca

SEQ ID NO: 1360 - DNA, 18 bp, Artificial Sequence
  Description of Artificial Sequence: Synthetic oligonucleotide
gacaagcctagggcgtac

SEQ ID NO: 1361 - DNA, 18 bp, Artificial Sequence
  Description of Artificial Sequence: Synthetic oligonucleotide
agggagacaagcctaggg

SEQ ID NO: 1362 - DNA, 18 bp, Artificial Sequence
  Description of Artificial Sequence: Synthetic oligonucleotide
agaccagggagacaagcc

SEQ ID NO: 1363 - DNA, 18 bp, Artificial Sequence
  Description of Artificial Sequence: Synthetic oligonucleotide
gatcaagaccagggagac

SEQ ID NO: 1364 - DNA, 18 bp, Artificial Sequence
  Description of Artificial Sequence: Synthetic oligonucleotide
cactggatcaagaccagg

SEQ ID NO: 1365 - DNA, 18 bp, Artificial Sequence
  Description of Artificial Sequence: Synthetic oligonucleotide
tgagacactggatcaaga

SEQ ID NO: 1366 - DNA, 18 bp, Artificial Sequence
  Description of Artificial Sequence: Synthetic oligonucleotide
aaagatgagacactggat

SEQ ID NO: 1367 - DNA, 18 bp, Artificial Sequence
  Description of Artificial Sequence: Synthetic oligonucleotide
ggtgcaaagatgagacac

SEQ ID NO: 1368 - DNA, 18 bp, Artificial Sequence
  Description of Artificial Sequence: Synthetic oligonucleotide
agagaggtgcaaagatga

SEQ ID NO: 1369 - DNA, 18 bp, Artificial Sequence
  Description of Artificial Sequence: Synthetic oligonucleotide
ctgatcagacctcaggcc

SEQ ID NO: 1370 - DNA, 18 bp, Artificial Sequence
  Description of Artificial Sequence: Synthetic oligonucleotide
tgtggctgatcagacctc

SEQ ID NO: 1371 - DNA, 18 bp, Artificial Sequence
  Description of Artificial Sequence: Synthetic oligonucleotide
ctctctgtggctgatcag

SEQ ID NO: 1372 - DNA, 18 bp, Artificial Sequence
  Description of Artificial Sequence: Synthetic oligonucleotide
ttagcctctctgtggctg

SEQ ID NO: 1373 - DNA, 18 bp, Artificial Sequence
  Description of Artificial Sequence: Synthetic oligonucleotide
aaaccttagcctctctgt

SEQ ID NO: 1374 - DNA, 18 bp, Artificial Sequence
  Description of Artificial Sequence: Synthetic oligonucleotide
accccaaaccttagcctc

SEQ ID NO: 1375 - DNA, 18 bp, Artificial Sequence
  Description of Artificial Sequence: Synthetic oligonucleotide
ccagaaccccaaacctta

SEQ ID NO: 1376 - DNA, 18 bp, Artificial Sequence
  Description of Artificial Sequence: Synthetic oligonucleotide
cacacccagaaccccaaa

SEQ ID NO: 1377 - DNA, 18 bp, Artificial Sequence
  Description of Artificial Sequence: Synthetic oligonucleotide
tgcaccacacccagaacc

SEQ ID NO: 1378 - DNA, 18 bp, Artificial Sequence
  Description of Artificial Sequence: Synthetic oligonucleotide
actactgcaccacaccca

SEQ ID NO: 1379 - DNA, 18 bp, Artificial Sequence
  Description of Artificial Sequence: Synthetic oligonucleotide
ggcacactactgcaccac

SEQ ID NO: 1380 - DNA, 18 bp, Artificial Sequence
  Description of Artificial Sequence: Synthetic oligonucleotide
tcaaaggcacactactgc

SEQ ID NO: 1381 - DNA, 18 bp, Artificial Sequence
  Description of Artificial Sequence: Synthetic oligonucleotide
tttaatcaaaggcacact

SEQ ID NO: 1382 - DNA, 18 bp, Artificial Sequence
  Description of Artificial Sequence: Synthetic oligonucleotide
agccatttaatcaaaggc

SEQ ID NO: 1383 - DNA, 18 bp, Artificial Sequence
  Description of Artificial Sequence: Synthetic oligonucleotide
agggaagccatttaatca

SEQ ID NO: 1384 - DNA, 18 bp, Artificial Sequence
  Description of Artificial Sequence: Synthetic oligonucleotide
cacagagggaagccattt

SEQ ID NO: 1385 - DNA, 18 bp, Artificial Sequence
  Description of Artificial Sequence: Synthetic oligonucleotide
gggcacacagagggaagc

SEQ ID NO: 1386 - DNA, 18 bp, Artificial Sequence
  Description of Artificial Sequence: Synthetic oligonucleotide
aacgggggcacacagagg

SEQ ID NO: 1387 - DNA, 18 bp, Artificial Sequence
  Description of Artificial Sequence: Synthetic oligonucleotide
gggacaacgggggcacac

SEQ ID NO: 1388 - DNA, 18 bp, Artificial Sequence
  Description of Artificial Sequence: Synthetic oligonucleotide
ctgaggggacaacggggg

SEQ ID NO: 1389 - DNA, 18 bp, Artificial Sequence
  Description of Artificial Sequence: Synthetic oligonucleotide
acttactgaggggacaac

SEQ ID NO: 1390 - DNA, 18 bp, Artificial Sequence
  Description of Artificial Sequence: Synthetic oligonucleotide
tccccacttactgagggg

SEQ ID NO: 1391 - DNA, 18 bp, Artificial Sequence
  Description of Artificial Sequence: Synthetic oligonucleotide
ttttatccccacttactg

SEQ ID NO: 1392 - DNA, 18 bp, Artificial Sequence
  Description of Artificial Sequence: Synthetic oligonucleotide
gggcattttatccccact

SEQ ID NO: 1393 - DNA, 18 bp, Artificial Sequence
  Description of Artificial Sequence: Synthetic oligonucleotide
aatcagggcattttatcc

SEQ ID NO: 1394 - DNA, 18 bp, Artificial Sequence
  Description of Artificial Sequence: Synthetic oligonucleotide
gggtgaatcagggcattt

SEQ ID NO: 1395 - DNA, 18 bp, Artificial Sequence
  Description of Artificial Sequence: Synthetic oligonucleotide
tctgagggtgaatcaggg

SEQ ID NO: 1396 - DNA, 18 bp, Artificial Sequence
  Description of Artificial Sequence: Synthetic oligonucleotide
atccctctgagggtgaat

SEQ ID NO: 1397 - DNA, 18 bp, Artificial Sequence
  Description of Artificial Sequence: Synthetic oligonucleotide
tttccatccctctgaggg

SEQ ID NO: 1398 - DNA, 18 bp, Artificial Sequence
  Description of Artificial Sequence: Synthetic oligonucleotide
acacatttccatccctct

SEQ ID NO: 1399 - DNA, 18 bp, Artificial Sequence
  Description of Artificial Sequence: Synthetic oligonucleotide
tggctacacatttccatc

SEQ ID NO: 1400 - DNA, 18 bp, Artificial Sequence
  Description of Artificial Sequence: Synthetic oligonucleotide
ctctgtggctacacattt

SEQ ID NO: 1401 - DNA, 18 bp, Artificial Sequence
  Description of Artificial Sequence: Synthetic oligonucleotide
acccactctgtggctaca

SEQ ID NO: 1402 - DNA, 18 bp, Artificial Sequence
  Description of Artificial Sequence: Synthetic oligonucleotide
cagaattttaggaccaga

SEQ ID NO: 1403 - DNA, 18 bp, Artificial Sequence
  Description of Artificial Sequence: Synthetic oligonucleotide
agtggcagaattttagga

SEQ ID NO: 1404 - DNA, 18 bp, Artificial Sequence
  Description of Artificial Sequence: Synthetic oligonucleotide
tatgcagtggcagaattt

SEQ ID NO: 1405 - DNA, 18 bp, Artificial Sequence
  Description of Artificial Sequence: Synthetic oligonucleotide
aaagctatgcagtggcag

SEQ ID NO: 1406 - DNA, 18 bp, Artificial Sequence
  Description of Artificial Sequence: Synthetic oligonucleotide
gttacaaagctatgcagt

SEQ ID NO: 1407 - DNA, 18 bp, Artificial Sequence
  Description of Artificial Sequence: Synthetic oligonucleotide
ccaaggttacaaagctat

SEQ ID NO: 1408 - DNA, 18 bp, Artificial Sequence
  Description of Artificial Sequence: Synthetic oligonucleotide
attgcccaaggttacaaa

SEQ ID NO: 1409 - DNA, 18 bp, Artificial Sequence
  Description of Artificial Sequence: Synthetic oligonucleotide
agtgaattgcccaaggtt

SEQ ID NO: 1410 - DNA, 18 bp, Artificial Sequence
  Description of Artificial Sequence: Synthetic oligonucleotide
gggaaagtgaattgccca

SEQ ID NO: 1411 - DNA, 18 bp, Artificial Sequence
  Description of Artificial Sequence: Synthetic oligonucleotide
aaggtgggaaagtgaatt

SEQ ID NO: 1412 - DNA, 18 bp, Artificial Sequence
  Description of Artificial Sequence: Synthetic oligonucleotide
ggaccaaggtgggaaagt

SEQ ID NO: 1413 - DNA, 18 bp, Artificial Sequence
  Description of Artificial Sequence: Synthetic oligonucleotide
actgaggaccaaggtggg

SEQ ID NO: 1414 - DNA, 18 bp, Artificial Sequence
  Description of Artificial Sequence: Synthetic oligonucleotide
acaaaactgaggaccaag

SEQ ID NO: 1415 - DNA, 18 bp, Artificial Sequence
  Description of Artificial Sequence: Synthetic oligonucleotide
agatgacaaaactgagga

SEQ ID NO: 1416 - DNA, 18 bp, Artificial Sequence
  Description of Artificial Sequence: Synthetic oligonucleotide
tttacagatgacaaaact

SEQ ID NO: 1417 - DNA, 18 bp, Artificial Sequence
  Description of Artificial Sequence: Synthetic oligonucleotide
gttattttacagatgaca

SEQ ID NO: 1418 - DNA, 18 bp, Artificial Sequence
  Description of Artificial Sequence: Synthetic oligonucleotide
ttattgttattttacaga

SEQ ID NO: 1419 - DNA, 18 bp, Artificial Sequence
  Description of Artificial Sequence: Synthetic oligonucleotide
agacattattgttatttt

SEQ ID NO: 1420 - DNA, 18 bp, Artificial Sequence
  Description of Artificial Sequence: Synthetic oligonucleotide
aagtcagacattattgtt

SEQ ID NO: 1421 - DNA, 18 bp, Artificial Sequence
  Description of Artificial Sequence: Synthetic oligonucleotide
aaaggaagtcagacatta

SEQ ID NO: 1422 - DNA, 18 bp, Artificial Sequence
  Description of Artificial Sequence: Synthetic oligonucleotide
tctggaaaggaagtcaga

SEQ ID NO: 1423 - DNA, 18 bp, Artificial Sequence
  Description of Artificial Sequence: Synthetic oligonucleotide
atggatctggaaaggaag

SEQ ID NO: 1424 - DNA, 18 bp, Artificial Sequence
  Description of Artificial Sequence: Synthetic oligonucleotide
gcttcatggatctggaaa

SEQ ID NO: 1425 - DNA, 18 bp, Artificial Sequence
  Description of Artificial Sequence: Synthetic oligonucleotide
cacttgcttcatggatct

SEQ ID NO: 1426 - DNA, 18 bp, Artificial Sequence
  Description of Artificial Sequence: Synthetic oligonucleotide
tcacccacttgcttcatg

SEQ ID NO: 1427 - DNA, 18 bp, Artificial Sequence
  Description of Artificial Sequence: Synthetic oligonucleotide
tcttctcacccacttgct

SEQ ID NO: 1428 - DNA, 18 bp, Artificial Sequence
  Description of Artificial Sequence: Synthetic oligonucleotide
tgaaatcttctcacccac

SEQ ID NO: 1429 - DNA, 18 bp, Artificial Sequence
  Description of Artificial Sequence: Synthetic oligonucleotide
caccttgaaatcttctca

SEQ ID NO: 1430 - DNA, 18 bp, Artificial Sequence
  Description of Artificial Sequence: Synthetic oligonucleotide
tctggcaccttgaaatct

SEQ ID NO: 1431 - DNA, 18 bp, Artificial Sequence
  Description of Artificial Sequence: Synthetic oligonucleotide
aggtttctggcaccttga

SEQ ID NO: 1432 - DNA, 18 bp, Artificial Sequence
  Description of Artificial Sequence: Synthetic oligonucleotide
gggtgaggtttctggcac

SEQ ID NO: 1433 - DNA, 18 bp, Artificial Sequence
  Description of Artificial Sequence: Synthetic oligonucleotide
gacctgggtgaggtttct

SEQ ID NO: 1434 - DNA, 18 bp, Artificial Sequence
  Description of Artificial Sequence: Synthetic oligonucleotide
ttagggacctgggtgagg

SEQ ID NO: 1435 - DNA, 18 bp, Artificial Sequence
  Description of Artificial Sequence: Synthetic oligonucleotide
agggcttagggacctggg

SEQ ID NO: 1436 - DNA, 18 bp, Artificial Sequence
  Description of Artificial Sequence: Synthetic oligonucleotide
aacagagggcttagggac

SEQ ID NO: 1437 - DNA, 18 bp, Artificial Sequence
  Description of Artificial Sequence: Synthetic oligonucleotide
ggagaaacagctatgcca

SEQ ID NO: 1438 - DNA, 18 bp, Artificial Sequence
  Description of Artificial Sequence: Synthetic oligonucleotide
ccaacggagaaacagcta

SEQ ID NO: 1439 - DNA, 18 bp, Artificial Sequence
  Description of Artificial Sequence: Synthetic oligonucleotide
caaccccaacggagaaac

SEQ ID NO: 1440 - DNA, 18 bp, Artificial Sequence
  Description of Artificial Sequence: Synthetic oligonucleotide
tgtggcaaccccaacgga

SEQ ID NO: 1441 - DNA, 18 bp, Artificial Sequence
  Description of Artificial Sequence: Synthetic oligonucleotide
taccctgtggcaacccca

SEQ ID NO: 1442 - DNA, 18 bp, Artificial Sequence
  Description of Artificial Sequence: Synthetic oligonucleotide
gttactaccctgtggcaa

SEQ ID NO: 1443 - DNA, 18 bp, Artificial Sequence
  Description of Artificial Sequence: Synthetic oligonucleotide
ctctggttactaccctgt

SEQ ID NO: 1444 - DNA, 18 bp, Artificial Sequence
  Description of Artificial Sequence: Synthetic oligonucleotide
gggggctctggttactac

SEQ ID NO: 1445 - DNA, 18 bp, Artificial Sequence
  Description of Artificial Sequence: Synthetic oligonucleotide
ggaaagggggctctggtt

SEQ ID NO: 1446 - DNA, 18 bp, Artificial Sequence
  Description of Artificial Sequence: Synthetic oligonucleotide
tctgaggaaagggggctc

SEQ ID NO: 1447 - DNA, 18 bp, Artificial Sequence
  Description of Artificial Sequence: Synthetic oligonucleotide
tgtcctctgaggaaaggg

SEQ ID NO: 1448 - DNA, 18 bp, Artificial Sequence
  Description of Artificial Sequence: Synthetic oligonucleotide
cacggtgtcctctgagga

SEQ ID NO: 1449 - DNA, 18 bp, Artificial Sequence
  Description of Artificial Sequence: Synthetic oligonucleotide
aacaccacggtgtcctct

SEQ ID NO: 1450 - DNA, 18 bp, Artificial Sequence
  Description of Artificial Sequence: Synthetic oligonucleotide
ccttaaacaccacggtgt

SEQ ID NO: 1451 - DNA, 18 bp, Artificial Sequence
  Description of Artificial Sequence: Synthetic oligonucleotide
gccgtccttaaacaccac

SEQ ID NO: 1452 - DNA, 18 bp, Artificial Sequence
  Description of Artificial Sequence: Synthetic oligonucleotide
aactggccgtccttaaac

SEQ ID NO: 1453 - DNA, 18 bp, Artificial Sequence
  Description of Artificial Sequence: Synthetic oligonucleotide
tggttaactggccgtcct

SEQ ID NO: 1454 - DNA, 18 bp, Artificial Sequence
  Description of Artificial Sequence: Synthetic oligonucleotide
ggctctggttaactggcc

SEQ ID NO: 1455 - DNA, 18 bp, Artificial Sequence
  Description of Artificial Sequence: Synthetic oligonucleotide
aaaggggctctggttaac

SEQ ID NO: 1456 - DNA, 18 bp, Artificial Sequence
  Description of Artificial Sequence: Synthetic oligonucleotide
gaggaaaaggggctctgg

SEQ ID NO: 1457 - DNA, 18 bp, Artificial Sequence
  Description of Artificial Sequence: Synthetic oligonucleotide
cccctgaggaaaaggggc

SEQ ID NO: 1458 - DNA, 18 bp, Artificial Sequence
  Description of Artificial Sequence: Synthetic oligonucleotide
ggtgtcccctgaggaaaa

SEQ ID NO: 1459 - DNA, 18 bp, Artificial Sequence
  Description of Artificial Sequence: Synthetic oligonucleotide
accacggtgtcccctgag

SEQ ID NO: 1460 - DNA, 18 bp, Artificial Sequence
  Description of Artificial Sequence: Synthetic oligonucleotide
taaacaccacggtgtccc

SEQ ID NO: 1461 - DNA, 18 bp, Artificial Sequence
  Description of Artificial Sequence: Synthetic oligonucleotide
atccttaaacaccacggt

SEQ ID NO: 1462 - DNA, 18 bp, Artificial Sequence
  Description of Artificial Sequence: Synthetic oligonucleotide
tggccatccttaaacacc

SEQ ID NO: 1463 - DNA, 18 bp, Artificial Sequence
  Description of Artificial Sequence: Synthetic oligonucleotide
ttaactggccatccttaa

SEQ ID NO: 1464 - DNA, 18 bp, Artificial Sequence
  Description of Artificial Sequence: Synthetic oligonucleotide
tctggttaactggccatc

SEQ ID NO: 1465 - DNA, 18 bp, Artificial Sequence
  Description of Artificial Sequence: Synthetic oligonucleotide
taaaggattctgaacaac

SEQ ID NO: 1466 - DNA, 18 bp, Artificial Sequence
  Description of Artificial Sequence: Synthetic oligonucleotide
atcactaaaggattctga

SEQ ID NO: 1467 - DNA, 18 bp, Artificial Sequence
  Description of Artificial Sequence: Synthetic oligonucleotide
ttaatatcactaaaggat

SEQ ID NO: 1468 - DNA, 18 bp, Artificial Sequence
  Description of Artificial Sequence: Synthetic oligonucleotide
tgagcttaatatcactaa

SEQ ID NO: 1469 - DNA, 18 bp, Artificial Sequence
  Description of Artificial Sequence: Synthetic oligonucleotide
ttatgtgagcttaatatc

SEQ ID NO: 1470 - DNA, 18 bp, Artificial Sequence
  Description of Artificial Sequence: Synthetic oligonucleotide
aaacattatgtgagctta

SEQ ID NO: 1471 - DNA, 18 bp, Artificial Sequence
  Description of Artificial Sequence: Synthetic oligonucleotide
gaaacaaacattatgtga

SEQ ID NO: 1472 - DNA, 18 bp, Artificial Sequence
  Description of Artificial Sequence: Synthetic oligonucleotide
tttttgaaacaaacatta

SEQ ID NO: 1473 - DNA, 18 bp, Artificial Sequence
  Description of Artificial Sequence: Synthetic oligonucleotide
acatatttttgaaacaaa

SEQ ID NO: 1474 - DNA, 18 bp, Artificial Sequence
  Description of Artificial Sequence: Synthetic oligonucleotide
atctaacatatttttgaa

SEQ ID NO: 1475 - DNA, 18 bp, Artificial Sequence
  Description of Artificial Sequence: Synthetic oligonucleotide
tttaaatctaacatattt

SEQ ID NO: 1476 - DNA, 18 bp, Artificial Sequence
  Description of Artificial Sequence: Synthetic oligonucleotide
aacactttaaatctaaca

SEQ ID NO: 1477 - DNA, 18 bp, Artificial Sequence
  Description of Artificial Sequence: Synthetic oligonucleotide
atggtaacactttaaatc

SEQ ID NO: 1478 - DNA, 18 bp, Artificial Sequence
  Description of Artificial Sequence: Synthetic oligonucleotide
gttttatggtaacacttt

SEQ ID NO: 1479 - DNA, 18 bp, Artificial Sequence
  Description of Artificial Sequence: Synthetic oligonucleotide
aaggagttttatggtaac

SEQ ID NO: 1480 - DNA, 18 bp, Artificial Sequence
  Description of Artificial Sequence: Synthetic oligonucleotide
aaaacaaggagttttatg

SEQ ID NO: 1481 - DNA, 18 bp, Artificial Sequence
  Description of Artificial Sequence: Synthetic oligonucleotide
tcaccaaaacaaggagtt

SEQ ID NO: 1482 - DNA, 18 bp, Artificial Sequence
  Description of Artificial Sequence: Synthetic oligonucleotide
aaaattcaccaaaacaag

SEQ ID NO: 1483 - DNA, 18 bp, Artificial Sequence
  Description of Artificial Sequence: Synthetic oligonucleotide
aaatcaaaattcaccaaa

SEQ ID NO: 1484 - DNA, 18 bp, Artificial Sequence
  Description of Artificial Sequence: Synthetic oligonucleotide
ctattaaatcaaaattca

SEQ ID NO: 1485 - DNA, 18 bp, Artificial Sequence
  Description of Artificial Sequence: Synthetic oligonucleotide
atgcactattaaatcaaa

SEQ ID NO: 1486 - DNA, 18 bp, Artificial Sequence
  Description of Artificial Sequence: Synthetic oligonucleotide
tggaagcgtggccttttg

SEQ ID NO: 1487 - DNA, 18 bp, Artificial Sequence
  Description of Artificial Sequence: Synthetic oligonucleotide
gcgtttggaagcgtggcc

SEQ ID NO: 1488 - DNA, 18 bp, Artificial Sequence
  Description of Artificial Sequence: Synthetic oligonucleotide
tggaagcgtttggaagcg

SEQ ID NO: 1489 - DNA, 18 bp, Artificial Sequence
  Description of Artificial Sequence: Synthetic oligonucleotide
gaggatggaagcgtttgg

SEQ ID NO: 1490 - DNA, 18 bp, Artificial Sequence
  Description of Artificial Sequence: Synthetic oligonucleotide
ggcacgaggatggaagcg

SEQ ID NO: 1491 - DNA, 18 bp, Artificial Sequence
  Description of Artificial Sequence: Synthetic oligonucleotide
gagtgggcacgaggatgg

SEQ ID NO: 1492 - DNA, 18 bp, Artificial Sequence
  Description of Artificial Sequence: Synthetic oligonucleotide
cggaggagtgggcacgag

SEQ ID NO: 1493 - DNA, 18 bp, Artificial Sequence
  Description of Artificial Sequence: Synthetic oligonucleotide
cgggacggaggagtgggc

SEQ ID NO: 1494 - DNA, 18 bp, Artificial Sequence
  Description of Artificial Sequence: Synthetic oligonucleotide
ggaggcgggacggaggag

SEQ ID NO: 1495 - DNA, 18 bp, Artificial Sequence
  Description of Artificial Sequence: Synthetic oligonucleotide
cgggaggaggcgggacgg

SEQ ID NO: 1496 - DNA, 18 bp, Artificial Sequence
  Description of Artificial Sequence: Synthetic oligonucleotide
tacaccgggaggaggcgg

SEQ ID NO: 1497 - DNA, 18 bp, Artificial Sequence
  Description of Artificial Sequence: Synthetic oligonucleotide
gggtgtacaccgggagga

SEQ ID NO: 1498 - DNA, 18 bp, Artificial Sequence
  Description of Artificial Sequence: Synthetic oligonucleotide
tcccggggtgtacaccgg

SEQ ID NO: 1499 - DNA, 18 bp, Artificial Sequence
  Description of Artificial Sequence: Synthetic oligonucleotide
ctcagtcccggggtgtac

SEQ ID NO: 1500 - DNA, 18 bp, Artificial Sequence
  Description of Artificial Sequence: Synthetic oligonucleotide
cccggctcagtcccgggg

SEQ ID NO: 1501 - DNA, 18 bp, Artificial Sequence
  Description of Artificial Sequence: Synthetic oligonucleotide
tcaggcccggctcagtcc

SEQ ID NO: 1502 - DNA, 18 bp, Artificial Sequence
  Description of Artificial Sequence: Synthetic oligonucleotide
ccggctcaggcccggctc

SEQ ID NO: 1503 - DNA, 18 bp, Artificial Sequence
  Description of Artificial Sequence: Synthetic oligonucleotide
aaggcccggctcaggccc

SEQ ID NO: 1504 - DNA, 18 bp, Artificial Sequence
  Description of Artificial Sequence: Synthetic oligonucleotide
gcgacaaggcccggctca

SEQ ID NO: 1505 - DNA, 18 bp, Artificial Sequence
  Description of Artificial Sequence: Synthetic oligonucleotide
gcgctgcgacaaggcccg

SEQ ID NO: 1506 - DNA, 18 bp, Artificial Sequence
  Description of Artificial Sequence: Synthetic oligonucleotide
gtcctgcgctgcgacaag

SEQ ID NO: 1507 - DNA, 18 bp, Artificial Sequence
  Description of Artificial Sequence: Synthetic oligonucleotide
cgcccgtcctgcgctgcg

SEQ ID NO: 1508 - DNA, 18 bp, Artificial Sequence
  Description of Artificial Sequence: Synthetic oligonucleotide
cagcgcgcccgtcctgcg

SEQ ID NO: 1509 - DNA, 18 bp, Artificial Sequence
  Description of Artificial Sequence: Synthetic oligonucleotide
acacgcagcgcgcccgtc

SEQ ID NO: 1510 - DNA, 18 bp, Artificial Sequence
  Description of Artificial Sequence: Synthetic oligonucleotide
gtcccacacgcagcgcgc

SEQ ID NO: 1511 - DNA, 18 bp, Artificial Sequence
  Description of Artificial Sequence: Synthetic oligonucleotide
ggcgggtcccacacgcag

SEQ ID NO: 1512 - DNA, 18 bp, Artificial Sequence
  Description of Artificial Sequence: Synthetic oligonucleotide
gccgcggcgggtcccaca

SEQ ID NO: 1513 - DNA, 18 bp, Artificial Sequence
  Description of Artificial Sequence: Synthetic oligonucleotide
ttgaggccgcggcgggtc

SEQ ID NO: 1514 - DNA, 18 bp, Artificial Sequence
  Description of Artificial Sequence: Synthetic oligonucleotide
ccgggttgaggccgcggc

SEQ ID NO: 1515 - DNA, 18 bp, Artificial Sequence
  Description of Artificial Sequence: Synthetic oligonucleotide
cggacccgggttgaggcc

SEQ ID NO: 1516 - DNA, 18 bp, Artificial Sequence
  Description of Artificial Sequence: Synthetic oligonucleotide
ccccgcggacccgggttg

SEQ ID NO: 1517 - DNA, 18 bp, Artificial Sequence
  Description of Artificial Sequence: Synthetic oligonucleotide
gggtgccccgcggacccg

SEQ ID NO: 1518 - DNA, 18 bp, Artificial Sequence
  Description of Artificial Sequence: Synthetic oligonucleotide
ccggcgggtgccccgcgg

SEQ ID NO: 1519 - DNA, 18 bp, Artificial Sequence
  Description of Artificial Sequence: Synthetic oligonucleotide
cgcatccggcgggtgccc

SEQ ID NO: 1520 - DNA, 18 bp, Artificial Sequence
  Description of Artificial Sequence: Synthetic oligonucleotide
ggctgcgcatccggcggg

SEQ ID NO: 1521 - DNA, 18 bp, Artificial Sequence
  Description of Artificial Sequence: Synthetic oligonucleotide
ggactctgaatttggcag

SEQ ID NO: 1522 - DNA, 18 bp, Artificial Sequence
  Description of Artificial Sequence: Synthetic oligonucleotide
aacttggactctgaattt

SEQ ID NO: 1523 - DNA, 18 bp, Artificial Sequence
  Description of Artificial Sequence: Synthetic oligonucleotide
ttaagaacttggactctg

SEQ ID NO: 1524 - DNA, 18 bp, Artificial Sequence
  Description of Artificial Sequence: Synthetic oligonucleotide
agtggttaagaacttgga

SEQ ID NO: 1525 - DNA, 18 bp, Artificial Sequence
  Description of Artificial Sequence: Synthetic oligonucleotide
aattaagtggttaagaac

SEQ ID NO: 1526 - DNA, 18 bp, Artificial Sequence
  Description of Artificial Sequence: Synthetic oligonucleotide
gaaggaattaagtggtta

SEQ ID NO: 1527 - DNA, 18 bp, Artificial Sequence
  Description of Artificial Sequence: Synthetic oligonucleotide
tacaggaaggaattaagt

SEQ ID NO: 1528 - DNA, 18 bp, Artificial Sequence
  Description of Artificial Sequence: Synthetic oligonucleotide
gtaattacaggaaggaat

SEQ ID NO: 1529 - DNA, 18 bp, Artificial Sequence
  Description of Artificial Sequence: Synthetic oligonucleotide
gaacggtaattacaggaa

SEQ ID NO: 1530 - DNA, 18 bp, Artificial Sequence
  Description of Artificial Sequence: Synthetic oligonucleotide
taaaagaacggtaattac

SEQ ID NO: 1531 - DNA, 18 bp, Artificial Sequence
  Description of Artificial Sequence: Synthetic oligonucleotide
tgtactaaaagaacggta

SEQ ID NO: 1532 - DNA, 18 bp, Artificial Sequence
  Description of Artificial Sequence: Synthetic oligonucleotide
gcaactgtactaaaagaa

SEQ ID NO: 1533 - DNA, 18 bp, Artificial Sequence
  Description of Artificial Sequence: Synthetic oligonucleotide
cactagcaactgtactaa

SEQ ID NO: 1534 - DNA, 18 bp, Artificial Sequence
  Description of Artificial Sequence: Synthetic oligonucleotide
gacaacactagcaactgt

SEQ ID NO: 1535 - DNA, 18 bp, Artificial Sequence
  Description of Artificial Sequence: Synthetic oligonucleotide
acagtgacaacactagca

SEQ ID NO: 1536 - DNA, 18 bp, Artificial Sequence
  Description of Artificial Sequence: Synthetic oligonucleotide
gaataacagtgacaacac

SEQ ID NO: 1537 - DNA, 18 bp, Artificial Sequence
  Description of Artificial Sequence: Synthetic oligonucleotide
aacaagaataacagtgac

SEQ ID NO: 1538 - DNA, 18 bp, Artificial Sequence
  Description of Artificial Sequence: Synthetic oligonucleotide
ggaacaacaagaataaca

SEQ ID NO: 1539 - DNA, 18 bp, Artificial Sequence
  Description of Artificial Sequence: Synthetic oligonucleotide
taataggaacaacaagaa

SEQ ID NO: 1540 - DNA, 18 bp, Artificial Sequence
  Description of Artificial Sequence: Synthetic oligonucleotide
aataataataggaacaac

SEQ ID NO: 1541 - DNA, 18 bp, Artificial Sequence
  Description of Artificial Sequence: Synthetic oligonucleotide
cctgaaataataatagga

SEQ ID NO: 1542 - DNA, 18 bp, Artificial Sequence
  Description of Artificial Sequence: Synthetic oligonucleotide
cagggcctgaaataataa

SEQ ID NO: 1543 - DNA, 18 bp, Artificial Sequence
  Description of Artificial Sequence: Synthetic oligonucleotide
aagcccagggcctgaaat

SEQ ID NO: 1544 - DNA, 18 bp, Artificial Sequence
  Description of Artificial Sequence: Synthetic oligonucleotide
tggccaagcccagggcct

SEQ ID NO: 1545 - DNA, 18 bp, Artificial Sequence
  Description of Artificial Sequence: Synthetic oligonucleotide
ctgcctggccaagcccag

SEQ ID NO: 1546 - DNA, 18 bp, Artificial Sequence
  Description of Artificial Sequence: Synthetic oligonucleotide
cttccctgcctggccaag

SEQ ID NO: 1547 - DNA, 18 bp, Artificial Sequence
  Description of Artificial Sequence: Synthetic oligonucleotide
tctggcttccctgcctgg

SEQ ID NO: 1548 - DNA, 18 bp, Artificial Sequence
  Description of Artificial Sequence: Synthetic oligonucleotide
cagtgtctggcttccctg

SEQ ID NO: 1549 - DNA, 18 bp, Artificial Sequence
  Description of Artificial Sequence: Synthetic oligonucleotide
ggatccagtgtctggctt

SEQ ID NO: 1550 - DNA, 18 bp, Artificial Sequence
  Description of Artificial Sequence: Synthetic oligonucleotide
ggatgggatccagtgtct

SEQ ID NO: 1551 - DNA, 18 bp, Artificial Sequence
  Description of Artificial Sequence: Synthetic oligonucleotide
gaggaggatgggatccag

SEQ ID NO: 1552 - DNA, 18 bp, Artificial Sequence
  Description of Artificial Sequence: Synthetic oligonucleotide
ggtgggaggaggatggga

SEQ ID NO: 1553 - DNA, 18 bp, Artificial Sequence
  Description of Artificial Sequence: Synthetic oligonucleotide
gagatggtgggaggagga

SEQ ID NO: 1554 - DNA, 18 bp, Artificial Sequence
  Description of Artificial Sequence: Synthetic oligonucleotide
aagtggagatggtgggag

SEQ ID NO: 1555 - DNA, 18 bp, Artificial Sequence
  Description of Artificial Sequence: Synthetic oligonucleotide
tatggaagtggagatggt

SEQ ID NO: 1556 - DNA, 18 bp, Artificial Sequence
  Description of Artificial Sequence: Synthetic oligonucleotide
agaaatatggaagtggag

SEQ ID NO: 1557 - DNA, 18 bp, Artificial Sequence
  Description of Artificial Sequence: Synthetic oligonucleotide
aggaaagaaatatggaag

SEQ ID NO: 1558 - DNA, 18 bp, Artificial Sequence
  Description of Artificial Sequence: Synthetic oligonucleotide
gaagcaggaaagaaatat

SEQ ID NO: 1559 - DNA, 18 bp, Artificial Sequence
  Description of Artificial Sequence: Synthetic oligonucleotide
gttgggaagcaggaaaga

SEQ ID NO: 1560 - DNA, 18 bp, Artificial Sequence
  Description of Artificial Sequence: Synthetic oligonucleotide
ggatggttgggaagcagg

SEQ ID NO: 1561 - DNA, 18 bp, Artificial Sequence
  Description of Artificial Sequence: Synthetic oligonucleotide
gagagggatggttgggaa

SEQ ID NO: 1562 - DNA, 18 bp, Artificial Sequence
  Description of Artificial Sequence: Synthetic oligonucleotide
cgactgagagggatggtt

SEQ ID NO: 1563 - DNA, 18 bp, Artificial Sequence
  Description of Artificial Sequence: Synthetic oligonucleotide
gggggcgactgagaggga

SEQ ID NO: 1564 - DNA, 18 bp, Artificial Sequence
  Description of Artificial Sequence: Synthetic oligonucleotide
ggtgcgggggcgactgag

SEQ ID NO: 1565 - DNA, 18 bp, Artificial Sequence
  Description of Artificial Sequence: Synthetic oligonucleotide
ccagtggtgcgggggcga

SEQ ID NO: 1566 - DNA, 18 bp, Artificial Sequence
  Description of Artificial Sequence: Synthetic oligonucleotide
aagggccagtggtgcggg

SEQ ID NO: 1567 - DNA, 18 bp, Artificial Sequence
  Description of Artificial Sequence: Synthetic oligonucleotide
gtgggaagggccagtggt

SEQ ID NO: 1568 - DNA, 18 bp, Artificial Sequence
  Description of Artificial Sequence: Synthetic oligonucleotide
tagctgtgggaagggcca

SEQ ID NO: 1569 - DNA, 18 bp, Artificial Sequence
  Description of Artificial Sequence: Synthetic oligonucleotide
attggtagctgtgggaag

SEQ ID NO: 1570 - DNA, 18 bp, Artificial Sequence
  Description of Artificial Sequence: Synthetic oligonucleotide
tatggattggtagctgtg

SEQ ID NO: 1571 - DNA, 18 bp, Artificial Sequence
  Description of Artificial Sequence: Synthetic oligonucleotide
tgggatatggattggtag

SEQ ID NO: 1572 - DNA, 18 bp, Artificial Sequence
  Description of Artificial Sequence: Synthetic oligonucleotide
tctgggcctgagttccct

SEQ ID NO: 1573 - DNA, 18 bp, Artificial Sequence
  Description of Artificial Sequence: Synthetic oligonucleotide
aggtttctgggcctgagt

SEQ ID NO: 1574 - DNA, 18 bp, Artificial Sequence
  Description of Artificial Sequence: Synthetic oligonucleotide
ccctcaggtttctgggcc

SEQ ID NO: 1575 - DNA, 18 bp, Artificial Sequence
  Description of Artificial Sequence: Synthetic oligonucleotide
ggagcccctcaggtttct

SEQ ID NO: 1576 - DNA, 18 bp, Artificial Sequence
  Description of Artificial Sequence: Synthetic oligonucleotide
gccacggagcccctcagg

SEQ ID NO: 1577 - DNA, 18 bp, Artificial Sequence
  Description of Artificial Sequence: Synthetic oligonucleotide
gggtggccacggagcccc

SEQ ID NO: 1578 - DNA, 18 bp, Artificial Sequence
  Description of Artificial Sequence: Synthetic oligonucleotide
tgtcagggtggccacgga

SEQ ID NO: 1579 - DNA, 18 bp, Artificial Sequence
  Description of Artificial Sequence: Synthetic oligonucleotide
atctctgtcagggtggcc

SEQ ID NO: 1580 - DNA, 18 bp, Artificial Sequence
  Description of Artificial Sequence: Synthetic oligonucleotide
ttcgcatctctgtcaggg

SEQ ID NO: 1581 - DNA, 18 bp, Artificial Sequence
  Description of Artificial Sequence: Synthetic oligonucleotide
agtggttcgcatctctgt

SEQ ID NO: 1582 - DNA, 18 bp, Artificial Sequence
  Description of Artificial Sequence: Synthetic oligonucleotide
cctgcagtggttcgcatc

SEQ ID NO: 1583 - DNA, 18 bp, Artificial Sequence
  Description of Artificial Sequence: Synthetic oligonucleotide
cgtggcctgcagtggttc

SEQ ID NO: 1584 - DNA, 18 bp, Artificial Sequence
  Description of Artificial Sequence: Synthetic oligonucleotide
aacaccgtggcctgcagt

SEQ ID NO: 1585 - DNA, 18 bp, Artificial Sequence
  Description of Artificial Sequence: Synthetic oligonucleotide
acacgaacaccgtggcct

SEQ ID NO: 1586 - DNA, 18 bp, Artificial Sequence
  Description of Artificial Sequence: Synthetic oligonucleotide
agcacacacgaacaccgt

SEQ ID NO: 1587 - DNA, 18 bp, Artificial Sequence
  Description of Artificial Sequence: Synthetic oligonucleotide
acacgagcacacacgaac

SEQ ID NO: 1588 - DNA, 18 bp, Artificial Sequence
  Description of Artificial Sequence: Synthetic oligonucleotide
tgattacacgagcacaca

SEQ ID NO: 1589 - DNA, 18 bp, Artificial Sequence
  Description of Artificial Sequence: Synthetic oligonucleotide
agaagtgattacacgagc

SEQ ID NO: 1590 - DNA, 18 bp, Artificial Sequence
  Description of Artificial Sequence: Synthetic oligonucleotide
gaatcagaagtgattaca

SEQ ID NO: 1591 - DNA, 18 bp, Artificial Sequence
  Description of Artificial Sequence: Synthetic oligonucleotide
tgcaagaatcagaagtga

SEQ ID NO: 1592 - DNA, 18 bp, Artificial Sequence
  Description of Artificial Sequence: Synthetic oligonucleotide
catgctgcaagaatcaga

SEQ ID NO: 1593 - DNA, 18 bp, Artificial Sequence
  Description of Artificial Sequence: Synthetic oligonucleotide
gcggccatgctgcaagaa

SEQ ID NO: 1594 - DNA, 18 bp, Artificial Sequence
  Description of Artificial Sequence: Synthetic oligonucleotide
tccaggcggccatgctgc

SEQ ID NO: 1595 - DNA, 18 bp, Artificial Sequence
  Description of Artificial Sequence: Synthetic oligonucleotide
cgccctccaggcggccat

SEQ ID NO: 1596 - DNA, 18 bp, Artificial Sequence
  Description of Artificial Sequence: Synthetic oligonucleotide
gcgggcgccctccaggcg

SEQ ID NO: 1597 - DNA, 18 bp, Artificial Sequence
  Description of Artificial Sequence: Synthetic oligonucleotide
gtggggcgggcgccctcc

SEQ ID NO: 1598 - DNA, 18 bp, Artificial Sequence
  Description of Artificial Sequence: Synthetic oligonucleotide
tctgcgtggggcgggcgc

SEQ ID NO: 1599 - DNA, 18 bp, Artificial Sequence
  Description of Artificial Sequence: Synthetic oligonucleotide
tctcctctgcgtggggcg

SEQ ID NO: 1600 - DNA, 18 bp, Artificial Sequence
  Description of Artificial Sequence: Synthetic oligonucleotide
cctcatctcctctgcgtg

SEQ ID NO: 1601 - DNA, 18 bp, Artificial Sequence
  Description of Artificial Sequence: Synthetic oligonucleotide
tacggcctcatctcctct

SEQ ID NO: 1602 - DNA, 18 bp, Artificial Sequence
  Description of Artificial Sequence: Synthetic oligonucleotide
tgcgttacggcctcatct

SEQ ID NO: 1603 - DNA, 18 bp, Artificial Sequence
  Description of Artificial Sequence: Synthetic oligonucleotide
gaacgtgcgttacggcct

SEQ ID NO: 1604 - DNA, 18 bp, Artificial Sequence
  Description of Artificial Sequence: Synthetic oligonucleotide
agggcatgcgtttttgag

SEQ ID NO: 1605 - DNA, 18 bp, Artificial Sequence
  Description of Artificial Sequence: Synthetic oligonucleotide
aacacagggcatgcgttt

SEQ ID NO: 1606 - DNA, 18 bp, Artificial Sequence
  Description of Artificial Sequence: Synthetic oligonucleotide
gtgggaacacagggcatg

SEQ ID NO: 1607 - DNA, 18 bp, Artificial Sequence
  Description of Artificial Sequence: Synthetic oligonucleotide
atacagtgggaacacagg

SEQ ID NO: 1608 - DNA, 18 bp, Artificial Sequence
  Description of Artificial Sequence: Synthetic oligonucleotide
gagaaatacagtgggaac

SEQ ID NO: 1609 - DNA, 18 bp, Artificial Sequence
  Description of Artificial Sequence: Synthetic oligonucleotide
acagtgagaaatacagtg

SEQ ID NO: 1610 - DNA, 18 bp, Artificial Sequence
  Description of Artificial Sequence: Synthetic oligonucleotide
gattaacagtgagaaata

SEQ ID NO: 1611 - DNA, 18 bp, Artificial Sequence
  Description of Artificial Sequence: Synthetic oligonucleotide
aaagagattaacagtgag

SEQ ID NO: 1612 - DNA, 18 bp, Artificial Sequence
  Description of Artificial Sequence: Synthetic oligonucleotide
actaaaaagagattaaca

SEQ ID NO: 1613 - DNA, 18 bp, Artificial Sequence
  Description of Artificial Sequence: Synthetic oligonucleotide
aaaaaactaaaaagagat

SEQ ID NO: 1614 - DNA, 18 bp, Artificial Sequence
  Description of Artificial Sequence: Synthetic oligonucleotide
agaagaaaaaactaaaaa

SEQ ID NO: 1615 - DNA, 18 bp, Artificial Sequence
  Description of Artificial Sequence: Synthetic oligonucleotide
ggtgaagaagaaaaaact

SEQ ID NO: 1616 - DNA, 18 bp, Artificial Sequence
  Description of Artificial Sequence: Synthetic oligonucleotide
taagaggtgaagaagaaa

SEQ ID NO: 1617 - DNA, 18 bp, Artificial Sequence
  Description of Artificial Sequence: Synthetic oligonucleotide
gcctgtaagaggtgaaga

SEQ ID NO: 1618 - DNA, 18 bp, Artificial Sequence
  Description of Artificial Sequence: Synthetic oligonucleotide
tagaagcctgtaagaggt

SEQ ID NO: 1619 - DNA, 18 bp, Artificial Sequence
  Description of Artificial Sequence: Synthetic oligonucleotide
gaagatagaagcctgtaa

SEQ ID NO: 1620 - DNA, 18 bp, Artificial Sequence
  Description of Artificial Sequence: Synthetic oligonucleotide
agattgaagatagaagcc

SEQ ID NO: 1621 - DNA, 18 bp, Artificial Sequence
  Description of Artificial Sequence: Synthetic oligonucleotide
aaaggagattgaagatag

SEQ ID NO: 1622 - DNA, 18 bp, Artificial Sequence
  Description of Artificial Sequence: Synthetic oligonucleotide
gaaggaaaggagattgaa

SEQ ID NO: 1623 - DNA, 18 bp, Artificial Sequence
  Description of Artificial Sequence: Synthetic oligonucleotide
gcaaggaaggaaaggaga

SEQ ID NO: 1624 - DNA, 18 bp, Artificial Sequence
  Description of Artificial Sequence: Synthetic oligonucleotide
aactagcaaggaaggaaa

SEQ ID NO: 1625 - DNA, 18 bp, Artificial Sequence
  Description of Artificial Sequence: Synthetic oligonucleotide
gtttgaactagcaaggaa

SEQ ID NO: 1626 - DNA, 18 bp, Artificial Sequence
  Description of Artificial Sequence: Synthetic oligonucleotide
ttacagtttgaactagca

SEQ ID NO: 1627 - DNA, 18 bp, Artificial Sequence
  Description of Artificial Sequence: Synthetic oligonucleotide
gtcagttacagtttgaac

SEQ ID NO: 1628 - DNA, 18 bp, Artificial Sequence
  Description of Artificial Sequence: Synthetic oligonucleotide
ccatcgtcagttacagtt

SEQ ID NO: 1629 - DNA, 18 bp, Artificial Sequence
  Description of Artificial Sequence: Synthetic oligonucleotide
aaaacccatcgtcagtta

SEQ ID NO: 1630 - DNA, 18 bp, Artificial Sequence
  Description of Artificial Sequence: Synthetic oligonucleotide
agaagaaaacccatcgtc

SEQ ID NO: 1631 - DNA, 18 bp, Artificial Sequence
  Description of Artificial Sequence: Synthetic oligonucleotide
agtcgagaagaaaaccca

SEQ ID NO: 1632 - DNA, 18 bp, Artificial Sequence
  Description of Artificial Sequence: Synthetic oligonucleotide
aagccagtcgagaagaaa

SEQ ID NO: 1633 - DNA, 18 bp, Artificial Sequence
  Description of Artificial Sequence: Synthetic oligonucleotide
aaatgaagccagtcgaga

SEQ ID NO: 1634 - DNA, 18 bp, Artificial Sequence
  Description of Artificial Sequence: Synthetic oligonucleotide
gacctggggaggtcagcc

SEQ ID NO: 1635 - DNA, 18 bp, Artificial Sequence
  Description of Artificial Sequence: Synthetic oligonucleotide
ccccagacctggggaggt

SEQ ID NO: 1636 - DNA, 18 bp, Artificial Sequence
  Description of Artificial Sequence: Synthetic oligonucleotide
ctcaaccccagacctggg

SEQ ID NO: 1637 - DNA, 18 bp, Artificial Sequence
  Description of Artificial Sequence: Synthetic oligonucleotide
tagacctcaaccccagac

SEQ ID NO: 1638 - DNA, 18 bp, Artificial Sequence
  Description of Artificial Sequence: Synthetic oligonucleotide
attcctagacctcaaccc

SEQ ID NO: 1639 - DNA, 18 bp, Artificial Sequence
  Description of Artificial Sequence: Synthetic oligonucleotide
tacccattcctagacctc

SEQ ID NO: 1640 - DNA, 18 bp, Artificial Sequence
  Description of Artificial Sequence: Synthetic oligonucleotide
caaaatacccattcctag

SEQ ID NO: 1641 - DNA, 18 bp, Artificial Sequence
  Description of Artificial Sequence: Synthetic oligonucleotide
tctcgcaaaatacccatt

SEQ ID NO: 1642 - DNA, 18 bp, Artificial Sequence
  Description of Artificial Sequence: Synthetic oligonucleotide
gaggctctcgcaaaatac

SEQ ID NO: 1643 - DNA, 18 bp, Artificial Sequence
  Description of Artificial Sequence: Synthetic oligonucleotide
gcctggaggctctcgcaa

SEQ ID NO: 1644 - DNA, 18 bp, Artificial Sequence
  Description of Artificial Sequence: Synthetic oligonucleotide
tggctgcctggaggctct

SEQ ID NO: 1645 - DNA, 18 bp, Artificial Sequence
  Description of Artificial Sequence: Synthetic oligonucleotide
gcacatggctgcctggag

SEQ ID NO: 1646 - DNA, 18 bp, Artificial Sequence
  Description of Artificial Sequence: Synthetic oligonucleotide
gcggggcacatggctgcc

SEQ ID NO: 1647 - DNA, 18 bp, Artificial Sequence
  Description of Artificial Sequence: Synthetic oligonucleotide
ggacagcggggcacatgg

SEQ ID NO: 1648 - DNA, 18 bp, Artificial Sequence
  Description of Artificial Sequence: Synthetic oligonucleotide
accatggacagcggggca

SEQ ID NO: 1649 - DNA, 18 bp, Artificial Sequence
  Description of Artificial Sequence: Synthetic oligonucleotide
tcagcaccatggacagcg

SEQ ID NO: 1650 - DNA, 18 bp, Artificial Sequence
  Description of Artificial Sequence: Synthetic oligonucleotide
gcatttcagcaccatgga

SEQ ID NO: 1651 - DNA, 18 bp, Artificial Sequence
  Description of Artificial Sequence: Synthetic oligonucleotide
agcacgcatttcagcacc

SEQ ID NO: 1652 - DNA, 18 bp, Artificial Sequence
  Description of Artificial Sequence: Synthetic oligonucleotide
caaggagcacgcatttca

SEQ ID NO: 1653 - DNA, 18 bp, Artificial Sequence
  Description of Artificial Sequence: Synthetic oligonucleotide
gggatcaaggagcacgca

SEQ ID NO: 1654 - DNA, 18 bp, Artificial Sequence
  Description of Artificial Sequence: Synthetic oligonucleotide
gcctagggatcaaggagc

SEQ ID NO: 1655 - DNA, 18 bp, Artificial Sequence
  Description of Artificial Sequence: Synthetic oligonucleotide
agggagcctagggatcaa

SEQ ID NO: 1656 - DNA, 18 bp, Artificial Sequence
  Description of Artificial Sequence: Synthetic oligonucleotide
tgagcagggagcctaggg

SEQ ID NO: 1657 - DNA, 18 bp, Artificial Sequence
  Description of Artificial Sequence: Synthetic oligonucleotide
tgggttgagcagggagcc

SEQ ID NO: 1658 - DNA, 18 bp, Artificial Sequence
  Description of Artificial Sequence: Synthetic oligonucleotide
tggcttgggttgagcagg

SEQ ID NO: 1659 - DNA, 18 bp, Artificial Sequence
  Description of Artificial Sequence: Synthetic oligonucleotide
ggaggtggcttgggttga

SEQ ID NO: 1660 - DNA, 18 bp, Artificial Sequence
  Description of Artificial Sequence: Synthetic oligonucleotide
aaagtggaggtggcttgg

SEQ ID NO: 1661 - DNA, 18 bp, Artificial Sequence
  Description of Artificial Sequence: Synthetic oligonucleotide
gaggcaaagtggaggtgg

SEQ ID NO: 1662 - DNA, 18 bp, Artificial Sequence
  Description of Artificial Sequence: Synthetic oligonucleotide
atgaggaggcaaagtgga

SEQ ID NO: 1663 - DNA, 18 bp, Artificial Sequence
  Description of Artificial Sequence: Synthetic oligonucleotide
agactatgaggaggcaaa

SEQ ID NO: 1664 - DNA, 18 bp, Artificial Sequence
  Description of Artificial Sequence: Synthetic oligonucleotide
tttttatttttttgagac

SEQ ID NO: 1665 - DNA, 18 bp, Artificial Sequence
  Description of Artificial Sequence: Synthetic oligonucleotide
cccgctttttattttttt

SEQ ID NO: 1666 - DNA, 18 bp, Artificial Sequence
  Description of Artificial Sequence: Synthetic oligonucleotide
ctcctcccgctttttatt

SEQ ID NO: 1667 - DNA, 18 bp, Artificial Sequence
  Description of Artificial Sequence: Synthetic oligonucleotide
tttgcctcctcccgcttt

SEQ ID NO: 1668 - DNA, 18 bp, Artificial Sequence
  Description of Artificial Sequence: Synthetic oligonucleotide
ctacctttgcctcctccc

SEQ ID NO: 1669 - DNA, 18 bp, Artificial Sequence
  Description of Artificial Sequence: Synthetic oligonucleotide
ggcttctacctttgcctc

SEQ ID NO: 1670 - DNA, 18 bp, Artificial Sequence
  Description of Artificial Sequence: Synthetic oligonucleotide
aggagggcttctaccttt

SEQ ID NO: 1671 - DNA, 18 bp, Artificial Sequence
  Description of Artificial Sequence: Synthetic oligonucleotide
tccccaggagggcttcta

SEQ ID NO: 1672 - DNA, 18 bp, Artificial Sequence
  Description of Artificial Sequence: Synthetic oligonucleotide
tgcagtccccaggagggc

SEQ ID NO: 1673 - DNA, 18 bp, Artificial Sequence
  Description of Artificial Sequence: Synthetic oligonucleotide
agacctgcagtccccagg

SEQ ID NO: 1674 - DNA, 18 bp, Artificial Sequence
  Description of Artificial Sequence: Synthetic oligonucleotide
gtcccagacctgcagtcc

SEQ ID NO: 1675 - DNA, 18 bp, Artificial Sequence
  Description of Artificial Sequence: Synthetic oligonucleotide
cagctgtcccagacctgc

SEQ ID NO: 1676 - DNA, 18 bp, Artificial Sequence
  Description of Artificial Sequence: Synthetic oligonucleotide
ccccacagctgtcccaga

SEQ ID NO: 1677 - DNA, 18 bp, Artificial Sequence
  Description of Artificial Sequence: Synthetic oligonucleotide
tagggccccacagctgtc

SEQ ID NO: 1678 - DNA, 18 bp, Artificial Sequence
  Description of Artificial Sequence: Synthetic oligonucleotide
ccagctagggccccacag

SEQ ID NO: 1679 - DNA, 18 bp, Artificial Sequence
  Description of Artificial Sequence: Synthetic oligonucleotide
aggagccagctagggccc

SEQ ID NO: 1680 - DNA, 18 bp, Artificial Sequence
  Description of Artificial Sequence: Synthetic oligonucleotide
gagggaggagccagctag

SEQ ID NO: 1681 - DNA, 18 bp, Artificial Sequence
  Description of Artificial Sequence: Synthetic oligonucleotide
cggcagagggaggagcca

SEQ ID NO: 1682 - DNA, 18 bp, Artificial Sequence
  Description of Artificial Sequence: Synthetic oligonucleotide
gcaggcggcagagggagg

SEQ ID NO: 1683 - DNA, 18 bp, Artificial Sequence
  Description of Artificial Sequence: Synthetic oligonucleotide
gtggagcaggcggcagag

SEQ ID NO: 1684 - DNA, 18 bp, Artificial Sequence
  Description of Artificial Sequence: Synthetic oligonucleotide
gagctgtggagcaggcgg

SEQ ID NO: 1685 - DNA, 18 bp, Artificial Sequence
  Description of Artificial Sequence: Synthetic oligonucleotide
gctcggagctgtggagca

SEQ ID NO: 1686 - DNA, 18 bp, Artificial Sequence
  Description of Artificial Sequence: Synthetic oligonucleotide
acacggctcggagctgtg

SEQ ID NO: 1687 - DNA, 18 bp, Artificial Sequence
  Description of Artificial Sequence: Synthetic oligonucleotide
ttcggacacggctcggag

SEQ ID NO: 1688 - DNA, 18 bp, Artificial Sequence
  Description of Artificial Sequence: Synthetic oligonucleotide
agcggttcggacacggct

SEQ ID NO: 1689 - DNA, 18 bp, Artificial Sequence
  Description of Artificial Sequence: Synthetic oligonucleotide
tgcctgcctaggccttcc

SEQ ID NO: 1690 - DNA, 18 bp, Artificial Sequence
  Description of Artificial Sequence: Synthetic oligonucleotide
cccactgcctgcctaggc

SEQ ID NO: 1691 - DNA, 18 bp, Artificial Sequence
  Description of Artificial Sequence: Synthetic oligonucleotide
ttggccccactgcctgcc

SEQ ID NO: 1692 - DNA, 18 bp, Artificial Sequence
  Description of Artificial Sequence: Synthetic oligonucleotide
ggcctttggccccactgc

SEQ ID NO: 1693 - DNA, 18 bp, Artificial Sequence
  Description of Artificial Sequence: Synthetic oligonucleotide
atcctggcctttggcccc

SEQ ID NO: 1694 - DNA, 18 bp, Artificial Sequence
  Description of Artificial Sequence: Synthetic oligonucleotide
atagcatcctggcctttg

SEQ ID NO: 1695 - DNA, 18 bp, Artificial Sequence
  Description of Artificial Sequence: Synthetic oligonucleotide
aatggatagcatcctggc

SEQ ID NO: 1696 - DNA, 18 bp, Artificial Sequence
  Description of Artificial Sequence: Synthetic oligonucleotide
aatataatggatagcatc

SEQ ID NO: 1697 - DNA, 18 bp, Artificial Sequence
  Description of Artificial Sequence: Synthetic oligonucleotide
ttgataatataatggata

SEQ ID NO: 1698 - DNA, 18 bp, Artificial Sequence
  Description of Artificial Sequence: Synthetic oligonucleotide
actgtttgataatataat

SEQ ID NO: 1699 - DNA, 18 bp, Artificial Sequence
  Description of Artificial Sequence: Synthetic oligonucleotide
gtctcactgtttgataat

SEQ ID NO: 1700 - DNA, 18 bp, Artificial Sequence
  Description of Artificial Sequence: Synthetic oligonucleotide
aacaggtctcactgtttg

SEQ ID NO: 1701 - DNA, 18 bp, Artificial Sequence
  Description of Artificial Sequence: Synthetic oligonucleotide
gggtaaacaggtctcact

SEQ ID NO: 1702 - DNA, 18 bp, Artificial Sequence
  Description of Artificial Sequence: Synthetic oligonucleotide
tgagtgggtaaacaggtc

SEQ ID NO: 1703 - DNA, 18 bp, Artificial Sequence
  Description of Artificial Sequence: Synthetic oligonucleotide
ctgtctgagtgggtaaac

SEQ ID NO: 1704 - DNA, 18 bp, Artificial Sequence
  Description of Artificial Sequence: Synthetic oligonucleotide
agtgtctgtctgagtggg

SEQ ID NO: 1705 - DNA, 18 bp, Artificial Sequence
  Description of Artificial Sequence: Synthetic oligonucleotide
aatgaagtgtctgtctga

SEQ ID NO: 1706 - DNA, 18 bp, Artificial Sequence
  Description of Artificial Sequence: Synthetic oligonucleotide
cagaaaatgaagtgtctg

SEQ ID NO: 1707 - DNA, 18 bp, Artificial Sequence
  Description of Artificial Sequence: Synthetic oligonucleotide
caggccagaaaatgaagt

SEQ ID NO: 1708 - DNA, 18 bp, Artificial Sequence
  Description of Artificial Sequence: Synthetic oligonucleotide
ctggacaggccagaaaat

SEQ ID NO: 1709 - DNA, 18 bp, Artificial Sequence
  Description of Artificial Sequence: Synthetic oligonucleotide
tggacctggacaggccag

SEQ ID NO: 1710 - DNA, 18 bp, Artificial Sequence
  Description of Artificial Sequence: Synthetic oligonucleotide
cactctggacctggacag

SEQ ID NO: 1711 - DNA, 18 bp, Artificial Sequence
  Description of Artificial Sequence: Synthetic oligonucleotide
gtgtccactctggacctg

SEQ ID NO: 1712 - DNA, 18 bp, Artificial Sequence
  Description of Artificial Sequence: Synthetic oligonucleotide
gtccggtgtccactctgg

SEQ ID NO: 1713 - DNA, 18 bp, Artificial Sequence
  Description of Artificial Sequence: Synthetic oligonucleotide
aaggtgtccggtgtccac

SEQ ID NO: 1714 - DNA, 18 bp, Artificial Sequence
  Description of Artificial Sequence: Synthetic oligonucleotide
tggccaaggtgtccggtg

SEQ ID NO: 1715 - DNA, 18 bp, Artificial Sequence
  Description of Artificial Sequence: Synthetic oligonucleotide
caacttggccaaggtgtc

SEQ ID NO: 1716 - DNA, 18 bp, Artificial Sequence
  Description of Artificial Sequence: Synthetic oligonucleotide
ccattcaacttggccaag

SEQ ID NO: 1717 - DNA, 18 bp, Artificial Sequence
  Description of Artificial Sequence: Synthetic oligonucleotide
gtgcaccattcaacttgg

SEQ ID NO: 1718 - DNA, 18 bp, Artificial Sequence
  Description of Artificial Sequence: Synthetic oligonucleotide
gaactgtgcaccattcaa

SEQ ID NO: 1719 - DNA, 18 bp, Artificial Sequence
  Description of Artificial Sequence: Synthetic oligonucleotide
gctcagaactgtgcacca

SEQ ID NO: 1720 - DNA, 18 bp, Artificial Sequence
  Description of Artificial Sequence: Synthetic oligonucleotide
ggcctgctcagaactgtg

SEQ ID NO: 1721 - DNA, 18 bp, Artificial Sequence
  Description of Artificial Sequence: Synthetic oligonucleotide
agtcaggcctgctcagaa

SEQ ID NO: 1722 - DNA, 18 bp, Artificial Sequence
  Description of Artificial Sequence: Synthetic oligonucleotide
acgtgagtcaggcctgct

SEQ ID NO: 1723 - DNA, 18 bp, Artificial Sequence
  Description of Artificial Sequence: Synthetic oligonucleotide
aggaaacgtgagtcaggc

SEQ ID NO: 1724 - DNA, 18 bp, Artificial Sequence
  Description of Artificial Sequence: Synthetic oligonucleotide
caataaggaaacgtgagt

SEQ ID NO: 1725 - DNA, 18 bp, Artificial Sequence
  Description of Artificial Sequence: Synthetic oligonucleotide
tgctcttaagtaacattc

SEQ ID NO: 1726 - DNA, 18 bp, Artificial Sequence
  Description of Artificial Sequence: Synthetic oligonucleotide
acctatgctcttaagtaa

SEQ ID NO: 1727 - DNA, 18 bp, Artificial Sequence
  Description of Artificial Sequence: Synthetic oligonucleotide
acctcacctatgctctta

SEQ ID NO: 1728 - DNA, 18 bp, Artificial Sequence
  Description of Artificial Sequence: Synthetic oligonucleotide
ttctcacctcacctatgc

SEQ ID NO: 1729 - DNA, 18 bp, Artificial Sequence
  Description of Artificial Sequence: Synthetic oligonucleotide
cccttttctcacctcacc

SEQ ID NO: 1730 - DNA, 18 bp, Artificial Sequence
  Description of Artificial Sequence: Synthetic oligonucleotide
acattcccttttctcacc

SEQ ID NO: 1731 - DNA, 18 bp, Artificial Sequence
  Description of Artificial Sequence: Synthetic oligonucleotide
tagtcacattcccttttc

SEQ ID NO: 1732 - DNA, 18 bp, Artificial Sequence
  Description of Artificial Sequence: Synthetic oligonucleotide
aacactagtcacattccc

SEQ ID NO: 1733 - DNA, 18 bp, Artificial Sequence
  Description of Artificial Sequence: Synthetic oligonucleotide
actaaaacactagtcaca

SEQ ID NO: 1734 - DNA, 18 bp, Artificial Sequence
  Description of Artificial Sequence: Synthetic oligonucleotide
aaaatactaaaacactag

SEQ ID NO: 1735 - DNA, 18 bp, Artificial Sequence
  Description of Artificial Sequence: Synthetic oligonucleotide
ccaagaaaatactaaaac

SEQ ID NO: 1736 - DNA, 18 bp, Artificial Sequence
  Description of Artificial Sequence: Synthetic oligonucleotide
ccacaccaagaaaatact

SEQ ID NO: 1737 - DNA, 18 bp, Artificial Sequence
  Description of Artificial Sequence: Synthetic oligonucleotide
tcatcccacaccaagaaa

SEQ ID NO: 1738 - DNA, 18 bp, Artificial Sequence
  Description of Artificial Sequence: Synthetic oligonucleotide
atacttcatcccacacca

SEQ ID NO: 1739 - DNA, 18 bp, Artificial Sequence
  Description of Artificial Sequence: Synthetic oligonucleotide
gaattatacttcatccca

SEQ ID NO: 1740 - DNA, 18 bp, Artificial Sequence
  Description of Artificial Sequence: Synthetic oligonucleotide
aaaaagaattatacttca

SEQ ID NO: 1741 - DNA, 18 bp, Artificial Sequence
  Description of Artificial Sequence: Synthetic oligonucleotide
aaaaaaaaaagaattata

SEQ ID NO: 1742 - DNA, 18 bp, Artificial Sequence
  Description of Artificial Sequence: Synthetic oligonucleotide
gagaaaaaaaaaaaagaa

SEQ ID NO: 1743 - DNA, 18 bp, Artificial Sequence
  Description of Artificial Sequence: Synthetic oligonucleotide
ttgttgagaaaaaaaaaa

SEQ ID NO: 1744 - DNA, 18 bp, Artificial Sequence
  Description of Artificial Sequence: Synthetic oligonucleotide
ctgctttgttgagaaaaa

SEQ ID NO: 1745 - DNA, 18 bp, Artificial Sequence
  Description of Artificial Sequence: Synthetic oligonucleotide
ttttactgctttgttgag

SEQ ID NO: 1746 - DNA, 18 bp, Artificial Sequence
  Description of Artificial Sequence: Synthetic oligonucleotide
tctagttttactgctttg

SEQ ID NO: 1747 - DNA, 18 bp, Artificial Sequence
  Description of Artificial Sequence: Synthetic oligonucleotide
ttctttctagttttactg

SEQ ID NO: 1748 - DNA, 18 bp, Artificial Sequence
  Description of Artificial Sequence: Synthetic oligonucleotide
tctccttctttctagttt

SEQ ID NO: 1749 - DNA, 18 bp, Artificial Sequence
  Description of Artificial Sequence: Synthetic oligonucleotide
agagttctccttctttct

SEQ ID NO: 1750 - DNA, 18 bp, Artificial Sequence
  Description of Artificial Sequence: Synthetic oligonucleotide
agggaagagttctccttc

SEQ ID NO: 1751 - DNA, 18 bp, Artificial Sequence
  Description of Artificial Sequence: Synthetic oligonucleotide
tcttgagggaagagttct

SEQ ID NO: 1752 - DNA, 18 bp, Artificial Sequence
  Description of Artificial Sequence: Synthetic oligonucleotide
gccattcttgagggaaga

SEQ ID NO: 1753 - DNA, 18 bp, Artificial Sequence
  Description of Artificial Sequence: Synthetic oligonucleotide
gtacagccattcttgagg

SEQ ID NO: 1754 - DNA, 18 bp, Artificial Sequence
  Description of Artificial Sequence: Synthetic oligonucleotide
tgaaggtacagccattct

SEQ ID NO: 1755 - DNA, 18 bp, Artificial Sequence
  Description of Artificial Sequence: Synthetic oligonucleotide
agatatgaaggtacagcc

SEQ ID NO: 1756 - DNA, 18 bp, Artificial Sequence
  Description of Artificial Sequence: Synthetic oligonucleotide
cctctagatatgaaggta

SEQ ID NO: 1757 - DNA, 18 bp, Artificial Sequence
  Description of Artificial Sequence: Synthetic oligonucleotide
atgtgcctctagatatga

SEQ ID NO: 1758 - DNA, 18 bp, Artificial Sequence
  Description of Artificial Sequence: Synthetic oligonucleotide
ttttaatgtgcctctaga

SEQ ID NO: 1759 - DNA, 18 bp, Artificial Sequence
  Description of Artificial Sequence: Synthetic oligonucleotide
cttttttttaatgtgcct

SEQ ID NO: 1760 - DNA, 18 bp, Artificial Sequence
  Description of Artificial Sequence: Synthetic oligonucleotide
acgttcttttttttaatg

SEQ ID NO: 1761 - DNA, 18 bp, Artificial Sequence
  Description of Artificial Sequence: Synthetic oligonucleotide
tacagacgttcttttttt

SEQ ID NO: 1762 - DNA, 18 bp, Artificial Sequence
  Description of Artificial Sequence: Synthetic oligonucleotide
taaggtacagacgttctt

SEQ ID NO: 1763 - DNA, 18 bp, Artificial Sequence
  Description of Artificial Sequence: Synthetic oligonucleotide
atttttaaggtacagacg

SEQ ID NO: 1764 - DNA, 18 bp, Artificial Sequence
  Description of Artificial Sequence: Synthetic oligonucleotide
cctccatttttaaggtac

SEQ ID NO: 1765 - DNA, 18 bp, Artificial Sequence
  Description of Artificial Sequence: Synthetic oligonucleotide
aatgacctccatttttaa

SEQ ID NO: 1766 - DNA, 18 bp, Artificial Sequence
  Description of Artificial Sequence: Synthetic oligonucleotide
aatgaaatgacctccatt

SEQ ID NO: 1767 - DNA, 18 bp, Artificial Sequence
  Description of Artificial Sequence: Synthetic oligonucleotide
tgtaataaccggtagccc

SEQ ID NO: 1768 - DNA, 18 bp, Artificial Sequence
  Description of Artificial Sequence: Synthetic oligonucleotide
tctcttgtaataaccggt

SEQ ID NO: 1769 - DNA, 18 bp, Artificial Sequence
  Description of Artificial Sequence: Synthetic oligonucleotide
aaaaatctcttgtaataa

SEQ ID NO: 1770 - DNA, 18 bp, Artificial Sequence
  Description of Artificial Sequence: Synthetic oligonucleotide
gtcataaaaatctcttgt

SEQ ID NO: 1771 - DNA, 18 bp, Artificial Sequence
  Description of Artificial Sequence: Synthetic oligonucleotide
caggagtcataaaaatct

SEQ ID NO: 1772 - DNA, 18 bp, Artificial Sequence
  Description of Artificial Sequence: Synthetic oligonucleotide
cacagcaggagtcataaa

SEQ ID NO: 1773 - DNA, 18 bp, Artificial Sequence
  Description of Artificial Sequence: Synthetic oligonucleotide
acccccacagcaggagtc

SEQ ID NO: 1774 - DNA, 18 bp, Artificial Sequence
  Description of Artificial Sequence: Synthetic oligonucleotide
agggcacccccacagcag

SEQ ID NO: 1775 - DNA, 18 bp, Artificial Sequence
  Description of Artificial Sequence: Synthetic oligonucleotide
tagaaagggcacccccac

SEQ ID NO: 1776 - DNA, 18 bp, Artificial Sequence
  Description of Artificial Sequence: Synthetic oligonucleotide
ccgggtagaaagggcacc

SEQ ID NO: 1777 - DNA, 18 bp, Artificial Sequence
  Description of Artificial Sequence: Synthetic oligonucleotide
ctcagccgggtagaaagg

SEQ ID NO: 1778 - DNA, 18 bp, Artificial Sequence
  Description of Artificial Sequence: Synthetic oligonucleotide
ccaagctcagccgggtag

SEQ ID NO: 1779 - DNA, 18 bp, Artificial Sequence
  Description of Artificial Sequence: Synthetic oligonucleotide
tcccaccaagctcagccg

SEQ ID NO: 1780 - DNA, 18 bp, Artificial Sequence
  Description of Artificial Sequence: Synthetic oligonucleotide
ttggctcccaccaagctc

SEQ ID NO: 1781 - DNA, 18 bp, Artificial Sequence
  Description of Artificial Sequence: Synthetic oligonucleotide
cagccttggctcccacca

SEQ ID NO: 1782 - DNA, 18 bp, Artificial Sequence
  Description of Artificial Sequence: Synthetic oligonucleotide
cgactcagccttggctcc

SEQ ID NO: 1783 - DNA, 18 bp, Artificial Sequence
  Description of Artificial Sequence: Synthetic oligonucleotide
acatccgactcagccttg

SEQ ID NO: 1784 - DNA, 18 bp, Artificial Sequence
  Description of Artificial Sequence: Synthetic oligonucleotide
aagatacatccgactcag

SEQ ID NO: 1785 - DNA, 18 bp, Artificial Sequence
  Description of Artificial Sequence: Synthetic oligonucleotide
atataaagatacatccga

SEQ ID NO: 1786 - DNA, 18 bp, Artificial Sequence
  Description of Artificial Sequence: Synthetic oligonucleotide
tggggatataaagataca

SEQ ID NO: 1787 - DNA, 18 bp, Artificial Sequence
  Description of Artificial Sequence: Synthetic oligonucleotide
agaactggggatataaag

SEQ ID NO: 1788 - DNA, 18 bp, Artificial Sequence
  Description of Artificial Sequence: Synthetic oligonucleotide
caccgagaactggggata

SEQ ID NO: 1789 - DNA, 18 bp, Artificial Sequence
  Description of Artificial Sequence: Synthetic oligonucleotide
agttccaccgagaactgg

SEQ ID NO: 1790 - DNA, 18 bp, Artificial Sequence
  Description of Artificial Sequence: Synthetic oligonucleotide
ttttaagttccaccgaga

SEQ ID NO: 1791 - DNA, 18 bp, Artificial Sequence
  Description of Artificial Sequence: Synthetic oligonucleotide
cagcattttaagttccac

SEQ ID NO: 1792 - DNA, 18 bp, Artificial Sequence
  Description of Artificial Sequence: Synthetic oligonucleotide
tctcacagcattttaagt

SEQ ID NO: 1793 - DNA, 18 bp, Artificial Sequence
  Description of Artificial Sequence: Synthetic oligonucleotide
tggtgtctcacagcattt

SEQ ID NO: 1794 - DNA, 18 bp, Artificial Sequence
  Description of Artificial Sequence: Synthetic oligonucleotide
ctgtctggtgtctcacag

SEQ ID NO: 1795 - DNA, 18 bp, Artificial Sequence
  Description of Artificial Sequence: Synthetic oligonucleotide
tctgtctgtctggtgtct

SEQ ID NO: 1796 - DNA, 18 bp, Artificial Sequence
  Description of Artificial Sequence: Synthetic oligonucleotide
cagtatctgtctgtctgg

SEQ ID NO: 1797 - DNA, 18 bp, Artificial Sequence
  Description of Artificial Sequence: Synthetic oligonucleotide
gttcacagtatctgtctg

SEQ ID NO: 1798 - DNA, 18 bp, Artificial Sequence
  Description of Artificial Sequence: Synthetic oligonucleotide
tccaagttcacagtatct

SEQ ID NO: 1799 - DNA, 18 bp, Artificial Sequence
  Description of Artificial Sequence: Synthetic oligonucleotide
agagctccaagttcacag

SEQ ID NO: 1800 - DNA, 18 bp, Artificial Sequence
  Description of Artificial Sequence: Synthetic oligonucleotide
attagagagctccaagtt

SEQ ID NO: 1801 - DNA, 18 bp, Artificial Sequence
  Description of Artificial Sequence: Synthetic oligonucleotide
ccttcattagagagctcc

SEQ ID NO: 1802 - DNA, 18 bp, Artificial Sequence
  Description of Artificial Sequence: Synthetic oligonucleotide
gtatcccttcattagaga

SEQ ID NO: 1803 - DNA, 18 bp, Artificial Sequence
  Description of Artificial Sequence: Synthetic oligonucleotide
ctttggtatcccttcatt

SEQ ID NO: 1804 - DNA, 18 bp, Artificial Sequence
  Description of Artificial Sequence: Synthetic oligonucleotide
caagactttggtatccct

SEQ ID NO: 1805 - DNA, 18 bp, Artificial Sequence
  Description of Artificial Sequence: Synthetic oligonucleotide
gaatacaagactttggta

SEQ ID NO: 1806 - DNA, 18 bp, Artificial Sequence
  Description of Artificial Sequence: Synthetic oligonucleotide
aaattgaatacaagactt

SEQ ID NO: 1807 - DNA, 18 bp, Artificial Sequence
  Description of Artificial Sequence: Synthetic oligonucleotide
aaaaaaaattgaatacaa

SEQ ID NO: 1808 - DNA, 18 bp, Artificial Sequence
  Description of Artificial Sequence: Synthetic oligonucleotide
ggtgaccaggagcagggc

SEQ ID NO: 1809 - DNA, 18 bp, Artificial Sequence
  Description of Artificial Sequence: Synthetic oligonucleotide
ctcggggtgaccaggagc

SEQ ID NO: 1810 - DNA, 18 bp, Artificial Sequence
  Description of Artificial Sequence: Synthetic oligonucleotide
agtcactcggggtgacca

SEQ ID NO: 1811 - DNA, 18 bp, Artificial Sequence
  Description of Artificial Sequence: Synthetic oligonucleotide
cctgcagtcactcggggt

SEQ ID NO: 1812 - DNA, 18 bp, Artificial Sequence
  Description of Artificial Sequence: Synthetic oligonucleotide
ggctccctgcagtcactc

SEQ ID NO: 1813 - DNA, 18 bp, Artificial Sequence
  Description of Artificial Sequence: Synthetic oligonucleotide
agagaggctccctgcagt

SEQ ID NO: 1814 - DNA, 18 bp, Artificial Sequence
  Description of Artificial Sequence: Synthetic oligonucleotide
ccctgagagaggctccct

SEQ ID NO: 1815 - DNA, 18 bp, Artificial Sequence
  Description of Artificial Sequence: Synthetic oligonucleotide
catcaccctgagagaggc

SEQ ID NO: 1816 - DNA, 18 bp, Artificial Sequence
  Description of Artificial Sequence: Synthetic oligonucleotide
tcatccatcaccctgaga

SEQ ID NO: 1817 - DNA, 18 bp, Artificial Sequence
  Description of Artificial Sequence: Synthetic oligonucleotide
cgggctcatccatcaccc

SEQ ID NO: 1818 - DNA, 18 bp, Artificial Sequence
  Description of Artificial Sequence: Synthetic oligonucleotide
agacacgggctcatccat

SEQ ID NO: 1819 - DNA, 18 bp, Artificial Sequence
  Description of Artificial Sequence: Synthetic oligonucleotide
ctgagagacacgggctca

SEQ ID NO: 1820 - DNA, 18 bp, Artificial Sequence
  Description of Artificial Sequence: Synthetic oligonucleotide
gggccctgagagacacgg

SEQ ID NO: 1821 - DNA, 18 bp, Artificial Sequence
  Description of Artificial Sequence: Synthetic oligonucleotide
ggcctgggccctgagaga

SEQ ID NO: 1822 - DNA, 18 bp, Artificial Sequence
  Description of Artificial Sequence: Synthetic oligonucleotide
ctcttggcctgggccctg

SEQ ID NO: 1823 - DNA, 18 bp, Artificial Sequence
  Description of Artificial Sequence: Synthetic oligonucleotide
gaatgctcttggcctggg

SEQ ID NO: 1824 - DNA, 18 bp, Artificial Sequence
  Description of Artificial Sequence: Synthetic oligonucleotide
atggagaatgctcttggc

SEQ ID NO: 1825 - DNA, 18 bp, Artificial Sequence
  Description of Artificial Sequence: Synthetic oligonucleotide
aaaggatggagaatgctc

SEQ ID NO: 1826 - DNA, 18 bp, Artificial Sequence
  Description of Artificial Sequence: Synthetic oligonucleotide
tggggaaaggatggagaa

SEQ ID NO: 1827 - DNA, 18 bp, Artificial Sequence
  Description of Artificial Sequence: Synthetic oligonucleotide
gaaggtggggaaaggatg

SEQ ID NO: 1828 - DNA, 18 bp, Artificial Sequence
  Description of Artificial Sequence: Synthetic oligonucleotide
ccctggaaggtggggaaa

SEQ ID NO: 1829 - DNA, 18 bp, Artificial Sequence
  Description of Artificial Sequence: Synthetic oligonucleotide
ccgttccctggaaggtgg

SEQ ID NO: 1830 - DNA, 18 bp, Artificial Sequence
  Description of Artificial Sequence: Synthetic oligonucleotide
tggtcccgttccctggaa

SEQ ID NO: 1831 - DNA, 18 bp, Artificial Sequence
  Description of Artificial Sequence: Synthetic oligonucleotide
gtcaatggtcccgttccc

SEQ ID NO: 1832 - DNA, 18 bp, Artificial Sequence
  Description of Artificial Sequence: Synthetic oligonucleotide
gggaagtcaatggtcccg

SEQ ID NO: 1833 - DNA, 18 bp, Artificial Sequence
  Description of Artificial Sequence: Synthetic oligonucleotide
actccgggaagtcaatgg

SEQ ID NO: 1834 - DNA, 18 bp, Artificial Sequence
  Description of Artificial Sequence: Synthetic oligonucleotide
caggaactccgggaagtc

SEQ ID NO: 1835 - DNA, 18 bp, Artificial Sequence
  Description of Artificial Sequence: Synthetic oligonucleotide
atggtcaggaactccggg

SEQ ID NO: 1836 - DNA, 18 bp, Artificial Sequence
  Description of Artificial Sequence: Synthetic oligonucleotide
ccatcatggtcaggaact

SEQ ID NO: 1837 - DNA, 18 bp, Artificial Sequence
  Description of Artificial Sequence: Synthetic oligonucleotide
tctggccatcatggtcag

SEQ ID NO: 1838 - DNA, 18 bp, Artificial Sequence
  Description of Artificial Sequence: Synthetic oligonucleotide
atctttctggccatcatg

SEQ ID NO: 1839 - DNA, 18 bp, Artificial Sequence
  Description of Artificial Sequence: Synthetic oligonucleotide
ccttcatctttctggcca

SEQ ID NO: 1840 - DNA, 18 bp, Artificial Sequence
  Description of Artificial Sequence: Synthetic oligonucleotide
tgtgtccttcatctttct

SEQ ID NO: 1841 - DNA, 18 bp, Artificial Sequence
  Description of Artificial Sequence: Synthetic oligonucleotide
ctgtctgtgtccttcatc

SEQ ID NO: 1842 - DNA, 18 bp, Artificial Sequence
  Description of Artificial Sequence: Synthetic oligonucleotide
cctcactgtctgtgtcct

SEQ ID NO: 1843 - DNA, 18 bp, Artificial Sequence
  Description of Artificial Sequence: Synthetic oligonucleotide
ctcctcctcactgtctgt

SEQ ID NO: 1844 - DNA, 18 bp, Artificial Sequence
  Description of Artificial Sequence: Synthetic oligonucleotide
cggatctcctcctcactg

SEQ ID NO: 1845 - DNA, 18 bp, Artificial Sequence
  Description of Artificial Sequence: Synthetic oligonucleotide
cctctcggatctcctcct

SEQ ID NO: 1846 - DNA, 18 bp, Artificial Sequence
  Description of Artificial Sequence: Synthetic oligonucleotide
gaacgcctctcggatctc

SEQ ID NO: 1847 - DNA, 18 bp, Artificial Sequence
  Description of Artificial Sequence: Synthetic oligonucleotide
acacggaacgcctctcgg

SEQ ID NO: 1848 - DNA, 18 bp, Artificial Sequence
  Description of Artificial Sequence: Synthetic oligonucleotide
caaagacacggaacgcct

SEQ ID NO: 1849 - DNA, 18 bp, Artificial Sequence
  Description of Artificial Sequence: Synthetic oligonucleotide
cttgtcaaagacacggaa

SEQ ID NO: 1850 - DNA, 18 bp, Artificial Sequence
  Description of Artificial Sequence: Synthetic oligonucleotide
cttaccttgtcaaagaca

SEQ ID NO: 1851 - DNA, 18 bp, Artificial Sequence
  Description of Artificial Sequence: Synthetic oligonucleotide
ggctgcttaccttgtcaa

SEQ ID NO: 1852 - DNA, 18 bp, Artificial Sequence
  Description of Artificial Sequence: Synthetic oligonucleotide
gagagggctgcttacctt

SEQ ID NO: 1853 - DNA, 18 bp, Artificial Sequence
  Description of Artificial Sequence: Synthetic oligonucleotide
ccctggagagggctgctt

SEQ ID NO: 1854 - DNA, 18 bp, Artificial Sequence
  Description of Artificial Sequence: Synthetic oligonucleotide
gccgcccctggagagggc

SEQ ID NO: 1855 - DNA, 18 bp, Artificial Sequence
  Description of Artificial Sequence: Synthetic oligonucleotide
tcagagccgcccctggag

SEQ ID NO: 1856 - DNA, 18 bp, Artificial Sequence
  Description of Artificial Sequence: Synthetic oligonucleotide
cagtctcagagccgcccc

SEQ ID NO: 1857 - DNA, 18 bp, Artificial Sequence
  Description of Artificial Sequence: Synthetic oligonucleotide
ggcgtcagtctcagagcc

SEQ ID NO: 1858 - DNA, 18 bp, Artificial Sequence
  Description of Artificial Sequence: Synthetic oligonucleotide
aggctggcgtcagtctca

SEQ ID NO: 1859 - DNA, 18 bp, Artificial Sequence
  Description of Artificial Sequence: Synthetic oligonucleotide
cctgaaggctggcgtcag

SEQ ID NO: 1860 - DNA, 18 bp, Artificial Sequence
  Description of Artificial Sequence: Synthetic oligonucleotide
gtctgcctgaaggctggc

SEQ ID NO: 1861 - DNA, 18 bp, Artificial Sequence
  Description of Artificial Sequence: Synthetic oligonucleotide
cgcctgtctgcctgaagg

SEQ ID NO: 1862 - DNA, 18 bp, Artificial Sequence
  Description of Artificial Sequence: Synthetic oligonucleotide
agttccgcctgtctgcct

SEQ ID NO: 1863 - DNA, 18 bp, Artificial Sequence
  Description of Artificial Sequence: Synthetic oligonucleotide
gctccagttccgcctgtc

SEQ ID NO: 1864 - DNA, 18 bp, Artificial Sequence
  Description of Artificial Sequence: Synthetic oligonucleotide
ccgtggctccagttccgc

SEQ ID NO: 1865 - DNA, 18 bp, Artificial Sequence
  Description of Artificial Sequence: Synthetic oligonucleotide
tagctccgtggctccagt

SEQ ID NO: 1866 - DNA, 18 bp, Artificial Sequence
  Description of Artificial Sequence: Synthetic oligonucleotide
agtggtagctccgtggct

SEQ ID NO: 1867 - DNA, 18 bp, Artificial Sequence
  Description of Artificial Sequence: Synthetic oligonucleotide
ctggaagtggtagctccg

SEQ ID NO: 1868 - DNA, 18 bp, Artificial Sequence
  Description of Artificial Sequence: Synthetic oligonucleotide
acctcctggaagtggtag

SEQ ID NO: 1869 - DNA, 18 bp, Artificial Sequence
  Description of Artificial Sequence: Synthetic oligonucleotide
cccggacctcctggaagt

SEQ ID NO: 1870 - DNA, 18 bp, Artificial Sequence
  Description of Artificial Sequence: Synthetic oligonucleotide
cgggacccggacctcctg

SEQ ID NO: 1871 - DNA, 18 bp, Artificial Sequence
  Description of Artificial Sequence: Synthetic oligonucleotide
ggcaccgggacccggacc

SEQ ID NO: 1872 - DNA, 18 bp, Artificial Sequence
  Description of Artificial Sequence: Synthetic oligonucleotide
aggctggcaccgggaccc

SEQ ID NO: 1873 - DNA, 18 bp, Artificial Sequence
  Description of Artificial Sequence: Synthetic oligonucleotide
caatgaggctggcaccgg

SEQ ID NO: 1874 - DNA, 18 bp, Artificial Sequence
  Description of Artificial Sequence: Synthetic oligonucleotide
gttggcaatgaggctggc

SEQ ID NO: 1875 - DNA, 18 bp, Artificial Sequence
  Description of Artificial Sequence: Synthetic oligonucleotide
agcaggttggcaatgagg

SEQ ID NO: 1876 - DNA, 18 bp, Artificial Sequence
  Description of Artificial Sequence: Synthetic oligonucleotide
ggcagagcaggttggcaa

SEQ ID NO: 1877 - DNA, 18 bp, Artificial Sequence
  Description of Artificial Sequence: Synthetic oligonucleotide
gaggtggcagagcaggtt

SEQ ID NO: 1878 - DNA, 18 bp, Artificial Sequence
  Description of Artificial Sequence: Synthetic oligonucleotide
tgcctgaggtggcagagc

SEQ ID NO: 1879 - DNA, 18 bp, Artificial Sequence
  Description of Artificial Sequence: Synthetic oligonucleotide
gaggctgcctgaggtggc

SEQ ID NO: 1880 - DNA, 18 bp, Artificial Sequence
  Description of Artificial Sequence: Synthetic oligonucleotide
tgagggaggctgcctgag

SEQ ID NO: 1881 - DNA, 18 bp, Artificial Sequence
  Description of Artificial Sequence: Synthetic oligonucleotide
cacagtgagggaggctgc

SEQ ID NO: 1882 - DNA, 18 bp, Artificial Sequence
  Description of Artificial Sequence: Synthetic oligonucleotide
gtgagcacagtgagggag

SEQ ID NO: 1883 - DNA, 18 bp, Artificial Sequence
  Description of Artificial Sequence: Synthetic oligonucleotide
cagcagtgagcacagtga

SEQ ID NO: 1884 - DNA, 18 bp, Artificial Sequence
  Description of Artificial Sequence: Synthetic oligonucleotide
tccctcagcagtgagcac

SEQ ID NO: 1885 - DNA, 18 bp, Artificial Sequence
  Description of Artificial Sequence: Synthetic oligonucleotide
caccatccctcagcagtg

SEQ ID NO: 1886 - DNA, 18 bp, Artificial Sequence
  Description of Artificial Sequence: Synthetic oligonucleotide
gtcatcaccatccctcag

SEQ ID NO: 1887 - DNA, 18 bp, Artificial Sequence
  Description of Artificial Sequence: Synthetic oligonucleotide
tggctgtcatcaccatcc

SEQ ID NO: 1888 - DNA, 18 bp, Artificial Sequence
  Description of Artificial Sequence: Synthetic oligonucleotide
aggggtggctgtcatcac

SEQ ID NO: 1889 - DNA, 18 bp, Artificial Sequence
  Description of Artificial Sequence: Synthetic oligonucleotide
gtgagaggggtggctgtc

SEQ ID NO: 1890 - DNA, 18 bp, Artificial Sequence
  Description of Artificial Sequence: Synthetic oligonucleotide
aggcagtgagaggggtgg

SEQ ID NO: 1891 - DNA, 18 bp, Artificial Sequence
  Description of Artificial Sequence: Synthetic oligonucleotide
gagagaggcagtgagagg

SEQ ID NO: 1892 - DNA, 18 bp, Artificial Sequence
  Description of Artificial Sequence: Synthetic oligonucleotide
gtggggagagaggcagtg

SEQ ID NO: 1893 - DNA, 18 bp, Artificial Sequence
  Description of Artificial Sequence: Synthetic oligonucleotide
tcccggtggggagagagg

SEQ ID NO: 1894 - DNA, 18 bp, Artificial Sequence
  Description of Artificial Sequence: Synthetic oligonucleotide
acttctcccggtggggag

SEQ ID NO: 1895 - DNA, 18 bp, Artificial Sequence
  Description of Artificial Sequence: Synthetic oligonucleotide
tgggcacttctcccggtg

SEQ ID NO: 1896 - DNA, 18 bp, Artificial Sequence
  Description of Artificial Sequence: Synthetic oligonucleotide
ttcactgggcacttctcc

SEQ ID NO: 1897 - DNA, 18 bp, Artificial Sequence
  Description of Artificial Sequence: Synthetic oligonucleotide
agcctttcactgggcact

SEQ ID NO: 1898 - DNA, 18 bp, Artificial Sequence
  Description of Artificial Sequence: Synthetic oligonucleotide
gataaagcctttcactgg

SEQ ID NO: 1899 - DNA, 18 bp, Artificial Sequence
  Description of Artificial Sequence: Synthetic oligonucleotide
ttggggataaagcctttc

SEQ ID NO: 1900 - DNA, 18 bp, Artificial Sequence
  Description of Artificial Sequence: Synthetic oligonucleotide
gggggttggggataaagc

SEQ ID NO: 1901 - DNA, 18 bp, Artificial Sequence
  Description of Artificial Sequence: Synthetic oligonucleotide
atcctgggggttggggat

SEQ ID NO: 1902 - DNA, 18 bp, Artificial Sequence
  Description of Artificial Sequence: Synthetic oligonucleotide
ttcccatcctgggggttg

SEQ ID NO: 1903 - DNA, 18 bp, Artificial Sequence
  Description of Artificial Sequence: Synthetic oligonucleotide
agccattcccatcctggg

SEQ ID NO: 1904 - DNA, 18 bp, Artificial Sequence
  Description of Artificial Sequence: Synthetic oligonucleotide
gatgtagccattcccatc

SEQ ID NO: 1905 - DNA, 18 bp, Artificial Sequence
  Description of Artificial Sequence: Synthetic oligonucleotide
gcgctgatgtagccattc

SEQ ID NO: 1906 - DNA, 18 bp, Artificial Sequence
  Description of Artificial Sequence: Synthetic oligonucleotide
ctgcggcgctgatgtagc

SEQ ID NO: 1907 - DNA, 18 bp, Artificial Sequence
  Description of Artificial Sequence: Synthetic oligonucleotide
cagctctgcggcgctgat

SEQ ID NO: 1908 - DNA, 18 bp, Artificial Sequence
  Description of Artificial Sequence: Synthetic oligonucleotide
tgacgcagctctgcggcg

SEQ ID NO: 1909 - DNA, 18 bp, Artificial Sequence
  Description of Artificial Sequence: Synthetic oligonucleotide
ttacgtgacgcagctctg

SEQ ID NO: 1910 - DNA, 18 bp, Artificial Sequence
  Description of Artificial Sequence: Synthetic oligonucleotide
cgtcattacgtgacgcag

SEQ ID NO: 1911 - DNA, 18 bp, Artificial Sequence
  Description of Artificial Sequence: Synthetic oligonucleotide
aggttcgtcattacgtga

SEQ ID NO: 1912 - DNA, 18 bp, Artificial Sequence
  Description of Artificial Sequence: Synthetic oligonucleotide
cccccaggttcgtcatta

SEQ ID NO: 1913 - DNA, 18 bp, Artificial Sequence
  Description of Artificial Sequence: Synthetic oligonucleotide
cttctcccccaggttcgt

SEQ ID NO: 1914 - DNA, 18 bp, Artificial Sequence
  Description of Artificial Sequence: Synthetic oligonucleotide
cacagtctcagtgggagc

SEQ ID NO: 1915 - DNA, 18 bp, Artificial Sequence
  Description of Artificial Sequence: Synthetic oligonucleotide
aaagtcacagtctcagtg

SEQ ID NO: 1916 - DNA, 18 bp, Artificial Sequence
  Description of Artificial Sequence: Synthetic oligonucleotide
tgtgaaaagtcacagtct

SEQ ID NO: 1917 - DNA, 18 bp, Artificial Sequence
  Description of Artificial Sequence: Synthetic oligonucleotide
tttactgtgaaaagtcac

SEQ ID NO: 1918 - DNA, 18 bp, Artificial Sequence
  Description of Artificial Sequence: Synthetic oligonucleotide
tttgttttactgtgaaaa

SEQ ID NO: 1919 - DNA, 18 bp, Artificial Sequence
  Description of Artificial Sequence: Synthetic oligonucleotide
accattttgttttactgt

SEQ ID NO: 1920 - DNA, 18 bp, Artificial Sequence
  Description of Artificial Sequence: Synthetic oligonucleotide
cagagaccattttgtttt

SEQ ID NO: 1921 - DNA, 18 bp, Artificial Sequence
  Description of Artificial Sequence: Synthetic oligonucleotide
ttcaacagagaccatttt

SEQ ID NO: 1922 - DNA, 18 bp, Artificial Sequence
  Description of Artificial Sequence: Synthetic oligonucleotide
aacaattcaacagagacc

SEQ ID NO: 1923 - DNA, 18 bp, Artificial Sequence
  Description of Artificial Sequence: Synthetic oligonucleotide
gtgtaaacaattcaacag

SEQ ID NO: 1924 - DNA, 18 bp, Artificial Sequence
  Description of Artificial Sequence: Synthetic oligonucleotide
gtttagtgtaaacaattc

SEQ ID NO: 1925 - DNA, 18 bp, Artificial Sequence
  Description of Artificial Sequence: Synthetic oligonucleotide
tttgtgtttagtgtaaac

SEQ ID NO: 1926 - DNA, 18 bp, Artificial Sequence
  Description of Artificial Sequence: Synthetic oligonucleotide
tgtggtttgtgtttagtg

SEQ ID NO: 1927 - DNA, 18 bp, Artificial Sequence
  Description of Artificial Sequence: Synthetic oligonucleotide
cacagtgtggtttgtgtt

SEQ ID NO: 1928 - DNA, 18 bp, Artificial Sequence
  Description of Artificial Sequence: Synthetic oligonucleotide
aacatcacagtgtggttt

SEQ ID NO: 1929 - DNA, 18 bp, Artificial Sequence
  Description of Artificial Sequence: Synthetic oligonucleotide
caacaaacatcacagtgt

SEQ ID NO: 1930 - DNA, 18 bp, Artificial Sequence
  Description of Artificial Sequence: Synthetic oligonucleotide
aacagcaacaaacatcac

SEQ ID NO: 1931 - DNA, 18 bp, Artificial Sequence
  Description of Artificial Sequence: Synthetic oligonucleotide
ccaaaaacagcaacaaac

SEQ ID NO: 1932 - DNA, 18 bp, Artificial Sequence
  Description of Artificial Sequence: Synthetic oligonucleotide
gattaccaaaaacagcaa

SEQ ID NO: 1933 - DNA, 18 bp, Artificial Sequence
  Description of Artificial Sequence: Synthetic oligonucleotide
cacaggattaccaaaaac

SEQ ID NO: 1934 - DNA, 18 bp, Artificial Sequence
  Description of Artificial Sequence: Synthetic oligonucleotide
cactgcacaggattacca

SEQ ID NO: 1935 - DNA, 18 bp, Artificial Sequence
  Description of Artificial Sequence: Synthetic oligonucleotide
agaaacactgcacaggat

SEQ ID NO: 1936 - DNA, 18 bp, Artificial Sequence
  Description of Artificial Sequence: Synthetic oligonucleotide
atgcaagaaacactgcac

SEQ ID NO: 1937 - DNA, 18 bp, Artificial Sequence
  Description of Artificial Sequence: Synthetic oligonucleotide
aagaaatgcaagaaacac

SEQ ID NO: 1938 - DNA, 18 bp, Artificial Sequence
  Description of Artificial Sequence: Synthetic oligonucleotide
atcacaagaaatgcaaga

SEQ ID NO: 1939 - DNA, 18 bp, Artificial Sequence
  Description of Artificial Sequence: Synthetic oligonucleotide
tgacgatcacaagaaatg

SEQ ID NO: 1940 - DNA, 18 bp, Artificial Sequence
  Description of Artificial Sequence: Synthetic oligonucleotide
aggaatgacgatcacaag

SEQ ID NO: 1941 - DNA, 18 bp, Artificial Sequence
  Description of Artificial Sequence: Synthetic oligonucleotide
aagactagcactagaagg

SEQ ID NO: 1942 - DNA, 18 bp, Artificial Sequence
  Description of Artificial Sequence: Synthetic oligonucleotide
cagggaagactagcacta

SEQ ID NO: 1943 - DNA, 18 bp, Artificial Sequence
  Description of Artificial Sequence: Synthetic oligonucleotide
aactgcagggaagactag

SEQ ID NO: 1944 - DNA, 18 bp, Artificial Sequence
  Description of Artificial Sequence: Synthetic oligonucleotide
gaagcaactgcagggaag

SEQ ID NO: 1945 - DNA, 18 bp, Artificial Sequence
  Description of Artificial Sequence: Synthetic oligonucleotide
aaagagaagcaactgcag

SEQ ID NO: 1946 - DNA, 18 bp, Artificial Sequence
  Description of Artificial Sequence: Synthetic oligonucleotide
gggcaaaagagaagcaac

SEQ ID NO: 1947 - DNA, 18 bp, Artificial Sequence
  Description of Artificial Sequence: Synthetic oligonucleotide
ttccagggcaaaagagaa

SEQ ID NO: 1948 - DNA, 18 bp, Artificial Sequence
  Description of Artificial Sequence: Synthetic oligonucleotide
cggcattccagggcaaaa

SEQ ID NO: 1949 - DNA, 18 bp, Artificial Sequence
  Description of Artificial Sequence: Synthetic oligonucleotide
ccacccggcattccaggg

SEQ ID NO: 1950 - DNA, 18 bp, Artificial Sequence
  Description of Artificial Sequence: Synthetic oligonucleotide
ggtctccacccggcattc

SEQ ID NO: 1951 - DNA, 18 bp, Artificial Sequence
  Description of Artificial Sequence: Synthetic oligonucleotide
agcagggtctccacccgg

SEQ ID NO: 1952 - DNA, 18 bp, Artificial Sequence
  Description of Artificial Sequence: Synthetic oligonucleotide
ggagtagcagggtctcca

SEQ ID NO: 1953 - DNA, 18 bp, Artificial Sequence
  Description of Artificial Sequence: Synthetic oligonucleotide
cacaaggagtagcagggt

SEQ ID NO: 1954 - DNA, 18 bp, Artificial Sequence
  Description of Artificial Sequence: Synthetic oligonucleotide
tctcgcacaaggagtagc

SEQ ID NO: 1955 - DNA, 18 bp, Artificial Sequence
  Description of Artificial Sequence: Synthetic oligonucleotide
tgccctctcgcacaagga

SEQ ID NO: 1956 - DNA, 18 bp, Artificial Sequence
  Description of Artificial Sequence: Synthetic oligonucleotide
gggtctgccctctcgcac

SEQ ID NO: 1957 - DNA, 18 bp, Artificial Sequence
  Description of Artificial Sequence: Synthetic oligonucleotide
aaacggggtctgccctct

SEQ ID NO: 1958 - DNA, 18 bp, Artificial Sequence
  Description of Artificial Sequence: Synthetic oligonucleotide
gaagaaaacggggtctgc

SEQ ID NO: 1959 - DNA, 18 bp, Artificial Sequence
  Description of Artificial Sequence: Synthetic oligonucleotide
ggcgggaagaaaacgggg

SEQ ID NO: 1960 - DNA, 18 bp, Artificial Sequence
  Description of Artificial Sequence: Synthetic oligonucleotide
ggagaggcgggaagaaaa

SEQ ID NO: 1961 - DNA, 18 bp, Artificial Sequence
  Description of Artificial Sequence: Synthetic oligonucleotide
agtctggagaggcgggaa

SEQ ID NO: 1962 - DNA, 18 bp, Artificial Sequence
  Description of Artificial Sequence: Synthetic oligonucleotide
aggacagtctggagaggc

SEQ ID NO: 1963 - DNA, 18 bp, Artificial Sequence
  Description of Artificial Sequence: Synthetic oligonucleotide
cctagaggacagtctgga

SEQ ID NO: 1964 - DNA, 18 bp, Artificial Sequence
  Description of Artificial Sequence: Synthetic oligonucleotide
cgctccctagaggacagt

SEQ ID NO: 1965 - DNA, 18 bp, Artificial Sequence
  Description of Artificial Sequence: Synthetic oligonucleotide
ccccacgctccctagagg

SEQ ID NO: 1966 - DNA, 18 bp, Artificial Sequence
  Description of Artificial Sequence: Synthetic oligonucleotide
gctctccccacgctccct

SEQ ID NO: 1967 - DNA, 18 bp, Artificial Sequence
  Description of Artificial Sequence: Synthetic oligonucleotide
cccgggctctccccacgc

SEQ ID NO: 1968 - DNA, 18 bp, Artificial Sequence
  Description of Artificial Sequence: Synthetic oligonucleotide
gtaaacccgggctctccc

SEQ ID NO: 1969 - DNA, 18 bp, Artificial Sequence
  Description of Artificial Sequence: Synthetic oligonucleotide
cccacgtaaacccgggct

SEQ ID NO: 1970 - DNA, 18 bp, Artificial Sequence
  Description of Artificial Sequence: Synthetic oligonucleotide
gctatcctatatgcttta

SEQ ID NO: 1971 - DNA, 18 bp, Artificial Sequence
  Description of Artificial Sequence: Synthetic oligonucleotide
ttcctgctatcctatatg

SEQ ID NO: 1972 - DNA, 18 bp, Artificial Sequence
  Description of Artificial Sequence: Synthetic oligonucleotide
gggatttcctgctatcct

SEQ ID NO: 1973 - DNA, 18 bp, Artificial Sequence
  Description of Artificial Sequence: Synthetic oligonucleotide
accctgggatttcctgct

SEQ ID NO: 1974 - DNA, 18 bp, Artificial Sequence
  Description of Artificial Sequence: Synthetic oligonucleotide
ccatcaccctgggatttc

SEQ ID NO: 1975 - DNA, 18 bp, Artificial Sequence
  Description of Artificial Sequence: Synthetic oligonucleotide
gagccccatcaccctggg

SEQ ID NO: 1976 - DNA, 18 bp, Artificial Sequence
  Description of Artificial Sequence: Synthetic oligonucleotide
agccagagccccatcacc

SEQ ID NO: 1977 - DNA, 18 bp, Artificial Sequence
  Description of Artificial Sequence: Synthetic oligonucleotide
aactaagccagagcccca

SEQ ID NO: 1978 - DNA, 18 bp, Artificial Sequence
  Description of Artificial Sequence: Synthetic oligonucleotide
tggaaaactaagccagag

SEQ ID NO: 1979 - DNA, 18 bp, Artificial Sequence
  Description of Artificial Sequence: Synthetic oligonucleotide
aaatatggaaaactaagc

SEQ ID NO: 1980 - DNA, 18 bp, Artificial Sequence
  Description of Artificial Sequence: Synthetic oligonucleotide
ggcctaaatatggaaaac

SEQ ID NO: 1981 - DNA, 18 bp, Artificial Sequence
  Description of Artificial Sequence: Synthetic oligonucleotide
ttagaggcctaaatatgg

SEQ ID NO: 1982 - DNA, 18 bp, Artificial Sequence
  Description of Artificial Sequence: Synthetic oligonucleotide
gcctattagaggcctaaa

SEQ ID NO: 1983 - DNA, 18 bp, Artificial Sequence
  Description of Artificial Sequence: Synthetic oligonucleotide
tgactgcctattagaggc

SEQ ID NO: 1984 - DNA, 18 bp, Artificial Sequence
  Description of Artificial Sequence: Synthetic oligonucleotide
gttactgactgcctatta

SEQ ID NO: 1985 - DNA, 18 bp, Artificial Sequence
  Description of Artificial Sequence: Synthetic oligonucleotide
gtggagttactgactgcc

SEQ ID NO: 1986 - DNA, 18 bp, Artificial Sequence
  Description of Artificial Sequence: Synthetic oligonucleotide
gaaatgtggagttactga

SEQ ID NO: 1987 - DNA, 18 bp, Artificial Sequence
  Description of Artificial Sequence: Synthetic oligonucleotide
aaggtgaaatgtggagtt

SEQ ID NO: 1988 - DNA, 18 bp, Artificial Sequence
  Description of Artificial Sequence: Synthetic oligonucleotide
aagaaaaggtgaaatgtg

SEQ ID NO: 1989 - DNA, 18 bp, Artificial Sequence
  Description of Artificial Sequence: Synthetic oligonucleotide
ctgaaaagaaaaggtgaa

SEQ ID NO: 1990 - DNA, 18 bp, Artificial Sequence
  Description of Artificial Sequence: Synthetic oligonucleotide
aagaactgaaaagaaaag

SEQ ID NO: 1991 - DNA, 18 bp, Artificial Sequence
  Description of Artificial Sequence: Synthetic oligonucleotide
aattaaagaactgaaaag

SEQ ID NO: 1992 - DNA, 18 bp, Artificial Sequence
  Description of Artificial Sequence: Synthetic oligonucleotide
ttctcaattaaagaactg

SEQ ID NO: 1993 - DNA, 18 bp, Artificial Sequence
  Description of Artificial Sequence: Synthetic oligonucleotide
ttgtcttctcaattaaag

SEQ ID NO: 1994 - DNA, 18 bp, Artificial Sequence
  Description of Artificial Sequence: Synthetic oligonucleotide
ccgagtctccccagcacc

SEQ ID NO: 1995 - DNA, 18 bp, Artificial Sequence
  Description of Artificial Sequence: Synthetic oligonucleotide
gctctccgagtctcccca

SEQ ID NO: 1996 - DNA, 18 bp, Artificial Sequence
  Description of Artificial Sequence: Synthetic oligonucleotide
gatcagctctccgagtct

SEQ ID NO: 1997 - DNA, 18 bp, Artificial Sequence
  Description of Artificial Sequence: Synthetic oligonucleotide
aaaaagatcagctctccg

SEQ ID NO: 1998 - DNA, 18 bp, Artificial Sequence
  Description of Artificial Sequence: Synthetic oligonucleotide
tccttaaaaagatcagct

SEQ ID NO: 1999 - DNA, 18 bp, Artificial Sequence
  Description of Artificial Sequence: Synthetic oligonucleotide
ctccctccttaaaaagat

SEQ ID NO: 2000 - DNA, 18 bp, Artificial Sequence
  Description of Artificial Sequence: Synthetic oligonucleotide
ttccactccctccttaaa

SEQ ID NO: 2001 - DNA, 18 bp, Artificial Sequence
  Description of Artificial Sequence: Synthetic oligonucleotide
ttccattccactccctcc

SEQ ID NO: 2002 - DNA, 18 bp, Artificial Sequence
  Description of Artificial Sequence: Synthetic oligonucleotide
atgatttccattccactc

SEQ ID NO: 2003 - DNA, 18 bp, Artificial Sequence
  Description of Artificial Sequence: Synthetic oligonucleotide
cagaaatgatttccattc

SEQ ID NO: 2004 - DNA, 18 bp, Artificial Sequence
  Description of Artificial Sequence: Synthetic oligonucleotide
acaagcagaaatgatttc

SEQ ID NO: 2005 - DNA, 18 bp, Artificial Sequence
  Description of Artificial Sequence: Synthetic oligonucleotide
agaggacaagcagaaatg

SEQ ID NO: 2006 - DNA, 18 bp, Artificial Sequence
  Description of Artificial Sequence: Synthetic oligonucleotide
taaacagaggacaagcag

SEQ ID NO: 2007 - DNA, 18 bp, Artificial Sequence
  Description of Artificial Sequence: Synthetic oligonucleotide
aattttaaacagaggaca

SEQ ID NO: 2008 - DNA, 18 bp, Artificial Sequence
  Description of Artificial Sequence: Synthetic oligonucleotide
aactcaattttaaacaga

SEQ ID NO: 2009 - DNA, 18 bp, Artificial Sequence
  Description of Artificial Sequence: Synthetic oligonucleotide
gataaaactcaattttaa

SEQ ID NO: 2010 - DNA, 18 bp, Artificial Sequence
  Description of Artificial Sequence: Synthetic oligonucleotide
tcaatgataaaactcaat

SEQ ID NO: 2011 - DNA, 18 bp, Artificial Sequence
  Description of Artificial Sequence: Synthetic oligonucleotide
gaagttcaatgataaaac

SEQ ID NO: 2012 - DNA, 18 bp, Artificial Sequence
  Description of Artificial Sequence: Synthetic oligonucleotide
aataagaagttcaatgat

SEQ ID NO: 2013 - DNA, 18 bp, Artificial Sequence
  Description of Artificial Sequence: Synthetic oligonucleotide
gaaagaataagaagttca

SEQ ID NO: 2014 - DNA, 18 bp, Artificial Sequence
  Description of Artificial Sequence: Synthetic oligonucleotide
ttctagaaagaataagaa

SEQ ID NO: 2015 - DNA, 18 bp, Artificial Sequence
  Description of Artificial Sequence: Synthetic oligonucleotide
acagattctagaaagaat

SEQ ID NO: 2016 - DNA, 18 bp, Artificial Sequence
  Description of Artificial Sequence: Synthetic oligonucleotide
tcattacagattctagaa

SEQ ID NO: 2017 - DNA, 18 bp, Artificial Sequence
  Description of Artificial Sequence: Synthetic oligonucleotide
tcttttcattacagattc

SEQ ID NO: 2018 - DNA, 18 bp, Artificial Sequence
  Description of Artificial Sequence: Synthetic oligonucleotide
atatttcttttcattaca

SEQ ID NO: 2019 - DNA, 18 bp, Artificial Sequence
  Description of Artificial Sequence: Synthetic oligonucleotide
taaacatatttcttttca

SEQ ID NO: 2020 - DNA, 18 bp, Artificial Sequence
  Description of Artificial Sequence: Synthetic oligonucleotide
gaggataaacatatttct

SEQ ID NO: 2021 - DNA, 18 bp, Artificial Sequence
  Description of Artificial Sequence: Synthetic oligonucleotide
acactgaggataaacata

SEQ ID NO: 2022 - DNA, 18 bp, Artificial Sequence
  Description of Artificial Sequence: Synthetic oligonucleotide
gcccgacactgaggataa

SEQ ID NO: 2023 - DNA, 18 bp, Artificial Sequence
  Description of Artificial Sequence: Synthetic oligonucleotide
tgtctgcccgacactgag

SEQ ID NO: 2024 - DNA, 18 bp, Artificial Sequence
  Description of Artificial Sequence: Synthetic oligonucleotide
agcactgtctgcccgaca

SEQ ID NO: 2025 - DNA, 18 bp, Artificial Sequence
  Description of Artificial Sequence: Synthetic oligonucleotide
aggaaagcactgtctgcc

SEQ ID NO: 2026 - DNA, 18 bp, Artificial Sequence
  Description of Artificial Sequence: Synthetic oligonucleotide
gtcgcaggaaagcactgt

SEQ ID NO: 2027 - DNA, 18 bp, Artificial Sequence
  Description of Artificial Sequence: Synthetic oligonucleotide
atgatgtcgcaggaaagc

SEQ ID NO: 2028 - DNA, 18 bp, Artificial Sequence
  Description of Artificial Sequence: Synthetic oligonucleotide
ttataatgatgtcgcagg

SEQ ID NO: 2029 - DNA, 18 bp, Artificial Sequence
  Description of Artificial Sequence: Synthetic oligonucleotide
cctgtttataatgatgtc

SEQ ID NO: 2030 - DNA, 18 bp, Artificial Sequence
  Description of Artificial Sequence: Synthetic oligonucleotide
tgttacctgtttataatg

SEQ ID NO: 2031 - DNA, 18 bp, Artificial Sequence
  Description of Artificial Sequence: Synthetic oligonucleotide
ggcaatgttacctgttta

SEQ ID NO: 2032 - DNA, 18 bp, Artificial Sequence
  Description of Artificial Sequence: Synthetic oligonucleotide
aaaacccgctcttgggca

SEQ ID NO: 2033 - DNA, 18 bp, Artificial Sequence
  Description of Artificial Sequence: Synthetic oligonucleotide
gaccaaaaacccgctctt

SEQ ID NO: 2034 - DNA, 18 bp, Artificial Sequence
  Description of Artificial Sequence: Synthetic oligonucleotide
ggctggaccaaaaacccg

SEQ ID NO: 2035 - DNA, 18 bp, Artificial Sequence
  Description of Artificial Sequence: Synthetic oligonucleotide
gctagggctggaccaaaa

SEQ ID NO: 2036 - DNA, 18 bp, Artificial Sequence
  Description of Artificial Sequence: Synthetic oligonucleotide
ttcgggctagggctggac

SEQ ID NO: 2037 - DNA, 18 bp, Artificial Sequence
  Description of Artificial Sequence: Synthetic oligonucleotide
cagggttcgggctagggc

SEQ ID NO: 2038 - DNA, 18 bp, Artificial Sequence
  Description of Artificial Sequence: Synthetic oligonucleotide
ggggtcagggttcgggct

SEQ ID NO: 2039 - DNA, 18 bp, Artificial Sequence
  Description of Artificial Sequence: Synthetic oligonucleotide
cctgtggggtcagggttc

SEQ ID NO: 2040 - DNA, 18 bp, Artificial Sequence
  Description of Artificial Sequence: Synthetic oligonucleotide
acagccctgtggggtcag

SEQ ID NO: 2041 - DNA, 18 bp, Artificial Sequence
  Description of Artificial Sequence: Synthetic oligonucleotide
agggcacagccctgtggg

SEQ ID NO: 2042 - DNA, 18 bp, Artificial Sequence
  Description of Artificial Sequence: Synthetic oligonucleotide
agtgtagggcacagccct

SEQ ID NO: 2043 - DNA, 18 bp, Artificial Sequence
  Description of Artificial Sequence: Synthetic oligonucleotide
cattcagtgtagggcaca

SEQ ID NO: 2044 - DNA, 18 bp, Artificial Sequence
  Description of Artificial Sequence: Synthetic oligonucleotide
cgggtcattcagtgtagg

SEQ ID NO: 2045 - DNA, 18 bp, Artificial Sequence
  Description of Artificial Sequence: Synthetic oligonucleotide
gccaacgggtcattcagt

SEQ ID NO: 2046 - DNA, 18 bp, Artificial Sequence
  Description of Artificial Sequence: Synthetic oligonucleotide
gaggggccaacgggtcat

SEQ ID NO: 2047 - DNA, 18 bp, Artificial Sequence
  Description of Artificial Sequence: Synthetic oligonucleotide
tgagggaggggccaacgg

SEQ ID NO: 2048 - DNA, 18 bp, Artificial Sequence
  Description of Artificial Sequence: Synthetic oligonucleotide
gagggtgagggaggggcc

SEQ ID NO: 2049 - DNA, 18 bp, Artificial Sequence
  Description of Artificial Sequence: Synthetic oligonucleotide
ggtcagagggtgagggag

SEQ ID NO: 2050 - DNA, 18 bp, Artificial Sequence
  Description of Artificial Sequence: Synthetic oligonucleotide
gagagggtcagagggtga

SEQ ID NO: 2051 - DNA, 18 bp, Artificial Sequence
  Description of Artificial Sequence: Synthetic oligonucleotide
gaagagagagggtcagag

SEQ ID NO: 2052 - DNA, 18 bp, Artificial Sequence
  Description of Artificial Sequence: Synthetic oligonucleotide
actaggaagagagagggt

SEQ ID NO: 2053 - DNA, 18 bp, Artificial Sequence
  Description of Artificial Sequence: Synthetic oligonucleotide
ggggcactaggaagagag

SEQ ID NO: 2054 - DNA, 18 bp, Artificial Sequence
  Description of Artificial Sequence: Synthetic oligonucleotide
ggcagggggcactaggaa

SEQ ID NO: 2055 - DNA, 18 bp, Artificial Sequence
  Description of Artificial Sequence: Synthetic oligonucleotide
gggagggcagggggcact

SEQ ID NO: 2056 - DNA, 18 bp, Artificial Sequence
  Description of Artificial Sequence: Synthetic oligonucleotide
ggagggggagggcagggg

SEQ ID NO: 2057 - DNA, 18 bp, Artificial Sequence
  Description of Artificial Sequence: Synthetic oligonucleotide
gcagtggagggggagggc

SEQ ID NO: 2058 - DNA, 18 bp, Artificial Sequence
  Description of Artificial Sequence: Synthetic oligonucleotide
aagaggcagtggaggggg

SEQ ID NO: 2059 - DNA, 18 bp, Artificial Sequence
  Description of Artificial Sequence: Synthetic oligonucleotide
agagaaagaggcagtgga

SEQ ID NO: 2060 - DNA, 18 bp, Artificial Sequence
  Description of Artificial Sequence: Synthetic oligonucleotide
tgggaagagaaagaggca

SEQ ID NO: 2061 - DNA, 18 bp, Artificial Sequence
  Description of Artificial Sequence: Synthetic oligonucleotide
aaaaacccgctcttgggc

SEQ ID NO: 2062 - DNA, 18 bp, Artificial Sequence
  Description of Artificial Sequence: Synthetic oligonucleotide
ggaccaaaaacccgctct

SEQ ID NO: 2063 - DNA, 18 bp, Artificial Sequence
  Description of Artificial Sequence: Synthetic oligonucleotide
gggctggaccaaaaaccc

SEQ ID NO: 2064 - DNA, 18 bp, Artificial Sequence
  Description of Artificial Sequence: Synthetic oligonucleotide
ggctagggctggaccaaa

SEQ ID NO: 2065 - DNA, 18 bp, Artificial Sequence
  Description of Artificial Sequence: Synthetic oligonucleotide
gttcgggctagggctgga

SEQ ID NO: 2066 - DNA, 18 bp, Artificial Sequence
  Description of Artificial Sequence: Synthetic oligonucleotide
tcagggttcgggctaggg

SEQ ID NO: 2067 - DNA, 18 bp, Artificial Sequence
  Description of Artificial Sequence: Synthetic oligonucleotide
tggggtcagggttcgggc

SEQ ID NO: 2068 - DNA, 18 bp, Artificial Sequence
  Description of Artificial Sequence: Synthetic oligonucleotide
ccctgtggggtcagggtt

SEQ ID NO: 2069 - DNA, 18 bp, Artificial Sequence
  Description of Artificial Sequence: Synthetic oligonucleotide
cacagccctgtggggtca

SEQ ID NO: 2070 - DNA, 18 bp, Artificial Sequence
  Description of Artificial Sequence: Synthetic oligonucleotide
tagggcacagccctgtgg

SEQ ID NO: 2071 - DNA, 18 bp, Artificial Sequence
  Description of Artificial Sequence: Synthetic oligonucleotide
cagtgtagggcacagccc

SEQ ID NO: 2072 - DNA, 18 bp, Artificial Sequence
  Description of Artificial Sequence: Synthetic oligonucleotide
tcattcagtgtagggcac

SEQ ID NO: 2073 - DNA, 18 bp, Artificial Sequence
  Description of Artificial Sequence: Synthetic oligonucleotide
acgggtcattcagtgtag

SEQ ID NO: 2074 - DNA, 18 bp, Artificial Sequence
  Description of Artificial Sequence: Synthetic oligonucleotide
ggccaacgggtcattcag

SEQ ID NO: 2075 - DNA, 18 bp, Artificial Sequence
  Description of Artificial Sequence: Synthetic oligonucleotide
ggaggggccaacgggtca

SEQ ID NO: 2076 - DNA, 18 bp, Artificial Sequence
  Description of Artificial Sequence: Synthetic oligonucleotide
gtgagggaggggccaacg

SEQ ID NO: 2077 - DNA, 18 bp, Artificial Sequence
  Description of Artificial Sequence: Synthetic oligonucleotide
agagggtgagggaggggc

SEQ ID NO: 2078 - DNA, 18 bp, Artificial Sequence
  Description of Artificial Sequence: Synthetic oligonucleotide
gggtcagagggtgaggga

SEQ ID NO: 2079 - DNA, 18 bp, Artificial Sequence
  Description of Artificial Sequence: Synthetic oligonucleotide
agagagggtcagagggtg

SEQ ID NO: 2080 - DNA, 18 bp, Artificial Sequence
  Description of Artificial Sequence: Synthetic oligonucleotide
ggaagagagagggtcaga

SEQ ID NO: 2081 - DNA, 18 bp, Artificial Sequence
  Description of Artificial Sequence: Synthetic oligonucleotide
cactaggaagagagaggg

SEQ ID NO: 2082 - DNA, 18 bp, Artificial Sequence
  Description of Artificial Sequence: Synthetic oligonucleotide
gggggcactaggaagaga

SEQ ID NO: 2083 - DNA, 18 bp, Artificial Sequence
  Description of Artificial Sequence: Synthetic oligonucleotide
gggcagggggcactagga

SEQ ID NO: 2084 - DNA, 18 bp, Artificial Sequence
  Description of Artificial Sequence: Synthetic oligonucleotide
ggggagggcagggggcac

SEQ ID NO: 2085 - DNA, 18 bp, Artificial Sequence
  Description of Artificial Sequence: Synthetic oligonucleotide
tggagggggagggcaggg

SEQ ID NO: 2086 - DNA, 18 bp, Artificial Sequence
  Description of Artificial Sequence: Synthetic oligonucleotide
ggcagtggagggggaggg

SEQ ID NO: 2087 - DNA, 18 bp, Artificial Sequence
  Description of Artificial Sequence: Synthetic oligonucleotide
aaagaggcagtggagggg

SEQ ID NO: 2088 - DNA, 18 bp, Artificial Sequence
  Description of Artificial Sequence: Synthetic oligonucleotide
aagagaaagaggcagtgg

SEQ ID NO: 2089 - DNA, 18 bp, Artificial Sequence
  Description of Artificial Sequence: Synthetic oligonucleotide
gtgggaagagaaagaggc

SEQ ID NO: 2090 - DNA, 18 bp, Artificial Sequence
  Description of Artificial Sequence: Synthetic oligonucleotide
ggggggtgggaagagaaa

SEQ ID NO: 2091 - DNA, 18 bp, Artificial Sequence
  Description of Artificial Sequence: Synthetic oligonucleotide
agggaggggggtgggaag

SEQ ID NO: 2092 - DNA, 18 bp, Artificial Sequence
  Description of Artificial Sequence: Synthetic oligonucleotide
ccttcagggaggggggtg

SEQ ID NO: 2093 - DNA, 18 bp, Artificial Sequence
  Description of Artificial Sequence: Synthetic oligonucleotide
ctgctccttcagggaggg

SEQ ID NO: 2094 - DNA, 18 bp, Artificial Sequence
  Description of Artificial Sequence: Synthetic oligonucleotide
aaatgctgctccttcagg

SEQ ID NO: 2095 - DNA, 18 bp, Artificial Sequence
  Description of Artificial Sequence: Synthetic oligonucleotide
cgcccaaatgctgctcct

SEQ ID NO: 2096 - DNA, 18 bp, Artificial Sequence
  Description of Artificial Sequence: Synthetic oligonucleotide
ccagacgcccaaatgctg

SEQ ID NO: 2097 - DNA, 18 bp, Artificial Sequence
  Description of Artificial Sequence: Synthetic oligonucleotide
acccaccagacgcccaaa

SEQ ID NO: 2098 - DNA, 18 bp, Artificial Sequence
  Description of Artificial Sequence: Synthetic oligonucleotide
ctttcacccaccagacgc

SEQ ID NO: 2099 - DNA, 18 bp, Artificial Sequence
  Description of Artificial Sequence: Synthetic oligonucleotide
ccatgctttcacccacca

SEQ ID NO: 2100 - DNA, 18 bp, Artificial Sequence
  Description of Artificial Sequence: Synthetic oligonucleotide
ctctgagccctgtgggga

SEQ ID NO: 2101 - DNA, 18 bp, Artificial Sequence
  Description of Artificial Sequence: Synthetic oligonucleotide
ccaccctctgagccctgt

SEQ ID NO: 2102 - DNA, 18 bp, Artificial Sequence
  Description of Artificial Sequence: Synthetic oligonucleotide
tccacccaccctctgagc

SEQ ID NO: 2103 - DNA, 18 bp, Artificial Sequence
  Description of Artificial Sequence: Synthetic oligonucleotide
tggggtccacccaccctc

SEQ ID NO: 2104 - DNA, 18 bp, Artificial Sequence
  Description of Artificial Sequence: Synthetic oligonucleotide
cagtatggggtccaccca

SEQ ID NO: 2105 - DNA, 18 bp, Artificial Sequence
  Description of Artificial Sequence: Synthetic oligonucleotide
tggggcagtatggggtcc

SEQ ID NO: 2106 - DNA, 18 bp, Artificial Sequence
  Description of Artificial Sequence: Synthetic oligonucleotide
cggggtggggcagtatgg

SEQ ID NO: 2107 - DNA, 18 bp, Artificial Sequence
  Description of Artificial Sequence: Synthetic oligonucleotide
cccttcggggtggggcag

SEQ ID NO: 2108 - DNA, 18 bp, Artificial Sequence
  Description of Artificial Sequence: Synthetic oligonucleotide
ccatccccttcggggtgg

SEQ ID NO: 2109 - DNA, 18 bp, Artificial Sequence
  Description of Artificial Sequence: Synthetic oligonucleotide
ccacgccatccccttcgg

SEQ ID NO: 2110 - DNA, 18 bp, Artificial Sequence
  Description of Artificial Sequence: Synthetic oligonucleotide
agcctccacgccatcccc

SEQ ID NO: 2111 - DNA, 18 bp, Artificial Sequence
  Description of Artificial Sequence: Synthetic oligonucleotide
cccaaagcctccacgcca

SEQ ID NO: 2112 - DNA, 18 bp, Artificial Sequence
  Description of Artificial Sequence: Synthetic oligonucleotide
ggagacccaaagcctcca

SEQ ID NO: 2113 - DNA, 18 bp, Artificial Sequence
  Description of Artificial Sequence: Synthetic oligonucleotide
cctgtggagacccaaagc

SEQ ID NO: 2114 - DNA, 18 bp, Artificial Sequence
  Description of Artificial Sequence: Synthetic oligonucleotide
tgacccctgtggagaccc

SEQ ID NO: 2115 - DNA, 18 bp, Artificial Sequence
  Description of Artificial Sequence: Synthetic oligonucleotide
gtccctgacccctgtgga

SEQ ID NO: 2116 - DNA, 18 bp, Artificial Sequence
  Description of Artificial Sequence: Synthetic oligonucleotide
cctcagtccctgacccct

SEQ ID NO: 2117 - DNA, 18 bp, Artificial Sequence
  Description of Artificial Sequence: Synthetic oligonucleotide
cctgtcctcagtccctga

SEQ ID NO: 2118 - DNA, 18 bp, Artificial Sequence
  Description of Artificial Sequence: Synthetic oligonucleotide
cagaacctgtcctcagtc

SEQ ID NO: 2119 - DNA, 18 bp, Artificial Sequence
  Description of Artificial Sequence: Synthetic oligonucleotide
ccccacagaacctgtcct

SEQ ID NO: 2120 - DNA, 18 bp, Artificial Sequence
  Description of Artificial Sequence: Synthetic oligonucleotide
cctgcccccacagaacct

SEQ ID NO: 2121 - DNA, 18 bp, Artificial Sequence
  Description of Artificial Sequence: Synthetic oligonucleotide
cccctcctgcccccacag

SEQ ID NO: 2122 - DNA, 18 bp, Artificial Sequence
  Description of Artificial Sequence: Synthetic oligonucleotide
cttggcccctcctgcccc

SEQ ID NO: 2123 - DNA, 18 bp, Artificial Sequence
  Description of Artificial Sequence: Synthetic oligonucleotide
acctgcttggcccctcct

SEQ ID NO: 2124 - DNA, 18 bp, Artificial Sequence
  Description of Artificial Sequence: Synthetic oligonucleotide
agagcacctgcttggccc

SEQ ID NO: 2125 - DNA, 18 bp, Artificial Sequence
  Description of Artificial Sequence: Synthetic oligonucleotide
gctgcagagcacctgctt

SEQ ID NO: 2126 - DNA, 18 bp, Artificial Sequence
  Description of Artificial Sequence: Synthetic oligonucleotide
caggggctgcagagcacc

SEQ ID NO: 2127 - DNA, 18 bp, Artificial Sequence
  Description of Artificial Sequence: Synthetic oligonucleotide
aggctcaggggctgcaga

SEQ ID NO: 2128 - DNA, 18 bp, Artificial Sequence
  Description of Artificial Sequence: Synthetic oligonucleotide
gggccaggctcaggggct

SEQ ID NO: 2129 - DNA, 18 bp, Artificial Sequence
  Description of Artificial Sequence: Synthetic oligonucleotide
tccaggctcctccttttc

SEQ ID NO: 2130 - DNA, 18 bp, Artificial Sequence
  Description of Artificial Sequence: Synthetic oligonucleotide
tagattccaggctcctcc

SEQ ID NO: 2131 - DNA, 18 bp, Artificial Sequence
  Description of Artificial Sequence: Synthetic oligonucleotide
gtgcttagattccaggct

SEQ ID NO: 2132 - DNA, 18 bp, Artificial Sequence
  Description of Artificial Sequence: Synthetic oligonucleotide
gataagtgcttagattcc

SEQ ID NO: 2133 - DNA, 18 bp, Artificial Sequence
  Description of Artificial Sequence: Synthetic oligonucleotide
caggagataagtgcttag

SEQ ID NO: 2134 - DNA, 18 bp, Artificial Sequence
  Description of Artificial Sequence: Synthetic oligonucleotide
cttttcaggagataagtg

SEQ ID NO: 2135 - DNA, 18 bp, Artificial Sequence
  Description of Artificial Sequence: Synthetic oligonucleotide
tgtaccttttcaggagat

SEQ ID NO: 2136 - DNA, 18 bp, Artificial Sequence
  Description of Artificial Sequence: Synthetic oligonucleotide
gtttctgtaccttttcag

SEQ ID NO: 2137 - DNA, 18 bp, Artificial Sequence
  Description of Artificial Sequence: Synthetic oligonucleotide
aacatgtttctgtacctt

SEQ ID NO: 2138 - DNA, 18 bp, Artificial Sequence
  Description of Artificial Sequence: Synthetic oligonucleotide
tctccaacatgtttctgt

SEQ ID NO: 2139 - DNA, 18 bp, Artificial Sequence
  Description of Artificial Sequence: Synthetic oligonucleotide
caagatctccaacatgtt

SEQ ID NO: 2140 - DNA, 18 bp, Artificial Sequence
  Description of Artificial Sequence: Synthetic oligonucleotide
aggctcaagatctccaac

SEQ ID NO: 2141 - DNA, 18 bp, Artificial Sequence
  Description of Artificial Sequence: Synthetic oligonucleotide
ccttgaggctcaagatct

SEQ ID NO: 2142 - DNA, 18 bp, Artificial Sequence
  Description of Artificial Sequence: Synthetic oligonucleotide
aagcaccttgaggctcaa

SEQ ID NO: 2143 - DNA, 18 bp, Artificial Sequence
  Description of Artificial Sequence: Synthetic oligonucleotide
gaagcaagcaccttgagg

SEQ ID NO: 2144 - DNA, 18 bp, Artificial Sequence
  Description of Artificial Sequence: Synthetic oligonucleotide
attctgaagcaagcacct

SEQ ID NO: 2145 - DNA, 18 bp, Artificial Sequence
  Description of Artificial Sequence: Synthetic oligonucleotide
ggaaaattctgaagcaag

SEQ ID NO: 2146 - DNA, 18 bp, Artificial Sequence
  Description of Artificial Sequence: Synthetic oligonucleotide
aatcaggaaaattctgaa

SEQ ID NO: 2147 - DNA, 18 bp, Artificial Sequence
  Description of Artificial Sequence: Synthetic oligonucleotide
gggagaatcaggaaaatt

SEQ ID NO: 2148 - DNA, 18 bp, Artificial Sequence
  Description of Artificial Sequence: Synthetic oligonucleotide
ggagagggagaatcagga

SEQ ID NO: 2149 - DNA, 18 bp, Artificial Sequence
  Description of Artificial Sequence: Synthetic oligonucleotide
ggtctggagagggagaat

SEQ ID NO: 2150 - DNA, 18 bp, Artificial Sequence
  Description of Artificial Sequence: Synthetic oligonucleotide
gaataggtctggagaggg

SEQ ID NO: 2151 - DNA, 18 bp, Artificial Sequence
  Description of Artificial Sequence: Synthetic oligonucleotide
gaacagaataggtctgga

SEQ ID NO: 2152 - DNA, 18 bp, Artificial Sequence
  Description of Artificial Sequence: Synthetic oligonucleotide
cccaagaacagaataggt

SEQ ID NO: 2153 - DNA, 18 bp, Artificial Sequence
  Description of Artificial Sequence: Synthetic oligonucleotide
tgggtcccaagaacagaa

SEQ ID NO: 2154 - DNA, 18 bp, Artificial Sequence
  Description of Artificial Sequence: Synthetic oligonucleotide
aagcttgggtcccaagaa

SEQ ID NO: 2155 - DNA, 18 bp, Artificial Sequence
  Description of Artificial Sequence: Synthetic oligonucleotide
ccaagaagcttgggtccc

SEQ ID NO: 2156 - DNA, 18 bp, Artificial Sequence
  Description of Artificial Sequence: Synthetic oligonucleotide
tggagccaagaagcttgg

SEQ ID NO: 2157 - DNA, 18 bp, Artificial Sequence
  Description of Artificial Sequence: Synthetic oligonucleotide
tgggctggagccaagaag

SEQ ID NO: 2158 - DNA, 18 bp, Artificial Sequence
  Description of Artificial Sequence: Synthetic oligonucleotide
gggagtgggctggagcca

SEQ ID NO: 2159 - DNA, 18 bp, Artificial Sequence
  Description of Artificial Sequence: Synthetic oligonucleotide
agtgggggagtgggctgg

SEQ ID NO: 2160 - DNA, 18 bp, Artificial Sequence
  Description of Artificial Sequence: Synthetic oligonucleotide
cctctagtgggggagtgg

SEQ ID NO: 2161 - DNA, 18 bp, Artificial Sequence
  Description of Artificial Sequence: Synthetic oligonucleotide
cagctcctctagtggggg

SEQ ID NO: 2162 - DNA, 18 bp, Artificial Sequence
  Description of Artificial Sequence: Synthetic oligonucleotide
ctttccagctcctctagt

SEQ ID NO: 2163 - DNA, 18 bp, Artificial Sequence
  Description of Artificial Sequence: Synthetic oligonucleotide
ccaaactttccagctcct

SEQ ID NO: 2164 - DNA, 18 bp, Artificial Sequence
  Description of Artificial Sequence: Synthetic oligonucleotide
cagcaccaaactttccag

SEQ ID NO: 2165 - DNA, 18 bp, Artificial Sequence
  Description of Artificial Sequence: Synthetic oligonucleotide
gaccacagcaccaaactt

SEQ ID NO: 2166 - DNA, 18 bp, Artificial Sequence
  Description of Artificial Sequence: Synthetic oligonucleotide
ggtatgaccacagcacca

SEQ ID NO: 2167 - DNA, 18 bp, Artificial Sequence
  Description of Artificial Sequence: Synthetic oligonucleotide
tctttggtatgaccacag

SEQ ID NO: 2168 - DNA, 18 bp, Artificial Sequence
  Description of Artificial Sequence: Synthetic oligonucleotide
gcccatctttggtatgac

SEQ ID NO: 2169 - DNA, 18 bp, Artificial Sequence
  Description of Artificial Sequence: Synthetic oligonucleotide
gtgttgcccatctttggt

SEQ ID NO: 2170 - DNA, 18 bp, Artificial Sequence
  Description of Artificial Sequence: Synthetic oligonucleotide
tctgggtgttgcccatct

SEQ ID NO: 2171 - DNA, 18 bp, Artificial Sequence
  Description of Artificial Sequence: Synthetic oligonucleotide
aggagtctgggtgttgcc

SEQ ID NO: 2172 - DNA, 18 bp, Artificial Sequence
  Description of Artificial Sequence: Synthetic oligonucleotide
aattcaaagacagtcatg

SEQ ID NO: 2173 - DNA, 18 bp, Artificial Sequence
  Description of Artificial Sequence: Synthetic oligonucleotide
agtcaaattcaaagacag

SEQ ID NO: 2174 - DNA, 18 bp, Artificial Sequence
  Description of Artificial Sequence: Synthetic oligonucleotide
attaaagtcaaattcaaa

SEQ ID NO: 2175 - DNA, 18 bp, Artificial Sequence
  Description of Artificial Sequence: Synthetic oligonucleotide
atcctattaaagtcaaat

SEQ ID NO: 2176 - DNA, 18 bp, Artificial Sequence
  Description of Artificial Sequence: Synthetic oligonucleotide
ttgaaatcctattaaagt

SEQ ID NO: 2177 - DNA, 18 bp, Artificial Sequence
  Description of Artificial Sequence: Synthetic oligonucleotide
cactgttgaaatcctatt

SEQ ID NO: 2178 - DNA, 18 bp, Artificial Sequence
  Description of Artificial Sequence: Synthetic oligonucleotide
caaatcactgttgaaatc

SEQ ID NO: 2179 - DNA, 18 bp, Artificial Sequence
  Description of Artificial Sequence: Synthetic oligonucleotide
gtccccaaatcactgttg

SEQ ID NO: 2180 - DNA, 18 bp, Artificial Sequence
  Description of Artificial Sequence: Synthetic oligonucleotide
tgcctgtccccaaatcac

SEQ ID NO: 2181 - DNA, 18 bp, Artificial Sequence
  Description of Artificial Sequence: Synthetic oligonucleotide
tgtattgcctgtccccaa

SEQ ID NO: 2182 - DNA, 18 bp, Artificial Sequence
  Description of Artificial Sequence: Synthetic oligonucleotide
tgaaatgtattgcctgtc

SEQ ID NO: 2183 - DNA, 18 bp, Artificial Sequence
  Description of Artificial Sequence: Synthetic oligonucleotide
ctacctgaaatgtattgc

SEQ ID NO: 2184 - DNA, 18 bp, Artificial Sequence
  Description of Artificial Sequence: Synthetic oligonucleotide
gtggtctacctgaaatgt

SEQ ID NO: 2185 - DNA, 18 bp, Artificial Sequence
  Description of Artificial Sequence: Synthetic oligonucleotide
agcaggtggtctacctga

SEQ ID NO: 2186 - DNA, 18 bp, Artificial Sequence
  Description of Artificial Sequence: Synthetic oligonucleotide
tgtcaagcaggtggtcta

SEQ ID NO: 2187 - DNA, 18 bp, Artificial Sequence
  Description of Artificial Sequence: Synthetic oligonucleotide
aactttgtcaagcaggtg

SEQ ID NO: 2188 - DNA, 18 bp, Artificial Sequence
  Description of Artificial Sequence: Synthetic oligonucleotide
accagaactttgtcaagc

SEQ ID NO: 2189 - DNA, 18 bp, Artificial Sequence
  Description of Artificial Sequence: Synthetic oligonucleotide
gaggcaccagaactttgt

SEQ ID NO: 2190 - DNA, 18 bp, Artificial Sequence
  Description of Artificial Sequence: Synthetic oligonucleotide
aaaatgaggcaccagaac

SEQ ID NO: 2191 - DNA, 18 bp, Artificial Sequence
  Description of Artificial Sequence: Synthetic oligonucleotide
gaaggaaaatgaggcacc

SEQ ID NO: 2192 - DNA, 18 bp, Artificial Sequence
  Description of Artificial Sequence: Synthetic oligonucleotide
caactgaaggaaaatgag

SEQ ID NO: 2193 - DNA, 18 bp, Artificial Sequence
  Description of Artificial Sequence: Synthetic oligonucleotide
cattccaactgaaggaaa

SEQ ID NO: 2194 - DNA, 18 bp, Artificial Sequence
  Description of Artificial Sequence: Synthetic oligonucleotide
tgtcccattccaactgaa

SEQ ID NO: 2195 - DNA, 18 bp, Artificial Sequence
  Description of Artificial Sequence: Synthetic oligonucleotide
gggtctgtcccattccaa

SEQ ID NO: 2196 - DNA, 18 bp, Artificial Sequence
  Description of Artificial Sequence: Synthetic oligonucleotide
catcagggtctgtcccat

SEQ ID NO: 2197 - DNA, 18 bp, Artificial Sequence
  Description of Artificial Sequence: Synthetic oligonucleotide
gaccccatcagggtctgt

SEQ ID NO: 2198 - DNA, 18 bp, Artificial Sequence
  Description of Artificial Sequence: Synthetic oligonucleotide
ttcctgaccccatcaggg

SEQ ID NO: 2199 - DNA, 18 bp, Artificial Sequence
  Description of Artificial Sequence: Synthetic oligonucleotide
ctttgttcctgaccccat

SEQ ID NO: 2200 - DNA, 18 bp, Artificial Sequence
  Description of Artificial Sequence: Synthetic oligonucleotide
tggctctttgttcctgac

SEQ ID NO: 2201 - DNA, 18 bp, Artificial Sequence
  Description of Artificial Sequence: Synthetic oligonucleotide
cacgctggctctttgttc

SEQ ID NO: 2202 - DNA, 18 bp, Artificial Sequence
  Description of Artificial Sequence: Synthetic oligonucleotide
tctcccacgctggctctt

SEQ ID NO: 2203 - DNA, 18 bp, Artificial Sequence
  Description of Artificial Sequence: Synthetic oligonucleotide
tcacctctcccacgctgg

SEQ ID NO: 2204 - DNA, 18 bp, Artificial Sequence
  Description of Artificial Sequence: Synthetic oligonucleotide
attgatcacctctcccac

SEQ ID NO: 2205 - DNA, 18 bp, Artificial Sequence
  Description of Artificial Sequence: Synthetic oligonucleotide
tgctcattgatcacctct

SEQ ID NO: 2206 - DNA, 18 bp, Artificial Sequence
  Description of Artificial Sequence: Synthetic oligonucleotide
cctcctgctcattgatca

SEQ ID NO: 2207 - DNA, 18 bp, Artificial Sequence
  Description of Artificial Sequence: Synthetic oligonucleotide
gccaacctcctgctcatt

SEQ ID NO: 2208 - DNA, 18 bp, Artificial Sequence
  Description of Artificial Sequence: Synthetic oligonucleotide
ggatggccaacctcctgc

SEQ ID NO: 2209 - DNA, 18 bp, Artificial Sequence
  Description of Artificial Sequence: Synthetic oligonucleotide
aatgaggatggccaacct

SEQ ID NO: 2210 - DNA, 18 bp, Artificial Sequence
  Description of Artificial Sequence: Synthetic oligonucleotide
ggaggaatgaggatggcc

SEQ ID NO: 2211 - DNA, 18 bp, Artificial Sequence
  Description of Artificial Sequence: Synthetic oligonucleotide
ttcaaagacagtcatgcc

SEQ ID NO: 2212 - DNA, 18 bp, Artificial Sequence
  Description of Artificial Sequence: Synthetic oligonucleotide
tcaaattcaaagacagtc

SEQ ID NO: 2213 - DNA, 18 bp, Artificial Sequence
  Description of Artificial Sequence: Synthetic oligonucleotide
taaagtcaaattcaaaga

SEQ ID NO: 2214 - DNA, 18 bp, Artificial Sequence
  Description of Artificial Sequence: Synthetic oligonucleotide
cctattaaagtcaaattc

SEQ ID NO: 2215 - DNA, 18 bp, Artificial Sequence
  Description of Artificial Sequence: Synthetic oligonucleotide
gaaatcctattaaagtca

SEQ ID NO: 2216 - DNA, 18 bp, Artificial Sequence
  Description of Artificial Sequence: Synthetic oligonucleotide
ctgttgaaatcctattaa

SEQ ID NO: 2217 - DNA, 18 bp, Artificial Sequence
  Description of Artificial Sequence: Synthetic oligonucleotide
aatcactgttgaaatcct

SEQ ID NO: 2218 - DNA, 18 bp, Artificial Sequence
  Description of Artificial Sequence: Synthetic oligonucleotide
ccccaaatcactgttgaa

SEQ ID NO: 2219 - DNA, 18 bp, Artificial Sequence
  Description of Artificial Sequence: Synthetic oligonucleotide
cctgtccccaaatcactg

SEQ ID NO: 2220 - DNA, 18 bp, Artificial Sequence
  Description of Artificial Sequence: Synthetic oligonucleotide
tattgcctgtccccaaat

SEQ ID NO: 2221 - DNA, 18 bp, Artificial Sequence
  Description of Artificial Sequence: Synthetic oligonucleotide
aaatgtattgcctgtccc

SEQ ID NO: 2222 - DNA, 18 bp, Artificial Sequence
  Description of Artificial Sequence: Synthetic oligonucleotide
acctgaaatgtattgcct

SEQ ID NO: 2223 - DNA, 18 bp, Artificial Sequence
  Description of Artificial Sequence: Synthetic oligonucleotide
ggtctacctgaaatgtat

SEQ ID NO: 2224 - DNA, 18 bp, Artificial Sequence
  Description of Artificial Sequence: Synthetic oligonucleotide
caggtggtctacctgaaa

SEQ ID NO: 2225 - DNA, 18 bp, Artificial Sequence
  Description of Artificial Sequence: Synthetic oligonucleotide
tcaagcaggtggtctacc

SEQ ID NO: 2226 - DNA, 18 bp, Artificial Sequence
  Description of Artificial Sequence: Synthetic oligonucleotide
ctttgtcaagcaggtggt

SEQ ID NO: 2227 - DNA, 18 bp, Artificial Sequence
  Description of Artificial Sequence: Synthetic oligonucleotide
cagaactttgtcaagcag

SEQ ID NO: 2228 - DNA, 18 bp, Artificial Sequence
  Description of Artificial Sequence: Synthetic oligonucleotide
ggcaccagaactttgtca

SEQ ID NO: 2229 - DNA, 18 bp, Artificial Sequence
  Description of Artificial Sequence: Synthetic oligonucleotide
aatgaggcaccagaactt

SEQ ID NO: 2230 - DNA, 18 bp, Artificial Sequence
  Description of Artificial Sequence: Synthetic oligonucleotide
aggaaaatgaggcaccag

SEQ ID NO: 2231 - DNA, 18 bp, Artificial Sequence
  Description of Artificial Sequence: Synthetic oligonucleotide
actgaaggaaaatgaggc

SEQ ID NO: 2232 - DNA, 18 bp, Artificial Sequence
  Description of Artificial Sequence: Synthetic oligonucleotide
ttccaactgaaggaaaat

SEQ ID NO: 2233 - DNA, 18 bp, Artificial Sequence
  Description of Artificial Sequence: Synthetic oligonucleotide
tcccattccaactgaagg

SEQ ID NO: 2234 - DNA, 18 bp, Artificial Sequence
  Description of Artificial Sequence: Synthetic oligonucleotide
gtctgtcccattccaact

SEQ ID NO: 2235 - DNA, 18 bp, Artificial Sequence
  Description of Artificial Sequence: Synthetic oligonucleotide
tcagggtctgtcccattc

SEQ ID NO: 2236 - DNA, 18 bp, Artificial Sequence
  Description of Artificial Sequence: Synthetic oligonucleotide
ccccatcagggtctgtcc

SEQ ID NO: 2237 - DNA, 18 bp, Artificial Sequence
  Description of Artificial Sequence: Synthetic oligonucleotide
cctgaccccatcagggtc

SEQ ID NO: 2238 - DNA, 18 bp, Artificial Sequence
  Description of Artificial Sequence: Synthetic oligonucleotide
ttgttcctgaccccatca

SEQ ID NO: 2239 - DNA, 18 bp, Artificial Sequence
  Description of Artificial Sequence: Synthetic oligonucleotide
gctctttgttcctgaccc

SEQ ID NO: 2240 - DNA, 18 bp, Artificial Sequence
  Description of Artificial Sequence: Synthetic oligonucleotide
cgctggctctttgttcct

SEQ ID NO: 2241 - DNA, 18 bp, Artificial Sequence
  Description of Artificial Sequence: Synthetic oligonucleotide
tcccacgctggctctttg

SEQ ID NO: 2242 - DNA, 18 bp, Artificial Sequence
  Description of Artificial Sequence: Synthetic oligonucleotide
acctctcccacgctggct

SEQ ID NO: 2243 - DNA, 18 bp, Artificial Sequence
  Description of Artificial Sequence: Synthetic oligonucleotide
tgatcacctctcccacgc

SEQ ID NO: 2244 - DNA, 18 bp, Artificial Sequence
  Description of Artificial Sequence: Synthetic oligonucleotide
ctcattgatcacctctcc

SEQ ID NO: 2245 - DNA, 18 bp, Artificial Sequence
  Description of Artificial Sequence: Synthetic oligonucleotide
tcctgctcattgatcacc

SEQ ID NO: 2246 - DNA, 18 bp, Artificial Sequence
  Description of Artificial Sequence: Synthetic oligonucleotide
caacctcctgctcattga

SEQ ID NO: 2247 - DNA, 18 bp, Artificial Sequence
  Description of Artificial Sequence: Synthetic oligonucleotide
atggccaacctcctgctc

SEQ ID NO: 2248 - DNA, 18 bp, Artificial Sequence
  Description of Artificial Sequence: Synthetic oligonucleotide
tgaggatggccaacctcc

SEQ ID NO: 2249 - DNA, 18 bp, Artificial Sequence
  Description of Artificial Sequence: Synthetic oligonucleotide
aggaatgaggatggccaa

SEQ ID NO: 2250 - DNA, 18 bp, Artificial Sequence
  Description of Artificial Sequence: Synthetic oligonucleotide
gggggaggaatgaggatg

SEQ ID NO: 2251 - DNA, 18 bp, Artificial Sequence
  Description of Artificial Sequence: Synthetic oligonucleotide
cattctttacatttctaa

SEQ ID NO: 2252 - DNA, 18 bp, Artificial Sequence
  Description of Artificial Sequence: Synthetic oligonucleotide
agattcattctttacatt

SEQ ID NO: 2253 - DNA, 18 bp, Artificial Sequence
  Description of Artificial Sequence: Synthetic oligonucleotide
tccccagattcattcttt

SEQ ID NO: 2254 - DNA, 18 bp, Artificial Sequence
  Description of Artificial Sequence: Synthetic oligonucleotide
acctgtccccagattcat

SEQ ID NO: 2255 - DNA, 18 bp, Artificial Sequence
  Description of Artificial Sequence: Synthetic oligonucleotide
tttctacctgtccccaga

SEQ ID NO: 2256 - DNA, 18 bp, Artificial Sequence
  Description of Artificial Sequence: Synthetic oligonucleotide
cttactttctacctgtcc

SEQ ID NO: 2257 - DNA, 18 bp, Artificial Sequence
  Description of Artificial Sequence: Synthetic oligonucleotide
gtgatcttactttctacc

SEQ ID NO: 2258 - DNA, 18 bp, Artificial Sequence
  Description of Artificial Sequence: Synthetic oligonucleotide
ggactgtgatcttacttt

SEQ ID NO: 2259 - DNA, 18 bp, Artificial Sequence
  Description of Artificial Sequence: Synthetic oligonucleotide
gaaacggactgtgatctt

SEQ ID NO: 2260 - DNA, 18 bp, Artificial Sequence
  Description of Artificial Sequence: Synthetic oligonucleotide
ccttggaaacggactgtg

SEQ ID NO: 2261 - DNA, 18 bp, Artificial Sequence
  Description of Artificial Sequence: Synthetic oligonucleotide
ctaccccttggaaacgga

SEQ ID NO: 2262 - DNA, 18 bp, Artificial Sequence
  Description of Artificial Sequence: Synthetic oligonucleotide
gtggactaccccttggaa

SEQ ID NO: 2263 - DNA, 18 bp, Artificial Sequence
  Description of Artificial Sequence: Synthetic oligonucleotide
actcagtggactacccct

SEQ ID NO: 2264 - DNA, 18 bp, Artificial Sequence
  Description of Artificial Sequence: Synthetic oligonucleotide
ctcgaactcagtggacta

SEQ ID NO: 2265 - DNA, 18 bp, Artificial Sequence
  Description of Artificial Sequence: Synthetic oligonucleotide
ggaagctcgaactcagtg

SEQ ID NO: 2266 - DNA, 18 bp, Artificial Sequence
  Description of Artificial Sequence: Synthetic oligonucleotide
ttttaggaagctcgaact

SEQ ID NO: 2267 - DNA, 18 bp, Artificial Sequence
  Description of Artificial Sequence: Synthetic oligonucleotide
accatttttaggaagctc

SEQ ID NO: 2268 - DNA, 18 bp, Artificial Sequence
  Description of Artificial Sequence: Synthetic oligonucleotide
aaaagaccatttttagga

SEQ ID NO: 2269 - DNA, 18 bp, Artificial Sequence
  Description of Artificial Sequence: Synthetic oligonucleotide
aagataaaagaccatttt

SEQ ID NO: 2270 - DNA, 18 bp, Artificial Sequence
  Description of Artificial Sequence: Synthetic oligonucleotide
acataaagataaaagacc

SEQ ID NO: 2271 - DNA, 18 bp, Artificial Sequence
  Description of Artificial Sequence: Synthetic oligonucleotide
tctgtacataaagataaa

SEQ ID NO: 2272 - DNA, 18 bp, Artificial Sequence
  Description of Artificial Sequence: Synthetic oligonucleotide
tcttttctgtacataaag

SEQ ID NO: 2273 - DNA, 18 bp, Artificial Sequence
  Description of Artificial Sequence: Synthetic oligonucleotide
tgatgtcttttctgtaca

SEQ ID NO: 2274 - DNA, 18 bp, Artificial Sequence
  Description of Artificial Sequence: Synthetic oligonucleotide
ttttgtgatgtcttttct

SEQ ID NO: 2275 - DNA, 18 bp, Artificial Sequence
  Description of Artificial Sequence: Synthetic oligonucleotide
atgaattttgtgatgtct

SEQ ID NO: 2276 - DNA, 18 bp, Artificial Sequence
  Description of Artificial Sequence: Synthetic oligonucleotide
ttgtaatgaattttgtga

SEQ ID NO: 2277 - DNA, 18 bp, Artificial Sequence
  Description of Artificial Sequence: Synthetic oligonucleotide
acattttgtaatgaattt

SEQ ID NO: 2278 - DNA, 18 bp, Artificial Sequence
  Description of Artificial Sequence: Synthetic oligonucleotide
aagtgacattttgtaatg

SEQ ID NO: 2279 - DNA, 18 bp, Artificial Sequence
  Description of Artificial Sequence: Synthetic oligonucleotide
gcagtaagtgacattttg

SEQ ID NO: 2280 - DNA, 18 bp, Artificial Sequence
  Description of Artificial Sequence: Synthetic oligonucleotide
atggagcagtaagtgaca

SEQ ID NO: 2281 - DNA, 18 bp, Artificial Sequence
  Description of Artificial Sequence: Synthetic oligonucleotide
ccagcatggagcagtaag

SEQ ID NO: 2282 - DNA, 18 bp, Artificial Sequence
  Description of Artificial Sequence: Synthetic oligonucleotide
tttctccagcatggagca

SEQ ID NO: 2283 - DNA, 18 bp, Artificial Sequence
  Description of Artificial Sequence: Synthetic oligonucleotide
atggctttctccagcatg

SEQ ID NO: 2284 - DNA, 18 bp, Artificial Sequence
  Description of Artificial Sequence: Synthetic oligonucleotide
aggatatggctttctcca

SEQ ID NO: 2285 - DNA, 18 bp, Artificial Sequence
  Description of Artificial Sequence: Synthetic oligonucleotide
ccagaaggatatggcttt

SEQ ID NO: 2286 - DNA, 18 bp, Artificial Sequence
  Description of Artificial Sequence: Synthetic oligonucleotide
aagtcccagaaggatatg

SEQ ID NO: 2287 - DNA, 18 bp, Artificial Sequence
  Description of Artificial Sequence: Synthetic oligonucleotide
gactcaagtcccagaagg

SEQ ID NO: 2288 - DNA, 18 bp, Artificial Sequence
  Description of Artificial Sequence: Synthetic oligonucleotide
gtgcagactcaagtccca

SEQ ID NO: 2289 - DNA, 18 bp, Artificial Sequence
  Description of Artificial Sequence: Synthetic oligonucleotide
taaatgtgcagactcaag

SEQ ID NO: 2290 - DNA, 18 bp, Artificial Sequence
  Description of Artificial Sequence: Synthetic oligonucleotide
gtagttaaatgtgcagac

SEQ ID NO: 2291 - DNA, 18 bp, Artificial Sequence
  Description of Artificial Sequence: Synthetic oligonucleotide
tacctgtagttaaatgtg

SEQ ID NO: 2292 - DNA, 18 bp, Artificial Sequence
  Description of Artificial Sequence: Synthetic oligonucleotide
atcagtacctgtagttaa

SEQ ID NO: 2293 - DNA, 18 bp, Artificial Sequence
  Description of Artificial Sequence: Synthetic oligonucleotide
ctgggtgaagctaggata

SEQ ID NO: 2294 - DNA, 18 bp, Artificial Sequence
  Description of Artificial Sequence: Synthetic oligonucleotide
caaagctgggtgaagcta

SEQ ID NO: 2295 - DNA, 18 bp, Artificial Sequence
  Description of Artificial Sequence: Synthetic oligonucleotide
ctccccaaagctgggtga

SEQ ID NO: 2296 - DNA, 18 bp, Artificial Sequence
  Description of Artificial Sequence: Synthetic oligonucleotide
ttctcctccccaaagctg

SEQ ID NO: 2297 - DNA, 18 bp, Artificial Sequence
  Description of Artificial Sequence: Synthetic oligonucleotide
gacttttctcctccccaa

SEQ ID NO: 2298 - DNA, 18 bp, Artificial Sequence
  Description of Artificial Sequence: Synthetic oligonucleotide
agacagacttttctcctc

SEQ ID NO: 2299 - DNA, 18 bp, Artificial Sequence
  Description of Artificial Sequence: Synthetic oligonucleotide
ataggagacagacttttc

SEQ ID NO: 2300 - DNA, 18 bp, Artificial Sequence
  Description of Artificial Sequence: Synthetic oligonucleotide
tggagataggagacagac

SEQ ID NO: 2301 - DNA, 18 bp, Artificial Sequence
  Description of Artificial Sequence: Synthetic oligonucleotide
agagttggagataggaga

SEQ ID NO: 2302 - DNA, 18 bp, Artificial Sequence
  Description of Artificial Sequence: Synthetic oligonucleotide
gactcagagttggagata

SEQ ID NO: 2303 - DNA, 18 bp, Artificial Sequence
  Description of Artificial Sequence: Synthetic oligonucleotide
gtcctgactcagagttgg

SEQ ID NO: 2304 - DNA, 18 bp, Artificial Sequence
  Description of Artificial Sequence: Synthetic oligonucleotide
ttttggtcctgactcaga

SEQ ID NO: 2305 - DNA, 18 bp, Artificial Sequence
  Description of Artificial Sequence: Synthetic oligonucleotide
atactttttggtcctgac

SEQ ID NO: 2306 - DNA, 18 bp, Artificial Sequence
  Description of Artificial Sequence: Synthetic oligonucleotide
aagagatactttttggtc

SEQ ID NO: 2307 - DNA, 18 bp, Artificial Sequence
  Description of Artificial Sequence: Synthetic oligonucleotide
gaaataagagatactttt

SEQ ID NO: 2308 - DNA, 18 bp, Artificial Sequence
  Description of Artificial Sequence: Synthetic oligonucleotide
aaggggaaataagagata

SEQ ID NO: 2309 - DNA, 18 bp, Artificial Sequence
  Description of Artificial Sequence: Synthetic oligonucleotide
gtgggaaggggaaataag

SEQ ID NO: 2310 - DNA, 18 bp, Artificial Sequence
  Description of Artificial Sequence: Synthetic oligonucleotide
gaagagtgggaaggggaa

SEQ ID NO: 2311 - DNA, 18 bp, Artificial Sequence
  Description of Artificial Sequence: Synthetic oligonucleotide
acaaggaagagtgggaag

SEQ ID NO: 2312 - DNA, 18 bp, Artificial Sequence
  Description of Artificial Sequence: Synthetic oligonucleotide
aggatacaaggaagagtg

SEQ ID NO: 2313 - DNA, 18 bp, Artificial Sequence
  Description of Artificial Sequence: Synthetic oligonucleotide
gagctaggatacaaggaa

SEQ ID NO: 2314 - DNA, 18 bp, Artificial Sequence
  Description of Artificial Sequence: Synthetic oligonucleotide
gcaaggagctaggataca

SEQ ID NO: 2315 - DNA, 18 bp, Artificial Sequence
  Description of Artificial Sequence: Synthetic oligonucleotide
ggtggggaccagctctca

SEQ ID NO: 2316 - DNA, 18 bp, Artificial Sequence
  Description of Artificial Sequence: Synthetic oligonucleotide
gggtgggtggggaccagc

SEQ ID NO: 2317 - DNA, 18 bp, Artificial Sequence
  Description of Artificial Sequence: Synthetic oligonucleotide
ggccagggtgggtgggga

SEQ ID NO: 2318 - DNA, 18 bp, Artificial Sequence
  Description of Artificial Sequence: Synthetic oligonucleotide
aaaggggccagggtgggt

SEQ ID NO: 2319 - DNA, 18 bp, Artificial Sequence
  Description of Artificial Sequence: Synthetic oligonucleotide
gtcaaaaaggggccaggg

SEQ ID NO: 2320 - DNA, 18 bp, Artificial Sequence
  Description of Artificial Sequence: Synthetic oligonucleotide
ggcaagtcaaaaaggggc

SEQ ID NO: 2321 - DNA, 18 bp, Artificial Sequence
  Description of Artificial Sequence: Synthetic oligonucleotide
aatggggcaagtcaaaaa

SEQ ID NO: 2322 - DNA, 18 bp, Artificial Sequence
  Description of Artificial Sequence: Synthetic oligonucleotide
cacagaatggggcaagtc

SEQ ID NO: 2323 - DNA, 18 bp, Artificial Sequence
  Description of Artificial Sequence: Synthetic oligonucleotide
ggggtcacagaatggggc

SEQ ID NO: 2324 - DNA, 18 bp, Artificial Sequence
  Description of Artificial Sequence: Synthetic oligonucleotide
cctgtggggtcacagaat

SEQ ID NO: 2325 - DNA, 18 bp, Artificial Sequence
  Description of Artificial Sequence: Synthetic oligonucleotide
ggaggcctgtggggtcac

SEQ ID NO: 2326 - DNA, 18 bp, Artificial Sequence
  Description of Artificial Sequence: Synthetic oligonucleotide
gtgtgggaggcctgtggg

SEQ ID NO: 2327 - DNA, 18 bp, Artificial Sequence
  Description of Artificial Sequence: Synthetic oligonucleotide
ctgaggtgtgggaggcct

SEQ ID NO: 2328 - DNA, 18 bp, Artificial Sequence
  Description of Artificial Sequence: Synthetic oligonucleotide
ttagactgaggtgtggga

SEQ ID NO: 2329 - DNA, 18 bp, Artificial Sequence
  Description of Artificial Sequence: Synthetic oligonucleotide
tgaagttagactgaggtg

SEQ ID NO: 2330 - DNA, 18 bp, Artificial Sequence
  Description of Artificial Sequence: Synthetic oligonucleotide
ggaactgaagttagactg

SEQ ID NO: 2331 - DNA, 18 bp, Artificial Sequence
  Description of Artificial Sequence: Synthetic oligonucleotide
ggatgggaactgaagtta

SEQ ID NO: 2332 - DNA, 18 bp, Artificial Sequence
  Description of Artificial Sequence: Synthetic oligonucleotide
atgaaggatgggaactga

SEQ ID NO: 2333 - DNA, 18 bp, Artificial Sequence
  Description of Artificial Sequence: Synthetic oligonucleotide
ctgggatgaaggatggga

SEQ ID NO: 2334 - DNA, 18 bp, Artificial Sequence
  Description of Artificial Sequence: Synthetic oligonucleotide
agtgcctgggatgaagga

SEQ ID NO: 2335 - DNA, 18 bp, Artificial Sequence
  Description of Artificial Sequence: Synthetic oligonucleotide
tagttagtgcctgggatg

SEQ ID NO: 2336 - DNA, 18 bp, Artificial Sequence
  Description of Artificial Sequence: Synthetic oligonucleotide
caatatagttagtgcctg

SEQ ID NO: 2337 - DNA, 18 bp, Artificial Sequence
  Description of Artificial Sequence: Synthetic oligonucleotide
cgcttcaatatagttagt

SEQ ID NO: 2338 - DNA, 18 bp, Artificial Sequence
  Description of Artificial Sequence: Synthetic oligonucleotide
caagacgcttcaatatag

SEQ ID NO: 2339 - DNA, 18 bp, Artificial Sequence
  Description of Artificial Sequence: Synthetic oligonucleotide
tcccacaagacgcttcaa

SEQ ID NO: 2340 - DNA, 18 bp, Artificial Sequence
  Description of Artificial Sequence: Synthetic oligonucleotide
agggttcccacaagacgc

SEQ ID NO: 2341 - DNA, 18 bp, Artificial Sequence
  Description of Artificial Sequence: Synthetic oligonucleotide
ataggagggttcccacaa

SEQ ID NO: 2342 - DNA, 18 bp, Artificial Sequence
  Description of Artificial Sequence: Synthetic oligonucleotide
ggctgataggagggttcc

SEQ ID NO: 2343 - DNA, 18 bp, Artificial Sequence
  Description of Artificial Sequence: Synthetic oligonucleotide
cctgtggctgataggagg

SEQ ID NO: 2344 - DNA, 18 bp, Artificial Sequence
  Description of Artificial Sequence: Synthetic oligonucleotide
gcttccctgtggctgata

SEQ ID NO: 2345 - DNA, 18 bp, Artificial Sequence
  Description of Artificial Sequence: Synthetic oligonucleotide
gaccagcttccctgtggc

SEQ ID NO: 2346 - DNA, 18 bp, Artificial Sequence
  Description of Artificial Sequence: Synthetic oligonucleotide
gctctgaccagcttccct

SEQ ID NO: 2347 - DNA, 18 bp, Artificial Sequence
  Description of Artificial Sequence: Synthetic oligonucleotide
gtctggctctgaccagct

SEQ ID NO: 2348 - DNA, 18 bp, Artificial Sequence
  Description of Artificial Sequence: Synthetic oligonucleotide
acgaggtctggctctgac

SEQ ID NO: 2349 - DNA, 18 bp, Artificial Sequence
  Description of Artificial Sequence: Synthetic oligonucleotide
caggcacgaggtctggct

SEQ ID NO: 2350 - DNA, 18 bp, Artificial Sequence
  Description of Artificial Sequence: Synthetic oligonucleotide
ttccccaggcacgaggtc

SEQ ID NO: 2351 - DNA, 18 bp, Artificial Sequence
  Description of Artificial Sequence: Synthetic oligonucleotide
ccccattccccaggcacg

SEQ ID NO: 2352 - DNA, 18 bp, Artificial Sequence
  Description of Artificial Sequence: Synthetic oligonucleotide
atgatccccattccccag

SEQ ID NO: 2353 - DNA, 18 bp, Artificial Sequence
  Description of Artificial Sequence: Synthetic oligonucleotide
cacccatgatccccattc

SEQ ID NO: 2354 - DNA, 18 bp, Artificial Sequence
  Description of Artificial Sequence: Synthetic oligonucleotide
gccagcacccatgatccc

SEQ ID NO: 2355 - DNA, 18 bp, Artificial Sequence
  Description of Artificial Sequence: Synthetic oligonucleotide
acaatgccagcacccatg

SEQ ID NO: 2356 - DNA, 18 bp, Artificial Sequence
  Description of Artificial Sequence: Synthetic oligonucleotide
tacccacaatgccagcac

SEQ ID NO: 2357 - DNA, 18 bp, Artificial Sequence
  Description of Artificial Sequence: Synthetic oligonucleotide
caccctacccacaatgcc

SEQ ID NO: 2358 - DNA, 18 bp, Artificial Sequence
  Description of Artificial Sequence: Synthetic oligonucleotide
aaaggcaccctacccaca

SEQ ID NO: 2359 - DNA, 18 bp, Artificial Sequence
  Description of Artificial Sequence: Synthetic oligonucleotide
tgaatgaatactgaacag

SEQ ID NO: 2360 - DNA, 18 bp, Artificial Sequence
  Description of Artificial Sequence: Synthetic oligonucleotide
ctccttgaatgaatactg

SEQ ID NO: 2361 - DNA, 18 bp, Artificial Sequence
  Description of Artificial Sequence: Synthetic oligonucleotide
atgtactccttgaatgaa

SEQ ID NO: 2362 - DNA, 18 bp, Artificial Sequence
  Description of Artificial Sequence: Synthetic oligonucleotide
tcaccatgtactccttga

SEQ ID NO: 2363 - DNA, 18 bp, Artificial Sequence
  Description of Artificial Sequence: Synthetic oligonucleotide
gcatttcaccatgtactc

SEQ ID NO: 2364 - DNA, 18 bp, Artificial Sequence
  Description of Artificial Sequence: Synthetic oligonucleotide
agctggcatttcaccatg

SEQ ID NO: 2365 - DNA, 18 bp, Artificial Sequence
  Description of Artificial Sequence: Synthetic oligonucleotide
tttccagctggcatttca

SEQ ID NO: 2366 - DNA, 18 bp, Artificial Sequence
  Description of Artificial Sequence: Synthetic oligonucleotide
tttcttttccagctggca

SEQ ID NO: 2367 - DNA, 18 bp, Artificial Sequence
  Description of Artificial Sequence: Synthetic oligonucleotide
ataggtttcttttccagc

SEQ ID NO: 2368 - DNA, 18 bp, Artificial Sequence
  Description of Artificial Sequence: Synthetic oligonucleotide
ctgagataggtttctttt

SEQ ID NO: 2369 - DNA, 18 bp, Artificial Sequence
  Description of Artificial Sequence: Synthetic oligonucleotide
tatccctgagataggttt

SEQ ID NO: 2370 - DNA, 18 bp, Artificial Sequence
  Description of Artificial Sequence: Synthetic oligonucleotide
tcatatatccctgagata

SEQ ID NO: 2371 - DNA, 18 bp, Artificial Sequence
  Description of Artificial Sequence: Synthetic oligonucleotide
taatgtcatatatccctg

SEQ ID NO: 2372 - DNA, 18 bp, Artificial Sequence
  Description of Artificial Sequence: Synthetic oligonucleotide
cggcataatgtcatatat

SEQ ID NO: 2373 - DNA, 18 bp, Artificial Sequence
  Description of Artificial Sequence: Synthetic oligonucleotide
ggtctcggcataatgtca

SEQ ID NO: 2374 - DNA, 18 bp, Artificial Sequence
  Description of Artificial Sequence: Synthetic oligonucleotide
aacccggtctcggcataa

SEQ ID NO: 2375 - DNA, 18 bp, Artificial Sequence
  Description of Artificial Sequence: Synthetic oligonucleotide
gcatgaacccggtctcgg

SEQ ID NO: 2376 - DNA, 18 bp, Artificial Sequence
  Description of Artificial Sequence: Synthetic oligonucleotide
tcagtgcatgaacccggt

SEQ ID NO: 2377 - DNA, 18 bp, Artificial Sequence
  Description of Artificial Sequence: Synthetic oligonucleotide
atcaatcagtgcatgaac

SEQ ID NO: 2378 - DNA, 18 bp, Artificial Sequence
  Description of Artificial Sequence: Synthetic oligonucleotide
gtcaaatcaatcagtgca

SEQ ID NO: 2379 - DNA, 18 bp, Artificial Sequence
  Description of Artificial Sequence: Synthetic oligonucleotide
cacctgtcaaatcaatca

SEQ ID NO: 2380 - DNA, 18 bp, Artificial Sequence
  Description of Artificial Sequence: Synthetic oligonucleotide
cagttcacctgtcaaatc

SEQ ID NO: 2381 - DNA, 18 bp, Artificial Sequence
  Description of Artificial Sequence: Synthetic oligonucleotide
tggagcagttcacctgtc

SEQ ID NO: 2382 - DNA, 18 bp, Artificial Sequence
  Description of Artificial Sequence: Synthetic oligonucleotide
caacatggagcagttcac

SEQ ID NO: 2383 - DNA, 18 bp, Artificial Sequence
  Description of Artificial Sequence: Synthetic oligonucleotide
tcccacaacatggagcag

SEQ ID NO: 2384 - DNA, 18 bp, Artificial Sequence
  Description of Artificial Sequence: Synthetic oligonucleotide
cctggtcccacaacatgg

SEQ ID NO: 2385 - DNA, 18 bp, Artificial Sequence
  Description of Artificial Sequence: Synthetic oligonucleotide
acatccctggtcccacaa

SEQ ID NO: 2386 - DNA, 18 bp, Artificial Sequence
  Description of Artificial Sequence: Synthetic oligonucleotide
gcttcacatccctggtcc

SEQ ID NO: 2387 - DNA, 18 bp, Artificial Sequence
  Description of Artificial Sequence: Synthetic oligonucleotide
tacttgcttcacatccct

SEQ ID NO: 2388 - DNA, 18 bp, Artificial Sequence
  Description of Artificial Sequence: Synthetic oligonucleotide
tgatgtacttgcttcaca

SEQ ID NO: 2389 - DNA, 18 bp, Artificial Sequence
  Description of Artificial Sequence: Synthetic oligonucleotide
aaggttgatgtacttgct

SEQ ID NO: 2390 - DNA, 18 bp, Artificial Sequence
  Description of Artificial Sequence: Synthetic oligonucleotide
gtttcaaggttgatgtac

SEQ ID NO: 2391 - DNA, 18 bp, Artificial Sequence
  Description of Artificial Sequence: Synthetic oligonucleotide
cgcgcgtttcaaggttga

SEQ ID NO: 2392 - DNA, 18 bp, Artificial Sequence
  Description of Artificial Sequence: Synthetic oligonucleotide
aactgcgcgcgtttcaag

SEQ ID NO: 2393 - DNA, 18 bp, Artificial Sequence
  Description of Artificial Sequence: Synthetic oligonucleotide
aaaccaactgcgcgcgtt

SEQ ID NO: 2394 - DNA, 18 bp, Artificial Sequence
  Description of Artificial Sequence: Synthetic oligonucleotide
ctcccaaaccaactgcgc

SEQ ID NO: 2395 - DNA, 18 bp, Artificial Sequence
  Description of Artificial Sequence: Synthetic oligonucleotide
cggctctcccaaaccaac

SEQ ID NO: 2396 - DNA, 18 bp, Artificial Sequence
  Description of Artificial Sequence: Synthetic oligonucleotide
caggccggctctcccaaa

SEQ ID NO: 2397 - DNA, 18 bp, Artificial Sequence
  Description of Artificial Sequence: Synthetic oligonucleotide
ttcctcaggccggctctc

SEQ ID NO: 2398 - DNA, 18 bp, Artificial Sequence
  Description of Artificial Sequence: Synthetic oligonucleotide
ggggcttcctcaggccgg

SEQ ID NO: 2399 - DNA, 18 bp, Artificial Sequence
  Description of Artificial Sequence: Synthetic oligonucleotide
gggcaggggcttcctcag

SEQ ID NO: 2400 - DNA, 18 bp, Artificial Sequence
  Description of Artificial Sequence: Synthetic oligonucleotide
ccttggggcaggggcttc

SEQ ID NO: 2401 - DNA, 18 bp, Artificial Sequence
  Description of Artificial Sequence: Synthetic oligonucleotide
ggcagccttggggcaggg

SEQ ID NO: 2402 - DNA, 18 bp, Artificial Sequence
  Description of Artificial Sequence: Synthetic oligonucleotide
ctgtgggcagccttgggg

SEQ ID NO: 2403 - DNA, 18 bp, Artificial Sequence
  Description of Artificial Sequence: Synthetic oligonucleotide
tccctctgtgggcagcct

SEQ ID NO: 2404 - DNA, 18 bp, Artificial Sequence
  Description of Artificial Sequence: Synthetic oligonucleotide
atccttccctctgtgggc

SEQ ID NO: 2405 - DNA, 18 bp, Artificial Sequence
  Description of Artificial Sequence: Synthetic oligonucleotide
acacaatccttccctctg

SEQ ID NO: 2406 - DNA, 18 bp, Artificial Sequence
  Description of Artificial Sequence: Synthetic oligonucleotide
cacacacacaatccttcc

SEQ ID NO: 2407 - DNA, 18 bp, Artificial Sequence
  Description of Artificial Sequence: Synthetic oligonucleotide
acacacacacacacaatc

SEQ ID NO: 2408 - DNA, 18 bp, Artificial Sequence
  Description of Artificial Sequence: Synthetic oligonucleotide
cacacacacacacacaca

SEQ ID NO: 2409 - DNA, 18 bp, Artificial Sequence
  Description of Artificial Sequence: Synthetic oligonucleotide
tggcacacacacacacac

SEQ ID NO: 2410 - DNA, 18 bp, Artificial Sequence
  Description of Artificial Sequence: Synthetic oligonucleotide
caagatggcacacacaca

SEQ ID NO: 2411 - DNA, 18 bp, Artificial Sequence
  Description of Artificial Sequence: Synthetic oligonucleotide
tctgtcaagatggcacac

SEQ ID NO: 2412 - DNA, 18 bp, Artificial Sequence
  Description of Artificial Sequence: Synthetic oligonucleotide
ctcactctgtcaagatgg

SEQ ID NO: 2413 - DNA, 18 bp, Artificial Sequence
  Description of Artificial Sequence: Synthetic oligonucleotide
actgactcactctgtcaa

SEQ ID NO: 2414 - DNA, 18 bp, Artificial Sequence
  Description of Artificial Sequence: Synthetic oligonucleotide
gtcagactgactcactct

SEQ ID NO: 2415 - DNA, 18 bp, Artificial Sequence
  Description of Artificial Sequence: Synthetic oligonucleotide
ggcaagtcagactgactc

SEQ ID NO: 2416 - DNA, 18 bp, Artificial Sequence
  Description of Artificial Sequence: Synthetic oligonucleotide
acaaaggcaagtcagact

SEQ ID NO: 2417 - DNA, 18 bp, Artificial Sequence
  Description of Artificial Sequence: Synthetic oligonucleotide
ctggaccaggcagcgggg

SEQ ID NO: 2418 - DNA, 18 bp, Artificial Sequence
  Description of Artificial Sequence: Synthetic oligonucleotide
aggagctggaccaggcag

SEQ ID NO: 2419 - DNA, 18 bp, Artificial Sequence
  Description of Artificial Sequence: Synthetic oligonucleotide
gagggaggagctggacca

SEQ ID NO: 2420 - DNA, 18 bp, Artificial Sequence
  Description of Artificial Sequence: Synthetic oligonucleotide
tggatgagggaggagctg

SEQ ID NO: 2421 - DNA, 18 bp, Artificial Sequence
  Description of Artificial Sequence: Synthetic oligonucleotide
ctgcctggatgagggagg

SEQ ID NO: 2422 - DNA, 18 bp, Artificial Sequence
  Description of Artificial Sequence: Synthetic oligonucleotide
gagccctgcctggatgag

SEQ ID NO: 2423 - DNA, 18 bp, Artificial Sequence
  Description of Artificial Sequence: Synthetic oligonucleotide
cgggggagccctgcctgg

SEQ ID NO: 2424 - DNA, 18 bp, Artificial Sequence
  Description of Artificial Sequence: Synthetic oligonucleotide
ctgggcgggggagccctg

SEQ ID NO: 2425 - DNA, 18 bp, Artificial Sequence
  Description of Artificial Sequence: Synthetic oligonucleotide
ggctgctgggcgggggag

SEQ ID NO: 2426 - DNA, 18 bp, Artificial Sequence
  Description of Artificial Sequence: Synthetic oligonucleotide
ggagtggctgctgggcgg

SEQ ID NO: 2427 - DNA, 18 bp, Artificial Sequence
  Description of Artificial Sequence: Synthetic oligonucleotide
ggaggggagtggctgctg

SEQ ID NO: 2428 - DNA, 18 bp, Artificial Sequence
  Description of Artificial Sequence: Synthetic oligonucleotide
ggcagggaggggagtggc

SEQ ID NO: 2429 - DNA, 18 bp, Artificial Sequence
  Description of Artificial Sequence: Synthetic oligonucleotide
gagcaggcagggagggga

SEQ ID NO: 2430 - DNA, 18 bp, Artificial Sequence
  Description of Artificial Sequence: Synthetic oligonucleotide
gccatgagcaggcaggga

SEQ ID NO: 2431 - DNA, 18 bp, Artificial Sequence
  Description of Artificial Sequence: Synthetic oligonucleotide
agggggccatgagcaggc

SEQ ID NO: 2432 - DNA, 18 bp, Artificial Sequence
  Description of Artificial Sequence: Synthetic oligonucleotide
agagcagggggccatgag

SEQ ID NO: 2433 - DNA, 18 bp, Artificial Sequence
  Description of Artificial Sequence: Synthetic oligonucleotide
aagggagagcagggggcc

SEQ ID NO: 2434 - DNA, 18 bp, Artificial Sequence
  Description of Artificial Sequence: Synthetic oligonucleotide
gaggaaagggagagcagg

SEQ ID NO: 2435 - DNA, 18 bp, Artificial Sequence
  Description of Artificial Sequence: Synthetic oligonucleotide
atggggaggaaagggaga

SEQ ID NO: 2436 - DNA, 18 bp, Artificial Sequence
  Description of Artificial Sequence: Synthetic oligonucleotide
ggggtatggggaggaaag

SEQ ID NO: 2437 - DNA, 18 bp, Artificial Sequence
  Description of Artificial Sequence: Synthetic oligonucleotide
gtctgggggtatggggag

SEQ ID NO: 2438 - DNA, 18 bp, Artificial Sequence
  Description of Artificial Sequence: Synthetic oligonucleotide
cacaggtctgggggtatg

SEQ ID NO: 2439 - DNA, 18 bp, Artificial Sequence
  Description of Artificial Sequence: Synthetic oligonucleotide
gcaagcacaggtctgggg

SEQ ID NO: 2440 - DNA, 18 bp, Artificial Sequence
  Description of Artificial Sequence: Synthetic oligonucleotide
cccgggcaagcacaggtc

SEQ ID NO: 2441 - DNA, 18 bp, Artificial Sequence
  Description of Artificial Sequence: Synthetic oligonucleotide
ctctccccgggcaagcac

SEQ ID NO: 2442 - DNA, 18 bp, Artificial Sequence
  Description of Artificial Sequence: Synthetic oligonucleotide
cctgactctccccgggca

SEQ ID NO: 2443 - DNA, 18 bp, Artificial Sequence
  Description of Artificial Sequence: Synthetic oligonucleotide
agagccctgactctcccc

SEQ ID NO: 2444 - DNA, 18 bp, Artificial Sequence
  Description of Artificial Sequence: Synthetic oligonucleotide
acaggagagccctgactc

SEQ ID NO: 2445 - DNA, 18 bp, Artificial Sequence
  Description of Artificial Sequence: Synthetic oligonucleotide
agctgacaggagagccct

SEQ ID NO: 2446 - DNA, 18 bp, Artificial Sequence
  Description of Artificial Sequence: Synthetic oligonucleotide
gacccagctgacaggaga

SEQ ID NO: 2447 - DNA, 18 bp, Artificial Sequence
  Description of Artificial Sequence: Synthetic oligonucleotide
gaggggacccagctgaca

SEQ ID NO: 2448 - DNA, 18 bp, Artificial Sequence
  Description of Artificial Sequence: Synthetic oligonucleotide
gctgggaggggacccagc

SEQ ID NO: 2449 - DNA, 18 bp, Artificial Sequence
  Description of Artificial Sequence: Synthetic oligonucleotide
ccggggctgggaggggac

SEQ ID NO: 2450 - DNA, 18 bp, Artificial Sequence
  Description of Artificial Sequence: Synthetic oligonucleotide
gcctcccggggctgggag

SEQ ID NO: 2451 - DNA, 18 bp, Artificial Sequence
  Description of Artificial Sequence: Synthetic oligonucleotide
tggcggcctcccggggct

SEQ ID NO: 2452 - DNA, 18 bp, Artificial Sequence
  Description of Artificial Sequence: Synthetic oligonucleotide
tccagtggcggcctcccg

SEQ ID NO: 2453 - DNA, 18 bp, Artificial Sequence
  Description of Artificial Sequence: Synthetic oligonucleotide
agggctccagtggcggcc

SEQ ID NO: 2454 - DNA, 18 bp, Artificial Sequence
  Description of Artificial Sequence: Synthetic oligonucleotide
ctcgagctgcgcctatcc

SEQ ID NO: 2455 - DNA, 18 bp, Artificial Sequence
  Description of Artificial Sequence: Synthetic oligonucleotide
ctccactcgagctgcgcc

SEQ ID NO: 2456 - DNA, 18 bp, Artificial Sequence
  Description of Artificial Sequence: Synthetic oligonucleotide
agggcctccactcgagct

SEQ ID NO: 2457 - DNA, 18 bp, Artificial Sequence
  Description of Artificial Sequence: Synthetic oligonucleotide
gtgccagggcctccactc

SEQ ID NO: 2458 - DNA, 18 bp, Artificial Sequence
  Description of Artificial Sequence: Synthetic oligonucleotide
gggaggtgccagggcctc

SEQ ID NO: 2459 - DNA, 18 bp, Artificial Sequence
  Description of Artificial Sequence: Synthetic oligonucleotide
atccagggaggtgccagg

SEQ ID NO: 2460 - DNA, 18 bp, Artificial Sequence
  Description of Artificial Sequence: Synthetic oligonucleotide
ctcccatccagggaggtg

SEQ ID NO: 2461 - DNA, 18 bp, Artificial Sequence
  Description of Artificial Sequence: Synthetic oligonucleotide
ccctcctcccatccaggg

SEQ ID NO: 2462 - DNA, 18 bp, Artificial Sequence
  Description of Artificial Sequence: Synthetic oligonucleotide
aagccccctcctcccatc

SEQ ID NO: 2463 - DNA, 18 bp, Artificial Sequence
  Description of Artificial Sequence: Synthetic oligonucleotide
aaggaaagccccctcctc

SEQ ID NO: 2464 - DNA, 18 bp, Artificial Sequence
  Description of Artificial Sequence: Synthetic oligonucleotide
caagcaaggaaagccccc

SEQ ID NO: 2465 - DNA, 18 bp, Artificial Sequence
  Description of Artificial Sequence: Synthetic oligonucleotide
gtacccaagcaaggaaag

SEQ ID NO: 2466 - DNA, 18 bp, Artificial Sequence
  Description of Artificial Sequence: Synthetic oligonucleotide
agtgggtacccaagcaag

SEQ ID NO: 2467 - DNA, 18 bp, Artificial Sequence
  Description of Artificial Sequence: Synthetic oligonucleotide
gtcaaagtgggtacccaa

SEQ ID NO: 2468 - DNA, 18 bp, Artificial Sequence
  Description of Artificial Sequence: Synthetic oligonucleotide
ggcctgtcaaagtgggta

SEQ ID NO: 2469 - DNA, 18 bp, Artificial Sequence
  Description of Artificial Sequence: Synthetic oligonucleotide
ttgagggcctgtcaaagt

SEQ ID NO: 2470 - DNA, 18 bp, Artificial Sequence
  Description of Artificial Sequence: Synthetic oligonucleotide
agaccttgagggcctgtc

SEQ ID NO: 2471 - DNA, 18 bp, Artificial Sequence
  Description of Artificial Sequence: Synthetic oligonucleotide
ccaaaagaccttgagggc

SEQ ID NO: 2472 - DNA, 18 bp, Artificial Sequence
  Description of Artificial Sequence: Synthetic oligonucleotide
accccccaaaagaccttg

SEQ ID NO: 2473 - DNA, 18 bp, Artificial Sequence
  Description of Artificial Sequence: Synthetic oligonucleotide
ccccaaccccccaaaaga

SEQ ID NO: 2474 - DNA, 18 bp, Artificial Sequence
  Description of Artificial Sequence: Synthetic oligonucleotide
ccctgccccaacccccca

SEQ ID NO: 2475 - DNA, 18 bp, Artificial Sequence
  Description of Artificial Sequence: Synthetic oligonucleotide
agggcccctgccccaacc

SEQ ID NO: 2476 - DNA, 18 bp, Artificial Sequence
  Description of Artificial Sequence: Synthetic oligonucleotide
gagggagggcccctgccc

SEQ ID NO: 2477 - DNA, 18 bp, Artificial Sequence
  Description of Artificial Sequence: Synthetic oligonucleotide
aaagagagggagggcccc

SEQ ID NO: 2478 - DNA, 18 bp, Artificial Sequence
  Description of Artificial Sequence: Synthetic oligonucleotide
tggagaaagagagggagg

SEQ ID NO: 2479 - DNA, 18 bp, Artificial Sequence
  Description of Artificial Sequence: Synthetic oligonucleotide
cttcttggagaaagagag

SEQ ID NO: 2480 - DNA, 18 bp, Artificial Sequence
  Description of Artificial Sequence: Synthetic oligonucleotide
gcagccttcttggagaaa

SEQ ID NO: 2481 - DNA, 18 bp, Artificial Sequence
  Description of Artificial Sequence: Synthetic oligonucleotide
ggttggcagccttcttgg

SEQ ID NO: 2482 - DNA, 18 bp, Artificial Sequence
  Description of Artificial Sequence: Synthetic oligonucleotide
tctggggttggcagcctt

SEQ ID NO: 2483 - DNA, 18 bp, Artificial Sequence
  Description of Artificial Sequence: Synthetic oligonucleotide
ggggctctggggttggca

SEQ ID NO: 2484 - DNA, 18 bp, Artificial Sequence
  Description of Artificial Sequence: Synthetic oligonucleotide
aggctggggctctggggt

SEQ ID NO: 2485 - DNA, 18 bp, Artificial Sequence
  Description of Artificial Sequence: Synthetic oligonucleotide
gggcaaggctggggctct

SEQ ID NO: 2486 - DNA, 18 bp, Artificial Sequence
  Description of Artificial Sequence: Synthetic oligonucleotide
cctcagggcaaggctggg

SEQ ID NO: 2487 - DNA, 18 bp, Artificial Sequence
  Description of Artificial Sequence: Synthetic oligonucleotide
cctctcctcagggcaagg

SEQ ID NO: 2488 - DNA, 18 bp, Artificial Sequence
  Description of Artificial Sequence: Synthetic oligonucleotide
cacttcctctcctcaggg

SEQ ID NO: 2489 - DNA, 18 bp, Artificial Sequence
  Description of Artificial Sequence: Synthetic oligonucleotide
ggaaacacttcctctcct

SEQ ID NO: 2490 - DNA, 18 bp, Artificial Sequence
  Description of Artificial Sequence: Synthetic oligonucleotide
atgctggaaacacttcct

SEQ ID NO: 2491 - DNA, 18 bp, Artificial Sequence
  Description of Artificial Sequence: Synthetic oligonucleotide
ggaacatgctggaaacac

SEQ ID NO: 2492 - DNA, 18 bp, Artificial Sequence
  Description of Artificial Sequence: Synthetic oligonucleotide
acgtgggaacatgctgga

SEQ ID NO: 2493 - DNA, 18 bp, Artificial Sequence
  Description of Artificial Sequence: Synthetic oligonucleotide
caaacacgtgggaacatg

SEQ ID NO: 2494 - DNA, 18 bp, Artificial Sequence
  Description of Artificial Sequence: Synthetic oligonucleotide
gtgggcaaacacgtggga

SEQ ID NO: 2495 - DNA, 18 bp, Artificial Sequence
  Description of Artificial Sequence: Synthetic oligonucleotide
ggccggtgggcaaacacg

SEQ ID NO: 2496 - DNA, 18 bp, Artificial Sequence
  Description of Artificial Sequence: Synthetic oligonucleotide
cagctggccggtgggcaa

SEQ ID NO: 2497 - DNA, 18 bp, Artificial Sequence
  Description of Artificial Sequence: Synthetic oligonucleotide
ctcgacagctggccggtg

SEQ ID NO: 2498 - DNA, 18 bp, Artificial Sequence
  Description of Artificial Sequence: Synthetic oligonucleotide
ccacgctcgacagctggc

SEQ ID NO: 2499 - DNA, 18 bp, Artificial Sequence
  Description of Artificial Sequence: Synthetic oligonucleotide
gcagcccacgctcgacag

SEQ ID NO: 2500 - DNA, 18 bp, Artificial Sequence
  Description of Artificial Sequence: Synthetic oligonucleotide
ggaccgcagcccacgctc

SEQ ID NO: 2501 - DNA, 18 bp, Artificial Sequence
  Description of Artificial Sequence: Synthetic oligonucleotide
cagggggaccgcagccca

SEQ ID NO: 2502 - DNA, 18 bp, Artificial Sequence
  Description of Artificial Sequence: Synthetic oligonucleotide
ggcatcagggggaccgca

SEQ ID NO: 2503 - DNA, 18 bp, Artificial Sequence
  Description of Artificial Sequence: Synthetic oligonucleotide
aggctggcatcaggggga

SEQ ID NO: 2504 - DNA, 18 bp, Artificial Sequence
  Description of Artificial Sequence: Synthetic oligonucleotide
aatacatagtcaaatttg

SEQ ID NO: 2505 - DNA, 18 bp, Artificial Sequence
  Description of Artificial Sequence: Synthetic oligonucleotide
cttagaatacatagtcaa

SEQ ID NO: 2506 - DNA, 18 bp, Artificial Sequence
  Description of Artificial Sequence: Synthetic oligonucleotide
gagatcttagaatacata

SEQ ID NO: 2507 - DNA, 18 bp, Artificial Sequence
  Description of Artificial Sequence: Synthetic oligonucleotide
agtttgagatcttagaat

SEQ ID NO: 2508 - DNA, 18 bp, Artificial Sequence
  Description of Artificial Sequence: Synthetic oligonucleotide
ctgacagtttgagatctt

SEQ ID NO: 2509 - DNA, 18 bp, Artificial Sequence
  Description of Artificial Sequence: Synthetic oligonucleotide
tttatctgacagtttgag

SEQ ID NO: 2510 - DNA, 18 bp, Artificial Sequence
  Description of Artificial Sequence: Synthetic oligonucleotide
gattatttatctgacagt

SEQ ID NO: 2511 - DNA, 18 bp, Artificial Sequence
  Description of Artificial Sequence: Synthetic oligonucleotide
atgcagattatttatctg

SEQ ID NO: 2512 - DNA, 18 bp, Artificial Sequence
  Description of Artificial Sequence: Synthetic oligonucleotide
gacacatgcagattattt

SEQ ID NO: 2513 - DNA, 18 bp, Artificial Sequence
  Description of Artificial Sequence: Synthetic oligonucleotide
tataagacacatgcagat

SEQ ID NO: 2514 - DNA, 18 bp, Artificial Sequence
  Description of Artificial Sequence: Synthetic oligonucleotide
gttagtataagacacatg

SEQ ID NO: 2515 - DNA, 18 bp, Artificial Sequence
  Description of Artificial Sequence: Synthetic oligonucleotide
tcagtgttagtataagac

SEQ ID NO: 2516 - DNA, 18 bp, Artificial Sequence
  Description of Artificial Sequence: Synthetic oligonucleotide
gaacatcagtgttagtat

SEQ ID NO: 2517 - DNA, 18 bp, Artificial Sequence
  Description of Artificial Sequence: Synthetic oligonucleotide
tattggaacatcagtgtt

SEQ ID NO: 2518 - DNA, 18 bp, Artificial Sequence
  Description of Artificial Sequence: Synthetic oligonucleotide
acttgtattggaacatca

SEQ ID NO: 2519 - DNA, 18 bp, Artificial Sequence
  Description of Artificial Sequence: Synthetic oligonucleotide
tattcacttgtattggaa

SEQ ID NO: 2520 - DNA, 18 bp, Artificial Sequence
  Description of Artificial Sequence: Synthetic oligonucleotide
ggaactattcacttgtat

SEQ ID NO: 2521 - DNA, 18 bp, Artificial Sequence
  Description of Artificial Sequence: Synthetic oligonucleotide
aatttggaactattcact

SEQ ID NO: 2522 - DNA, 18 bp, Artificial Sequence
  Description of Artificial Sequence: Synthetic oligonucleotide
gaaccaatttggaactat

SEQ ID NO: 2523 - DNA, 18 bp, Artificial Sequence
  Description of Artificial Sequence: Synthetic oligonucleotide
tggaagaaccaatttgga

SEQ ID NO: 2524 - DNA, 18 bp, Artificial Sequence
  Description of Artificial Sequence: Synthetic oligonucleotide
cttcctggaagaaccaat

SEQ ID NO: 2525 - DNA, 18 bp, Artificial Sequence
  Description of Artificial Sequence: Synthetic oligonucleotide
ttgaacttcctggaagaa

SEQ ID NO: 2526 - DNA, 18 bp, Artificial Sequence
  Description of Artificial Sequence: Synthetic oligonucleotide
caaacttgaacttcctgg

SEQ ID NO: 2527 - DNA, 18 bp, Artificial Sequence
  Description of Artificial Sequence: Synthetic oligonucleotide
acattcaaacttgaactt

SEQ ID NO: 2528 - DNA, 18 bp, Artificial Sequence
  Description of Artificial Sequence: Synthetic oligonucleotide
aagttacattcaaacttg

SEQ ID NO: 2529 - DNA, 18 bp, Artificial Sequence
  Description of Artificial Sequence: Synthetic oligonucleotide
atctgaagttacattcaa

SEQ ID NO: 2530 - DNA, 18 bp, Artificial Sequence
  Description of Artificial Sequence: Synthetic oligonucleotide
atatgatctgaagttaca

SEQ ID NO: 2531 - DNA, 18 bp, Artificial Sequence
  Description of Artificial Sequence: Synthetic oligonucleotide
tattcatatgatctgaag

SEQ ID NO: 2532 - DNA, 18 bp, Artificial Sequence
  Description of Artificial Sequence: Synthetic oligonucleotide
ttctgtattcatatgatc

SEQ ID NO: 2533 - DNA, 18 bp, Artificial Sequence
  Description of Artificial Sequence: Synthetic oligonucleotide
gtaatttctgtattcata

SEQ ID NO: 2534 - DNA, 18 bp, Artificial Sequence
  Description of Artificial Sequence: Synthetic oligonucleotide
aagtagtaatttctgtat

SEQ ID NO: 2535 - DNA, 18 bp, Artificial Sequence
  Description of Artificial Sequence: Synthetic oligonucleotide
cttataagtagtaatttc

SEQ ID NO: 2536 - DNA, 18 bp, Artificial Sequence
  Description of Artificial Sequence: Synthetic oligonucleotide
ttcttcttataagtagta

SEQ ID NO: 2537 - DNA, 18 bp, Artificial Sequence
  Description of Artificial Sequence: Synthetic oligonucleotide
tcaatttcttcttataag

SEQ ID NO: 2538 - DNA, 18 bp, Artificial Sequence
  Description of Artificial Sequence: Synthetic oligonucleotide
agtactcaatttcttctt

SEQ ID NO: 2539 - DNA, 18 bp, Artificial Sequence
  Description of Artificial Sequence: Synthetic oligonucleotide
tgattagtactcaatttc

SEQ ID NO: 2540 - DNA, 18 bp, Artificial Sequence
  Description of Artificial Sequence: Synthetic oligonucleotide
atggctgattagtactca

SEQ ID NO: 2541 - DNA, 18 bp, Artificial Sequence
  Description of Artificial Sequence: Synthetic oligonucleotide
atggcatggctgattagt

SEQ ID NO: 2542 - DNA, 18 bp, Artificial Sequence
  Description of Artificial Sequence: Synthetic oligonucleotide
gtcttatggcatggctga

SEQ ID NO: 2543 - DNA, 18 bp, Artificial Sequence
  Description of Artificial Sequence: Synthetic oligonucleotide
ttacagtcttatggcatg

SEQ ID NO: 2544 - DNA, 18 bp, Artificial Sequence
  Description of Artificial Sequence: Synthetic oligonucleotide
atctgttacagtcttatg

SEQ ID NO: 2545 - DNA, 18 bp, Artificial Sequence
  Description of Artificial Sequence: Synthetic oligonucleotide
gcttcatctgttacagtc

SEQ ID NO: 2546 - DNA, 18 bp, Artificial Sequence
  Description of Artificial Sequence: Synthetic oligonucleotide
tctgagcttcatctgtta

SEQ ID NO: 2547 - DNA, 18 bp, Artificial Sequence
  Description of Artificial Sequence: Synthetic oligonucleotide
gttgctctgagcttcatc

SEQ ID NO: 2548 - DNA, 18 bp, Artificial Sequence
  Description of Artificial Sequence: Synthetic oligonucleotide
ttaaggttgctctgagct

SEQ ID NO: 2549 - DNA, 18 bp, Artificial Sequence
  Description of Artificial Sequence: Synthetic oligonucleotide
ttgtgttaaggttgctct

SEQ ID NO: 2550 - DNA, 18 bp, Artificial Sequence
  Description of Artificial Sequence: Synthetic oligonucleotide
aactgttgtgttaaggtt

SEQ ID NO: 2551 - DNA, 18 bp, Artificial Sequence
  Description of Artificial Sequence: Synthetic oligonucleotide
aatccaactgttgtgtta

SEQ ID NO: 2552 - DNA, 18 bp, Artificial Sequence
  Description of Artificial Sequence: Synthetic oligonucleotide
ttgaaaatccaactgttg

SEQ ID NO: 2553 - DNA, 18 bp, Artificial Sequence
  Description of Artificial Sequence: Synthetic oligonucleotide
aaactttgaaaatccaac

SEQ ID NO: 2554 - DNA, 18 bp, Artificial Sequence
  Description of Artificial Sequence: Synthetic oligonucleotide
aatgtaaactttgaaaat

SEQ ID NO: 2555 - DNA, 18 bp, Artificial Sequence
  Description of Artificial Sequence: Synthetic oligonucleotide
ttgtaaatgtaaactttg

SEQ ID NO: 2556 - DNA, 18 bp, Artificial Sequence
  Description of Artificial Sequence: Synthetic oligonucleotide
catccttgtaaatgtaaa

SEQ ID NO: 2557 - DNA, 18 bp, Artificial Sequence
  Description of Artificial Sequence: Synthetic oligonucleotide
tttttcatccttgtaaat

SEQ ID NO: 2558 - DNA, 18 bp, Artificial Sequence
  Description of Artificial Sequence: Synthetic oligonucleotide
gagaatttttcatccttg

SEQ ID NO: 2559 - DNA, 18 bp, Artificial Sequence
  Description of Artificial Sequence: Synthetic oligonucleotide
aatctgagaatttttcat

SEQ ID NO: 2560 - DNA, 18 bp, Artificial Sequence
  Description of Artificial Sequence: Synthetic oligonucleotide
gaaagaatctgagaattt

SEQ ID NO: 2561 - DNA, 18 bp, Artificial Sequence
  Description of Artificial Sequence: Synthetic oligonucleotide
actgagaaagaatctgag

SEQ ID NO: 2562 - DNA, 18 bp, Artificial Sequence
  Description of Artificial Sequence: Synthetic oligonucleotide
attaaactgagaaagaat

SEQ ID NO: 2563 - DNA, 18 bp, Artificial Sequence
  Description of Artificial Sequence: Synthetic oligonucleotide
ttttgattaaactgagaa

SEQ ID NO: 2564 - DNA, 18 bp, Artificial Sequence
  Description of Artificial Sequence: Synthetic oligonucleotide
tacaattttgattaaact

SEQ ID NO: 2565 - DNA, 18 bp, Artificial Sequence
  Description of Artificial Sequence: Synthetic oligonucleotide
agttatacaattttgatt

SEQ ID NO: 2566 - DNA, 18 bp, Artificial Sequence
  Description of Artificial Sequence: Synthetic oligonucleotide
cttccagttatacaattt

SEQ ID NO: 2567 - DNA, 18 bp, Artificial Sequence
  Description of Artificial Sequence: Synthetic oligonucleotide
acatacttccagttatac

SEQ ID NO: 2568 - DNA, 18 bp, Artificial Sequence
  Description of Artificial Sequence: Synthetic oligonucleotide
atcagacatacttccagt

SEQ ID NO: 2569 - DNA, 18 bp, Artificial Sequence
  Description of Artificial Sequence: Synthetic oligonucleotide
ctaaaccacagaatgggt

SEQ ID NO: 2570 - DNA, 18 bp, Artificial Sequence
  Description of Artificial Sequence: Synthetic oligonucleotide
taacgctaaaccacagaa

SEQ ID NO: 2571 - DNA, 18 bp, Artificial Sequence
  Description of Artificial Sequence: Synthetic oligonucleotide
ctcaataacgctaaacca

SEQ ID NO: 2572 - DNA, 18 bp, Artificial Sequence
  Description of Artificial Sequence: Synthetic oligonucleotide
gaaagctcaataacgcta

SEQ ID NO: 2573 - DNA, 18 bp, Artificial Sequence
  Description of Artificial Sequence: Synthetic oligonucleotide
attaagaaagctcaataa

SEQ ID NO: 2574 - DNA, 18 bp, Artificial Sequence
  Description of Artificial Sequence: Synthetic oligonucleotide
cttaaattaagaaagctc

SEQ ID NO: 2575 - DNA, 18 bp, Artificial Sequence
  Description of Artificial Sequence: Synthetic oligonucleotide
tcagccttaaattaagaa

SEQ ID NO: 2576 - DNA, 18 bp, Artificial Sequence
  Description of Artificial Sequence: Synthetic oligonucleotide
tcaagtcagccttaaatt

SEQ ID NO: 2577 - DNA, 18 bp, Artificial Sequence
  Description of Artificial Sequence: Synthetic oligonucleotide
atcaatcaagtcagcctt

SEQ ID NO: 2578 - DNA, 18 bp, Artificial Sequence
  Description of Artificial Sequence: Synthetic oligonucleotide
ttatgatcaatcaagtca

SEQ ID NO: 2579 - DNA, 18 bp, Artificial Sequence
  Description of Artificial Sequence: Synthetic oligonucleotide
tggctttatgatcaatca

SEQ ID NO: 2580 - DNA, 18 bp, Artificial Sequence
  Description of Artificial Sequence: Synthetic oligonucleotide
tcaattggctttatgatc

SEQ ID NO: 2581 - DNA, 18 bp, Artificial Sequence
  Description of Artificial Sequence: Synthetic oligonucleotide
ttaattcaattggcttta

SEQ ID NO: 2582 - DNA, 18 bp, Artificial Sequence
  Description of Artificial Sequence: Synthetic oligonucleotide
gaattttaattcaattgg

SEQ ID NO: 2583 - DNA, 18 bp, Artificial Sequence
  Description of Artificial Sequence: Synthetic oligonucleotide
ggtgagaattttaattca

SEQ ID NO: 2584 - DNA, 18 bp, Artificial Sequence
  Description of Artificial Sequence: Synthetic oligonucleotide
acaatggtgagaatttta

SEQ ID NO: 2585 - DNA, 18 bp, Artificial Sequence
  Description of Artificial Sequence: Synthetic oligonucleotide
accaaacaatggtgagaa

SEQ ID NO: 2586 - DNA, 18 bp, Artificial Sequence
  Description of Artificial Sequence: Synthetic oligonucleotide
ccacaaccaaacaatggt

SEQ ID NO: 2587 - DNA, 18 bp, Artificial Sequence
  Description of Artificial Sequence: Synthetic oligonucleotide
aatgaccacaaccaaaca

SEQ ID NO: 2588 - DNA, 18 bp, Artificial Sequence
  Description of Artificial Sequence: Synthetic oligonucleotide
aaagtaatgaccacaacc

SEQ ID NO: 2589 - DNA, 18 bp, Artificial Sequence
  Description of Artificial Sequence: Synthetic oligonucleotide
gctgcaaagtaatgacca

SEQ ID NO: 2590 - DNA, 18 bp, Artificial Sequence
  Description of Artificial Sequence: Synthetic oligonucleotide
tgaaggctgcaaagtaat

SEQ ID NO: 2591 - DNA, 18 bp, Artificial Sequence
  Description of Artificial Sequence: Synthetic oligonucleotide
tggactgaaggctgcaaa

SEQ ID NO: 2592 - DNA, 18 bp, Artificial Sequence
  Description of Artificial Sequence: Synthetic oligonucleotide
tcaattggactgaaggct

SEQ ID NO: 2593 - DNA, 18 bp, Artificial Sequence
  Description of Artificial Sequence: Synthetic oligonucleotide
attgatcaattggactga

SEQ ID NO: 2594 - DNA, 18 bp, Artificial Sequence
  Description of Artificial Sequence: Synthetic oligonucleotide
cttgcattgatcaattgg

SEQ ID NO: 2595 - DNA, 18 bp, Artificial Sequence
  Description of Artificial Sequence: Synthetic oligonucleotide
tccaccttgcattgatca

SEQ ID NO: 2596 - DNA, 18 bp, Artificial Sequence
  Description of Artificial Sequence: Synthetic oligonucleotide
ttccttccaccttgcatt

SEQ ID NO: 2597 - DNA, 18 bp, Artificial Sequence
  Description of Artificial Sequence: Synthetic oligonucleotide
tttgattccttccacctt

SEQ ID NO: 2598 - DNA, 18 bp, Artificial Sequence
  Description of Artificial Sequence: Synthetic oligonucleotide
tttgctttgattccttcc

SEQ ID NO: 2599 - DNA, 18 bp, Artificial Sequence
  Description of Artificial Sequence: Synthetic oligonucleotide
tttgctttgctttgattc

SEQ ID NO: 2600 - DNA, 18 bp, Artificial Sequence
  Description of Artificial Sequence: Synthetic oligonucleotide
attcctttgctttgcttt

SEQ ID NO: 2601 - DNA, 18 bp, Artificial Sequence
  Description of Artificial Sequence: Synthetic oligonucleotide
tattcattcctttgcttt

SEQ ID NO: 2602 - DNA, 18 bp, Artificial Sequence
  Description of Artificial Sequence: Synthetic oligonucleotide
tcctgtattcattccttt

SEQ ID NO: 2603 - DNA, 18 bp, Artificial Sequence
  Description of Artificial Sequence: Synthetic oligonucleotide
tatcttcctgtattcatt

SEQ ID NO: 2604 - DNA, 18 bp, Artificial Sequence
  Description of Artificial Sequence: Synthetic oligonucleotide
aacactatcttcctgtat

SEQ ID NO: 2605 - DNA, 18 bp, Artificial Sequence
  Description of Artificial Sequence: Synthetic oligonucleotide
tcacaaacactatcttcc

SEQ ID NO: 2606 - DNA, 18 bp, Artificial Sequence
  Description of Artificial Sequence: Synthetic oligonucleotide
taccctcacaaacactat

SEQ ID NO: 2607 - DNA, 18 bp, Artificial Sequence
  Description of Artificial Sequence: Synthetic oligonucleotide
tgtgataccctcacaaac

SEQ ID NO: 2608 - DNA, 18 bp, Artificial Sequence
  Description of Artificial Sequence: Synthetic oligonucleotide
cctcgtgtgataccctca

SEQ ID NO: 2609 - DNA, 18 bp, Artificial Sequence
  Description of Artificial Sequence: Synthetic oligonucleotide
aaattcctcgtgtgatac

SEQ ID NO: 2610 - DNA, 18 bp, Artificial Sequence
  Description of Artificial Sequence: Synthetic oligonucleotide
aggaaaaattcctcgtgt

SEQ ID NO: 2611 - DNA, 18 bp, Artificial Sequence
  Description of Artificial Sequence: Synthetic oligonucleotide
tatcattaaaccagtcac

SEQ ID NO: 2612 - DNA, 18 bp, Artificial Sequence
  Description of Artificial Sequence: Synthetic oligonucleotide
atccctatcattaaacca

SEQ ID NO: 2613 - DNA, 18 bp, Artificial Sequence
  Description of Artificial Sequence: Synthetic oligonucleotide
gaaaaatccctatcatta

SEQ ID NO: 2614 - DNA, 18 bp, Artificial Sequence
  Description of Artificial Sequence: Synthetic oligonucleotide
ttgcagaaaaatccctat

SEQ ID NO: 2615 - DNA, 18 bp, Artificial Sequence
  Description of Artificial Sequence: Synthetic oligonucleotide
agatcttgcagaaaaatc

SEQ ID NO: 2616 - DNA, 18 bp, Artificial Sequence
  Description of Artificial Sequence: Synthetic oligonucleotide
agggcagatcttgcagaa

SEQ ID NO: 2617 - DNA, 18 bp, Artificial Sequence
  Description of Artificial Sequence: Synthetic oligonucleotide
aatcaagggcagatcttg

SEQ ID NO: 2618 - DNA, 18 bp, Artificial Sequence
  Description of Artificial Sequence: Synthetic oligonucleotide
tgaaaaatcaagggcaga

SEQ ID NO: 2619 - DNA, 18 bp, Artificial Sequence
  Description of Artificial Sequence: Synthetic oligonucleotide
tcaaatgaaaaatcaagg

SEQ ID NO: 2620 - DNA, 18 bp, Artificial Sequence
  Description of Artificial Sequence: Synthetic oligonucleotide
gtgactcaaatgaaaaat

SEQ ID NO: 2621 - DNA, 18 bp, Artificial Sequence
  Description of Artificial Sequence: Synthetic oligonucleotide
gtgttgtgactcaaatga

SEQ ID NO: 2622 - DNA, 18 bp, Artificial Sequence
  Description of Artificial Sequence: Synthetic oligonucleotide
ttgtcgtgttgtgactca

SEQ ID NO: 2623 - DNA, 18 bp, Artificial Sequence
  Description of Artificial Sequence: Synthetic oligonucleotide
gggtattgtcgtgttgtg

SEQ ID NO: 2624 - DNA, 18 bp, Artificial Sequence
  Description of Artificial Sequence: Synthetic oligonucleotide
ctaaagggtattgtcgtg

SEQ ID NO: 2625 - DNA, 18 bp, Artificial Sequence
  Description of Artificial Sequence: Synthetic oligonucleotide
ctttactaaagggtattg

SEQ ID NO: 2626 - DNA, 18 bp, Artificial Sequence
  Description of Artificial Sequence: Synthetic oligonucleotide
cacacctttactaaaggg

SEQ ID NO: 2627 - DNA, 18 bp, Artificial Sequence
  Description of Artificial Sequence: Synthetic oligonucleotide
caatacacacctttacta

SEQ ID NO: 2628 - DNA, 18 bp, Artificial Sequence
  Description of Artificial Sequence: Synthetic oligonucleotide
gataacaatacacacctt

SEQ ID NO: 2629 - DNA, 18 bp, Artificial Sequence
  Description of Artificial Sequence: Synthetic oligonucleotide
gaaatgataacaatacac

SEQ ID NO: 2630 - DNA, 18 bp, Artificial Sequence
  Description of Artificial Sequence: Synthetic oligonucleotide
ggaatgaaatgataacaa

SEQ ID NO: 2631 - DNA, 18 bp, Artificial Sequence
  Description of Artificial Sequence: Synthetic oligonucleotide
ctactggaatgaaatgat

SEQ ID NO: 2632 - DNA, 18 bp, Artificial Sequence
  Description of Artificial Sequence: Synthetic oligonucleotide
accatctactggaatgaa

SEQ ID NO: 2633 - DNA, 18 bp, Artificial Sequence
  Description of Artificial Sequence: Synthetic oligonucleotide
gtgtcaccatctactgga

SEQ ID NO: 2634 - DNA, 18 bp, Artificial Sequence
  Description of Artificial Sequence: Synthetic oligonucleotide
ttcttgtgtcaccatcta

SEQ ID NO: 2635 - DNA, 18 bp, Artificial Sequence
  Description of Artificial Sequence: Synthetic oligonucleotide
atggattcttgtgtcacc

SEQ ID NO: 2636 - DNA, 18 bp, Artificial Sequence
  Description of Artificial Sequence: Synthetic oligonucleotide
tcagcatggattcttgtg

SEQ ID NO: 2637 - DNA, 18 bp, Artificial Sequence
  Description of Artificial Sequence: Synthetic oligonucleotide
agccttcagcatggattc

SEQ ID NO: 2638 - DNA, 18 bp, Artificial Sequence
  Description of Artificial Sequence: Synthetic oligonucleotide
aaggcagccttcagcatg

SEQ ID NO: 2639 - DNA, 18 bp, Artificial Sequence
  Description of Artificial Sequence: Synthetic oligonucleotide
tggccaataatcataaaa

SEQ ID NO: 2640 - DNA, 18 bp, Artificial Sequence
  Description of Artificial Sequence: Synthetic oligonucleotide
caatttggccaataatca

SEQ ID NO: 2641 - DNA, 18 bp, Artificial Sequence
  Description of Artificial Sequence: Synthetic oligonucleotide
ctcttcaatttggccaat

SEQ ID NO: 2642 - DNA, 18 bp, Artificial Sequence
  Description of Artificial Sequence: Synthetic oligonucleotide
gaattctcttcaatttgg

SEQ ID NO: 2643 - DNA, 18 bp, Artificial Sequence
  Description of Artificial Sequence: Synthetic oligonucleotide
tggcagaattctcttcaa

SEQ ID NO: 2644 - DNA, 18 bp, Artificial Sequence
  Description of Artificial Sequence: Synthetic oligonucleotide
gcaggtggcagaattctc

SEQ ID NO: 2645 - DNA, 18 bp, Artificial Sequence
  Description of Artificial Sequence: Synthetic oligonucleotide
attcagcaggtggcagaa

SEQ ID NO: 2646 - DNA, 18 bp, Artificial Sequence
  Description of Artificial Sequence: Synthetic oligonucleotide
aatgcattcagcaggtgg

SEQ ID NO: 2647 - DNA, 18 bp, Artificial Sequence
  Description of Artificial Sequence: Synthetic oligonucleotide
gacagaatgcattcagca

SEQ ID NO: 2648 - DNA, 18 bp, Artificial Sequence
  Description of Artificial Sequence: Synthetic oligonucleotide
ccggagacagaatgcatt

SEQ ID NO: 2649 - DNA, 18 bp, Artificial Sequence
  Description of Artificial Sequence: Synthetic oligonucleotide
aagctccggagacagaat

SEQ ID NO: 2650 - DNA, 18 bp, Artificial Sequence
  Description of Artificial Sequence: Synthetic oligonucleotide
ctaggaagctccggagac

SEQ ID NO: 2651 - DNA, 18 bp, Artificial Sequence
  Description of Artificial Sequence: Synthetic oligonucleotide
taaggctaggaagctccg

SEQ ID NO: 2652 - DNA, 18 bp, Artificial Sequence
  Description of Artificial Sequence: Synthetic oligonucleotide
aaatataaggctaggaag

SEQ ID NO: 2653 - DNA, 18 bp, Artificial Sequence
  Description of Artificial Sequence: Synthetic oligonucleotide
agttaaaatataaggcta

SEQ ID NO: 2654 - DNA, 18 bp, Artificial Sequence
  Description of Artificial Sequence: Synthetic oligonucleotide
taaaaagttaaaatataa

SEQ ID NO: 2655 - DNA, 18 bp, Artificial Sequence
  Description of Artificial Sequence: Synthetic oligonucleotide
aaatgtaaaaagttaaaa

SEQ ID NO: 2656 - DNA, 18 bp, Artificial Sequence
  Description of Artificial Sequence: Synthetic oligonucleotide
cagctaaatgtaaaaagt

SEQ ID NO: 2657 - DNA, 18 bp, Artificial Sequence
  Description of Artificial Sequence: Synthetic oligonucleotide
ataaacagctaaatgtaa

SEQ ID NO: 2658 - DNA, 18 bp, Artificial Sequence
  Description of Artificial Sequence: Synthetic oligonucleotide
taaaaataaacagctaaa

SEQ ID NO: 2659 - DNA, 18 bp, Artificial Sequence
  Description of Artificial Sequence: Synthetic oligonucleotide
tcacctaaaaataaacag

SEQ ID NO: 2660 - DNA, 18 bp, Artificial Sequence
  Description of Artificial Sequence: Synthetic oligonucleotide
caacttcacctaaaaata

SEQ ID NO: 2661 - DNA, 18 bp, Artificial Sequence
  Description of Artificial Sequence: Synthetic oligonucleotide
ggactcaacttcacctaa

SEQ ID NO: 2662 - DNA, 18 bp, Artificial Sequence
  Description of Artificial Sequence: Synthetic oligonucleotide
agggaggactcaacttca

SEQ ID NO: 2663 - DNA, 18 bp, Artificial Sequence
  Description of Artificial Sequence: Synthetic oligonucleotide
gaaagagggaggactcaa

SEQ ID NO: 2664 - DNA, 18 bp, Artificial Sequence
  Description of Artificial Sequence: Synthetic oligonucleotide
aggaagaaagagggagga

SEQ ID NO: 2665 - DNA, 18 bp, Artificial Sequence
  Description of Artificial Sequence: Synthetic oligonucleotide
aggcaaggaagaaagagg

SEQ ID NO: 2666 - DNA, 18 bp, Artificial Sequence
  Description of Artificial Sequence: Synthetic oligonucleotide
gcgaaaggcaaggaagaa

SEQ ID NO: 2667 - DNA, 18 bp, Artificial Sequence
  Description of Artificial Sequence: Synthetic oligonucleotide
ggccggcgaaaggcaagg

SEQ ID NO: 2668 - DNA, 18 bp, Artificial Sequence
  Description of Artificial Sequence: Synthetic oligonucleotide
cgtgtggccggcgaaagg

SEQ ID NO: 2669 - DNA, 18 bp, Artificial Sequence
  Description of Artificial Sequence: Synthetic oligonucleotide
cggggcgtgtggccggcg

SEQ ID NO: 2670 - DNA, 18 bp, Artificial Sequence
  Description of Artificial Sequence: Synthetic oligonucleotide
ggcaacggggcgtgtggc

SEQ ID NO: 2671 - DNA, 18 bp, Artificial Sequence
  Description of Artificial Sequence: Synthetic oligonucleotide
tgcacggcaacggggcgt

SEQ ID NO: 2672 - DNA, 18 bp, Artificial Sequence
  Description of Artificial Sequence: Synthetic oligonucleotide
gcccatgcacggcaacgg

SEQ ID NO: 2673 - DNA, 18 bp, Artificial Sequence
  Description of Artificial Sequence: Synthetic oligonucleotide
caggggcccatgcacggc

SEQ ID NO: 2674 - DNA, 18 bp, Artificial Sequence
  Description of Artificial Sequence: Synthetic oligonucleotide
ctgagcaggggcccatgc

SEQ ID NO: 2675 - DNA, 18 bp, Artificial Sequence
  Description of Artificial Sequence: Synthetic oligonucleotide
aggcactgagcaggggcc

SEQ ID NO: 2676 - DNA, 18 bp, Artificial Sequence
  Description of Artificial Sequence: Synthetic oligonucleotide
aggtgaggcactgagcag

SEQ ID NO: 2677 - DNA, 18 bp, Artificial Sequence
  Description of Artificial Sequence: Synthetic oligonucleotide
gggtcaggtgaggcactg

SEQ ID NO: 2678 - DNA, 18 bp, Artificial Sequence
  Description of Artificial Sequence: Synthetic oligonucleotide
ggactctggggatcccaa

SEQ ID NO: 2679 - DNA, 18 bp, Artificial Sequence
  Description of Artificial Sequence: Synthetic oligonucleotide
aggagggactctggggat

SEQ ID NO: 2680 - DNA, 18 bp, Artificial Sequence
  Description of Artificial Sequence: Synthetic oligonucleotide
tcttcaggagggactctg

SEQ ID NO: 2681 - DNA, 18 bp, Artificial Sequence
  Description of Artificial Sequence: Synthetic oligonucleotide
tgttctcttcaggaggga

SEQ ID NO: 2682 - DNA, 18 bp, Artificial Sequence
  Description of Artificial Sequence: Synthetic oligonucleotide
aatgctgttctcttcagg

SEQ ID NO: 2683 - DNA, 18 bp, Artificial Sequence
  Description of Artificial Sequence: Synthetic oligonucleotide
ggacaaatgctgttctct

SEQ ID NO: 2684 - DNA, 18 bp, Artificial Sequence
  Description of Artificial Sequence: Synthetic oligonucleotide
cctggggacaaatgctgt

SEQ ID NO: 2685 - DNA, 18 bp, Artificial Sequence
  Description of Artificial Sequence: Synthetic oligonucleotide
ccttgcctggggacaaat

SEQ ID NO: 2686 - DNA, 18 bp, Artificial Sequence
  Description of Artificial Sequence: Synthetic oligonucleotide
ctcagccttgcctgggga

SEQ ID NO: 2687 - DNA, 18 bp, Artificial Sequence
  Description of Artificial Sequence: Synthetic oligonucleotide
tccgactcagccttgcct

SEQ ID NO: 2688 - DNA, 18 bp, Artificial Sequence
  Description of Artificial Sequence: Synthetic oligonucleotide
ccaactccgactcagcct

SEQ ID NO: 2689 - DNA, 18 bp, Artificial Sequence
  Description of Artificial Sequence: Synthetic oligonucleotide
cccatccaactccgactc

SEQ ID NO: 2690 - DNA, 18 bp, Artificial Sequence
  Description of Artificial Sequence: Synthetic oligonucleotide
cttatcccatccaactcc

SEQ ID NO: 2691 - DNA, 18 bp, Artificial Sequence
  Description of Artificial Sequence: Synthetic oligonucleotide
tacaccttatcccatcca

SEQ ID NO: 2692 - DNA, 18 bp, Artificial Sequence
  Description of Artificial Sequence: Synthetic oligonucleotide
gctgctacaccttatccc

SEQ ID NO: 2693 - DNA, 18 bp, Artificial Sequence
  Description of Artificial Sequence: Synthetic oligonucleotide
ggcaggctgctacacctt

SEQ ID NO: 2694 - DNA, 18 bp, Artificial Sequence
  Description of Artificial Sequence: Synthetic oligonucleotide
tggagggcaggctgctac

SEQ ID NO: 2695 - DNA, 18 bp, Artificial Sequence
  Description of Artificial Sequence: Synthetic oligonucleotide
cagggtggagggcaggct

SEQ ID NO: 2696 - DNA, 18 bp, Artificial Sequence
  Description of Artificial Sequence: Synthetic oligonucleotide
ggtagcagggtggagggc

SEQ ID NO: 2697 - DNA, 18 bp, Artificial Sequence
  Description of Artificial Sequence: Synthetic oligonucleotide
caaagggtagcagggtgg

SEQ ID NO: 2698 - DNA, 18 bp, Artificial Sequence
  Description of Artificial Sequence: Synthetic oligonucleotide
acctgcaaagggtagcag

SEQ ID NO: 2699 - DNA, 18 bp, Artificial Sequence
  Description of Artificial Sequence: Synthetic oligonucleotide
tcaagacctgcaaagggt

SEQ ID NO: 2700 - DNA, 18 bp, Artificial Sequence
  Description of Artificial Sequence: Synthetic oligonucleotide
tgtgatcaagacctgcaa

SEQ ID NO: 2701 - DNA, 18 bp, Artificial Sequence
  Description of Artificial Sequence: Synthetic oligonucleotide
gtccctgtgatcaagacc

SEQ ID NO: 2702 - DNA, 18 bp, Artificial Sequence
  Description of Artificial Sequence: Synthetic oligonucleotide
gccacgtccctgtgatca

SEQ ID NO: 2703 - DNA, 18 bp, Artificial Sequence
  Description of Artificial Sequence: Synthetic oligonucleotide
caagggccacgtccctgt

SEQ ID NO: 2704 - DNA, 18 bp, Artificial Sequence
  Description of Artificial Sequence: Synthetic oligonucleotide
tacaccaagggccacgtc

SEQ ID NO: 2705 - DNA, 18 bp, Artificial Sequence
  Description of Artificial Sequence: Synthetic oligonucleotide
cctcatacaccaagggcc

SEQ ID NO: 2706 - DNA, 18 bp, Artificial Sequence
  Description of Artificial Sequence: Synthetic oligonucleotide
cccctcctcatacaccaa

SEQ ID NO: 2707 - DNA, 18 bp, Artificial Sequence
  Description of Artificial Sequence: Synthetic oligonucleotide
tgtcacccctcctcatac

SEQ ID NO: 2708 - DNA, 18 bp, Artificial Sequence
  Description of Artificial Sequence: Synthetic oligonucleotide
tgccttgtcacccctcct

SEQ ID NO: 2709 - DNA, 18 bp, Artificial Sequence
  Description of Artificial Sequence: Synthetic oligonucleotide
gtggttgccttgtcaccc

SEQ ID NO: 2710 - DNA, 18 bp, Artificial Sequence
  Description of Artificial Sequence: Synthetic oligonucleotide
aggctgtggttgccttgt

SEQ ID NO: 2711 - DNA, 18 bp, Artificial Sequence
  Description of Artificial Sequence: Synthetic oligonucleotide
cactcaggctgtggttgc

SEQ ID NO: 2712 - DNA, 18 bp, Artificial Sequence
  Description of Artificial Sequence: Synthetic oligonucleotide
acgtgcactcaggctgtg

SEQ ID NO: 2713 - DNA, 18 bp, Artificial Sequence
  Description of Artificial Sequence: Synthetic oligonucleotide
gcagcacgtgcactcagg

SEQ ID NO: 2714 - DNA, 18 bp, Artificial Sequence
  Description of Artificial Sequence: Synthetic oligonucleotide
tggctccccaggacccaa

SEQ ID NO: 2715 - DNA, 18 bp, Artificial Sequence
  Description of Artificial Sequence: Synthetic oligonucleotide
ttccgtggctccccagga

SEQ ID NO: 2716 - DNA, 18 bp, Artificial Sequence
  Description of Artificial Sequence: Synthetic oligonucleotide
caaccttccgtggctccc

SEQ ID NO: 2717 - DNA, 18 bp, Artificial Sequence
  Description of Artificial Sequence: Synthetic oligonucleotide
acccacaaccttccgtgg

SEQ ID NO: 2718 - DNA, 18 bp, Artificial Sequence
  Description of Artificial Sequence: Synthetic oligonucleotide
ctggcacccacaaccttc

SEQ ID NO: 2719 - DNA, 18 bp, Artificial Sequence
  Description of Artificial Sequence: Synthetic oligonucleotide
accctctggcacccacaa

SEQ ID NO: 2720 - DNA, 18 bp, Artificial Sequence
  Description of Artificial Sequence: Synthetic oligonucleotide
ccgcaaccctctggcacc

SEQ ID NO: 2721 - DNA, 18 bp, Artificial Sequence
  Description of Artificial Sequence: Synthetic oligonucleotide
tctgaccgcaaccctctg

SEQ ID NO: 2722 - DNA, 18 bp, Artificial Sequence
  Description of Artificial Sequence: Synthetic oligonucleotide
gtgactctgaccgcaacc

SEQ ID NO: 2723 - DNA, 18 bp, Artificial Sequence
  Description of Artificial Sequence: Synthetic oligonucleotide
tgactgtgactctgaccg

SEQ ID NO: 2724 - DNA, 18 bp, Artificial Sequence
  Description of Artificial Sequence: Synthetic oligonucleotide
gcccttgactgtgactct

SEQ ID NO: 2725 - DNA, 18 bp, Artificial Sequence
  Description of Artificial Sequence: Synthetic oligonucleotide
agaaggcccttgactgtg

SEQ ID NO: 2726 - DNA, 18 bp, Artificial Sequence
  Description of Artificial Sequence: Synthetic oligonucleotide
gtctcagaaggcccttga

SEQ ID NO: 2727 - DNA, 18 bp, Artificial Sequence
  Description of Artificial Sequence: Synthetic oligonucleotide
cacaggtctcagaaggcc

SEQ ID NO: 2728 - DNA, 18 bp, Artificial Sequence
  Description of Artificial Sequence: Synthetic oligonucleotide
gggggcacaggtctcaga

SEQ ID NO: 2729 - DNA, 18 bp, Artificial Sequence
  Description of Artificial Sequence: Synthetic oligonucleotide
ggggagggggcacaggtc

SEQ ID NO: 2730 - DNA, 18 bp, Artificial Sequence
  Description of Artificial Sequence: Synthetic oligonucleotide
agggtggggagggggcac

SEQ ID NO: 2731 - DNA, 18 bp, Artificial Sequence
  Description of Artificial Sequence: Synthetic oligonucleotide
gagggagggtggggaggg

SEQ ID NO: 2732 - DNA, 18 bp, Artificial Sequence
  Description of Artificial Sequence: Synthetic oligonucleotide
gtggggagggagggtggg

SEQ ID NO: 2733 - DNA, 18 bp, Artificial Sequence
  Description of Artificial Sequence: Synthetic oligonucleotide
aggaggtggggagggagg

SEQ ID NO: 2734 - DNA, 18 bp, Artificial Sequence
  Description of Artificial Sequence: Synthetic oligonucleotide
gcctgaggaggtggggag

SEQ ID NO: 2735 - DNA, 18 bp, Artificial Sequence
  Description of Artificial Sequence: Synthetic oligonucleotide
agctggcctgaggaggtg

SEQ ID NO: 2736 - DNA, 18 bp, Artificial Sequence
  Description of Artificial Sequence: Synthetic oligonucleotide
taaaattatttatacaat

SEQ ID NO: 2737 - DNA, 18 bp, Artificial Sequence
  Description of Artificial Sequence: Synthetic oligonucleotide
aacattaaaattatttat

SEQ ID NO: 2738 - DNA, 18 bp, Artificial Sequence
  Description of Artificial Sequence: Synthetic oligonucleotide
tgcttaacattaaaatta

SEQ ID NO: 2739 - DNA, 18 bp, Artificial Sequence
  Description of Artificial Sequence: Synthetic oligonucleotide
gtttttgcttaacattaa

SEQ ID NO: 2740 - DNA, 18 bp, Artificial Sequence
  Description of Artificial Sequence: Synthetic oligonucleotide
attatgtttttgcttaac

SEQ ID NO: 2741 - DNA, 18 bp, Artificial Sequence
  Description of Artificial Sequence: Synthetic oligonucleotide
atacaattatgtttttgc

SEQ ID NO: 2742 - DNA, 18 bp, Artificial Sequence
  Description of Artificial Sequence: Synthetic oligonucleotide
atattatacaattatgtt

SEQ ID NO: 2743 - DNA, 18 bp, Artificial Sequence
  Description of Artificial Sequence: Synthetic oligonucleotide
acaaaatattatacaatt

SEQ ID NO: 2744 - DNA, 18 bp, Artificial Sequence
  Description of Artificial Sequence: Synthetic oligonucleotide
tatcgacaaaatattata

SEQ ID NO: 2745 - DNA, 18 bp, Artificial Sequence
  Description of Artificial Sequence: Synthetic oligonucleotide
gcatgtatcgacaaaata

SEQ ID NO: 2746 - DNA, 18 bp, Artificial Sequence
  Description of Artificial Sequence: Synthetic oligonucleotide
agaaggcatgtatcgaca

SEQ ID NO: 2747 - DNA, 18 bp, Artificial Sequence
  Description of Artificial Sequence: Synthetic oligonucleotide
ttttaagaaggcatgtat

SEQ ID NO: 2748 - DNA, 18 bp, Artificial Sequence
  Description of Artificial Sequence: Synthetic oligonucleotide
actatttttaagaaggca

SEQ ID NO: 2749 - DNA, 18 bp, Artificial Sequence
  Description of Artificial Sequence: Synthetic oligonucleotide
ttattactatttttaaga

SEQ ID NO: 2750 - DNA, 18 bp, Artificial Sequence
  Description of Artificial Sequence: Synthetic oligonucleotide
ccacattattactatttt

SEQ ID NO: 2751 - DNA, 18 bp, Artificial Sequence
  Description of Artificial Sequence: Synthetic oligonucleotide
taaagccacattattact

SEQ ID NO: 2752 - DNA, 18 bp, Artificial Sequence
  Description of Artificial Sequence: Synthetic oligonucleotide
gtatttaaagccacatta

SEQ ID NO: 2753 - DNA, 18 bp, Artificial Sequence
  Description of Artificial Sequence: Synthetic oligonucleotide
aagttgtatttaaagcca

SEQ ID NO: 2754 - DNA, 18 bp, Artificial Sequence
  Description of Artificial Sequence: Synthetic oligonucleotide
aatacaagttgtatttaa

SEQ ID NO: 2755 - DNA, 18 bp, Artificial Sequence
  Description of Artificial Sequence: Synthetic oligonucleotide
tgtttaatacaagttgta

SEQ ID NO: 2756 - DNA, 18 bp, Artificial Sequence
  Description of Artificial Sequence: Synthetic oligonucleotide
gaacctgtttaatacaag

SEQ ID NO: 2757 - DNA, 18 bp, Artificial Sequence
  Description of Artificial Sequence: Synthetic oligonucleotide
caattgaacctgtttaat

SEQ ID NO: 2758 - DNA, 18 bp, Artificial Sequence
  Description of Artificial Sequence: Synthetic oligonucleotide
tagtcaccaaatatttac

SEQ ID NO: 2759 - DNA, 18 bp, Artificial Sequence
  Description of Artificial Sequence: Synthetic oligonucleotide
ttctttagtcaccaaata

SEQ ID NO: 2760 - DNA, 18 bp, Artificial Sequence
  Description of Artificial Sequence: Synthetic oligonucleotide
cattattctttagtcacc

SEQ ID NO: 2761 - DNA, 18 bp, Artificial Sequence
  Description of Artificial Sequence: Synthetic oligonucleotide
taactcattattctttag

SEQ ID NO: 2762 - DNA, 18 bp, Artificial Sequence
  Description of Artificial Sequence: Synthetic oligonucleotide
cactgtaactcattattc

SEQ ID NO: 2763 - DNA, 18 bp, Artificial Sequence
  Description of Artificial Sequence: Synthetic oligonucleotide
tttctcactgtaactcat

SEQ ID NO: 2764 - DNA, 18 bp, Artificial Sequence
  Description of Artificial Sequence: Synthetic oligonucleotide
caaattttctcactgtaa

SEQ ID NO: 2765 - DNA, 18 bp, Artificial Sequence
  Description of Artificial Sequence: Synthetic oligonucleotide
tttgtcaaattttctcac

SEQ ID NO: 2766 - DNA, 18 bp, Artificial Sequence
  Description of Artificial Sequence: Synthetic oligonucleotide
aattatttgtcaaatttt

SEQ ID NO: 2767 - DNA, 18 bp, Artificial Sequence
  Description of Artificial Sequence: Synthetic oligonucleotide
aattaaattatttgtcaa

SEQ ID NO: 2768 - DNA, 18 bp, Artificial Sequence
  Description of Artificial Sequence: Synthetic oligonucleotide
aagaaaattaaattattt

SEQ ID NO: 2769 - DNA, 18 bp, Artificial Sequence
  Description of Artificial Sequence: Synthetic oligonucleotide
ttaaaaagaaaattaaat

SEQ ID NO: 2770 - DNA, 18 bp, Artificial Sequence
  Description of Artificial Sequence: Synthetic oligonucleotide
aatttttaaaaagaaaat

SEQ ID NO: 2771 - DNA, 18 bp, Artificial Sequence
  Description of Artificial Sequence: Synthetic oligonucleotide
attaaaatttttaaaaag

SEQ ID NO: 2772 - DNA, 18 bp, Artificial Sequence
  Description of Artificial Sequence: Synthetic oligonucleotide
cacaaattaaaattttta

SEQ ID NO: 2773 - DNA, 18 bp, Artificial Sequence
  Description of Artificial Sequence: Synthetic oligonucleotide
aatttcacaaattaaaat

SEQ ID NO: 2774 - DNA, 18 bp, Artificial Sequence
  Description of Artificial Sequence: Synthetic oligonucleotide
ataaaaatttcacaaatt

SEQ ID NO: 2775 - DNA, 18 bp, Artificial Sequence
  Description of Artificial Sequence: Synthetic oligonucleotide
cctaaataaaaatttcac

SEQ ID NO: 2776 - DNA, 18 bp, Artificial Sequence
  Description of Artificial Sequence: Synthetic oligonucleotide
tacctcctaaataaaaat

SEQ ID NO: 2777 - DNA, 18 bp, Artificial Sequence
  Description of Artificial Sequence: Synthetic oligonucleotide
acttgtacctcctaaata

SEQ ID NO: 2778 - DNA, 18 bp, Artificial Sequence
  Description of Artificial Sequence: Synthetic oligonucleotide
tccacacttgtacctcct

SEQ ID NO: 2779 - DNA, 18 bp, Artificial Sequence
  Description of Artificial Sequence: Synthetic oligonucleotide
atacatccacacttgtac

SEQ ID NO: 2780 - DNA, 18 bp, Artificial Sequence
  Description of Artificial Sequence: Synthetic oligonucleotide
atgtaatacatccacact

SEQ ID NO: 2781 - DNA, 18 bp, Artificial Sequence
  Description of Artificial Sequence: Synthetic oligonucleotide
tatgcatgtaatacatcc

SEQ ID NO: 2782 - DNA, 18 bp, Artificial Sequence
  Description of Artificial Sequence: Synthetic oligonucleotide
cattttatgcatgtaata

SEQ ID NO: 2783 - DNA, 18 bp, Artificial Sequence
  Description of Artificial Sequence: Synthetic oligonucleotide
ctatccattttatgcatg

SEQ ID NO: 2784 - DNA, 18 bp, Artificial Sequence
  Description of Artificial Sequence: Synthetic oligonucleotide
catcactatccattttat

SEQ ID NO: 2785 - DNA, 18 bp, Artificial Sequence
  Description of Artificial Sequence: Synthetic oligonucleotide
gacttcatcactatccat

SEQ ID NO: 2786 - DNA, 18 bp, Artificial Sequence
  Description of Artificial Sequence: Synthetic oligonucleotide
acccagacttcatcacta

SEQ ID NO: 2787 - DNA, 18 bp, Artificial Sequence
  Description of Artificial Sequence: Synthetic oligonucleotide
agcttacccagacttcat

SEQ ID NO: 2788 - DNA, 18 bp, Artificial Sequence
  Description of Artificial Sequence: Synthetic oligonucleotide
aataaagcttacccagac

SEQ ID NO: 2789 - DNA, 18 bp, Artificial Sequence
  Description of Artificial Sequence: Synthetic oligonucleotide
aaatgaataaagcttacc

SEQ ID NO: 2790 - DNA, 18 bp, Artificial Sequence
  Description of Artificial Sequence: Synthetic oligonucleotide
atataaaatgaataaagc

SEQ ID NO: 2791 - DNA, 18 bp, Artificial Sequence
  Description of Artificial Sequence: Synthetic oligonucleotide
ttattatataaaatgaat

SEQ ID NO: 2792 - DNA, 18 bp, Artificial Sequence
  Description of Artificial Sequence: Synthetic oligonucleotide
caatattattatataaaa

SEQ ID NO: 2793 - DNA, 18 bp, Artificial Sequence
  Description of Artificial Sequence: Synthetic oligonucleotide
gaggcttgctttattcat

SEQ ID NO: 2794 - DNA, 18 bp, Artificial Sequence
  Description of Artificial Sequence: Synthetic oligonucleotide
aggctgaggcttgcttta

SEQ ID NO: 2795 - DNA, 18 bp, Artificial Sequence
  Description of Artificial Sequence: Synthetic oligonucleotide
ctaaaaggctgaggcttg

SEQ ID NO: 2796 - DNA, 18 bp, Artificial Sequence
  Description of Artificial Sequence: Synthetic oligonucleotide
cttacctaaaaggctgag

SEQ ID NO: 2797 - DNA, 18 bp, Artificial Sequence
  Description of Artificial Sequence: Synthetic oligonucleotide
tcaagcttacctaaaagg

SEQ ID NO: 2798 - DNA, 18 bp, Artificial Sequence
  Description of Artificial Sequence: Synthetic oligonucleotide
gaaactcaagcttaccta

SEQ ID NO: 2799 - DNA, 18 bp, Artificial Sequence
  Description of Artificial Sequence: Synthetic oligonucleotide
taaaggaaactcaagctt

SEQ ID NO: 2800 - DNA, 18 bp, Artificial Sequence
  Description of Artificial Sequence: Synthetic oligonucleotide
gcaattaaaggaaactca

SEQ ID NO: 2801 - DNA, 18 bp, Artificial Sequence
  Description of Artificial Sequence: Synthetic oligonucleotide
caaaagcaattaaaggaa

SEQ ID NO: 2802 - DNA, 18 bp, Artificial Sequence
  Description of Artificial Sequence: Synthetic oligonucleotide
cttttcaaaagcaattaa

SEQ ID NO: 2803 - DNA, 18 bp, Artificial Sequence
  Description of Artificial Sequence: Synthetic oligonucleotide
tgtctcttttcaaaagca

SEQ ID NO: 2804 - DNA, 18 bp, Artificial Sequence
  Description of Artificial Sequence: Synthetic oligonucleotide
aaagctgtctcttttcaa

SEQ ID NO: 2805 - DNA, 18 bp, Artificial Sequence
  Description of Artificial Sequence: Synthetic oligonucleotide
aagagaaagctgtctctt

SEQ ID NO: 2806 - DNA, 18 bp, Artificial Sequence
  Description of Artificial Sequence: Synthetic oligonucleotide
tatataagagaaagctgt

SEQ ID NO: 2807 - DNA, 18 bp, Artificial Sequence
  Description of Artificial Sequence: Synthetic oligonucleotide
tcctatatataagagaaa

SEQ ID NO: 2808 - DNA, 18 bp, Artificial Sequence
  Description of Artificial Sequence: Synthetic oligonucleotide
aattctcctatatataag

SEQ ID NO: 2809 - DNA, 18 bp, Artificial Sequence
  Description of Artificial Sequence: Synthetic oligonucleotide
actaaaattctcctatat

SEQ ID NO: 2810 - DNA, 18 bp, Artificial Sequence
  Description of Artificial Sequence: Synthetic oligonucleotide
aagccactaaaattctcc

SEQ ID NO: 2811 - DNA, 18 bp, Artificial Sequence
  Description of Artificial Sequence: Synthetic oligonucleotide
aataaaagccactaaaat

SEQ ID NO: 2812 - DNA, 18 bp, Artificial Sequence
  Description of Artificial Sequence: Synthetic oligonucleotide
gttgaaataaaagccact

SEQ ID NO: 2813 - DNA, 18 bp, Artificial Sequence
  Description of Artificial Sequence: Synthetic oligonucleotide
cacctgttgaaataaaag

SEQ ID NO: 2814 - DNA, 18 bp, Artificial Sequence
  Description of Artificial Sequence: Synthetic oligonucleotide
ggtaacacctgttgaaat

SEQ ID NO: 2815 - DNA, 18 bp, Artificial Sequence
  Description of Artificial Sequence: Synthetic oligonucleotide
ttgaaggtaacacctgtt

SEQ ID NO: 2816 - DNA, 18 bp, Artificial Sequence
  Description of Artificial Sequence: Synthetic oligonucleotide
atatcttgaaggtaacac

SEQ ID NO: 2817 - DNA, 18 bp, Artificial Sequence
  Description of Artificial Sequence: Synthetic oligonucleotide
aatgcatatcttgaaggt

SEQ ID NO: 2818 - DNA, 18 bp, Artificial Sequence
  Description of Artificial Sequence: Synthetic oligonucleotide
tcgttaatgcatatcttg

SEQ ID NO: 2819 - DNA, 18 bp, Artificial Sequence
  Description of Artificial Sequence: Synthetic oligonucleotide
gtttatcgttaatgcata

SEQ ID NO: 2820 - DNA, 18 bp, Artificial Sequence
  Description of Artificial Sequence: Synthetic oligonucleotide
acattgtttatcgttaat

SEQ ID NO: 2821 - DNA, 18 bp, Artificial Sequence
  Description of Artificial Sequence: Synthetic oligonucleotide
atcactggtctgaaactt

SEQ ID NO: 2822 - DNA, 18 bp, Artificial Sequence
  Description of Artificial Sequence: Synthetic oligonucleotide
atcaaatcactggtctga

SEQ ID NO: 2823 - DNA, 18 bp, Artificial Sequence
  Description of Artificial Sequence: Synthetic oligonucleotide
aaagaatcaaatcactgg

SEQ ID NO: 2824 - DNA, 18 bp, Artificial Sequence
  Description of Artificial Sequence: Synthetic oligonucleotide
acccaaaagaatcaaatc

SEQ ID NO: 2825 - DNA, 18 bp, Artificial Sequence
  Description of Artificial Sequence: Synthetic oligonucleotide
gggccacccaaaagaatc

SEQ ID NO: 2826 - DNA, 18 bp, Artificial Sequence
  Description of Artificial Sequence: Synthetic oligonucleotide
gaaaggggccacccaaaa

SEQ ID NO: 2827 - DNA, 18 bp, Artificial Sequence
  Description of Artificial Sequence: Synthetic oligonucleotide
cccaggaaaggggccacc

SEQ ID NO: 2828 - DNA, 18 bp, Artificial Sequence
  Description of Artificial Sequence: Synthetic oligonucleotide
tgtagcccaggaaagggg

SEQ ID NO: 2829 - DNA, 18 bp, Artificial Sequence
  Description of Artificial Sequence: Synthetic oligonucleotide
gagcatgtagcccaggaa

SEQ ID NO: 2830 - DNA, 18 bp, Artificial Sequence
  Description of Artificial Sequence: Synthetic oligonucleotide
tgagcgagcatgtagccc

SEQ ID NO: 2831 - DNA, 18 bp, Artificial Sequence
  Description of Artificial Sequence: Synthetic oligonucleotide
ggggttgagcgagcatgt

SEQ ID NO: 2832 - DNA, 18 bp, Artificial Sequence
  Description of Artificial Sequence: Synthetic oligonucleotide
aaaagggggttgagcgag

SEQ ID NO: 2833 - DNA, 18 bp, Artificial Sequence
  Description of Artificial Sequence: Synthetic oligonucleotide
aaggaaaaagggggttga

SEQ ID NO: 2834 - DNA, 18 bp, Artificial Sequence
  Description of Artificial Sequence: Synthetic oligonucleotide
aacaaaaggaaaaagggg

SEQ ID NO: 2835 - DNA, 18 bp, Artificial Sequence
  Description of Artificial Sequence: Synthetic oligonucleotide
cagggaacaaaaggaaaa

SEQ ID NO: 2836 - DNA, 18 bp, Artificial Sequence
  Description of Artificial Sequence: Synthetic oligonucleotide
ggagacagggaacaaaag

SEQ ID NO: 2837 - DNA, 18 bp, Artificial Sequence
  Description of Artificial Sequence: Synthetic oligonucleotide
gatggggagacagggaac

SEQ ID NO: 2838 - DNA, 18 bp, Artificial Sequence
  Description of Artificial Sequence: Synthetic oligonucleotide
aaggggatggggagacag

SEQ ID NO: 2839 - DNA, 18 bp, Artificial Sequence
  Description of Artificial Sequence: Synthetic oligonucleotide
accccaaggggatgggga

SEQ ID NO: 2840 - DNA, 18 bp, Artificial Sequence
  Description of Artificial Sequence: Synthetic oligonucleotide
ctggcaccccaaggggat

SEQ ID NO: 2841 - DNA, 18 bp, Artificial Sequence
  Description of Artificial Sequence: Synthetic oligonucleotide
ggcacctggcaccccaag

SEQ ID NO: 2842 - DNA, 18 bp, Artificial Sequence
  Description of Artificial Sequence: Synthetic oligonucleotide
agatgggcacctggcacc

SEQ ID NO: 2843 - DNA, 18 bp, Artificial Sequence
  Description of Artificial Sequence: Synthetic oligonucleotide
tcctatggatattttctc

SEQ ID NO: 2844 - DNA, 18 bp, Artificial Sequence
  Description of Artificial Sequence: Synthetic oligonucleotide
aaccctcctatggatatt

SEQ ID NO: 2845 - DNA, 18 bp, Artificial Sequence
  Description of Artificial Sequence: Synthetic oligonucleotide
gtcccaaccctcctatgg

SEQ ID NO: 2846 - DNA, 18 bp, Artificial Sequence
  Description of Artificial Sequence: Synthetic oligonucleotide
gagaagtcccaaccctcc

SEQ ID NO: 2847 - DNA, 18 bp, Artificial Sequence
  Description of Artificial Sequence: Synthetic oligonucleotide
taactgagaagtcccaac

SEQ ID NO: 2848 - DNA, 18 bp, Artificial Sequence
  Description of Artificial Sequence: Synthetic oligonucleotide
caatctaactgagaagtc

SEQ ID NO: 2849 - DNA, 18 bp, Artificial Sequence
  Description of Artificial Sequence: Synthetic oligonucleotide
gtattcaatctaactgag

SEQ ID NO: 2850 - DNA, 18 bp, Artificial Sequence
  Description of Artificial Sequence: Synthetic oligonucleotide
aacaggtattcaatctaa

SEQ ID NO: 2851 - DNA, 18 bp, Artificial Sequence
  Description of Artificial Sequence: Synthetic oligonucleotide
cattcaacaggtattcaa

SEQ ID NO: 2852 - DNA, 18 bp, Artificial Sequence
  Description of Artificial Sequence: Synthetic oligonucleotide
cttcccattcaacaggta

SEQ ID NO: 2853 - DNA, 18 bp, Artificial Sequence
  Description of Artificial Sequence: Synthetic oligonucleotide
tttctcttcccattcaac

SEQ ID NO: 2854 - DNA, 18 bp, Artificial Sequence
  Description of Artificial Sequence: Synthetic oligonucleotide
gggactttctcttcccat

SEQ ID NO: 2855 - DNA, 18 bp, Artificial Sequence
  Description of Artificial Sequence: Synthetic oligonucleotide
gcttagggactttctctt

SEQ ID NO: 2856 - DNA, 18 bp, Artificial Sequence
  Description of Artificial Sequence: Synthetic oligonucleotide
tgtcagcttagggacttt

SEQ ID NO: 2857 - DNA, 18 bp, Artificial Sequence
  Description of Artificial Sequence: Synthetic oligonucleotide
taaattgtcagcttaggg

SEQ ID NO: 2858 - DNA, 18 bp, Artificial Sequence
  Description of Artificial Sequence: Synthetic oligonucleotide
tacaataaattgtcagct

SEQ ID NO: 2859 - DNA, 18 bp, Artificial Sequence
  Description of Artificial Sequence: Synthetic oligonucleotide
tgttttacaataaattgt

SEQ ID NO: 2860 - DNA, 18 bp, Artificial Sequence
  Description of Artificial Sequence: Synthetic oligonucleotide
agatatgttttacaataa

SEQ ID NO: 2861 - DNA, 18 bp, Artificial Sequence
  Description of Artificial Sequence: Synthetic oligonucleotide
agcacagatatgttttac

SEQ ID NO: 2862 - DNA, 18 bp, Artificial Sequence
  Description of Artificial Sequence: Synthetic oligonucleotide
gcattagcacagatatgt

SEQ ID NO: 2863 - DNA, 18 bp, Artificial Sequence
  Description of Artificial Sequence: Synthetic oligonucleotide
ttcctgcattagcacaga

SEQ ID NO: 2864 - DNA, 18 bp, Artificial Sequence
  Description of Artificial Sequence: Synthetic oligonucleotide
cggagttcctgcattagc

SEQ ID NO: 2865 - DNA, 18 bp, Artificial Sequence
  Description of Artificial Sequence: Synthetic oligonucleotide
tgggtcggagttcctgca

SEQ ID NO: 2866 - DNA, 18 bp, Artificial Sequence
  Description of Artificial Sequence: Synthetic oligonucleotide
ccaggtgggtcggagttc

SEQ ID NO: 2867 - DNA, 18 bp, Artificial Sequence
  Description of Artificial Sequence: Synthetic oligonucleotide
ctgcaccaggtgggtcgg

SEQ ID NO: 2868 - DNA, 18 bp, Artificial Sequence
  Description of Artificial Sequence: Synthetic oligonucleotide
ctcctctgcaccaggtgg

SEQ ID NO: 2869 - DNA, 18 bp, Artificial Sequence
  Description of Artificial Sequence: Synthetic oligonucleotide
caagactcctctgcacca

SEQ ID NO: 2870 - DNA, 18 bp, Artificial Sequence
  Description of Artificial Sequence: Synthetic oligonucleotide
caagacaagactcctctg

SEQ ID NO: 2871 - DNA, 18 bp, Artificial Sequence
  Description of Artificial Sequence: Synthetic oligonucleotide
caggtcaagacaagactc

SEQ ID NO: 2872 - DNA, 18 bp, Artificial Sequence
  Description of Artificial Sequence: Synthetic oligonucleotide
caaagcaggtcaagacaa

SEQ ID NO: 2873 - DNA, 18 bp, Artificial Sequence
  Description of Artificial Sequence: Synthetic oligonucleotide
tctcccaaagcaggtcaa

SEQ ID NO: 2874 - DNA, 18 bp, Artificial Sequence
  Description of Artificial Sequence: Synthetic oligonucleotide
aacactctcccaaagcag

SEQ ID NO: 2875 - DNA, 18 bp, Artificial Sequence
  Description of Artificial Sequence: Synthetic oligonucleotide
aagacaacactctcccaa

SEQ ID NO: 2876 - DNA, 18 bp, Artificial Sequence
  Description of Artificial Sequence: Synthetic oligonucleotide
gcatcaagacaacactct

SEQ ID NO: 2877 - DNA, 18 bp, Artificial Sequence
  Description of Artificial Sequence: Synthetic oligonucleotide
gaaaagcatcaagacaac

SEQ ID NO: 2878 - DNA, 18 bp, Artificial Sequence
  Description of Artificial Sequence: Synthetic oligonucleotide
gaagagaaaagcatcaag

SEQ ID NO: 2879 - DNA, 18 bp, Artificial Sequence
  Description of Artificial Sequence: Synthetic oligonucleotide
aaattcttagaacaagga

SEQ ID NO: 2880 - DNA, 18 bp, Artificial Sequence
  Description of Artificial Sequence: Synthetic oligonucleotide
atgccaaattcttagaac

SEQ ID NO: 2881 - DNA, 18 bp, Artificial Sequence
  Description of Artificial Sequence: Synthetic oligonucleotide
actaaatgccaaattctt

SEQ ID NO: 2882 - DNA, 18 bp, Artificial Sequence
  Description of Artificial Sequence: Synthetic oligonucleotide
acaccactaaatgccaaa

SEQ ID NO: 2883 - DNA, 18 bp, Artificial Sequence
  Description of Artificial Sequence: Synthetic oligonucleotide
tgctgacaccactaaatg

SEQ ID NO: 2884 - DNA, 18 bp, Artificial Sequence
  Description of Artificial Sequence: Synthetic oligonucleotide
agaactgctgacaccact

SEQ ID NO: 2885 - DNA, 18 bp, Artificial Sequence
  Description of Artificial Sequence: Synthetic oligonucleotide
tactcagaactgctgaca

SEQ ID NO: 2886 - DNA, 18 bp, Artificial Sequence
  Description of Artificial Sequence: Synthetic oligonucleotide
ctctatactcagaactgc

SEQ ID NO: 2887 - DNA, 18 bp, Artificial Sequence
  Description of Artificial Sequence: Synthetic oligonucleotide
tacctctctatactcaga

SEQ ID NO: 2888 - DNA, 18 bp, Artificial Sequence
  Description of Artificial Sequence: Synthetic oligonucleotide
tattctacctctctatac

SEQ ID NO: 2889 - DNA, 18 bp, Artificial Sequence
  Description of Artificial Sequence: Synthetic oligonucleotide
gggactattctacctctc

SEQ ID NO: 2890 - DNA, 18 bp, Artificial Sequence
  Description of Artificial Sequence: Synthetic oligonucleotide
ggcttgggactattctac

SEQ ID NO: 2891 - DNA, 18 bp, Artificial Sequence
  Description of Artificial Sequence: Synthetic oligonucleotide
gccatggcttgggactat

SEQ ID NO: 2892 - DNA, 18 bp, Artificial Sequence
  Description of Artificial Sequence: Synthetic oligonucleotide
gctgtgccatggcttggg

SEQ ID NO: 2893 - DNA, 18 bp, Artificial Sequence
  Description of Artificial Sequence: Synthetic oligonucleotide
tgaaagctgtgccatggc

SEQ ID NO: 2894 - DNA, 18 bp, Artificial Sequence
  Description of Artificial Sequence: Synthetic oligonucleotide
cacagtgaaagctgtgcc

SEQ ID NO: 2895 - DNA, 18 bp, Artificial Sequence
  Description of Artificial Sequence: Synthetic oligonucleotide
tgtcacacagtgaaagct

SEQ ID NO: 2896 - DNA, 18 bp, Artificial Sequence
  Description of Artificial Sequence: Synthetic oligonucleotide
gaatgtgtcacacagtga

SEQ ID NO: 2897 - DNA, 18 bp, Artificial Sequence
  Description of Artificial Sequence: Synthetic oligonucleotide
aaggagaatgtgtcacac

SEQ ID NO: 2898 - DNA, 18 bp, Artificial Sequence
  Description of Artificial Sequence: Synthetic oligonucleotide
tggaaaaggagaatgtgt

SEQ ID NO: 2899 - DNA, 18 bp, Artificial Sequence
  Description of Artificial Sequence: Synthetic oligonucleotide
aagcctggaaaaggagaa

SEQ ID NO: 2900 - DNA, 18 bp, Artificial Sequence
  Description of Artificial Sequence: Synthetic oligonucleotide
gctcaaagcctggaaaag

SEQ ID NO: 2901 - DNA, 18 bp, Artificial Sequence
  Description of Artificial Sequence: Synthetic oligonucleotide
gtgtagctcaaagcctgg

SEQ ID NO: 2902 - DNA, 18 bp, Artificial Sequence
  Description of Artificial Sequence: Synthetic oligonucleotide
acagggtgtagctcaaag

SEQ ID NO: 2903 - DNA, 18 bp, Artificial Sequence
  Description of Artificial Sequence: Synthetic oligonucleotide
gctggacagggtgtagct

SEQ ID NO: 2904 - DNA, 18 bp, Artificial Sequence
  Description of Artificial Sequence: Synthetic oligonucleotide
gaacagctggacagggtg

SEQ ID NO: 2905 - DNA, 18 bp, Artificial Sequence
  Description of Artificial Sequence: Synthetic oligonucleotide
gtacagaacagctggaca

SEQ ID NO: 2906 - DNA, 18 bp, Artificial Sequence
  Description of Artificial Sequence: Synthetic oligonucleotide
gggttgtacagaacagct

SEQ ID NO: 2907 - DNA, 18 bp, Artificial Sequence
  Description of Artificial Sequence: Synthetic oligonucleotide
ggaaagggttgtacagaa

SEQ ID NO: 2908 - DNA, 18 bp, Artificial Sequence
  Description of Artificial Sequence: Synthetic oligonucleotide
aaaggggaaagggttgta

SEQ ID NO: 2909 - DNA, 18 bp, Artificial Sequence
  Description of Artificial Sequence: Synthetic oligonucleotide
ggagaaaaggggaaaggg

SEQ ID NO: 2910 - DNA, 18 bp, Artificial Sequence
  Description of Artificial Sequence: Synthetic oligonucleotide
ggaagggagaaaagggga

SEQ ID NO: 2911 - DNA, 18 bp, Artificial Sequence
  Description of Artificial Sequence: Synthetic oligonucleotide
aatcaggaagggagaaaa

SEQ ID NO: 2912 - DNA, 18 bp, Artificial Sequence
  Description of Artificial Sequence: Synthetic oligonucleotide
ctcacaatcaggaaggga

SEQ ID NO: 2913 - DNA, 18 bp, Artificial Sequence
  Description of Artificial Sequence: Synthetic oligonucleotide
gcatgctcacaatcagga

SEQ ID NO: 2914 - DNA, 18 bp, Artificial Sequence
  Description of Artificial Sequence: Synthetic oligonucleotide
catcagcatgctcacaat

SEQ ID NO: 2915 - DNA, 18 bp, Artificial Sequence
  Description of Artificial Sequence: Synthetic oligonucleotide
ccacccatcagcatgctc

SEQ ID NO: 2916 - DNA, 18 bp, Artificial Sequence
  Description of Artificial Sequence: Synthetic oligonucleotide
catgcccacccatcagca

SEQ ID NO: 2917 - DNA, 18 bp, Artificial Sequence
  Description of Artificial Sequence: Synthetic oligonucleotide
ggcatcatgcccacccat

SEQ ID NO: 2918 - DNA, 18 bp, Artificial Sequence
  Description of Artificial Sequence: Synthetic oligonucleotide
ccccaggaagcggtgcac

SEQ ID NO: 2919 - DNA, 18 bp, Artificial Sequence
  Description of Artificial Sequence: Synthetic oligonucleotide
caggaccccaggaagcgg

SEQ ID NO: 2920 - DNA, 18 bp, Artificial Sequence
  Description of Artificial Sequence: Synthetic oligonucleotide
ccgggcaggaccccagga

SEQ ID NO: 2921 - DNA, 18 bp, Artificial Sequence
  Description of Artificial Sequence: Synthetic oligonucleotide
ttcagccgggcaggaccc

SEQ ID NO: 2922 - DNA, 18 bp, Artificial Sequence
  Description of Artificial Sequence: Synthetic oligonucleotide
cccctttcagccgggcag

SEQ ID NO: 2923 - DNA, 18 bp, Artificial Sequence
  Description of Artificial Sequence: Synthetic oligonucleotide
tctgccccctttcagccg

SEQ ID NO: 2924 - DNA, 18 bp, Artificial Sequence
  Description of Artificial Sequence: Synthetic oligonucleotide
cttcctctgccccctttc

SEQ ID NO: 2925 - DNA, 18 bp, Artificial Sequence
  Description of Artificial Sequence: Synthetic oligonucleotide
cctgccttcctctgcccc

SEQ ID NO: 2926 - DNA, 18 bp, Artificial Sequence
  Description of Artificial Sequence: Synthetic oligonucleotide
ctgctcctgccttcctct

SEQ ID NO: 2927 - DNA, 18 bp, Artificial Sequence
  Description of Artificial Sequence: Synthetic oligonucleotide
agcctctgctcctgcctt

SEQ ID NO: 2928 - DNA, 18 bp, Artificial Sequence
  Description of Artificial Sequence: Synthetic oligonucleotide
ggcttagcctctgctcct

SEQ ID NO: 2929 - DNA, 18 bp, Artificial Sequence
  Description of Artificial Sequence: Synthetic oligonucleotide
tgagcggcttagcctctg

SEQ ID NO: 2930 - DNA, 18 bp, Artificial Sequence
  Description of Artificial Sequence: Synthetic oligonucleotide
ggggatgagcggcttagc

SEQ ID NO: 2931 - DNA, 18 bp, Artificial Sequence
  Description of Artificial Sequence: Synthetic oligonucleotide
gccctggggatgagcggc

SEQ ID NO: 2932 - DNA, 18 bp, Artificial Sequence
  Description of Artificial Sequence: Synthetic oligonucleotide
cacctgccctggggatga

SEQ ID NO: 2933 - DNA, 18 bp, Artificial Sequence
  Description of Artificial Sequence: Synthetic oligonucleotide
gtctacacctgccctggg

SEQ ID NO: 2934 - DNA, 18 bp, Artificial Sequence
  Description of Artificial Sequence: Synthetic oligonucleotide
actgcgtctacacctgcc

SEQ ID NO: 2935 - DNA, 18 bp, Artificial Sequence
  Description of Artificial Sequence: Synthetic oligonucleotide
atacccaagccctgtcac

SEQ ID NO: 2936 - DNA, 18 bp, Artificial Sequence
  Description of Artificial Sequence: Synthetic oligonucleotide
ccgaaatacccaagccct

SEQ ID NO: 2937 - DNA, 18 bp, Artificial Sequence
  Description of Artificial Sequence: Synthetic oligonucleotide
gcctgccgaaatacccaa

SEQ ID NO: 2938 - DNA, 18 bp, Artificial Sequence
  Description of Artificial Sequence: Synthetic oligonucleotide
taaaggcctgccgaaata

SEQ ID NO: 2939 - DNA, 18 bp, Artificial Sequence
  Description of Artificial Sequence: Synthetic oligonucleotide
caggataaaggcctgccg

SEQ ID NO: 2940 - DNA, 18 bp, Artificial Sequence
  Description of Artificial Sequence: Synthetic oligonucleotide
ggaagcaggataaaggcc

SEQ ID NO: 2941 - DNA, 18 bp, Artificial Sequence
  Description of Artificial Sequence: Synthetic oligonucleotide
catggggaagcaggataa

SEQ ID NO: 2942 - DNA, 18 bp, Artificial Sequence
  Description of Artificial Sequence: Synthetic oligonucleotide
catgccatggggaagcag

SEQ ID NO: 2943 - DNA, 18 bp, Artificial Sequence
  Description of Artificial Sequence: Synthetic oligonucleotide
agctccatgccatgggga

SEQ ID NO: 2944 - DNA, 18 bp, Artificial Sequence
  Description of Artificial Sequence: Synthetic oligonucleotide
ccaggagctccatgccat

SEQ ID NO: 2945 - DNA, 18 bp, Artificial Sequence
  Description of Artificial Sequence: Synthetic oligonucleotide
cgggcccaggagctccat

SEQ ID NO: 2946 - DNA, 18 bp, Artificial Sequence
  Description of Artificial Sequence: Synthetic oligonucleotide
ggcgccgggcccaggagc

SEQ ID NO: 2947 - DNA, 18 bp, Artificial Sequence
  Description of Artificial Sequence: Synthetic oligonucleotide
gaaggggcgccgggccca

SEQ ID NO: 2948 - DNA, 18 bp, Artificial Sequence
  Description of Artificial Sequence: Synthetic oligonucleotide
gcagggaaggggcgccgg

SEQ ID NO: 2949 - DNA, 18 bp, Artificial Sequence
  Description of Artificial Sequence: Synthetic oligonucleotide
ggcaggcagggaaggggc

SEQ ID NO: 2950 - DNA, 18 bp, Artificial Sequence
  Description of Artificial Sequence: Synthetic oligonucleotide
gggtgggcaggcagggaa

SEQ ID NO: 2951 - DNA, 18 bp, Artificial Sequence
  Description of Artificial Sequence: Synthetic oligonucleotide
cacccgggtgggcaggca

SEQ ID NO: 2952 - DNA, 18 bp, Artificial Sequence
  Description of Artificial Sequence: Synthetic oligonucleotide
aaggccacccgggtgggc

SEQ ID NO: 2953 - DNA, 18 bp, Artificial Sequence
  Description of Artificial Sequence: Synthetic oligonucleotide
gaggaaaggccacccggg

SEQ ID NO: 2954 - DNA, 18 bp, Artificial Sequence
  Description of Artificial Sequence: Synthetic oligonucleotide
gccaagaggaaaggccac

SEQ ID NO: 2955 - DNA, 18 bp, Artificial Sequence
  Description of Artificial Sequence: Synthetic oligonucleotide
tggctgccaagaggaaag

SEQ ID NO: 2956 - DNA, 18 bp, Artificial Sequence
  Description of Artificial Sequence: Synthetic oligonucleotide
gggcctggctgccaagag

SEQ ID NO: 2957 - DNA, 18 bp, Artificial Sequence
  Description of Artificial Sequence: Synthetic oligonucleotide
ccctggggcctggctgcc

SEQ ID NO: 2958 - DNA, 18 bp, Artificial Sequence
  Description of Artificial Sequence: Synthetic oligonucleotide
caggcccctggggcctgg

SEQ ID NO: 2959 - DNA, 18 bp, Artificial Sequence
  Description of Artificial Sequence: Synthetic oligonucleotide
ggcttcaggcccctgggg

SEQ ID NO: 2960 - DNA, 18 bp, Artificial Sequence
  Description of Artificial Sequence: Synthetic oligonucleotide
actctggcttcaggcccc

SEQ ID NO: 2961 - DNA, 18 bp, Artificial Sequence
  Description of Artificial Sequence: Synthetic oligonucleotide
cctggactctggcttcag

SEQ ID NO: 2962 - DNA, 18 bp, Artificial Sequence
  Description of Artificial Sequence: Synthetic oligonucleotide
ctccccctggactctggc

SEQ ID NO: 2963 - DNA, 18 bp, Artificial Sequence
  Description of Artificial Sequence: Synthetic oligonucleotide
tcctcctccccctggact

SEQ ID NO: 2964 - DNA, 18 bp, Artificial Sequence
  Description of Artificial Sequence: Synthetic oligonucleotide
acgtgtcctcctccccct

SEQ ID NO: 2965 - DNA, 18 bp, Artificial Sequence
  Description of Artificial Sequence: Synthetic oligonucleotide
caggcacgtgtcctcctc

SEQ ID NO: 2966 - DNA, 18 bp, Artificial Sequence
  Description of Artificial Sequence: Synthetic oligonucleotide
cggggcaggcacgtgtcc

SEQ ID NO: 2967 - DNA, 18 bp, Artificial Sequence
  Description of Artificial Sequence: Synthetic oligonucleotide
ggggccggggcaggcacg

SEQ ID NO: 2968 - DNA, 18 bp, Artificial Sequence
  Description of Artificial Sequence: Synthetic oligonucleotide
cccgaggggccggggcag

SEQ ID NO: 2969 - DNA, 18 bp, Artificial Sequence
  Description of Artificial Sequence: Synthetic oligonucleotide
ggactcccgaggggccgg

SEQ ID NO: 2970 - DNA, 18 bp, Artificial Sequence
  Description of Artificial Sequence: Synthetic oligonucleotide
ccagccctgcttcccctg

SEQ ID NO: 2971 - DNA, 18 bp, Artificial Sequence
  Description of Artificial Sequence: Synthetic oligonucleotide
tacacccagccctgcttc

SEQ ID NO: 2972 - DNA, 18 bp, Artificial Sequence
  Description of Artificial Sequence: Synthetic oligonucleotide
ctctctacacccagccct

SEQ ID NO: 2973 - DNA, 18 bp, Artificial Sequence
  Description of Artificial Sequence: Synthetic oligonucleotide
gggtcctctctacaccca

SEQ ID NO: 2974 - DNA, 18 bp, Artificial Sequence
  Description of Artificial Sequence: Synthetic oligonucleotide
cgtgagggtcctctctac

SEQ ID NO: 2975 - DNA, 18 bp, Artificial Sequence
  Description of Artificial Sequence: Synthetic oligonucleotide
cccagcgtgagggtcctc

SEQ ID NO: 2976 - DNA, 18 bp, Artificial Sequence
  Description of Artificial Sequence: Synthetic oligonucleotide
gaggccccagcgtgaggg

SEQ ID NO: 2977 - DNA, 18 bp, Artificial Sequence
  Description of Artificial Sequence: Synthetic oligonucleotide
agtctgaggccccagcgt

SEQ ID NO: 2978 - DNA, 18 bp, Artificial Sequence
  Description of Artificial Sequence: Synthetic oligonucleotide
gcaccagtctgaggcccc

SEQ ID NO: 2979 - DNA, 18 bp, Artificial Sequence
  Description of Artificial Sequence: Synthetic oligonucleotide
cacaggcaccagtctgag

SEQ ID NO: 2980 - DNA, 18 bp, Artificial Sequence
  Description of Artificial Sequence: Synthetic oligonucleotide
ctggtcacaggcaccagt

SEQ ID NO: 2981 - DNA, 18 bp, Artificial Sequence
  Description of Artificial Sequence: Synthetic oligonucleotide
ggtccctggtcacaggca

SEQ ID NO: 2982 - DNA, 18 bp, Artificial Sequence
  Description of Artificial Sequence: Synthetic oligonucleotide
cctctggtccctggtcac

SEQ ID NO: 2983 - DNA, 18 bp, Artificial Sequence
  Description of Artificial Sequence: Synthetic oligonucleotide
gcctccctctggtccctg

SEQ ID NO: 2984 - DNA, 18 bp, Artificial Sequence
  Description of Artificial Sequence: Synthetic oligonucleotide
gccaggcctccctctggt

SEQ ID NO: 2985 - DNA, 18 bp, Artificial Sequence
  Description of Artificial Sequence: Synthetic oligonucleotide
aaggagccaggcctccct

SEQ ID NO: 2986 - DNA, 18 bp, Artificial Sequence
  Description of Artificial Sequence: Synthetic oligonucleotide
gagagaaggagccaggcc

SEQ ID NO: 2987 - DNA, 18 bp, Artificial Sequence
  Description of Artificial Sequence: Synthetic oligonucleotide
ggtgagagagaaggagcc

SEQ ID NO: 2988 - DNA, 18 bp, Artificial Sequence
  Description of Artificial Sequence: Synthetic oligonucleotide
tggcaggtgagagagaag

SEQ ID NO: 2989 - DNA, 18 bp, Artificial Sequence
  Description of Artificial Sequence: Synthetic oligonucleotide
caggttggcaggtgagag

SEQ ID NO: 2990 - DNA, 18 bp, Artificial Sequence
  Description of Artificial Sequence: Synthetic oligonucleotide
gcctgcaggttggcaggt

SEQ ID NO: 2991 - DNA, 18 bp, Artificial Sequence
  Description of Artificial Sequence: Synthetic oligonucleotide
catttgcctgcaggttgg

SEQ ID NO: 2992 - DNA, 18 bp, Artificial Sequence
  Description of Artificial Sequence: Synthetic oligonucleotide
caagtccatcaaaaatta

SEQ ID NO: 2993 - DNA, 18 bp, Artificial Sequence
  Description of Artificial Sequence: Synthetic oligonucleotide
ctgaacaagtccatcaaa

SEQ ID NO: 2994 - DNA, 18 bp, Artificial Sequence
  Description of Artificial Sequence: Synthetic oligonucleotide
aagcactgaacaagtcca

SEQ ID NO: 2995 - DNA, 18 bp, Artificial Sequence
  Description of Artificial Sequence: Synthetic oligonucleotide
aaactaagcactgaacaa

SEQ ID NO: 2996 - DNA, 18 bp, Artificial Sequence
  Description of Artificial Sequence: Synthetic oligonucleotide
cacaaaaactaagcactg

SEQ ID NO: 2997 - DNA, 18 bp, Artificial Sequence
  Description of Artificial Sequence: Synthetic oligonucleotide
aaatccacaaaaactaag

SEQ ID NO: 2998 - DNA, 18 bp, Artificial Sequence
  Description of Artificial Sequence: Synthetic oligonucleotide
tatgaaaatccacaaaaa

SEQ ID NO: 2999 - DNA, 18 bp, Artificial Sequence
  Description of Artificial Sequence: Synthetic oligonucleotide
tttactatgaaaatccac

SEQ ID NO: 3000 - DNA, 18 bp, Artificial Sequence
  Description of Artificial Sequence: Synthetic oligonucleotide
atctttttactatgaaaa

SEQ ID NO: 3001 - DNA, 18 bp, Artificial Sequence
  Description of Artificial Sequence: Synthetic oligonucleotide
acaacatctttttactat

SEQ ID NO: 3002 - DNA, 18 bp, Artificial Sequence
  Description of Artificial Sequence: Synthetic oligonucleotide
agttgacaacatcttttt

SEQ ID NO: 3003 - DNA, 18 bp, Artificial Sequence
  Description of Artificial Sequence: Synthetic oligonucleotide
gtcagagttgacaacatc

SEQ ID NO: 3004 - DNA, 18 bp, Artificial Sequence
  Description of Artificial Sequence: Synthetic oligonucleotide
attaagtcagagttgaca

SEQ ID NO: 3005 - DNA, 18 bp, Artificial Sequence
  Description of Artificial Sequence: Synthetic oligonucleotide
ttttaattaagtcagagt

SEQ ID NO: 3006 - DNA, 18 bp, Artificial Sequence
  Description of Artificial Sequence: Synthetic oligonucleotide
gaaaattttaattaagtc

SEQ ID NO: 3007 - DNA, 18 bp, Artificial Sequence
  Description of Artificial Sequence: Synthetic oligonucleotide
aaaaggaaaattttaatt

SEQ ID NO: 3008 - DNA, 18 bp, Artificial Sequence
  Description of Artificial Sequence: Synthetic oligonucleotide
gaaagaaaaggaaaattt

SEQ ID NO: 3009 - DNA, 18 bp, Artificial Sequence
  Description of Artificial Sequence: Synthetic oligonucleotide
ataaggaaagaaaaggaa

SEQ ID NO: 3010 - DNA, 18 bp, Artificial Sequence
  Description of Artificial Sequence: Synthetic oligonucleotide
agaggataaggaaagaaa

SEQ ID NO: 3011 - DNA, 18 bp, Artificial Sequence
  Description of Artificial Sequence: Synthetic oligonucleotide
gttcaagaggataaggaa

SEQ ID NO: 3012 - DNA, 18 bp, Artificial Sequence
  Description of Artificial Sequence: Synthetic oligonucleotide
ctctagttcaagaggata

SEQ ID NO: 3013 - DNA, 18 bp, Artificial Sequence
  Description of Artificial Sequence: Synthetic oligonucleotide
attttctctagttcaaga

SEQ ID NO: 3014 - DNA, 18 bp, Artificial Sequence
  Description of Artificial Sequence: Synthetic oligonucleotide
tttttattttctctagtt

SEQ ID NO: 3015 - DNA, 18 bp, Artificial Sequence
  Description of Artificial Sequence: Synthetic oligonucleotide
ctccatttttattttctc

SEQ ID NO: 3016 - DNA, 18 bp, Artificial Sequence
  Description of Artificial Sequence: Synthetic oligonucleotide
cagtactccatttttatt

SEQ ID NO: 3017 - DNA, 18 bp, Artificial Sequence
  Description of Artificial Sequence: Synthetic oligonucleotide
aaaaacagtactccattt

SEQ ID NO: 3018 - DNA, 18 bp, Artificial Sequence
  Description of Artificial Sequence: Synthetic oligonucleotide
aacagaaaaacagtactc

SEQ ID NO: 3019 - DNA, 18 bp, Artificial Sequence
  Description of Artificial Sequence: Synthetic oligonucleotide
atgcaaacagaaaaacag

SEQ ID NO: 3020 - DNA, 18 bp, Artificial Sequence
  Description of Artificial Sequence: Synthetic oligonucleotide
agtacatgcaaacagaaa

SEQ ID NO: 3021 - DNA, 18 bp, Artificial Sequence
  Description of Artificial Sequence: Synthetic oligonucleotide
tcaagagtacatgcaaac

SEQ ID NO: 3022 - DNA, 18 bp, Artificial Sequence
  Description of Artificial Sequence: Synthetic oligonucleotide
acttgtcaagagtacatg

SEQ ID NO: 3023 - DNA, 18 bp, Artificial Sequence
  Description of Artificial Sequence: Synthetic oligonucleotide
agcaaacttgtcaagagt

SEQ ID NO: 3024 - DNA, 18 bp, Artificial Sequence
  Description of Artificial Sequence: Synthetic oligonucleotide
acaattttttttctttct

SEQ ID NO: 3025 - DNA, 18 bp, Artificial Sequence
  Description of Artificial Sequence: Synthetic oligonucleotide
tttgcacaattttttttc

SEQ ID NO: 3026 - DNA, 18 bp, Artificial Sequence
  Description of Artificial Sequence: Synthetic oligonucleotide
agttatttgcacaatttt

SEQ ID NO: 3027 - DNA, 18 bp, Artificial Sequence
  Description of Artificial Sequence: Synthetic oligonucleotide
tactaagttatttgcaca

SEQ ID NO: 3028 - DNA, 18 bp, Artificial Sequence
  Description of Artificial Sequence: Synthetic oligonucleotide
ctacatactaagttattt

SEQ ID NO: 3029 - DNA, 18 bp, Artificial Sequence
  Description of Artificial Sequence: Synthetic oligonucleotide
ttcctctacatactaagt

SEQ ID NO: 3030 - DNA, 18 bp, Artificial Sequence
  Description of Artificial Sequence: Synthetic oligonucleotide
ctggattcctctacatac

SEQ ID NO: 3031 - DNA, 18 bp, Artificial Sequence
  Description of Artificial Sequence: Synthetic oligonucleotide
acaccctggattcctcta

SEQ ID NO: 3032 - DNA, 18 bp, Artificial Sequence
  Description of Artificial Sequence: Synthetic oligonucleotide
ttttgacaccctggattc

SEQ ID NO: 3033 - DNA, 18 bp, Artificial Sequence
  Description of Artificial Sequence: Synthetic oligonucleotide
taggcttttgacaccctg

SEQ ID NO: 3034 - DNA, 18 bp, Artificial Sequence
  Description of Artificial Sequence: Synthetic oligonucleotide
acgcataggcttttgaca

SEQ ID NO: 3035 - DNA, 18 bp, Artificial Sequence
  Description of Artificial Sequence: Synthetic oligonucleotide
gggacacgcataggcttt

SEQ ID NO: 3036 - DNA, 18 bp, Artificial Sequence
  Description of Artificial Sequence: Synthetic oligonucleotide
cccaggggacacgcatag

SEQ ID NO: 3037 - DNA, 18 bp, Artificial Sequence
  Description of Artificial Sequence: Synthetic oligonucleotide
tgggccccaggggacacg

SEQ ID NO: 3038 - DNA, 18 bp, Artificial Sequence
  Description of Artificial Sequence: Synthetic oligonucleotide
tggtctgggccccagggg

SEQ ID NO: 3039 - DNA, 18 bp, Artificial Sequence
  Description of Artificial Sequence: Synthetic oligonucleotide
gatggtggtctgggcccc

SEQ ID NO: 3040 - DNA, 18 bp, Artificial Sequence
  Description of Artificial Sequence: Synthetic oligonucleotide
gggaggatggtggtctgg

SEQ ID NO: 3041 - DNA, 18 bp, Artificial Sequence
  Description of Artificial Sequence: Synthetic oligonucleotide
gacgggggaggatggtgg

SEQ ID NO: 3042 - DNA, 18 bp, Artificial Sequence
  Description of Artificial Sequence: Synthetic oligonucleotide
agggggacgggggaggat

SEQ ID NO: 3043 - DNA, 18 bp, Artificial Sequence
  Description of Artificial Sequence: Synthetic oligonucleotide
gggtgagggggacggggg

SEQ ID NO: 3044 - DNA, 18 bp, Artificial Sequence
  Description of Artificial Sequence: Synthetic oligonucleotide
gactggggtgagggggac

SEQ ID NO: 3045 - DNA, 18 bp, Artificial Sequence
  Description of Artificial Sequence: Synthetic oligonucleotide
gctgagactggggtgagg

SEQ ID NO: 3046 - DNA, 18 bp, Artificial Sequence
  Description of Artificial Sequence: Synthetic oligonucleotide
cagctgctgagactgggg

SEQ ID NO: 3047 - DNA, 18 bp, Artificial Sequence
  Description of Artificial Sequence: Synthetic oligonucleotide
cagaacagctgctgagac

SEQ ID NO: 3048 - DNA, 18 bp, Artificial Sequence
  Description of Artificial Sequence: Synthetic oligonucleotide
tccatcagtcctgctttt

SEQ ID NO: 3049 - DNA, 18 bp, Artificial Sequence
  Description of Artificial Sequence: Synthetic oligonucleotide
tatgctccatcagtcctg

SEQ ID NO: 3050 - DNA, 18 bp, Artificial Sequence
  Description of Artificial Sequence: Synthetic oligonucleotide
atacatatgctccatcag

SEQ ID NO: 3051 - DNA, 18 bp, Artificial Sequence
  Description of Artificial Sequence: Synthetic oligonucleotide
tacatatacatatgctcc

SEQ ID NO: 3052 - DNA, 18 bp, Artificial Sequence
  Description of Artificial Sequence: Synthetic oligonucleotide
ttttctacatatacatat

SEQ ID NO: 3053 - DNA, 18 bp, Artificial Sequence
  Description of Artificial Sequence: Synthetic oligonucleotide
ggtatttttctacatata

SEQ ID NO: 3054 - DNA, 18 bp, Artificial Sequence
  Description of Artificial Sequence: Synthetic oligonucleotide
gactgggtatttttctac

SEQ ID NO: 3055 - DNA, 18 bp, Artificial Sequence
  Description of Artificial Sequence: Synthetic oligonucleotide
cacatgactgggtatttt

SEQ ID NO: 3056 - DNA, 18 bp, Artificial Sequence
  Description of Artificial Sequence: Synthetic oligonucleotide
cagaacacatgactgggt

SEQ ID NO: 3057 - DNA, 18 bp, Artificial Sequence
  Description of Artificial Sequence: Synthetic oligonucleotide
actatcagaacacatgac

SEQ ID NO: 3058 - DNA, 18 bp, Artificial Sequence
  Description of Artificial Sequence: Synthetic oligonucleotide
caagcactatcagaacac

SEQ ID NO: 3059 - DNA, 18 bp, Artificial Sequence
  Description of Artificial Sequence: Synthetic oligonucleotide
gaatgcaagcactatcag

SEQ ID NO: 3060 - DNA, 18 bp, Artificial Sequence
  Description of Artificial Sequence: Synthetic oligonucleotide
aatgtgaatgcaagcact

SEQ ID NO: 3061 - DNA, 18 bp, Artificial Sequence
  Description of Artificial Sequence: Synthetic oligonucleotide
gacacaatgtgaatgcaa

SEQ ID NO: 3062 - DNA, 18 bp, Artificial Sequence
  Description of Artificial Sequence: Synthetic oligonucleotide
caaaagacacaatgtgaa

SEQ ID NO: 3063 - DNA, 18 bp, Artificial Sequence
  Description of Artificial Sequence: Synthetic oligonucleotide
tataacaaaagacacaat

SEQ ID NO: 3064 - DNA, 18 bp, Artificial Sequence
  Description of Artificial Sequence: Synthetic oligonucleotide
ttgcatataacaaaagac

SEQ ID NO: 3065 - DNA, 18 bp, Artificial Sequence
  Description of Artificial Sequence: Synthetic oligonucleotide
ctttattgcatataacaa

SEQ ID NO: 3066 - DNA, 18 bp, Artificial Sequence
  Description of Artificial Sequence: Synthetic oligonucleotide
aagaactttattgcatat

SEQ ID NO: 3067 - DNA, 18 bp, Artificial Sequence
  Description of Artificial Sequence: Synthetic oligonucleotide
ctaaaaagaactttattg

SEQ ID NO: 3068 - DNA, 18 bp, Artificial Sequence
  Description of Artificial Sequence: Synthetic oligonucleotide
acaaactaaaaagaactt

SEQ ID NO: 3069 - DNA, 18 bp, Artificial Sequence
  Description of Artificial Sequence: Synthetic oligonucleotide
ccccaggcaggggcccca

SEQ ID NO: 3070 - DNA, 18 bp, Artificial Sequence
  Description of Artificial Sequence: Synthetic oligonucleotide
ctgaaccccaggcagggg

SEQ ID NO: 3071 - DNA, 18 bp, Artificial Sequence
  Description of Artificial Sequence: Synthetic oligonucleotide
cctccctgaaccccaggc

SEQ ID NO: 3072 - DNA, 18 bp, Artificial Sequence
  Description of Artificial Sequence: Synthetic oligonucleotide
ctgtacctccctgaaccc

SEQ ID NO: 3073 - DNA, 18 bp, Artificial Sequence
  Description of Artificial Sequence: Synthetic oligonucleotide
gcctgctgtacctccctg

SEQ ID NO: 3074 - DNA, 18 bp, Artificial Sequence
  Description of Artificial Sequence: Synthetic oligonucleotide
ccaaggcctgctgtacct

SEQ ID NO: 3075 - DNA, 18 bp, Artificial Sequence
  Description of Artificial Sequence: Synthetic oligonucleotide
ctggcccaaggcctgctg

SEQ ID NO: 3076 - DNA, 18 bp, Artificial Sequence
  Description of Artificial Sequence: Synthetic oligonucleotide
atccgctggcccaaggcc

SEQ ID NO: 3077 - DNA, 18 bp, Artificial Sequence
  Description of Artificial Sequence: Synthetic oligonucleotide
gcttcatccgctggccca

SEQ ID NO: 3078 - DNA, 18 bp, Artificial Sequence
  Description of Artificial Sequence: Synthetic oligonucleotide
aggcagcttcatccgctg

SEQ ID NO: 3079 - DNA, 18 bp, Artificial Sequence
  Description of Artificial Sequence: Synthetic oligonucleotide
cttgaaggcagcttcatc

SEQ ID NO: 3080 - DNA, 18 bp, Artificial Sequence
  Description of Artificial Sequence: Synthetic oligonucleotide
aggcccttgaaggcagct

SEQ ID NO: 3081 - DNA, 18 bp, Artificial Sequence
  Description of Artificial Sequence: Synthetic oligonucleotide
tcaagaggcccttgaagg

SEQ ID NO: 3082 - DNA, 18 bp, Artificial Sequence
  Description of Artificial Sequence: Synthetic oligonucleotide
gtggctcaagaggccctt

SEQ ID NO: 3083 - DNA, 18 bp, Artificial Sequence
  Description of Artificial Sequence: Synthetic oligonucleotide
ggtgtgtggctcaagagg

SEQ ID NO: 3084 - DNA, 18 bp, Artificial Sequence
  Description of Artificial Sequence: Synthetic oligonucleotide
gtgcaggtgtgtggctca

SEQ ID NO: 3085 - DNA, 18 bp, Artificial Sequence
  Description of Artificial Sequence: Synthetic oligonucleotide
tcaccgtgcaggtgtgtg

SEQ ID NO: 3086 - DNA, 18 bp, Artificial Sequence
  Description of Artificial Sequence: Synthetic oligonucleotide
ggaagtcaccgtgcaggt

SEQ ID NO: 3087 - DNA, 18 bp, Artificial Sequence
  Description of Artificial Sequence: Synthetic oligonucleotide
ggaggggaagtcaccgtg

SEQ ID NO: 3088 - DNA, 18 bp, Artificial Sequence
  Description of Artificial Sequence: Synthetic oligonucleotide
ctgtaggaggggaagtca

SEQ ID NO: 3089 - DNA, 18 bp, Artificial Sequence
  Description of Artificial Sequence: Synthetic oligonucleotide
agttactgtaggagggga

SEQ ID NO: 3090 - DNA, 18 bp, Artificial Sequence
  Description of Artificial Sequence: Synthetic oligonucleotide
gaaggagttactgtagga

SEQ ID NO: 3091 - DNA, 18 bp, Artificial Sequence
  Description of Artificial Sequence: Synthetic oligonucleotide
atgtggaaggagttactg

SEQ ID NO: 3092 - DNA, 18 bp, Artificial Sequence
  Description of Artificial Sequence: Synthetic oligonucleotide
tcatcatgtggaaggagt

SEQ ID NO: 3093 - DNA, 18 bp, Artificial Sequence
  Description of Artificial Sequence: Synthetic oligonucleotide
gactgtcatcatgtggaa

SEQ ID NO: 3094 - DNA, 18 bp, Artificial Sequence
  Description of Artificial Sequence: Synthetic oligonucleotide
cggaggactgtcatcatg

SEQ ID NO: 3095 - DNA, 18 bp, Artificial Sequence
  Description of Artificial Sequence: Synthetic oligonucleotide
ttcttccaaaaaataatc

SEQ ID NO: 3096 - DNA, 18 bp, Artificial Sequence
  Description of Artificial Sequence: Synthetic oligonucleotide
ccaccttcttccaaaaaa

SEQ ID NO: 3097 - DNA, 18 bp, Artificial Sequence
  Description of Artificial Sequence: Synthetic oligonucleotide
ccccaccaccttcttcca

SEQ ID NO: 3098 - DNA, 18 bp, Artificial Sequence
  Description of Artificial Sequence: Synthetic oligonucleotide
tgtctccccaccaccttc

SEQ ID NO: 3099 - DNA, 18 bp, Artificial Sequence
  Description of Artificial Sequence: Synthetic oligonucleotide
ttaaatgtctccccacca

SEQ ID NO: 3100 - DNA, 18 bp, Artificial Sequence
  Description of Artificial Sequence: Synthetic oligonucleotide
agacattaaatgtctccc

SEQ ID NO: 3101 - DNA, 18 bp, Artificial Sequence
  Description of Artificial Sequence: Synthetic oligonucleotide
agtttagacattaaatgt

SEQ ID NO: 3102 - DNA, 18 bp, Artificial Sequence
  Description of Artificial Sequence: Synthetic oligonucleotide
gtttaagtttagacatta

SEQ ID NO: 3103 - DNA, 18 bp, Artificial Sequence
  Description of Artificial Sequence: Synthetic oligonucleotide
taagggtttaagtttaga

SEQ ID NO: 3104 - DNA, 18 bp, Artificial Sequence
  Description of Artificial Sequence: Synthetic oligonucleotide
tcatttaagggtttaagt

SEQ ID NO: 3105 - DNA, 18 bp, Artificial Sequence
  Description of Artificial Sequence: Synthetic oligonucleotide
tttcctcatttaagggtt

SEQ ID NO: 3106 - DNA, 18 bp, Artificial Sequence
  Description of Artificial Sequence: Synthetic oligonucleotide
acagttttcctcatttaa

SEQ ID NO: 3107 - DNA, 18 bp, Artificial Sequence
  Description of Artificial Sequence: Synthetic oligonucleotide
gtataacagttttcctca

SEQ ID NO: 3108 - DNA, 18 bp, Artificial Sequence
  Description of Artificial Sequence: Synthetic oligonucleotide
acctagtataacagtttt

SEQ ID NO: 3109 - DNA, 18 bp, Artificial Sequence
  Description of Artificial Sequence: Synthetic oligonucleotide
gtttgacctagtataaca

SEQ ID NO: 3110 - DNA, 18 bp, Artificial Sequence
  Description of Artificial Sequence: Synthetic oligonucleotide
aagaagtttgacctagta

SEQ ID NO: 3111 - DNA, 18 bp, Artificial Sequence
  Description of Artificial Sequence: Synthetic oligonucleotide
aaatgaagaagtttgacc

SEQ ID NO: 3112 - DNA, 18 bp, Artificial Sequence
  Description of Artificial Sequence: Synthetic oligonucleotide
aaaaaaaatgaagaagtt

SEQ ID NO: 3113 - DNA, 18 bp, Artificial Sequence
  Description of Artificial Sequence: Synthetic oligonucleotide
aaaacaaaaaaaatgaag

SEQ ID NO: 3114 - DNA, 18 bp, Artificial Sequence
  Description of Artificial Sequence: Synthetic oligonucleotide
taaacaaaacaaaaaaaa

SEQ ID NO: 3115 - DNA, 18 bp, Artificial Sequence
  Description of Artificial Sequence: Synthetic oligonucleotide
atgcctaaacaaaacaaa

SEQ ID NO: 3116 - DNA, 18 bp, Artificial Sequence
  Description of Artificial Sequence: Synthetic oligonucleotide
aaaggatgcctaaacaaa

SEQ ID NO: 3117 - DNA, 18 bp, Artificial Sequence
  Description of Artificial Sequence: Synthetic oligonucleotide
aatgaaaaggatgcctaa

SEQ ID NO: 3118 - DNA, 18 bp, Artificial Sequence
  Description of Artificial Sequence: Synthetic oligonucleotide
aagccaatgaaaaggatg

SEQ ID NO: 3119 - DNA, 18 bp, Artificial Sequence
  Description of Artificial Sequence: Synthetic oligonucleotide
gtagaaagccaatgaaaa

SEQ ID NO: 3120 - DNA, 18 bp, Artificial Sequence
  Description of Artificial Sequence: Synthetic oligonucleotide
aaaaagtagaaagccaat

SEQ ID NO: 3121 - DNA, 18 bp, Artificial Sequence
  Description of Artificial Sequence: Synthetic oligonucleotide
aaaagaaaaagtagaaag

SEQ ID NO: 3122 - DNA, 18 bp, Artificial Sequence
  Description of Artificial Sequence: Synthetic oligonucleotide
tagtcaaaagaaaaagta

SEQ ID NO: 3123 - DNA, 18 bp, Artificial Sequence
  Description of Artificial Sequence: Synthetic oligonucleotide
gcaaatagtcaaaagaaa

SEQ ID NO: 3124 - DNA, 18 bp, Artificial Sequence
  Description of Artificial Sequence: Synthetic oligonucleotide
atccagcaaatagtcaaa

SEQ ID NO: 3125 - DNA, 18 bp, Artificial Sequence
  Description of Artificial Sequence: Synthetic oligonucleotide
ataaaatccagcaaatag

SEQ ID NO: 3126 - DNA, 18 bp, Artificial Sequence
  Description of Artificial Sequence: Synthetic oligonucleotide
attatataaaatccagca

SEQ ID NO: 3127 - DNA, 18 bp, Artificial Sequence
  Description of Artificial Sequence: Synthetic oligonucleotide
aacaaattatataaaatc

SEQ ID NO: 3128 - DNA, 18 bp, Artificial Sequence
  Description of Artificial Sequence: Synthetic oligonucleotide
tcttcaacaaattatata

SEQ ID NO: 3129 - DNA, 18 bp, Artificial Sequence
  Description of Artificial Sequence: Synthetic oligonucleotide
atcactcttcaacaaatt

SEQ ID NO: 3130 - DNA, 18 bp, Artificial Sequence
  Description of Artificial Sequence: Synthetic oligonucleotide
ggagaatcactcttcaac

SEQ ID NO: 3131 - DNA, 18 bp, Artificial Sequence
  Description of Artificial Sequence: Synthetic oligonucleotide
atgagggagaatcactct

SEQ ID NO: 3132 - DNA, 18 bp, Artificial Sequence
  Description of Artificial Sequence: Synthetic oligonucleotide
agaggatgagggagaatc

SEQ ID NO: 3133 - DNA, 18 bp, Artificial Sequence
  Description of Artificial Sequence: Synthetic oligonucleotide
cagatgcagtaaagggga

SEQ ID NO: 3134 - DNA, 18 bp, Artificial Sequence
  Description of Artificial Sequence: Synthetic oligonucleotide
tatctcagatgcagtaaa

SEQ ID NO: 3135 - DNA, 18 bp, Artificial Sequence
  Description of Artificial Sequence: Synthetic oligonucleotide
ccacatatctcagatgca

SEQ ID NO: 3136 - DNA, 18 bp, Artificial Sequence
  Description of Artificial Sequence: Synthetic oligonucleotide
agtgaccacatatctcag

SEQ ID NO: 3137 - DNA, 18 bp, Artificial Sequence
  Description of Artificial Sequence: Synthetic oligonucleotide
tcttcagtgaccacatat

SEQ ID NO: 3138 - DNA, 18 bp, Artificial Sequence
  Description of Artificial Sequence: Synthetic oligonucleotide
ggagctcttcagtgacca

SEQ ID NO: 3139 - DNA, 18 bp, Artificial Sequence
  Description of Artificial Sequence: Synthetic oligonucleotide
ttggaggagctcttcagt

SEQ ID NO: 3140 - DNA, 18 bp, Artificial Sequence
  Description of Artificial Sequence: Synthetic oligonucleotide
gaaatttggaggagctct

SEQ ID NO: 3141 - DNA, 18 bp, Artificial Sequence
  Description of Artificial Sequence: Synthetic oligonucleotide
ctggagaaatttggagga

SEQ ID NO: 3142 - DNA, 18 bp, Artificial Sequence
  Description of Artificial Sequence: Synthetic oligonucleotide
tgtcactggagaaatttg

SEQ ID NO: 3143 - DNA, 18 bp, Artificial Sequence
  Description of Artificial Sequence: Synthetic oligonucleotide
ttttgtgtcactggagaa

SEQ ID NO: 3144 - DNA, 18 bp, Artificial Sequence
  Description of Artificial Sequence: Synthetic oligonucleotide
aaaagttttgtgtcactg

SEQ ID NO: 3145 - DNA, 18 bp, Artificial Sequence
  Description of Artificial Sequence: Synthetic oligonucleotide
agttgaaaagttttgtgt

SEQ ID NO: 3146 - DNA, 18 bp, Artificial Sequence
  Description of Artificial Sequence: Synthetic oligonucleotide
gtctaagttgaaaagttt

SEQ ID NO: 3147 - DNA, 18 bp, Artificial Sequence
  Description of Artificial Sequence: Synthetic oligonucleotide
aaacagtctaagttgaaa

SEQ ID NO: 3148 - DNA, 18 bp, Artificial Sequence
  Description of Artificial Sequence: Synthetic oligonucleotide
ttttcaaacagtctaagt

SEQ ID NO: 3149 - DNA, 18 bp, Artificial Sequence
  Description of Artificial Sequence: Synthetic oligonucleotide
ttaggttttcaaacagtc

SEQ ID NO: 3150 - DNA, 18 bp, Artificial Sequence
  Description of Artificial Sequence: Synthetic oligonucleotide
aataattaggttttcaaa

SEQ ID NO: 3151 - DNA, 18 bp, Artificial Sequence
  Description of Artificial Sequence: Synthetic oligonucleotide
acagaaataattaggttt

SEQ ID NO: 3152 - DNA, 18 bp, Artificial Sequence
  Description of Artificial Sequence: Synthetic oligonucleotide
gtgaaacagaaataatta

SEQ ID NO: 3153 - DNA, 18 bp, Artificial Sequence
  Description of Artificial Sequence: Synthetic oligonucleotide
cacctgtgaaacagaaat

SEQ ID NO: 3154 - DNA, 18 bp, Artificial Sequence
  Description of Artificial Sequence: Synthetic oligonucleotide
ttcctcacctgtgaaaca

SEQ ID NO: 3155 - DNA, 18 bp, Artificial Sequence
  Description of Artificial Sequence: Synthetic oligonucleotide
tcaatttcctcacctgtg

SEQ ID NO: 3156 - DNA, 18 bp, Artificial Sequence
  Description of Artificial Sequence: Synthetic oligonucleotide
gagcttcaatttcctcac

SEQ ID NO: 3157 - DNA, 18 bp, Artificial Sequence
  Description of Artificial Sequence: Synthetic oligonucleotide
actgagagcttcaatttc

SEQ ID NO: 3158 - DNA, 18 bp, Artificial Sequence
  Description of Artificial Sequence: Synthetic oligonucleotide
tcaccactgagagcttca

SEQ ID NO: 3159 - DNA, 18 bp, Artificial Sequence
  Description of Artificial Sequence: Synthetic oligonucleotide
atgcttcaccactgagag

SEQ ID NO: 3160 - DNA, 18 bp, Artificial Sequence
  Description of Artificial Sequence: Synthetic oligonucleotide
catggatgcttcaccact

SEQ ID NO: 3161 - DNA, 18 bp, Artificial Sequence
  Description of Artificial Sequence: Synthetic oligonucleotide
agaggcatggatgcttca

SEQ ID NO: 3162 - DNA, 18 bp, Artificial Sequence
  Description of Artificial Sequence: Synthetic oligonucleotide
acagaagaggcatggatg

SEQ ID NO: 3163 - DNA, 18 bp, Artificial Sequence
  Description of Artificial Sequence: Synthetic oligonucleotide
tattgacagaagaggcat

SEQ ID NO: 3164 - DNA, 18 bp, Artificial Sequence
  Description of Artificial Sequence: Synthetic oligonucleotide
ccacttattgacagaaga

SEQ ID NO: 3165 - DNA, 18 bp, Artificial Sequence
  Description of Artificial Sequence: Synthetic oligonucleotide
ttctgccacttattgaca

SEQ ID NO: 3166 - DNA, 18 bp, Artificial Sequence
  Description of Artificial Sequence: Synthetic oligonucleotide
ccaagttctgccacttat

SEQ ID NO: 3167 - DNA, 18 bp, Artificial Sequence
  Description of Artificial Sequence: Synthetic oligonucleotide
caatcccaagttctgcca

SEQ ID NO: 3168 - DNA, 18 bp, Artificial Sequence
  Description of Artificial Sequence: Synthetic oligonucleotide
ggcaccaatcccaagttc

SEQ ID NO: 3169 - DNA, 18 bp, Artificial Sequence
  Description of Artificial Sequence: Synthetic oligonucleotide
agacaggcaccaatccca

SEQ ID NO: 3170 - DNA, 18 bp, Artificial Sequence
  Description of Artificial Sequence: Synthetic oligonucleotide
caatgagacaggcaccaa

SEQ ID NO: 3171 - DNA, 18 bp, Artificial Sequence
  Description of Artificial Sequence: Synthetic oligonucleotide
aaagtcaatgagacaggc

SEQ ID NO: 3172 - DNA, 18 bp, Artificial Sequence
  Description of Artificial Sequence: Synthetic oligonucleotide
gctttaaagtcaatgaga

SEQ ID NO: 3173 - DNA, 18 bp, Artificial Sequence
  Description of Artificial Sequence: Synthetic oligonucleotide
gatcggctttaaagtcaa

SEQ ID NO: 3174 - DNA, 18 bp, Artificial Sequence
  Description of Artificial Sequence: Synthetic oligonucleotide
cagaagatcggctttaaa

SEQ ID NO: 3175 - DNA, 18 bp, Artificial Sequence
  Description of Artificial Sequence: Synthetic oligonucleotide
tctgacagaagatcggct

SEQ ID NO: 3176 - DNA, 18 bp, Artificial Sequence
  Description of Artificial Sequence: Synthetic oligonucleotide
tatgttctgacagaagat

SEQ ID NO: 3177 - DNA, 18 bp, Artificial Sequence
  Description of Artificial Sequence: Synthetic oligonucleotide
agagatatgttctgacag

SEQ ID NO: 3178 - DNA, 18 bp, Artificial Sequence
  Description of Artificial Sequence: Synthetic oligonucleotide
cagtaagagatatgttct

SEQ ID NO: 3179 - DNA, 18 bp, Artificial Sequence
  Description of Artificial Sequence: Synthetic oligonucleotide
atagtcagtaagagatat

SEQ ID NO: 3180 - DNA, 18 bp, Artificial Sequence
  Description of Artificial Sequence: Synthetic oligonucleotide
cttccatagtcagtaaga

SEQ ID NO: 3181 - DNA, 18 bp, Artificial Sequence
  Description of Artificial Sequence: Synthetic oligonucleotide
tagaccttccatagtcag

SEQ ID NO: 3182 - DNA, 18 bp, Artificial Sequence
  Description of Artificial Sequence: Synthetic oligonucleotide
tattatagaccttccata

SEQ ID NO: 3183 - DNA, 18 bp, Artificial Sequence
  Description of Artificial Sequence: Synthetic oligonucleotide
ctaagtattatagacctt

SEQ ID NO: 3184 - DNA, 18 bp, Artificial Sequence
  Description of Artificial Sequence: Synthetic oligonucleotide
tcttgctaagtattatag

SEQ ID NO: 3185 - DNA, 18 bp, Artificial Sequence
  Description of Artificial Sequence: Synthetic oligonucleotide
tattttcttgctaagtat

SEQ ID NO: 3186 - DNA, 18 bp, Artificial Sequence
  Description of Artificial Sequence: Synthetic oligonucleotide
tcttttattttcttgcta

SEQ ID NO: 3187 - DNA, 18 bp, Artificial Sequence
  Description of Artificial Sequence: Synthetic oligonucleotide
gtttctcttttattttct

SEQ ID NO: 3188 - DNA, 18 bp, Artificial Sequence
  Description of Artificial Sequence: Synthetic oligonucleotide
tttaggtttctcttttat

SEQ ID NO: 3189 - DNA, 18 bp, Artificial Sequence
  Description of Artificial Sequence: Synthetic oligonucleotide
cttgttttaggtttctct

SEQ ID NO: 3190 - DNA, 18 bp, Artificial Sequence
  Description of Artificial Sequence: Synthetic oligonucleotide
taccacttgttttaggtt

SEQ ID NO: 3191 - DNA, 18 bp, Artificial Sequence
  Description of Artificial Sequence: Synthetic oligonucleotide
aattataccacttgtttt

SEQ ID NO: 3192 - DNA, 18 bp, Artificial Sequence
  Description of Artificial Sequence: Synthetic oligonucleotide
aataaaattataccactt

SEQ ID NO: 3193 - DNA, 18 bp, Artificial Sequence
  Description of Artificial Sequence: Synthetic oligonucleotide
gaaaaaataaaattatac

SEQ ID NO: 3194 - DNA, 18 bp, Artificial Sequence
  Description of Artificial Sequence: Synthetic oligonucleotide
caaatgaaaaaataaaat

SEQ ID NO: 3195 - DNA, 18 bp, Artificial Sequence
  Description of Artificial Sequence: Synthetic oligonucleotide
caaaccaaatgaaaaaat

SEQ ID NO: 3196 - DNA, 18 bp, Artificial Sequence
  Description of Artificial Sequence: Synthetic oligonucleotide
gaatgcaaaccaaatgaa

SEQ ID NO: 3197 - DNA, 18 bp, Artificial Sequence
  Description of Artificial Sequence: Synthetic oligonucleotide
tgttggaatgcaaaccaa

SEQ ID NO: 3198 - DNA, 18 bp, Artificial Sequence
  Description of Artificial Sequence: Synthetic oligonucleotide
aattgtgttggaatgcaa

SEQ ID NO: 3199 - DNA, 18 bp, Artificial Sequence
  Description of Artificial Sequence: Synthetic oligonucleotide
caggcaattgtgttggaa

SEQ ID NO: 3200 - DNA, 18 bp, Artificial Sequence
  Description of Artificial Sequence: Synthetic oligonucleotide
agaaacaggcaattgtgt

SEQ ID NO: 3201 - DNA, 18 bp, Artificial Sequence
  Description of Artificial Sequence: Synthetic oligonucleotide
ttaaaagaaacaggcaat

SEQ ID NO: 3202 - DNA, 18 bp, Artificial Sequence
  Description of Artificial Sequence: Synthetic oligonucleotide
tagatttaaaagaaacag

SEQ ID NO: 3203 - DNA, 18 bp, Artificial Sequence
  Description of Artificial Sequence: Synthetic oligonucleotide
taaattagatttaaaaga

SEQ ID NO: 3204 - DNA, 18 bp, Artificial Sequence
  Description of Artificial Sequence: Synthetic oligonucleotide
ggaaataaattagattta

SEQ ID NO: 3205 - DNA, 18 bp, Artificial Sequence
  Description of Artificial Sequence: Synthetic oligonucleotide
cttagggaaataaattag

SEQ ID NO: 3206 - DNA, 18 bp, Artificial Sequence
  Description of Artificial Sequence: Synthetic oligonucleotide
cctatcttagggaaataa

SEQ ID NO: 3207 - DNA, 18 bp, Artificial Sequence
  Description of Artificial Sequence: Synthetic oligonucleotide
ttacacctatcttaggga

SEQ ID NO: 3208 - DNA, 18 bp, Artificial Sequence
  Description of Artificial Sequence: Synthetic oligonucleotide
tgacattacacctatctt

SEQ ID NO: 3209 - DNA, 18 bp, Artificial Sequence
  Description of Artificial Sequence: Synthetic oligonucleotide
cagtgtgacattacacct

SEQ ID NO: 3210 - DNA, 18 bp, Artificial Sequence
  Description of Artificial Sequence: Synthetic oligonucleotide
aatatcagtgtgacatta

SEQ ID NO: 3211 - DNA, 18 bp, Artificial Sequence
  Description of Artificial Sequence: Synthetic oligonucleotide
aagtaaatatcagtgtga

SEQ ID NO: 3212 - DNA, 18 bp, Artificial Sequence
  Description of Artificial Sequence: Synthetic oligonucleotide
taacaaagtaaatatcag

SEQ ID NO: 3213 - DNA, 18 bp, Artificial Sequence
  Description of Artificial Sequence: Synthetic oligonucleotide
ctatataacaaagtaaat

SEQ ID NO: 3214 - DNA, 18 bp, Artificial Sequence
  Description of Artificial Sequence: Synthetic oligonucleotide
aagtgctatataacaaag

SEQ ID NO: 3215 - DNA, 18 bp, Artificial Sequence
  Description of Artificial Sequence: Synthetic oligonucleotide
ccaataagtgctatataa

SEQ ID NO: 3216 - DNA, 18 bp, Artificial Sequence
  Description of Artificial Sequence: Synthetic oligonucleotide
aaattccaataagtgcta

SEQ ID NO: 3217 - DNA, 18 bp, Artificial Sequence
  Description of Artificial Sequence: Synthetic oligonucleotide
acaaaaaattccaataag

SEQ ID NO: 3218 - DNA, 18 bp, Artificial Sequence
  Description of Artificial Sequence: Synthetic oligonucleotide
gaacaacaaaaaattcca

SEQ ID NO: 3219 - DNA, 18 bp, Artificial Sequence
  Description of Artificial Sequence: Synthetic oligonucleotide
caaaagaacaacaaaaaa

SEQ ID NO: 3220 - DNA, 18 bp, Artificial Sequence
  Description of Artificial Sequence: Synthetic oligonucleotide
aatttcaaaagaacaaca

SEQ ID NO: 3221 - DNA, 18 bp, Artificial Sequence
  Description of Artificial Sequence: Synthetic oligonucleotide
ttcctaatttcaaaagaa

SEQ ID NO: 3222 - DNA, 18 bp, Artificial Sequence
  Description of Artificial Sequence: Synthetic oligonucleotide
tcagtttcctaatttcaa

SEQ ID NO: 3223 - DNA, 18 bp, Artificial Sequence
  Description of Artificial Sequence: Synthetic oligonucleotide
taatttcagtttcctaat

SEQ ID NO: 3224 - DNA, 18 bp, Artificial Sequence
  Description of Artificial Sequence: Synthetic oligonucleotide
aaaattaatttcagtttc

SEQ ID NO: 3225 - DNA, 18 bp, Artificial Sequence
  Description of Artificial Sequence: Synthetic oligonucleotide
actaaaaaattaatttca

SEQ ID NO: 3226 - DNA, 18 bp, Artificial Sequence
  Description of Artificial Sequence: Synthetic oligonucleotide
atttcactaaaaaattaa

SEQ ID NO: 3227 - DNA, 18 bp, Artificial Sequence
  Description of Artificial Sequence: Synthetic oligonucleotide
ggtctatttcactaaaaa

SEQ ID NO: 3228 - DNA, 18 bp, Artificial Sequence
  Description of Artificial Sequence: Synthetic oligonucleotide
gtcttctaaaagctactg

SEQ ID NO: 3229 - DNA, 18 bp, Artificial Sequence
  Description of Artificial Sequence: Synthetic oligonucleotide
atgtcgtcttctaaaagc

SEQ ID NO: 3230 - DNA, 18 bp, Artificial Sequence
  Description of Artificial Sequence: Synthetic oligonucleotide
gaacaatgtcgtcttcta

SEQ ID NO: 3231 - DNA, 18 bp, Artificial Sequence
  Description of Artificial Sequence: Synthetic oligonucleotide
aggaagaacaatgtcgtc

SEQ ID NO: 3232 - DNA, 18 bp, Artificial Sequence
  Description of Artificial Sequence: Synthetic oligonucleotide
gtcctaggaagaacaatg

SEQ ID NO: 3233 - DNA, 18 bp, Artificial Sequence
  Description of Artificial Sequence: Synthetic oligonucleotide
gctatgtcctaggaagaa

SEQ ID NO: 3234 - DNA, 18 bp, Artificial Sequence
  Description of Artificial Sequence: Synthetic oligonucleotide
taaaggctatgtcctagg

SEQ ID NO: 3235 - DNA, 18 bp, Artificial Sequence
  Description of Artificial Sequence: Synthetic oligonucleotide
gtatgtaaaggctatgtc

SEQ ID NO: 3236 - DNA, 18 bp, Artificial Sequence
  Description of Artificial Sequence: Synthetic oligonucleotide
ctagggtatgtaaaggct

SEQ ID NO: 3237 - DNA, 18 bp, Artificial Sequence
  Description of Artificial Sequence: Synthetic oligonucleotide
agccactagggtatgtaa

SEQ ID NO: 3238 - DNA, 18 bp, Artificial Sequence
  Description of Artificial Sequence: Synthetic oligonucleotide
acagcagccactagggta

SEQ ID NO: 3239 - DNA, 18 bp, Artificial Sequence
  Description of Artificial Sequence: Synthetic oligonucleotide
tctatacagcagccacta

SEQ ID NO: 3240 - DNA, 18 bp, Artificial Sequence
  Description of Artificial Sequence: Synthetic oligonucleotide
gccaatctatacagcagc

SEQ ID NO: 3241 - DNA, 18 bp, Artificial Sequence
  Description of Artificial Sequence: Synthetic oligonucleotide
tatacgccaatctataca

SEQ ID NO: 3242 - DNA, 18 bp, Artificial Sequence
  Description of Artificial Sequence: Synthetic oligonucleotide
tttgctatacgccaatct

SEQ ID NO: 3243 - DNA, 18 bp, Artificial Sequence
  Description of Artificial Sequence: Synthetic oligonucleotide
ctccctttgctatacgcc

SEQ ID NO: 3244 - DNA, 18 bp, Artificial Sequence
  Description of Artificial Sequence: Synthetic oligonucleotide
atcaactccctttgctat

SEQ ID NO: 3245 - DNA, 18 bp, Artificial Sequence
  Description of Artificial Sequence: Synthetic oligonucleotide
gagtaatcaactcccttt

SEQ ID NO: 3246 - DNA, 18 bp, Artificial Sequence
  Description of Artificial Sequence: Synthetic oligonucleotide
aggaggagtaatcaactc

SEQ ID NO: 3247 - DNA, 18 bp, Artificial Sequence
  Description of Artificial Sequence: Synthetic oligonucleotide
gagagaggaggagtaatc

SEQ ID NO: 3248 - DNA, 18 bp, Artificial Sequence
  Description of Artificial Sequence: Synthetic oligonucleotide
actaggagagaggaggag

SEQ ID NO: 3249 - DNA, 18 bp, Artificial Sequence
  Description of Artificial Sequence: Synthetic oligonucleotide
tccaaactaggagagagg

SEQ ID NO: 3250 - DNA, 18 bp, Artificial Sequence
  Description of Artificial Sequence: Synthetic oligonucleotide
cccagtccaaactaggag

SEQ ID NO: 3251 - DNA, 18 bp, Artificial Sequence
  Description of Artificial Sequence: Synthetic oligonucleotide
gaggccccagtccaaact

SEQ ID NO: 3252 - DNA, 18 bp, Artificial Sequence
  Description of Artificial Sequence: Synthetic oligonucleotide
tgttagaggccccagtcc

SEQ ID NO: 3253 - DNA, 18 bp, Artificial Sequence
  Description of Artificial Sequence: Synthetic oligonucleotide
gcttctgttagaggcccc

SEQ ID NO: 3254 - DNA, 18 bp, Artificial Sequence
  Description of Artificial Sequence: Synthetic oligonucleotide
caacagcttctgttagag

SEQ ID NO: 3255 - DNA, 18 bp, Artificial Sequence
  Description of Artificial Sequence: Synthetic oligonucleotide
gagttcaacagcttctgt

SEQ ID NO: 3256 - DNA, 18 bp, Artificial Sequence
  Description of Artificial Sequence: Synthetic oligonucleotide
tcccagagttcaacagct

SEQ ID NO: 3257 - DNA, 18 bp, Artificial Sequence
  Description of Artificial Sequence: Synthetic oligonucleotide
aataatcccagagttcaa

SEQ ID NO: 3258 - DNA, 18 bp, Artificial Sequence
  Description of Artificial Sequence: Synthetic oligonucleotide
ccaacaataatcccagag

SEQ ID NO: 3259 - DNA, 18 bp, Artificial Sequence
  Description of Artificial Sequence: Synthetic oligonucleotide
agattccaacaataatcc

SEQ ID NO: 3260 - DNA, 18 bp, Artificial Sequence
  Description of Artificial Sequence: Synthetic oligonucleotide
gaattagattccaacaat

SEQ ID NO: 3261 - DNA, 18 bp, Artificial Sequence
  Description of Artificial Sequence: Synthetic oligonucleotide
ctcatgaattagattcca

SEQ ID NO: 3262 - DNA, 18 bp, Artificial Sequence
  Description of Artificial Sequence: Synthetic oligonucleotide
gtgctctcatgaattaga

SEQ ID NO: 3263 - DNA, 18 bp, Artificial Sequence
  Description of Artificial Sequence: Synthetic oligonucleotide
tatatgtgctctcatgaa

SEQ ID NO: 3264 - DNA, 18 bp, Artificial Sequence
  Description of Artificial Sequence: Synthetic oligonucleotide
cgcaatatatgtgctctc

SEQ ID NO: 3265 - DNA, 18 bp, Artificial Sequence
  Description of Artificial Sequence: Synthetic oligonucleotide
tcattcgcaatatatgtg

SEQ ID NO: 3266 - DNA, 18 bp, Artificial Sequence
  Description of Artificial Sequence: Synthetic oligonucleotide
tgacttcattcgcaatat

SEQ ID NO: 3267 - DNA, 18 bp, Artificial Sequence
  Description of Artificial Sequence: Synthetic oligonucleotide
cagtatgacttcattcgc

SEQ ID NO: 3268 - DNA, 18 bp, Artificial Sequence
  Description of Artificial Sequence: Synthetic oligonucleotide
tcagacagtatgacttca

SEQ ID NO: 3269 - DNA, 18 bp, Artificial Sequence
  Description of Artificial Sequence: Synthetic oligonucleotide
atgattcagacagtatga

SEQ ID NO: 3270 - DNA, 18 bp, Artificial Sequence
  Description of Artificial Sequence: Synthetic oligonucleotide
caaagatgattcagacag

SEQ ID NO: 3271 - DNA, 18 bp, Artificial Sequence
  Description of Artificial Sequence: Synthetic oligonucleotide
gaaaccaaagatgattca

SEQ ID NO: 3272 - DNA, 18 bp, Artificial Sequence
  Description of Artificial Sequence: Synthetic oligonucleotide
tgcaggaggcacacttac

SEQ ID NO: 3273 - DNA, 18 bp, Artificial Sequence
  Description of Artificial Sequence: Synthetic oligonucleotide
aggagtgcaggaggcaca

SEQ ID NO: 3274 - DNA, 18 bp, Artificial Sequence
  Description of Artificial Sequence: Synthetic oligonucleotide
gctccaggagtgcaggag

SEQ ID NO: 3275 - DNA, 18 bp, Artificial Sequence
  Description of Artificial Sequence: Synthetic oligonucleotide
cctcagctccaggagtgc

SEQ ID NO: 3276 - DNA, 18 bp, Artificial Sequence
  Description of Artificial Sequence: Synthetic oligonucleotide
aataccctcagctccagg

SEQ ID NO: 3277 - DNA, 18 bp, Artificial Sequence
  Description of Artificial Sequence: Synthetic oligonucleotide
gcacaaataccctcagct

SEQ ID NO: 3278 - DNA, 18 bp, Artificial Sequence
  Description of Artificial Sequence: Synthetic oligonucleotide
gaaatgcacaaataccct

SEQ ID NO: 3279 - DNA, 18 bp, Artificial Sequence
  Description of Artificial Sequence: Synthetic oligonucleotide
gcaaagaaatgcacaaat

SEQ ID NO: 3280 - DNA, 18 bp, Artificial Sequence
  Description of Artificial Sequence: Synthetic oligonucleotide
acagggcaaagaaatgca

SEQ ID NO: 3281 - DNA, 18 bp, Artificial Sequence
  Description of Artificial Sequence: Synthetic oligonucleotide
cagacacagggcaaagaa

SEQ ID NO: 3282 - DNA, 18 bp, Artificial Sequence
  Description of Artificial Sequence: Synthetic oligonucleotide
gagttcagacacagggca

SEQ ID NO: 3283 - DNA, 18 bp, Artificial Sequence
  Description of Artificial Sequence: Synthetic oligonucleotide
gattagagttcagacaca

SEQ ID NO: 3284 - DNA, 18 bp, Artificial Sequence
  Description of Artificial Sequence: Synthetic oligonucleotide
caacagattagagttcag

SEQ ID NO: 3285 - DNA, 18 bp, Artificial Sequence
  Description of Artificial Sequence: Synthetic oligonucleotide
catggcaacagattagag

SEQ ID NO: 3286 - DNA, 18 bp, Artificial Sequence
  Description of Artificial Sequence: Synthetic oligonucleotide
gctctcatggcaacagat

SEQ ID NO: 3287 - DNA, 18 bp, Artificial Sequence
  Description of Artificial Sequence: Synthetic oligonucleotide
aaaaagctctcatggcaa

SEQ ID NO: 3288 - DNA, 18 bp, Artificial Sequence
  Description of Artificial Sequence: Synthetic oligonucleotide
tagaaaaaaagctctcat

SEQ ID NO: 3289 - DNA, 18 bp, Artificial Sequence
  Description of Artificial Sequence: Synthetic oligonucleotide
caacatagaaaaaaagct

SEQ ID NO: 3290 - DNA, 18 bp, Artificial Sequence
  Description of Artificial Sequence: Synthetic oligonucleotide
cggtgcaacatagaaaaa

SEQ ID NO: 3291 - DNA, 18 bp, Artificial Sequence
  Description of Artificial Sequence: Synthetic oligonucleotide
aacagcggtgcaacatag

SEQ ID NO: 3292 - DNA, 18 bp, Artificial Sequence
  Description of Artificial Sequence: Synthetic oligonucleotide
gctgtaacagcggtgcaa

SEQ ID NO: 3293 - DNA, 18 bp, Artificial Sequence
  Description of Artificial Sequence: Synthetic oligonucleotide
tgattgctgtaacagcgg

SEQ ID NO: 3294 - DNA, 18 bp, Artificial Sequence
  Description of Artificial Sequence: Synthetic oligonucleotide
ggtcatgattgctgtaac

SEQ ID NO: 3295 - DNA, 18 bp, Artificial Sequence
  Description of Artificial Sequence: Synthetic oligonucleotide
ggtctggtcatgattgct

SEQ ID NO: 3296 - DNA, 18 bp, Artificial Sequence
  Description of Artificial Sequence: Synthetic oligonucleotide
aaggaggtctggtcatga

SEQ ID NO: 3297 - DNA, 18 bp, Artificial Sequence
  Description of Artificial Sequence: Synthetic oligonucleotide
gcaggaaggaggtctggt

SEQ ID NO: 3298 - DNA, 18 bp, Artificial Sequence
  Description of Artificial Sequence: Synthetic oligonucleotide
ccatggcaggaaggaggt

SEQ ID NO: 3299 - DNA, 18 bp, Artificial Sequence
  Description of Artificial Sequence: Synthetic oligonucleotide
atcatccatggcaggaag

SEQ ID NO: 3300 - DNA, 18 bp, Artificial Sequence
  Description of Artificial Sequence: Synthetic oligonucleotide
ggtgcccgcaaatggaag

SEQ ID NO: 3301 - DNA, 18 bp, Artificial Sequence
  Description of Artificial Sequence: Synthetic oligonucleotide
ggagaggtgcccgcaaat

SEQ ID NO: 3302 - DNA, 18 bp, Artificial Sequence
  Description of Artificial Sequence: Synthetic oligonucleotide
acactggagaggtgcccg

SEQ ID NO: 3303 - DNA, 18 bp, Artificial Sequence
  Description of Artificial Sequence: Synthetic oligonucleotide
cagaaacactggagaggt

SEQ ID NO: 3304 - DNA, 18 bp, Artificial Sequence
  Description of Artificial Sequence: Synthetic oligonucleotide
acagacagaaacactgga

SEQ ID NO: 3305 - DNA, 18 bp, Artificial Sequence
  Description of Artificial Sequence: Synthetic oligonucleotide
gacagacagacagaaaca

SEQ ID NO: 3306 - DNA, 18 bp, Artificial Sequence
  Description of Artificial Sequence: Synthetic oligonucleotide
acagggacagacagacag

SEQ ID NO: 3307 - DNA, 18 bp, Artificial Sequence
  Description of Artificial Sequence: Synthetic oligonucleotide
gccagacagggacagaca

SEQ ID NO: 3308 - DNA, 18 bp, Artificial Sequence
  Description of Artificial Sequence: Synthetic oligonucleotide
ccccagccagacagggac

SEQ ID NO: 3309 - DNA, 18 bp, Artificial Sequence
  Description of Artificial Sequence: Synthetic oligonucleotide
ccccaccccagccagaca

SEQ ID NO: 3310 - DNA, 18 bp, Artificial Sequence
  Description of Artificial Sequence: Synthetic oligonucleotide
cccacccccaccccagcc

SEQ ID NO: 3311 - DNA, 18 bp, Artificial Sequence
  Description of Artificial Sequence: Synthetic oligonucleotide
cccaccccacccccaccc

SEQ ID NO: 3312 - DNA, 18 bp, Artificial Sequence
  Description of Artificial Sequence: Synthetic oligonucleotide
gacctcccaccccacccc

SEQ ID NO: 3313 - DNA, 18 bp, Artificial Sequence
  Description of Artificial Sequence: Synthetic oligonucleotide
gcacagacctcccacccc

SEQ ID NO: 3314 - DNA, 18 bp, Artificial Sequence
  Description of Artificial Sequence: Synthetic oligonucleotide
gagaggcacagacctccc

SEQ ID NO: 3315 - DNA, 18 bp, Artificial Sequence
  Description of Artificial Sequence: Synthetic oligonucleotide
tgctcgagaggcacagac

SEQ ID NO: 3316 - DNA, 18 bp, Artificial Sequence
  Description of Artificial Sequence: Synthetic oligonucleotide
acagctgctcgagaggca

SEQ ID NO: 3317 - DNA, 18 bp, Artificial Sequence
  Description of Artificial Sequence: Synthetic oligonucleotide
gagaaacagctgctcgag

SEQ ID NO: 3318 - DNA, 18 bp, Artificial Sequence
  Description of Artificial Sequence: Synthetic oligonucleotide
agccagagaaacagctgc

SEQ ID NO: 3319 - DNA, 18 bp, Artificial Sequence
  Description of Artificial Sequence: Synthetic oligonucleotide
ctgccagccagagaaaca

SEQ ID NO: 3320 - DNA, 18 bp, Artificial Sequence
  Description of Artificial Sequence: Synthetic oligonucleotide
cgaccctgccagccagag

SEQ ID NO: 3321 - DNA, 18 bp, Artificial Sequence
  Description of Artificial Sequence: Synthetic oligonucleotide
cagatcgaccctgccagc

SEQ ID NO: 3322 - DNA, 18 bp, Artificial Sequence
  Description of Artificial Sequence: Synthetic oligonucleotide
ggtcccagatcgaccctg

SEQ ID NO: 3323 - DNA, 18 bp, Artificial Sequence
  Description of Artificial Sequence: Synthetic oligonucleotide
tccgaggtcccagatcga

SEQ ID NO: 3324 - DNA, 18 bp, Artificial Sequence
  Description of Artificial Sequence: Synthetic oligonucleotide
cagggtccgaggtcccag

SEQ ID NO: 3325 - DNA, 18 bp, Artificial Sequence
  Description of Artificial Sequence: Synthetic oligonucleotide
agagccagggtccgaggt

SEQ ID NO: 3326 - DNA, 18 bp, Artificial Sequence
  Description of Artificial Sequence: Synthetic oligonucleotide
ccctcagagccagggtcc

SEQ ID NO: 3327 - DNA, 18 bp, Artificial Sequence
  Description of Artificial Sequence: Synthetic oligonucleotide
tgtggccctcagagccag

SEQ ID NO: 3328 - DNA, 18 bp, Artificial Sequence
  Description of Artificial Sequence: Synthetic oligonucleotide
gcggatgtggccctcaga

SEQ ID NO: 3329 - DNA, 18 bp, Artificial Sequence
  Description of Artificial Sequence: Synthetic oligonucleotide
tcggggcgcaggggctac

SEQ ID NO: 3330 - DNA, 18 bp, Artificial Sequence
  Description of Artificial Sequence: Synthetic oligonucleotide
gtgtgtcggggcgcaggg

SEQ ID NO: 3331 - DNA, 18 bp, Artificial Sequence
  Description of Artificial Sequence: Synthetic oligonucleotide
ggccagtgtgtcggggcg

SEQ ID NO: 3332 - DNA, 18 bp, Artificial Sequence
  Description of Artificial Sequence: Synthetic oligonucleotide
cgtggggccagtgtgtcg

SEQ ID NO: 3333 - DNA, 18 bp, Artificial Sequence
  Description of Artificial Sequence: Synthetic oligonucleotide
cctcccgtggggccagtg

SEQ ID NO: 3334 - DNA, 18 bp, Artificial Sequence
  Description of Artificial Sequence: Synthetic oligonucleotide
gggaccctcccgtggggc

SEQ ID NO: 3335 - DNA, 18 bp, Artificial Sequence
  Description of Artificial Sequence: Synthetic oligonucleotide
cttcagggaccctcccgt

SEQ ID NO: 3336 - DNA, 18 bp, Artificial Sequence
  Description of Artificial Sequence: Synthetic oligonucleotide
gcaggcttcagggaccct

SEQ ID NO: 3337 - DNA, 18 bp, Artificial Sequence
  Description of Artificial Sequence: Synthetic oligonucleotide
gacaggcaggcttcaggg

SEQ ID NO: 3338 - DNA, 18 bp, Artificial Sequence
  Description of Artificial Sequence: Synthetic oligonucleotide
cagaagacaggcaggctt

SEQ ID NO: 3339 - DNA, 18 bp, Artificial Sequence
  Description of Artificial Sequence: Synthetic oligonucleotide
ccctgcagaagacaggca

SEQ ID NO: 3340 - DNA, 18 bp, Artificial Sequence
  Description of Artificial Sequence: Synthetic oligonucleotide
gaggcccctgcagaagac

SEQ ID NO: 3341 - DNA, 18 bp, Artificial Sequence
  Description of Artificial Sequence: Synthetic oligonucleotide
gtgcagaggcccctgcag

SEQ ID NO: 3342 - DNA, 18 bp, Artificial Sequence
  Description of Artificial Sequence: Synthetic oligonucleotide
tgtgggtgcagaggcccc

SEQ ID NO: 3343 - DNA, 18 bp, Artificial Sequence
  Description of Artificial Sequence: Synthetic oligonucleotide
aagcctgtgggtgcagag

SEQ ID NO: 3344 - DNA, 18 bp, Artificial Sequence
  Description of Artificial Sequence: Synthetic oligonucleotide
ggaccaagcctgtgggtg

SEQ ID NO: 3345 - DNA, 18 bp, Artificial Sequence
  Description of Artificial Sequence: Synthetic oligonucleotide
gctgtggaccaagcctgt

SEQ ID NO: 3346 - DNA, 18 bp, Artificial Sequence
  Description of Artificial Sequence: Synthetic oligonucleotide
aggcagctgtggaccaag

SEQ ID NO: 3347 - DNA, 18 bp, Artificial Sequence
  Description of Artificial Sequence: Synthetic oligonucleotide
ccaagaggcagctgtgga

SEQ ID NO: 3348 - DNA, 18 bp, Artificial Sequence
  Description of Artificial Sequence: Synthetic oligonucleotide
gacaaccaagaggcagct

SEQ ID NO: 3349 - DNA, 18 bp, Artificial Sequence
  Description of Artificial Sequence: Synthetic oligonucleotide
ggagggacaaccaagagg

SEQ ID NO: 3350 - DNA, 18 bp, Artificial Sequence
  Description of Artificial Sequence: Synthetic oligonucleotide
gaggtggagggacaacca

SEQ ID NO: 3351 - DNA, 18 bp, Artificial Sequence
  Description of Artificial Sequence: Synthetic oligonucleotide
ccagggaggtggagggac

SEQ ID NO: 3352 - DNA, 18 bp, Artificial Sequence
  Description of Artificial Sequence: Synthetic oligonucleotide
aaaggccagggaggtgga

SEQ ID NO: 3353 - DNA, 18 bp, Artificial Sequence
  Description of Artificial Sequence: Synthetic oligonucleotide
gtctcaaaggccagggag

SEQ ID NO: 3354 - DNA, 18 bp, Artificial Sequence
  Description of Artificial Sequence: Synthetic oligonucleotide
agggagtctcaaaggcca

SEQ ID NO: 3355 - DNA, 18 bp, Artificial Sequence
  Description of Artificial Sequence: Synthetic oligonucleotide
cactgagggagtctcaaa

SEQ ID NO: 3356 - DNA, 18 bp, Artificial Sequence
  Description of Artificial Sequence: Synthetic oligonucleotide
aaagccactgagggagtc

SEQ ID NO: 3357 - DNA, 18 bp, Artificial Sequence
  Description of Artificial Sequence: Synthetic oligonucleotide
ctgacaaagccactgagg

SEQ ID NO: 3358 - DNA, 18 bp, Artificial Sequence
  Description of Artificial Sequence: Synthetic oligonucleotide
gaactctgacaaagccac

SEQ ID NO: 3359 - DNA, 18 bp, Artificial Sequence
  Description of Artificial Sequence: Synthetic oligonucleotide
tcagagaactctgacaaa

SEQ ID NO: 3360 - DNA, 18 bp, Artificial Sequence
  Description of Artificial Sequence: Synthetic oligonucleotide
tgggctcagagaactctg

SEQ ID NO: 3361 - DNA, 18 bp, Artificial Sequence
  Description of Artificial Sequence: Synthetic oligonucleotide
acagctgggctcagagaa

SEQ ID NO: 3362 - DNA, 18 bp, Artificial Sequence
  Description of Artificial Sequence: Synthetic oligonucleotide
cctccacagctgggctca

SEQ ID NO: 3363 - DNA, 18 bp, Artificial Sequence
  Description of Artificial Sequence: Synthetic oligonucleotide
actctcctccacagctgg

SEQ ID NO: 3364 - DNA, 18 bp, Artificial Sequence
  Description of Artificial Sequence: Synthetic oligonucleotide
ttcagactctcctccaca

SEQ ID NO: 3365 - DNA, 18 bp, Artificial Sequence
  Description of Artificial Sequence: Synthetic oligonucleotide
gctgtttcagactctcct

SEQ ID NO: 3366 - DNA, 18 bp, Artificial Sequence
  Description of Artificial Sequence: Synthetic oligonucleotide
gagcagctgtttcagact

SEQ ID NO: 3367 - DNA, 18 bp, Artificial Sequence
  Description of Artificial Sequence: Synthetic oligonucleotide
tcccagagcagctgtttc

SEQ ID NO: 3368 - DNA, 18 bp, Artificial Sequence
  Description of Artificial Sequence: Synthetic oligonucleotide
ccgcctcccagagcagct

SEQ ID NO: 3369 - DNA, 18 bp, Artificial Sequence
  Description of Artificial Sequence: Synthetic oligonucleotide
tgctgccgcctcccagag

SEQ ID NO: 3370 - DNA, 18 bp, Artificial Sequence
  Description of Artificial Sequence: Synthetic oligonucleotide
actcctgctgccgcctcc

SEQ ID NO: 3371 - DNA, 18 bp, Artificial Sequence
  Description of Artificial Sequence: Synthetic oligonucleotide
gggacactcctgctgccg

SEQ ID NO: 3372 - DNA, 18 bp, Artificial Sequence
  Description of Artificial Sequence: Synthetic oligonucleotide
gcgctgggacactcctgc

SEQ ID NO: 3373 - DNA, 18 bp, Artificial Sequence
  Description of Artificial Sequence: Synthetic oligonucleotide
ccacggcgctgggacact

SEQ ID NO: 3374 - DNA, 18 bp, Artificial Sequence
  Description of Artificial Sequence: Synthetic oligonucleotide
ccagcccacggcgctggg

SEQ ID NO: 3375 - DNA, 18 bp, Artificial Sequence
  Description of Artificial Sequence: Synthetic oligonucleotide
ccagcccagcccacggcg

SEQ ID NO: 3376 - DNA, 18 bp, Artificial Sequence
  Description of Artificial Sequence: Synthetic oligonucleotide
tggcaccagcccagccca

SEQ ID NO: 3377 - DNA, 18 bp, Artificial Sequence
  Description of Artificial Sequence: Synthetic oligonucleotide
aggcttggcaccagccca

SEQ ID NO: 3378 - DNA, 18 bp, Artificial Sequence
  Description of Artificial Sequence: Synthetic oligonucleotide
ggcttaggcttggcacca

SEQ ID NO: 3379 - DNA, 18 bp, Artificial Sequence
  Description of Artificial Sequence: Synthetic oligonucleotide
ctggggcccgggatgagc

SEQ ID NO: 3380 - DNA, 18 bp, Artificial Sequence
  Description of Artificial Sequence: Synthetic oligonucleotide
tatctctggggcccggga

SEQ ID NO: 3381 - DNA, 18 bp, Artificial Sequence
  Description of Artificial Sequence: Synthetic oligonucleotide
ggatttatctctggggcc

SEQ ID NO: 3382 - DNA, 18 bp, Artificial Sequence
  Description of Artificial Sequence: Synthetic oligonucleotide
cactgggatttatctctg

SEQ ID NO: 3383 - DNA, 18 bp, Artificial Sequence
  Description of Artificial Sequence: Synthetic oligonucleotide
agggtcactgggatttat

SEQ ID NO: 3384 - DNA, 18 bp, Artificial Sequence
  Description of Artificial Sequence: Synthetic oligonucleotide
gcttcagggtcactggga

SEQ ID NO: 3385 - DNA, 18 bp, Artificial Sequence
  Description of Artificial Sequence: Synthetic oligonucleotide
gtgctgcttcagggtcac

SEQ ID NO: 3386 - DNA, 18 bp, Artificial Sequence
  Description of Artificial Sequence: Synthetic oligonucleotide
tcggggtgctgcttcagg

SEQ ID NO: 3387 - DNA, 18 bp, Artificial Sequence
  Description of Artificial Sequence: Synthetic oligonucleotide
gaaggtcggggtgctgct

SEQ ID NO: 3388 - DNA, 18 bp, Artificial Sequence
  Description of Artificial Sequence: Synthetic oligonucleotide
gagcggaaggtcggggtg

SEQ ID NO: 3389 - DNA, 18 bp, Artificial Sequence
  Description of Artificial Sequence: Synthetic oligonucleotide
gctgggagcggaaggtcg

SEQ ID NO: 3390 - DNA, 18 bp, Artificial Sequence
  Description of Artificial Sequence: Synthetic oligonucleotide
tggctgctgggagcggaa

SEQ ID NO: 3391 - DNA, 18 bp, Artificial Sequence
  Description of Artificial Sequence: Synthetic oligonucleotide
gggtgtggctgctgggag

SEQ ID NO: 3392 - DNA, 18 bp, Artificial Sequence
  Description of Artificial Sequence: Synthetic oligonucleotide
ccggtgggtgtggctgct

SEQ ID NO: 3393 - DNA, 18 bp, Artificial Sequence
  Description of Artificial Sequence: Synthetic oligonucleotide
agggcccggtgggtgtgg

SEQ ID NO: 3394 - DNA, 18 bp, Artificial Sequence
  Description of Artificial Sequence: Synthetic oligonucleotide
cggagagggcccggtggg

SEQ ID NO: 3395 - DNA, 18 bp, Artificial Sequence
  Description of Artificial Sequence: Synthetic oligonucleotide
gacgccggagagggcccg

SEQ ID NO: 3396 - DNA, 18 bp, Artificial Sequence
  Description of Artificial Sequence: Synthetic oligonucleotide
aagcagacgccggagagg

SEQ ID NO: 3397 - DNA, 18 bp, Artificial Sequence
  Description of Artificial Sequence: Synthetic oligonucleotide
gtggaaagcagacgccgg

SEQ ID NO: 3398 - DNA, 18 bp, Artificial Sequence
  Description of Artificial Sequence: Synthetic oligonucleotide
gcattgtggaaagcagac

SEQ ID NO: 3399 - DNA, 18 bp, Artificial Sequence
  Description of Artificial Sequence: Synthetic oligonucleotide
gggctgcattgtggaaag

SEQ ID NO: 3400 - DNA, 18 bp, Artificial Sequence
  Description of Artificial Sequence: Synthetic oligonucleotide
ggcgggggctgcattgtg

SEQ ID NO: 3401 - DNA, 18 bp, Artificial Sequence
  Description of Artificial Sequence: Synthetic oligonucleotide
tcctgggcgggggctgca

SEQ ID NO: 3402 - DNA, 18 bp, Artificial Sequence
  Description of Artificial Sequence: Synthetic oligonucleotide
ggccctcctgggcggggg

SEQ ID NO: 3403 - DNA, 18 bp, Artificial Sequence
  Description of Artificial Sequence: Synthetic oligonucleotide
acatgggccctcctgggc

SEQ ID NO: 3404 - DNA, 18 bp, Artificial Sequence
  Description of Artificial Sequence: Synthetic oligonucleotide
taagcacatgggccctcc

SEQ ID NO: 3405 - DNA, 18 bp, Artificial Sequence
  Description of Artificial Sequence: Synthetic oligonucleotide
cagggtaagcacatgggc

SEQ ID NO: 3406 - DNA, 18 bp, Artificial Sequence
  Description of Artificial Sequence: Synthetic oligonucleotide
caaaacagggtaagcaca

SEQ ID NO: 3407 - DNA, 18 bp, Artificial Sequence
  Description of Artificial Sequence: Synthetic oligonucleotide
atgggcaaaacagggtaa

SEQ ID NO: 3408 - DNA, 18 bp, Artificial Sequence
  Description of Artificial Sequence: Synthetic oligonucleotide
tcttcatgggcaaaacag

SEQ ID NO: 3409 - DNA, 18 bp, Artificial Sequence
  Description of Artificial Sequence: Synthetic oligonucleotide
ctgtttcttcatgggcaa

SEQ ID NO: 3410 - DNA, 18 bp, Artificial Sequence
  Description of Artificial Sequence: Synthetic oligonucleotide
ctgagctgtttcttcatg

SEQ ID NO: 3411 - DNA, 18 bp, Artificial Sequence
  Description of Artificial Sequence: Synthetic oligonucleotide
caacactgagctgtttct

SEQ ID NO: 3412 - DNA, 18 bp, Artificial Sequence
  Description of Artificial Sequence: Synthetic oligonucleotide
acccacaacactgagctg

SEQ ID NO: 3413 - DNA, 18 bp, Artificial Sequence
  Description of Artificial Sequence: Synthetic oligonucleotide
cactgacccacaacactg

SEQ ID NO: 3414 - DNA, 18 bp, Artificial Sequence
  Description of Artificial Sequence: Synthetic oligonucleotide
gcgggcactgacccacaa

SEQ ID NO: 3415 - DNA, 18 bp, Artificial Sequence
  Description of Artificial Sequence: Synthetic oligonucleotide
gtgatgcgggcactgacc

SEQ ID NO: 3416 - DNA, 18 bp, Artificial Sequence
  Description of Artificial Sequence: Synthetic oligonucleotide
gctgtgtgatgcgggcac

SEQ ID NO: 3417 - DNA, 18 bp, Artificial Sequence
  Description of Artificial Sequence: Synthetic oligonucleotide
tagacgctgtgtgatgcg

SEQ ID NO: 3418 - DNA, 18 bp, Artificial Sequence
  Description of Artificial Sequence: Synthetic oligonucleotide
cgtgctagacgctgtgtg

SEQ ID NO: 3419 - DNA, 18 bp, Artificial Sequence
  Description of Artificial Sequence: Synthetic oligonucleotide
agttacgtgctagacgct

SEQ ID NO: 3420 - DNA, 18 bp, Artificial Sequence
  Description of Artificial Sequence: Synthetic oligonucleotide
ggtgcagttacgtgctag

SEQ ID NO: 3421 - DNA, 18 bp, Artificial Sequence
  Description of Artificial Sequence: Synthetic oligonucleotide
cccggggtgcagttacgt

SEQ ID NO: 3422 - DNA, 18 bp, Artificial Sequence
  Description of Artificial Sequence: Synthetic oligonucleotide
cgactcccggggtgcagt

SEQ ID NO: 3423 - DNA, 18 bp, Artificial Sequence
  Description of Artificial Sequence: Synthetic oligonucleotide
gcccacgactcccggggt

SEQ ID NO: 3424 - DNA, 18 bp, Artificial Sequence
  Description of Artificial Sequence: Synthetic oligonucleotide
cagatgcccacgactccc

SEQ ID NO: 3425 - DNA, 18 bp, Artificial Sequence
  Description of Artificial Sequence: Synthetic oligonucleotide
gccagcagatgcccacga

SEQ ID NO: 3426 - DNA, 18 bp, Artificial Sequence
  Description of Artificial Sequence: Synthetic oligonucleotide
aggaggccagcagatgcc

SEQ ID NO: 3427 - DNA, 18 bp, Artificial Sequence
  Description of Artificial Sequence: Synthetic oligonucleotide
ccggcaggaggccagcag

SEQ ID NO: 3428 - DNA, 18 bp, Artificial Sequence
  Description of Artificial Sequence: Synthetic oligonucleotide
ggaggccggcaggaggcc

SEQ ID NO: 3429 - DNA, 18 bp, Artificial Sequence
  Description of Artificial Sequence: Synthetic oligonucleotide
gcgcaggaggccggcagg

SEQ ID NO: 3430 - DNA, 18 bp, Artificial Sequence
  Description of Artificial Sequence: Synthetic oligonucleotide
cagcagcgcaggaggccg

SEQ ID NO: 3431 - DNA, 18 bp, Artificial Sequence
  Description of Artificial Sequence: Synthetic oligonucleotide
gctgtcagcagcgcagga

SEQ ID NO: 3432 - DNA, 18 bp, Artificial Sequence
  Description of Artificial Sequence: Synthetic oligonucleotide
agcaagctgtcagcagcg

SEQ ID NO: 3433 - DNA, 18 bp, Artificial Sequence
  Description of Artificial Sequence: Synthetic oligonucleotide
ggcacagcaagctgtcag

SEQ ID NO: 3434 - DNA, 18 bp, Artificial Sequence
  Description of Artificial Sequence: Synthetic oligonucleotide
agaccagtgcagcgggtg

SEQ ID NO: 3435 - DNA, 18 bp, Artificial Sequence
  Description of Artificial Sequence: Synthetic oligonucleotide
aataaagaccagtgcagc

SEQ ID NO: 3436 - DNA, 18 bp, Artificial Sequence
  Description of Artificial Sequence: Synthetic oligonucleotide
cagccaataaagaccagt

SEQ ID NO: 3437 - DNA, 18 bp, Artificial Sequence
  Description of Artificial Sequence: Synthetic oligonucleotide
gtcctcagccaataaaga

SEQ ID NO: 3438 - DNA, 18 bp, Artificial Sequence
  Description of Artificial Sequence: Synthetic oligonucleotide
tccctgtcctcagccaat

SEQ ID NO: 3439 - DNA, 18 bp, Artificial Sequence
  Description of Artificial Sequence: Synthetic oligonucleotide
cgcaatccctgtcctcag

SEQ ID NO: 3440 - DNA, 18 bp, Artificial Sequence
  Description of Artificial Sequence: Synthetic oligonucleotide
tcccccgcaatccctgtc

SEQ ID NO: 3441 - DNA, 18 bp, Artificial Sequence
  Description of Artificial Sequence: Synthetic oligonucleotide
acagctcccccgcaatcc

SEQ ID NO: 3442 - DNA, 18 bp, Artificial Sequence
  Description of Artificial Sequence: Synthetic oligonucleotide
gcctgacagctcccccgc

SEQ ID NO: 3443 - DNA, 18 bp, Artificial Sequence
  Description of Artificial Sequence: Synthetic oligonucleotide
caggggcctgacagctcc

SEQ ID NO: 3444 - DNA, 18 bp, Artificial Sequence
  Description of Artificial Sequence: Synthetic oligonucleotide
cctgccaggggcctgaca

SEQ ID NO: 3445 - DNA, 18 bp, Artificial Sequence
  Description of Artificial Sequence: Synthetic oligonucleotide
tctaacctgccaggggcc

SEQ ID NO: 3446 - DNA, 18 bp, Artificial Sequence
  Description of Artificial Sequence: Synthetic oligonucleotide
acttttctaacctgccag

SEQ ID NO: 3447 - DNA, 18 bp, Artificial Sequence
  Description of Artificial Sequence: Synthetic oligonucleotide
cagggacttttctaacct

SEQ ID NO: 3448 - DNA, 18 bp, Artificial Sequence
  Description of Artificial Sequence: Synthetic oligonucleotide
ctttccagggacttttct

SEQ ID NO: 3449 - DNA, 18 bp, Artificial Sequence
  Description of Artificial Sequence: Synthetic oligonucleotide
gaggactttccagggact

SEQ ID NO: 3450 - DNA, 18 bp, Artificial Sequence
  Description of Artificial Sequence: Synthetic oligonucleotide
cagctgaggactttccag

SEQ ID NO: 3451 - DNA, 18 bp, Artificial Sequence
  Description of Artificial Sequence: Synthetic oligonucleotide
aggtacagctgaggactt

SEQ ID NO: 3452 - DNA, 18 bp, Artificial Sequence
  Description of Artificial Sequence: Synthetic oligonucleotide
aaggcaggtacagctgag

SEQ ID NO: 3453 - DNA, 18 bp, Artificial Sequence
  Description of Artificial Sequence: Synthetic oligonucleotide
ggtggaaggcaggtacag

SEQ ID NO: 3454 - DNA, 18 bp, Artificial Sequence
  Description of Artificial Sequence: Synthetic oligonucleotide
gtcctggtggaaggcagg

SEQ ID NO: 3455 - DNA, 18 bp, Artificial Sequence
  Description of Artificial Sequence: Synthetic oligonucleotide
agttcgtcctggtggaag

SEQ ID NO: 3456 - DNA, 18 bp, Artificial Sequence
  Description of Artificial Sequence: Synthetic oligonucleotide
tggctagttcgtcctggt

SEQ ID NO: 3457 - DNA, 18 bp, Artificial Sequence
  Description of Artificial Sequence: Synthetic oligonucleotide
ctctctggctagttcgtc

SEQ ID NO: 3458 - DNA, 18 bp, Artificial Sequence
  Description of Artificial Sequence: Synthetic oligonucleotide
ccacactctctggctagt

SEQ ID NO: 3459 - DNA, 18 bp, Artificial Sequence
  Description of Artificial Sequence: Synthetic oligonucleotide
cgaagccacactctctgg

SEQ ID NO: 3460 - DNA, 18 bp, Artificial Sequence
  Description of Artificial Sequence: Synthetic oligonucleotide
acccacgaagccacactc

SEQ ID NO: 3461 - DNA, 18 bp, Artificial Sequence
  Description of Artificial Sequence: Synthetic oligonucleotide
gcaggacccacgaagcca

SEQ ID NO: 3462 - DNA, 18 bp, Artificial Sequence
  Description of Artificial Sequence: Synthetic oligonucleotide
cagaagcaggacccacga

SEQ ID NO: 3463 - DNA, 18 bp, Artificial Sequence
  Description of Artificial Sequence: Synthetic oligonucleotide
ctcttcagaagcaggacc

SEQ ID NO: 3464 - DNA, 18 bp, Artificial Sequence
  Description of Artificial Sequence: Synthetic oligonucleotide
gggaactcttcagaagca

SEQ ID NO: 3465 - DNA, 18 bp, Artificial Sequence
  Description of Artificial Sequence: Synthetic oligonucleotide
aggctgggaactcttcag

SEQ ID NO: 3466 - DNA, 18 bp, Artificial Sequence
  Description of Artificial Sequence: Synthetic oligonucleotide
aggggaggctgggaactc

SEQ ID NO: 3467 - DNA, 18 bp, Artificial Sequence
  Description of Artificial Sequence: Synthetic oligonucleotide
ggaagaggggaggctggg

SEQ ID NO: 3468 - DNA, 18 bp, Artificial Sequence
  Description of Artificial Sequence: Synthetic oligonucleotide
gtgcgggaagaggggagg

SEQ ID NO: 3469 - DNA, 18 bp, Artificial Sequence
  Description of Artificial Sequence: Synthetic oligonucleotide
tgggggtgcgggaagagg

SEQ ID NO: 3470 - DNA, 18 bp, Artificial Sequence
  Description of Artificial Sequence: Synthetic oligonucleotide
ggggctgggggtgcggga

SEQ ID NO: 3471 - DNA, 18 bp, Artificial Sequence
  Description of Artificial Sequence: Synthetic oligonucleotide
tgttgggggctgggggtg

SEQ ID NO: 3472 - DNA, 18 bp, Artificial Sequence
  Description of Artificial Sequence: Synthetic oligonucleotide
gtgcgtgttgggggctgg

SEQ ID NO: 3473 - DNA, 18 bp, Artificial Sequence
  Description of Artificial Sequence: Synthetic oligonucleotide
agggtgtgcgtgttgggg

SEQ ID NO: 3474 - DNA, 18 bp, Artificial Sequence
  Description of Artificial Sequence: Synthetic oligonucleotide
atctcagggtgtgcgtgt

SEQ ID NO: 3475 - DNA, 18 bp, Artificial Sequence
  Description of Artificial Sequence: Synthetic oligonucleotide
tccagatctcagggtgtg

SEQ ID NO: 3476 - DNA, 18 bp, Artificial Sequence
  Description of Artificial Sequence: Synthetic oligonucleotide
tgcactccagatctcagg

SEQ ID NO: 3477 - DNA, 18 bp, Artificial Sequence
  Description of Artificial Sequence: Synthetic oligonucleotide
acccatgcactccagatc

SEQ ID NO: 3478 - DNA, 18 bp, Artificial Sequence
  Description of Artificial Sequence: Synthetic oligonucleotide
ataaaacccatgcactcc

SEQ ID NO: 3479 - DNA, 18 bp, Artificial Sequence
  Description of Artificial Sequence: Synthetic oligonucleotide
ctggcataaaacccatgc

SEQ ID NO: 3480 - DNA, 18 bp, Artificial Sequence
  Description of Artificial Sequence: Synthetic oligonucleotide
agggactggcataaaacc

SEQ ID NO: 3481 - DNA, 18 bp, Artificial Sequence
  Description of Artificial Sequence: Synthetic oligonucleotide
gcacaagggactggcata

SEQ ID NO: 3482 - DNA, 18 bp, Artificial Sequence
  Description of Artificial Sequence: Synthetic oligonucleotide
cagtggcacaagggactg

SEQ ID NO: 3483 - DNA, 18 bp, Artificial Sequence
  Description of Artificial Sequence: Synthetic oligonucleotide
cggcccagtggcacaagg

SEQ ID NO: 3484 - DNA, 18 bp, Artificial Sequence
  Description of Artificial Sequence: Synthetic oligonucleotide
gagggcggcccagtggca

SEQ ID NO: 3485 - DNA, 18 bp, Artificial Sequence
  Description of Artificial Sequence: Synthetic oligonucleotide
gtgatggtcagtgaaaat

SEQ ID NO: 3486 - DNA, 18 bp, Artificial Sequence
  Description of Artificial Sequence: Synthetic oligonucleotide
atggggtgatggtcagtg

SEQ ID NO: 3487 - DNA, 18 bp, Artificial Sequence
  Description of Artificial Sequence: Synthetic oligonucleotide
gaggaatggggtgatggt

SEQ ID NO: 3488 - DNA, 18 bp, Artificial Sequence
  Description of Artificial Sequence: Synthetic oligonucleotide
ttttagaggaatggggtg

SEQ ID NO: 3489 - DNA, 18 bp, Artificial Sequence
  Description of Artificial Sequence: Synthetic oligonucleotide
gacacttttagaggaatg

SEQ ID NO: 3490 - DNA, 18 bp, Artificial Sequence
  Description of Artificial Sequence: Synthetic oligonucleotide
cctttgacacttttagag

SEQ ID NO: 3491 - DNA, 18 bp, Artificial Sequence
  Description of Artificial Sequence: Synthetic oligonucleotide
agttgcctttgacacttt

SEQ ID NO: 3492 - DNA, 18 bp, Artificial Sequence
  Description of Artificial Sequence: Synthetic oligonucleotide
cctccagttgcctttgac

SEQ ID NO: 3493 - DNA, 18 bp, Artificial Sequence
  Description of Artificial Sequence: Synthetic oligonucleotide
cctcccctccagttgcct

SEQ ID NO: 3494 - DNA, 18 bp, Artificial Sequence
  Description of Artificial Sequence: Synthetic oligonucleotide
ccagccctcccctccagt

SEQ ID NO: 3495 - DNA, 18 bp, Artificial Sequence
  Description of Artificial Sequence: Synthetic oligonucleotide
attccccagccctcccct

SEQ ID NO: 3496 - DNA, 18 bp, Artificial Sequence
  Description of Artificial Sequence: Synthetic oligonucleotide
gtctgattccccagccct

SEQ ID NO: 3497 - DNA, 18 bp, Artificial Sequence
  Description of Artificial Sequence: Synthetic oligonucleotide
agagggtctgattcccca

SEQ ID NO: 3498 - DNA, 18 bp, Artificial Sequence
  Description of Artificial Sequence: Synthetic oligonucleotide
gaaacagagggtctgatt

SEQ ID NO: 3499 - DNA, 18 bp, Artificial Sequence
  Description of Artificial Sequence: Synthetic oligonucleotide
agaatgaaacagagggtc

SEQ ID NO: 3500 - DNA, 18 bp, Artificial Sequence
  Description of Artificial Sequence: Synthetic oligonucleotide
gaggaagaatgaaacaga

SEQ ID NO: 3501 - DNA, 18 bp, Artificial Sequence
  Description of Artificial Sequence: Synthetic oligonucleotide
accgagaggaagaatgaa

SEQ ID NO: 3502 - DNA, 18 bp, Artificial Sequence
  Description of Artificial Sequence: Synthetic oligonucleotide
gagagaccgagaggaaga

SEQ ID NO: 3503 - DNA, 18 bp, Artificial Sequence
  Description of Artificial Sequence: Synthetic oligonucleotide
agtgagagagaccgagag

SEQ ID NO: 3504 - DNA, 18 bp, Artificial Sequence
  Description of Artificial Sequence: Synthetic oligonucleotide
gaaagagtgagagagacc

SEQ ID NO: 3505 - DNA, 18 bp, Artificial Sequence
  Description of Artificial Sequence: Synthetic oligonucleotide
gcactgaaagagtgagag

SEQ ID NO: 3506 - DNA, 18 bp, Artificial Sequence
  Description of Artificial Sequence: Synthetic oligonucleotide
gaggagcactgaaagagt

SEQ ID NO: 3507 - DNA, 18 bp, Artificial Sequence
  Description of Artificial Sequence: Synthetic oligonucleotide
aaagagaggagcactgaa

SEQ ID NO: 3508 - DNA, 18 bp, Artificial Sequence
  Description of Artificial Sequence: Synthetic oligonucleotide
gggccaaagagaggagca

SEQ ID NO: 3509 - DNA, 18 bp, Artificial Sequence
  Description of Artificial Sequence: Synthetic oligonucleotide
agccagggccaaagagag

SEQ ID NO: 3510 - DNA, 18 bp, Artificial Sequence
  Description of Artificial Sequence: Synthetic oligonucleotide
tacagagccagggccaaa

SEQ ID NO: 3511 - DNA, 18 bp, Artificial Sequence
  Description of Artificial Sequence: Synthetic oligonucleotide
ggctgtacagagccaggg

SEQ ID NO: 3512 - DNA, 18 bp, Artificial Sequence
  Description of Artificial Sequence: Synthetic oligonucleotide
catggggctgtacagagc

SEQ ID NO: 3513 - DNA, 18 bp, Artificial Sequence
  Description of Artificial Sequence: Synthetic oligonucleotide
gaagtcatggggctgtac

SEQ ID NO: 3514 - DNA, 18 bp, Artificial Sequence
  Description of Artificial Sequence: Synthetic oligonucleotide
aaggggaagtcatggggc

SEQ ID NO: 3515 - DNA, 18 bp, Artificial Sequence
  Description of Artificial Sequence: Synthetic oligonucleotide
ggggcaaggggaagtcat

SEQ ID NO: 3516 - DNA, 18 bp, Artificial Sequence
  Description of Artificial Sequence: Synthetic oligonucleotide
agccaggggcaaggggaa

SEQ ID NO: 3517 - DNA, 18 bp, Artificial Sequence
  Description of Artificial Sequence: Synthetic oligonucleotide
acccaagccaggggcaag

SEQ ID NO: 3518 - DNA, 18 bp, Artificial Sequence
  Description of Artificial Sequence: Synthetic oligonucleotide
aatagtgtttgcccatat

SEQ ID NO: 3519 - DNA, 18 bp, Artificial Sequence
  Description of Artificial Sequence: Synthetic oligonucleotide
atcaaaatagtgtttgcc

SEQ ID NO: 3520 - DNA, 18 bp, Artificial Sequence
  Description of Artificial Sequence: Synthetic oligonucleotide
gacacatcaaaatagtgt

SEQ ID NO: 3521 - DNA, 18 bp, Artificial Sequence
  Description of Artificial Sequence: Synthetic oligonucleotide
tatcagacacatcaaaat

SEQ ID NO: 3522 - DNA, 18 bp, Artificial Sequence
  Description of Artificial Sequence: Synthetic oligonucleotide
agtggtatcagacacatc

SEQ ID NO: 3523 - DNA, 18 bp, Artificial Sequence
  Description of Artificial Sequence: Synthetic oligonucleotide
acacaagtggtatcagac

SEQ ID NO: 3524 - DNA, 18 bp, Artificial Sequence
  Description of Artificial Sequence: Synthetic oligonucleotide
agagaacacaagtggtat

SEQ ID NO: 3525 - DNA, 18 bp, Artificial Sequence
  Description of Artificial Sequence: Synthetic oligonucleotide
tgatcagagaacacaagt

SEQ ID NO: 3526 - DNA, 18 bp, Artificial Sequence
  Description of Artificial Sequence: Synthetic oligonucleotide
agaaatgatcagagaaca

SEQ ID NO: 3527 - DNA, 18 bp, Artificial Sequence
  Description of Artificial Sequence: Synthetic oligonucleotide
agatcagaaatgatcaga

SEQ ID NO: 3528 - DNA, 18 bp, Artificial Sequence
  Description of Artificial Sequence: Synthetic oligonucleotide
gtcaaagatcagaaatga

SEQ ID NO: 3529 - DNA, 18 bp, Artificial Sequence
  Description of Artificial Sequence: Synthetic oligonucleotide
gcaaggtcaaagatcaga

SEQ ID NO: 3530 - DNA, 18 bp, Artificial Sequence
  Description of Artificial Sequence: Synthetic oligonucleotide
tgacagcaaggtcaaaga

SEQ ID NO: 3531 - DNA, 18 bp, Artificial Sequence
  Description of Artificial Sequence: Synthetic oligonucleotide
agaggtgacagcaaggtc

SEQ ID NO: 3532 - DNA, 18 bp, Artificial Sequence
  Description of Artificial Sequence: Synthetic oligonucleotide
gggtcagaggtgacagca

SEQ ID NO: 3533 - DNA, 18 bp, Artificial Sequence
  Description of Artificial Sequence: Synthetic oligonucleotide
gtcgtgggtcagaggtga

SEQ ID NO: 3534 - DNA, 18 bp, Artificial Sequence
  Description of Artificial Sequence: Synthetic oligonucleotide
ggacagtcgtgggtcaga

SEQ ID NO: 3535 - DNA, 18 bp, Artificial Sequence
  Description of Artificial Sequence: Synthetic oligonucleotide
ccggaggacagtcgtggg

SEQ ID NO: 3536 - DNA, 18 bp, Artificial Sequence
  Description of Artificial Sequence: Synthetic oligonucleotide
gaagaccggaggacagtc

SEQ ID NO: 3537 - DNA, 18 bp, Artificial Sequence
  Description of Artificial Sequence: Synthetic oligonucleotide
agagtgaagaccggagga

SEQ ID NO: 3538 - DNA, 18 bp, Artificial Sequence
  Description of Artificial Sequence: Synthetic oligonucleotide
tctggagagtgaagaccg

SEQ ID NO: 3539 - DNA, 18 bp, Artificial Sequence
  Description of Artificial Sequence: Synthetic oligonucleotide
aaagctctggagagtgaa

SEQ ID NO: 3540 - DNA, 18 bp, Artificial Sequence
  Description of Artificial Sequence: Synthetic oligonucleotide
gccagaaagctctggaga

SEQ ID NO: 3541 - DNA, 18 bp, Artificial Sequence
  Description of Artificial Sequence: Synthetic oligonucleotide
cagaagccagaaagctct

SEQ ID NO: 3542 - DNA, 18 bp, Artificial Sequence
  Description of Artificial Sequence: Synthetic oligonucleotide
ggagtcagaagccagaaa

SEQ ID NO: 3543 - DNA, 18 bp, Artificial Sequence
  Description of Artificial Sequence: Synthetic oligonucleotide
tcaggggagtcagaagcc

SEQ ID NO: 3544 - DNA, 18 bp, Artificial Sequence
  Description of Artificial Sequence: Synthetic oligonucleotide
ggaggtcaggggagtcag

SEQ ID NO: 3545 - DNA, 18 bp, Artificial Sequence
  Description of Artificial Sequence: Synthetic oligonucleotide
gccaaggaggtcagggga

SEQ ID NO: 3546 - DNA, 18 bp, Artificial Sequence
  Description of Artificial Sequence: Synthetic oligonucleotide
cgtaattcctcacccttg

SEQ ID NO: 3547 - DNA, 18 bp, Artificial Sequence
  Description of Artificial Sequence: Synthetic oligonucleotide
cgcctcgtaattcctcac

SEQ ID NO: 3548 - DNA, 18 bp, Artificial Sequence
  Description of Artificial Sequence: Synthetic oligonucleotide
gcgaccgcctcgtaattc

SEQ ID NO: 3549 - DNA, 18 bp, Artificial Sequence
  Description of Artificial Sequence: Synthetic oligonucleotide
cccgggcgaccgcctcgt

SEQ ID NO: 3550 - DNA, 18 bp, Artificial Sequence
  Description of Artificial Sequence: Synthetic oligonucleotide
tcaaacccgggcgaccgc

SEQ ID NO: 3551 - DNA, 18 bp, Artificial Sequence
  Description of Artificial Sequence: Synthetic oligonucleotide
gaggctcaaacccgggcg

SEQ ID NO: 3552 - DNA, 18 bp, Artificial Sequence
  Description of Artificial Sequence: Synthetic oligonucleotide
aggtggaggctcaaaccc

SEQ ID NO: 3553 - DNA, 18 bp, Artificial Sequence
  Description of Artificial Sequence: Synthetic oligonucleotide
tggtcaggtggaggctca

SEQ ID NO: 3554 - DNA, 18 bp, Artificial Sequence
  Description of Artificial Sequence: Synthetic oligonucleotide
gtagatggtcaggtggag

SEQ ID NO: 3555 - DNA, 18 bp, Artificial Sequence
  Description of Artificial Sequence: Synthetic oligonucleotide
caggggtagatggtcagg

SEQ ID NO: 3556 - DNA, 18 bp, Artificial Sequence
  Description of Artificial Sequence: Synthetic oligonucleotide
gggatcaggggtagatgg

SEQ ID NO: 3557 - DNA, 18 bp, Artificial Sequence
  Description of Artificial Sequence: Synthetic oligonucleotide
ggccagggatcaggggta

SEQ ID NO: 3558 - DNA, 18 bp, Artificial Sequence
  Description of Artificial Sequence: Synthetic oligonucleotide
cccgtggccagggatcag

SEQ ID NO: 3559 - DNA, 18 bp, Artificial Sequence
  Description of Artificial Sequence: Synthetic oligonucleotide
gaccacccgtggccaggg

SEQ ID NO: 3560 - DNA, 18 bp, Artificial Sequence
  Description of Artificial Sequence: Synthetic oligonucleotide
aaagtgaccacccgtggc

SEQ ID NO: 3561 - DNA, 18 bp, Artificial Sequence
  Description of Artificial Sequence: Synthetic oligonucleotide
cagccaaagtgaccaccc

SEQ ID NO: 3562 - DNA, 18 bp, Artificial Sequence
  Description of Artificial Sequence: Synthetic oligonucleotide
agcctcagccaaagtgac

SEQ ID NO: 3563 - DNA, 18 bp, Artificial Sequence
  Description of Artificial Sequence: Synthetic oligonucleotide
aactgagcctcagccaaa

SEQ ID NO: 3564 - DNA, 18 bp, Artificial Sequence
  Description of Artificial Sequence: Synthetic oligonucleotide
gaggaaactgagcctcag

SEQ ID NO: 3565 - DNA, 18 bp, Artificial Sequence
  Description of Artificial Sequence: Synthetic oligonucleotide
ctgatgaggaaactgagc

SEQ ID NO: 3566 - DNA, 18 bp, Artificial Sequence
  Description of Artificial Sequence: Synthetic oligonucleotide
gtttcctgatgaggaaac

SEQ ID NO: 3567 - DNA, 18 bp, Artificial Sequence
  Description of Artificial Sequence: Synthetic oligonucleotide
tccctgtttcctgatgag

SEQ ID NO: 3568 - DNA, 18 bp, Artificial Sequence
  Description of Artificial Sequence: Synthetic oligonucleotide
tatgatccctgtttcctg

SEQ ID NO: 3569 - DNA, 18 bp, Artificial Sequence
  Description of Artificial Sequence: Synthetic oligonucleotide
aagcttatgatccctgtt

SEQ ID NO: 3570 - DNA, 18 bp, Artificial Sequence
  Description of Artificial Sequence: Synthetic oligonucleotide
gcagcaagcttatgatcc

SEQ ID NO: 3571 - DNA, 18 bp, Artificial Sequence
  Description of Artificial Sequence: Synthetic oligonucleotide
agggggcagcaagcttat

SEQ ID NO: 3572 - DNA, 18 bp, Artificial Sequence
  Description of Artificial Sequence: Synthetic oligonucleotide
ccccaagggggcagcaag

SEQ ID NO: 3573 - DNA, 18 bp, Artificial Sequence
  Description of Artificial Sequence: Synthetic oligonucleotide
gaccaccccaagggggca

SEQ ID NO: 3574 - DNA, 18 bp, Artificial Sequence
  Description of Artificial Sequence: Synthetic oligonucleotide
tgggcgaccaccccaagg

SEQ ID NO: 3575 - DNA, 18 bp, Artificial Sequence
  Description of Artificial Sequence: Synthetic oligonucleotide
gcacttgggcgaccaccc

SEQ ID NO: 3576 - DNA, 18 bp, Artificial Sequence
  Description of Artificial Sequence: Synthetic oligonucleotide
ttactgcacttgggcgac

SEQ ID NO: 3577 - DNA, 18 bp, Artificial Sequence
  Description of Artificial Sequence: Synthetic oligonucleotide
cttccttactgcacttgg

SEQ ID NO: 3578 - DNA, 18 bp, Artificial Sequence
  Description of Artificial Sequence: Synthetic oligonucleotide
aagcgcttccttactgca

SEQ ID NO: 3579 - DNA, 18 bp, Artificial Sequence
  Description of Artificial Sequence: Synthetic oligonucleotide
tgcgcaagcgcttcctta

SEQ ID NO: 3580 - DNA, 18 bp, Artificial Sequence
  Description of Artificial Sequence: Synthetic oligonucleotide
ggcgctgcgcaagcgctt

SEQ ID NO: 3581 - DNA, 18 bp, Artificial Sequence
  Description of Artificial Sequence: Synthetic oligonucleotide
cgccaggcgctgcgcaag

SEQ ID NO: 3582 - DNA, 18 bp, Artificial Sequence
  Description of Artificial Sequence: Synthetic oligonucleotide
gcccgcgccaggcgctgc

SEQ ID NO: 3583 - DNA, 18 bp, Artificial Sequence
  Description of Artificial Sequence: Synthetic oligonucleotide
ggccggcccgcgccaggc

SEQ ID NO: 3584 - DNA, 18 bp, Artificial Sequence
  Description of Artificial Sequence: Synthetic oligonucleotide
ctgcgggccggcccgcgc

SEQ ID NO: 3585 - DNA, 18 bp, Artificial Sequence
  Description of Artificial Sequence: Synthetic oligonucleotide
gctccctgcgggccggcc

SEQ ID NO: 3586 - DNA, 18 bp, Artificial Sequence
  Description of Artificial Sequence: Synthetic oligonucleotide
cgcgcgctccctgcgggc

SEQ ID NO: 3587 - DNA, 18 bp, Artificial Sequence
  Description of Artificial Sequence: Synthetic oligonucleotide
gttaccgcgcgctccctg

SEQ ID NO: 3588 - DNA, 18 bp, Artificial Sequence
  Description of Artificial Sequence: Synthetic oligonucleotide
cgccggttaccgcgcgct

SEQ ID NO: 3589 - DNA, 18 bp, Artificial Sequence
  Description of Artificial Sequence: Synthetic oligonucleotide
cacggcgccggttaccgc

SEQ ID NO: 3590 - DNA, 18 bp, Artificial Sequence
  Description of Artificial Sequence: Synthetic oligonucleotide
acaaccacggcgccggtt

SEQ ID NO: 3591 - DNA, 18 bp, Artificial Sequence
  Description of Artificial Sequence: Synthetic oligonucleotide
cgtgacacctgagtcctc

SEQ ID NO: 3592 - DNA, 18 bp, Artificial Sequence
  Description of Artificial Sequence: Synthetic oligonucleotide
tctgacgtgacacctgag

SEQ ID NO: 3593 - DNA, 18 bp, Artificial Sequence
  Description of Artificial Sequence: Synthetic oligonucleotide
caagctctgacgtgacac

SEQ ID NO: 3594 - DNA, 18 bp, Artificial Sequence
  Description of Artificial Sequence: Synthetic oligonucleotide
acctgcaagctctgacgt

SEQ ID NO: 3595 - DNA, 18 bp, Artificial Sequence
  Description of Artificial Sequence: Synthetic oligonucleotide
cgggaacctgcaagctct

SEQ ID NO: 3596 - DNA, 18 bp, Artificial Sequence
  Description of Artificial Sequence: Synthetic oligonucleotide
ctgggcgggaacctgcaa

SEQ ID NO: 3597 - DNA, 18 bp, Artificial Sequence
  Description of Artificial Sequence: Synthetic oligonucleotide
ctgggctgggcgggaacc

SEQ ID NO: 3598 - DNA, 18 bp, Artificial Sequence
  Description of Artificial Sequence: Synthetic oligonucleotide
acagactgggctgggcgg

SEQ ID NO: 3599 - DNA, 18 bp, Artificial Sequence
  Description of Artificial Sequence: Synthetic oligonucleotide
ctgtaacagactgggctg

SEQ ID NO: 3600 - DNA, 18 bp, Artificial Sequence
  Description of Artificial Sequence: Synthetic oligonucleotide
ggtttctgtaacagactg

SEQ ID NO: 3601 - DNA, 18 bp, Artificial Sequence
  Description of Artificial Sequence: Synthetic oligonucleotide
acaacggtttctgtaaca

SEQ ID NO: 3602 - DNA, 18 bp, Artificial Sequence
  Description of Artificial Sequence: Synthetic oligonucleotide
gatccacaacggtttctg

SEQ ID NO: 3603 - DNA, 18 bp, Artificial Sequence
  Description of Artificial Sequence: Synthetic oligonucleotide
acaaagatccacaacggt

SEQ ID NO: 3604 - DNA, 18 bp, Artificial Sequence
  Description of Artificial Sequence: Synthetic oligonucleotide
agagaacaaagatccaca

SEQ ID NO: 3605 - DNA, 18 bp, Artificial Sequence
  Description of Artificial Sequence: Synthetic oligonucleotide
ctcagagagaacaaagat

SEQ ID NO: 3606 - DNA, 18 bp, Artificial Sequence
  Description of Artificial Sequence: Synthetic oligonucleotide
aggggctcagagagaaca

SEQ ID NO: 3607 - DNA, 18 bp, Artificial Sequence
  Description of Artificial Sequence: Synthetic oligonucleotide
tatgaaggggctcagaga

SEQ ID NO: 3608 - DNA, 18 bp, Artificial Sequence
  Description of Artificial Sequence: Synthetic oligonucleotide
ccaagtatgaaggggctc

SEQ ID NO: 3609 - DNA, 18 bp, Artificial Sequence
  Description of Artificial Sequence: Synthetic oligonucleotide
gacccccaagtatgaagg

SEQ ID NO: 3610 - DNA, 18 bp, Artificial Sequence
  Description of Artificial Sequence: Synthetic oligonucleotide
aaagagacccccaagtat

SEQ ID NO: 3611 - DNA, 18 bp, Artificial Sequence
  Description of Artificial Sequence: Synthetic oligonucleotide
acctgaaagagaccccca

SEQ ID NO: 3612 - DNA, 18 bp, Artificial Sequence
  Description of Artificial Sequence: Synthetic oligonucleotide
tgcacacctgaaagagac

SEQ ID NO: 3613 - DNA, 18 bp, Artificial Sequence
  Description of Artificial Sequence: Synthetic oligonucleotide
ttccctgcacacctgaaa

SEQ ID NO: 3614 - DNA, 18 bp, Artificial Sequence
  Description of Artificial Sequence: Synthetic oligonucleotide
tgctgttccctgcacacc

SEQ ID NO: 3615 - DNA, 18 bp, Artificial Sequence
  Description of Artificial Sequence: Synthetic oligonucleotide
catcttgctgttccctgc

SEQ ID NO: 3616 - DNA, 18 bp, Artificial Sequence
  Description of Artificial Sequence: Synthetic oligonucleotide
aggcacatcttgctgttc

SEQ ID NO: 3617 - DNA, 18 bp, Artificial Sequence
  Description of Artificial Sequence: Synthetic oligonucleotide
acaagaggcacatcttgc

SEQ ID NO: 3618 - DNA, 18 bp, Artificial Sequence
  Description of Artificial Sequence: Synthetic oligonucleotide
caagaacaagaggcacat

SEQ ID NO: 3619 - DNA, 18 bp, Artificial Sequence
  Description of Artificial Sequence: Synthetic oligonucleotide
ggcagcaagaacaagagg

SEQ ID NO: 3620 - DNA, 18 bp, Artificial Sequence
  Description of Artificial Sequence: Synthetic oligonucleotide
agcgtggcagcaagaaca

SEQ ID NO: 3621 - DNA, 18 bp, Artificial Sequence
  Description of Artificial Sequence: Synthetic oligonucleotide
agggaagcgtggcagcaa

SEQ ID NO: 3622 - DNA, 18 bp, Artificial Sequence
  Description of Artificial Sequence: Synthetic oligonucleotide
gacacagggaagcgtggc

SEQ ID NO: 3623 - DNA, 18 bp, Artificial Sequence
  Description of Artificial Sequence: Synthetic oligonucleotide
gccaggacacagggaagc

SEQ ID NO: 3624 - DNA, 18 bp, Artificial Sequence
  Description of Artificial Sequence: Synthetic oligonucleotide
cgcccgccaggacacagg

SEQ ID NO: 3625 - DNA, 18 bp, Artificial Sequence
  Description of Artificial Sequence: Synthetic oligonucleotide
acacccgcccgccaggac

SEQ ID NO: 3626 - DNA, 18 bp, Artificial Sequence
  Description of Artificial Sequence: Synthetic oligonucleotide
cgtccacacccgcccgcc

SEQ ID NO: 3627 - DNA, 18 bp, Artificial Sequence
  Description of Artificial Sequence: Synthetic oligonucleotide
agccccgtccacacccgc

SEQ ID NO: 3628 - DNA, 18 bp, Artificial Sequence
  Description of Artificial Sequence: Synthetic oligonucleotide
tctgcccgagcgggacag

SEQ ID NO: 3629 - DNA, 18 bp, Artificial Sequence
  Description of Artificial Sequence: Synthetic oligonucleotide
taccctctgcccgagcgg

SEQ ID NO: 3630 - DNA, 18 bp, Artificial Sequence
  Description of Artificial Sequence: Synthetic oligonucleotide
ccaggtaccctctgcccg

SEQ ID NO: 3631 - DNA, 18 bp, Artificial Sequence
  Description of Artificial Sequence: Synthetic oligonucleotide
gagtcccaggtaccctct

SEQ ID NO: 3632 - DNA, 18 bp, Artificial Sequence
  Description of Artificial Sequence: Synthetic oligonucleotide
tccacgagtcccaggtac

SEQ ID NO: 3633 - DNA, 18 bp, Artificial Sequence
  Description of Artificial Sequence: Synthetic oligonucleotide
tcttctccacgagtccca

SEQ ID NO: 3634 - DNA, 18 bp, Artificial Sequence
  Description of Artificial Sequence: Synthetic oligonucleotide
tgccctcttctccacgag

SEQ ID NO: 3635 - DNA, 18 bp, Artificial Sequence
  Description of Artificial Sequence: Synthetic oligonucleotide
gcaggtgccctcttctcc

SEQ ID NO: 3636 - DNA, 18 bp, Artificial Sequence
  Description of Artificial Sequence: Synthetic oligonucleotide
gtgaggcaggtgccctct

SEQ ID NO: 3637 - DNA, 18 bp, Artificial Sequence
  Description of Artificial Sequence: Synthetic oligonucleotide
ctcaagtgaggcaggtgc

SEQ ID NO: 3638 - DNA, 18 bp, Artificial Sequence
  Description of Artificial Sequence: Synthetic oligonucleotide
tgttgctcaagtgaggca

SEQ ID NO: 3639 - DNA, 18 bp, Artificial Sequence
  Description of Artificial Sequence: Synthetic oligonucleotide
gcaactgttgctcaagtg

SEQ ID NO: 3640 - DNA, 18 bp, Artificial Sequence
  Description of Artificial Sequence: Synthetic oligonucleotide
tgggagcaactgttgctc

SEQ ID NO: 3641 - DNA, 18 bp, Artificial Sequence
  Description of Artificial Sequence: Synthetic oligonucleotide
gagagtgggagcaactgt

SEQ ID NO: 3642 - DNA, 18 bp, Artificial Sequence
  Description of Artificial Sequence: Synthetic oligonucleotide
ggtgggagagtgggagca

SEQ ID NO: 3643 - DNA, 18 bp, Artificial Sequence
  Description of Artificial Sequence: Synthetic oligonucleotide
cacccaatcccatggcac

SEQ ID NO: 3644 - DNA, 18 bp, Artificial Sequence
  Description of Artificial Sequence: Synthetic oligonucleotide
gtttccacccaatcccat

SEQ ID NO: 3645 - DNA, 18 bp, Artificial Sequence
  Description of Artificial Sequence: Synthetic oligonucleotide
ccgaggtttccacccaat

SEQ ID NO: 3646 - DNA, 18 bp, Artificial Sequence
  Description of Artificial Sequence: Synthetic oligonucleotide
cttgcccgaggtttccac

SEQ ID NO: 3647 - DNA, 18 bp, Artificial Sequence
  Description of Artificial Sequence: Synthetic oligonucleotide
aggtacttgcccgaggtt

SEQ ID NO: 3648 - DNA, 18 bp, Artificial Sequence
  Description of Artificial Sequence: Synthetic oligonucleotide
gggaaaggtacttgcccg

SEQ ID NO: 3649 - DNA, 18 bp, Artificial Sequence
  Description of Artificial Sequence: Synthetic oligonucleotide
agtttgggaaaggtactt

SEQ ID NO: 3650 - DNA, 18 bp, Artificial Sequence
  Description of Artificial Sequence: Synthetic oligonucleotide
agaagagtttgggaaagg

SEQ ID NO: 3651 - DNA, 18 bp, Artificial Sequence
  Description of Artificial Sequence: Synthetic oligonucleotide
cccccagaagagtttggg

SEQ ID NO: 3652 - DNA, 18 bp, Artificial Sequence
  Description of Artificial Sequence: Synthetic oligonucleotide
tggaccccccagaagagt

SEQ ID NO: 3653 - DNA, 18 bp, Artificial Sequence
  Description of Artificial Sequence: Synthetic oligonucleotide
aaatatggaccccccaga

SEQ ID NO: 3654 - DNA, 18 bp, Artificial Sequence
  Description of Artificial Sequence: Synthetic oligonucleotide
cctccaaatatggacccc

SEQ ID NO: 3655 - DNA, 18 bp, Artificial Sequence
  Description of Artificial Sequence: Synthetic oligonucleotide
ccctccctccaaatatgg

SEQ ID NO: 3656 - DNA, 18 bp, Artificial Sequence
  Description of Artificial Sequence: Synthetic oligonucleotide
ctctcccctccctccaaa

SEQ ID NO: 3657 - DNA, 18 bp, Artificial Sequence
  Description of Artificial Sequence: Synthetic oligonucleotide
gagaactctcccctccct

SEQ ID NO: 3658 - DNA, 18 bp, Artificial Sequence
  Description of Artificial Sequence: Synthetic oligonucleotide
caacggagaactctcccc

SEQ ID NO: 3659 - DNA, 18 bp, Artificial Sequence
  Description of Artificial Sequence: Synthetic oligonucleotide
gagagcaacggagaactc

SEQ ID NO: 3660 - DNA, 18 bp, Artificial Sequence
  Description of Artificial Sequence: Synthetic oligonucleotide
aaagagagagcaacggag

SEQ ID NO: 3661 - DNA, 18 bp, Artificial Sequence
  Description of Artificial Sequence: Synthetic oligonucleotide
gagggaaagagagagcaa

SEQ ID NO: 3662 - DNA, 18 bp, Artificial Sequence
  Description of Artificial Sequence: Synthetic oligonucleotide
gggctgagggaaagagag

SEQ ID NO: 3663 - DNA, 18 bp, Artificial Sequence
  Description of Artificial Sequence: Synthetic oligonucleotide
aggcagggctgagggaaa

SEQ ID NO: 3664 - DNA, 18 bp, Artificial Sequence
  Description of Artificial Sequence: Synthetic oligonucleotide
atcagaggcagggctgag

SEQ ID NO: 3665 - DNA, 18 bp, Artificial Sequence
  Description of Artificial Sequence: Synthetic oligonucleotide
tgaagatcagaggcaggg

SEQ ID NO: 3666 - DNA, 18 bp, Artificial Sequence
  Description of Artificial Sequence: Synthetic oligonucleotide
ggcattgaagatcagagg

SEQ ID NO: 3667 - DNA, 18 bp, Artificial Sequence
  Description of Artificial Sequence: Synthetic oligonucleotide
agaaaggcattgaagatc

SEQ ID NO: 3668 - DNA, 18 bp, Artificial Sequence
  Description of Artificial Sequence: Synthetic oligonucleotide
aagtgagaaaggcattga

SEQ ID NO: 3669 - DNA, 18 bp, Artificial Sequence
  Description of Artificial Sequence: Synthetic oligonucleotide
tccacaagtgagaaaggc

SEQ ID NO: 3670 - DNA, 18 bp, Artificial Sequence
  Description of Artificial Sequence: Synthetic oligonucleotide
ggacatccacaagtgaga

SEQ ID NO: 3671 - DNA, 18 bp, Artificial Sequence
  Description of Artificial Sequence: Synthetic oligonucleotide
atagttagaagggttata

SEQ ID NO: 3672 - DNA, 18 bp, Artificial Sequence
  Description of Artificial Sequence: Synthetic oligonucleotide
gccttatagttagaaggg

SEQ ID NO: 3673 - DNA, 18 bp, Artificial Sequence
  Description of Artificial Sequence: Synthetic oligonucleotide
taaaagccttatagttag

SEQ ID NO: 3674 - DNA, 18 bp, Artificial Sequence
  Description of Artificial Sequence: Synthetic oligonucleotide
aaaaataaaagccttata

SEQ ID NO: 3675 - DNA, 18 bp, Artificial Sequence
  Description of Artificial Sequence: Synthetic oligonucleotide
gacagaaaaataaaagcc

SEQ ID NO: 3676 - DNA, 18 bp, Artificial Sequence
  Description of Artificial Sequence: Synthetic oligonucleotide
tggctgacagaaaaataa

SEQ ID NO: 3677 - DNA, 18 bp, Artificial Sequence
  Description of Artificial Sequence: Synthetic oligonucleotide
tacaatggctgacagaaa

SEQ ID NO: 3678 - DNA, 18 bp, Artificial Sequence
  Description of Artificial Sequence: Synthetic oligonucleotide
aactttacaatggctgac

SEQ ID NO: 3679 - DNA, 18 bp, Artificial Sequence
  Description of Artificial Sequence: Synthetic oligonucleotide
caataaactttacaatgg

SEQ ID NO: 3680 - DNA, 18 bp, Artificial Sequence
  Description of Artificial Sequence: Synthetic oligonucleotide
acccccaataaactttac

SEQ ID NO: 3681 - DNA, 18 bp, Artificial Sequence
  Description of Artificial Sequence: Synthetic oligonucleotide
ttctcacccccaataaac

SEQ ID NO: 3682 - DNA, 18 bp, Artificial Sequence
  Description of Artificial Sequence: Synthetic oligonucleotide
atctcttctcacccccaa

SEQ ID NO: 3683 - DNA, 18 bp, Artificial Sequence
  Description of Artificial Sequence: Synthetic oligonucleotide
ggacaatctcttctcacc

SEQ ID NO: 3684 - DNA, 18 bp, Artificial Sequence
  Description of Artificial Sequence: Synthetic oligonucleotide
ctaaaggacaatctcttc

SEQ ID NO: 3685 - DNA, 18 bp, Artificial Sequence
  Description of Artificial Sequence: Synthetic oligonucleotide
tattactaaaggacaatc

SEQ ID NO: 3686 - DNA, 18 bp, Artificial Sequence
  Description of Artificial Sequence: Synthetic oligonucleotide
ggtaatattactaaagga

SEQ ID NO: 3687 - DNA, 18 bp, Artificial Sequence
  Description of Artificial Sequence: Synthetic oligonucleotide
accttggtaatattacta

SEQ ID NO: 3688 - DNA, 18 bp, Artificial Sequence
  Description of Artificial Sequence: Synthetic oligonucleotide
aaggtaccttggtaatat

SEQ ID NO: 3689 - DNA, 18 bp, Artificial Sequence
  Description of Artificial Sequence: Synthetic oligonucleotide
aggaaaaggtaccttggt

SEQ ID NO: 3690 - DNA, 18 bp, Artificial Sequence
  Description of Artificial Sequence: Synthetic oligonucleotide
tgggaaggaaaaggtacc

SEQ ID NO: 3691 - DNA, 18 bp, Artificial Sequence
  Description of Artificial Sequence: Synthetic oligonucleotide
tggtctgggaaggaaaag

SEQ ID NO: 3692 - DNA, 18 bp, Artificial Sequence
  Description of Artificial Sequence: Synthetic oligonucleotide
agggttggtctgggaagg

SEQ ID NO: 3693 - DNA, 18 bp, Artificial Sequence
  Description of Artificial Sequence: Synthetic oligonucleotide
cagccagggttggtctgg

SEQ ID NO: 3694 - DNA, 18 bp, Artificial Sequence
  Description of Artificial Sequence: Synthetic oligonucleotide
catctcagccagggttgg

SEQ ID NO: 3695 - DNA, 18 bp, Artificial Sequence
  Description of Artificial Sequence: Synthetic oligonucleotide
gaaagcatctcagccagg

SEQ ID NO: 3696 - DNA, 18 bp, Artificial Sequence
  Description of Artificial Sequence: Synthetic oligonucleotide
aggggacttaggccgcat

SEQ ID NO: 3697 - DNA, 18 bp, Artificial Sequence
  Description of Artificial Sequence: Synthetic oligonucleotide
aaaggaggggacttaggc

SEQ ID NO: 3698 - DNA, 18 bp, Artificial Sequence
  Description of Artificial Sequence: Synthetic oligonucleotide
agaggaaaggaggggact

SEQ ID NO: 3699 - DNA, 18 bp, Artificial Sequence
  Description of Artificial Sequence: Synthetic oligonucleotide
gccgcagaggaaaggagg

SEQ ID NO: 3700 - DNA, 18 bp, Artificial Sequence
  Description of Artificial Sequence: Synthetic oligonucleotide
gaggggccgcagaggaaa

SEQ ID NO: 3701 - DNA, 18 bp, Artificial Sequence
  Description of Artificial Sequence: Synthetic oligonucleotide
cacaggaggggccgcaga

SEQ ID NO: 3702 - DNA, 18 bp, Artificial Sequence
  Description of Artificial Sequence: Synthetic oligonucleotide
cgtgacacaggaggggcc

SEQ ID NO: 3703 - DNA, 18 bp, Artificial Sequence
  Description of Artificial Sequence: Synthetic oligonucleotide
agccccgtgacacaggag

SEQ ID NO: 3704 - DNA, 18 bp, Artificial Sequence
  Description of Artificial Sequence: Synthetic oligonucleotide
gaggcagccccgtgacac

SEQ ID NO: 3705 - DNA, 18 bp, Artificial Sequence
  Description of Artificial Sequence: Synthetic oligonucleotide
gagtggaggcagccccgt

SEQ ID NO: 3706 - DNA, 18 bp, Artificial Sequence
  Description of Artificial Sequence: Synthetic oligonucleotide
ggcctgagtggaggcagc

SEQ ID NO: 3707 - DNA, 18 bp, Artificial Sequence
  Description of Artificial Sequence: Synthetic oligonucleotide
ctggaggcctgagtggag

SEQ ID NO: 3708 - DNA, 18 bp, Artificial Sequence
  Description of Artificial Sequence: Synthetic oligonucleotide
tggctctggaggcctgag

SEQ ID NO: 3709 - DNA, 18 bp, Artificial Sequence
  Description of Artificial Sequence: Synthetic oligonucleotide
ctggctggctctggaggc

SEQ ID NO: 3710 - DNA, 18 bp, Artificial Sequence
  Description of Artificial Sequence: Synthetic oligonucleotide
cacggctggctggctctg

SEQ ID NO: 3711 - DNA, 18 bp, Artificial Sequence
  Description of Artificial Sequence: Synthetic oligonucleotide
acacgcacggctggctgg

SEQ ID NO: 3712 - DNA, 18 bp, Artificial Sequence
  Description of Artificial Sequence: Synthetic oligonucleotide
ggaggacacgcacggctg

SEQ ID NO: 3713 - DNA, 18 bp, Artificial Sequence
  Description of Artificial Sequence: Synthetic oligonucleotide
tgctgggaggacacgcac

SEQ ID NO: 3714 - DNA, 18 bp, Artificial Sequence
  Description of Artificial Sequence: Synthetic oligonucleotide
gcggctgctgggaggaca

SEQ ID NO: 3715 - DNA, 18 bp, Artificial Sequence
  Description of Artificial Sequence: Synthetic oligonucleotide
cagccgcggctgctggga

SEQ ID NO: 3716 - DNA, 18 bp, Artificial Sequence
  Description of Artificial Sequence: Synthetic oligonucleotide
agcaacagccgcggctgc

SEQ ID NO: 3717 - DNA, 18 bp, Artificial Sequence
  Description of Artificial Sequence: Synthetic oligonucleotide
tcctgagcaacagccgcg

SEQ ID NO: 3718 - DNA, 18 bp, Artificial Sequence
  Description of Artificial Sequence: Synthetic oligonucleotide
cgggctcctgagcaacag

SEQ ID NO: 3719 - DNA, 18 bp, Artificial Sequence
  Description of Artificial Sequence: Synthetic oligonucleotide
gaggacgggctcctgagc

SEQ ID NO: 3720 - DNA, 18 bp, Artificial Sequence
  Description of Artificial Sequence: Synthetic oligonucleotide
gcggcgaggacgggctcc

SEQ ID NO: 3721 - DNA, 18 bp, Artificial Sequence
  Description of Artificial Sequence: Synthetic oligonucleotide
ggtgctacgttctctggg

SEQ ID NO: 3722 - DNA, 18 bp, Artificial Sequence
  Description of Artificial Sequence: Synthetic oligonucleotide
ctacgggtgctacgttct

SEQ ID NO: 3723 - DNA, 18 bp, Artificial Sequence
  Description of Artificial Sequence: Synthetic oligonucleotide
ggggcctacgggtgctac

SEQ ID NO: 3724 - DNA, 18 bp, Artificial Sequence
  Description of Artificial Sequence: Synthetic oligonucleotide
ggcctggggcctacgggt

SEQ ID NO: 3725 - DNA, 18 bp, Artificial Sequence
  Description of Artificial Sequence: Synthetic oligonucleotide
gacagggcctggggccta

SEQ ID NO: 3726 - DNA, 18 bp, Artificial Sequence
  Description of Artificial Sequence: Synthetic oligonucleotide
ccagggacagggcctggg

SEQ ID NO: 3727 - DNA, 18 bp, Artificial Sequence
  Description of Artificial Sequence: Synthetic oligonucleotide
agtggccagggacagggc

SEQ ID NO: 3728 - DNA, 18 bp, Artificial Sequence
  Description of Artificial Sequence: Synthetic oligonucleotide
tgggaagtggccagggac

SEQ ID NO: 3729 - DNA, 18 bp, Artificial Sequence
  Description of Artificial Sequence: Synthetic oligonucleotide
caggatgggaagtggcca

SEQ ID NO: 3730 - DNA, 18 bp, Artificial Sequence
  Description of Artificial Sequence: Synthetic oligonucleotide
cttcccaggatgggaagt

SEQ ID NO: 3731 - DNA, 18 bp, Artificial Sequence
  Description of Artificial Sequence: Synthetic oligonucleotide
gacggcttcccaggatgg

SEQ ID NO: 3732 - DNA, 18 bp, Artificial Sequence
  Description of Artificial Sequence: Synthetic oligonucleotide
gggaggacggcttcccag

SEQ ID NO: 3733 - DNA, 18 bp, Artificial Sequence
  Description of Artificial Sequence: Synthetic oligonucleotide
acacagggaggacggctt

SEQ ID NO: 3734 - DNA, 18 bp, Artificial Sequence
  Description of Artificial Sequence: Synthetic oligonucleotide
agaagacacagggaggac

SEQ ID NO: 3735 - DNA, 18 bp, Artificial Sequence
  Description of Artificial Sequence: Synthetic oligonucleotide
tgccaagaagacacaggg

SEQ ID NO: 3736 - DNA, 18 bp, Artificial Sequence
  Description of Artificial Sequence: Synthetic oligonucleotide
gggcttgccaagaagaca

SEQ ID NO: 3737 - DNA, 18 bp, Artificial Sequence
  Description of Artificial Sequence: Synthetic oligonucleotide
gaagggggcttgccaaga

SEQ ID NO: 3738 - DNA, 18 bp, Artificial Sequence
  Description of Artificial Sequence: Synthetic oligonucleotide
gtggggaagggggcttgc

SEQ ID NO: 3739 - DNA, 18 bp, Artificial Sequence
  Description of Artificial Sequence: Synthetic oligonucleotide
agcaggtggggaaggggg

SEQ ID NO: 3740 - DNA, 18 bp, Artificial Sequence
  Description of Artificial Sequence: Synthetic oligonucleotide
tggtgagcaggtggggaa

SEQ ID NO: 3741 - DNA, 18 bp, Artificial Sequence
  Description of Artificial Sequence: Synthetic oligonucleotide
gaccctggtgagcaggtg

SEQ ID NO: 3742 - DNA, 18 bp, Artificial Sequence
  Description of Artificial Sequence: Synthetic oligonucleotide
gttgggaccctggtgagc

SEQ ID NO: 3743 - DNA, 18 bp, Artificial Sequence
  Description of Artificial Sequence: Synthetic oligonucleotide
cactggttgggaccctgg

SEQ ID NO: 3744 - DNA, 18 bp, Artificial Sequence
  Description of Artificial Sequence: Synthetic oligonucleotide
ccattcactggttgggac

SEQ ID NO: 3745 - DNA, 18 bp, Artificial Sequence
  Description of Artificial Sequence: Synthetic oligonucleotide
cacgcccattcactggtt

SEQ ID NO: 3746 - DNA, 18 bp, Artificial Sequence
  Description of Artificial Sequence: Synthetic oligonucleotide
tccatcacgcccattcac

SEQ ID NO: 3747 - DNA, 18 bp, Artificial Sequence
  Description of Artificial Sequence: Synthetic oligonucleotide
atccatccatcacgccca

SEQ ID NO: 3748 - DNA, 18 bp, Artificial Sequence
  Description of Artificial Sequence: Synthetic oligonucleotide
atcctatccatccatcac

SEQ ID NO: 3749 - DNA, 18 bp, Artificial Sequence
  Description of Artificial Sequence: Synthetic oligonucleotide
ggaccatcctatccatcc

SEQ ID NO: 3750 - DNA, 18 bp, Artificial Sequence
  Description of Artificial Sequence: Synthetic oligonucleotide
cttcgggaccatcctatc

SEQ ID NO: 3751 - DNA, 18 bp, Artificial Sequence
  Description of Artificial Sequence: Synthetic oligonucleotide
gagcccttcgggaccatc

SEQ ID NO: 3752 - DNA, 18 bp, Artificial Sequence
  Description of Artificial Sequence: Synthetic oligonucleotide
tctctgagcccttcggga

SEQ ID NO: 3753 - DNA, 18 bp, Artificial Sequence
  Description of Artificial Sequence: Synthetic oligonucleotide
gcacatctctgagccctt

SEQ ID NO: 3754 - DNA, 18 bp, Artificial Sequence
  Description of Artificial Sequence: Synthetic oligonucleotide
cagcagcacatctctgag

SEQ ID NO: 3755 - DNA, 18 bp, Artificial Sequence
  Description of Artificial Sequence: Synthetic oligonucleotide
ggcagcagcagcacatct

SEQ ID NO: 3756 - DNA, 18 bp, Artificial Sequence
  Description of Artificial Sequence: Synthetic oligonucleotide
ggggtggcagcagcagca

SEQ ID NO: 3757 - DNA, 18 bp, Artificial Sequence
  Description of Artificial Sequence: Synthetic oligonucleotide
gggcgggggtggcagcag

SEQ ID NO: 3758 - DNA, 18 bp, Artificial Sequence
  Description of Artificial Sequence: Synthetic oligonucleotide
agtgggggcgggggtggc

SEQ ID NO: 3759 - DNA, 18 bp, Artificial Sequence
  Description of Artificial Sequence: Synthetic oligonucleotide
ggtgcagtgggggcgggg

SEQ ID NO: 3760 - DNA, 18 bp, Artificial Sequence
  Description of Artificial Sequence: Synthetic oligonucleotide
ttcggggtgcagtggggg

SEQ ID NO: 3761 - DNA, 18 bp, Artificial Sequence
  Description of Artificial Sequence: Synthetic oligonucleotide
gcagcttcggggtgcagt

SEQ ID NO: 3762 - DNA, 18 bp, Artificial Sequence
  Description of Artificial Sequence: Synthetic oligonucleotide
tgagggcagcttcggggt

SEQ ID NO: 3763 - DNA, 18 bp, Artificial Sequence
  Description of Artificial Sequence: Synthetic oligonucleotide
gcaggtgagggcagcttc

SEQ ID NO: 3764 - DNA, 18 bp, Artificial Sequence
  Description of Artificial Sequence: Synthetic oligonucleotide
ataggaactccaggacct

SEQ ID NO: 3765 - DNA, 18 bp, Artificial Sequence
  Description of Artificial Sequence: Synthetic oligonucleotide
gccagataggaactccag

SEQ ID NO: 3766 - DNA, 18 bp, Artificial Sequence
  Description of Artificial Sequence: Synthetic oligonucleotide
gaccggccagataggaac

SEQ ID NO: 3767 - DNA, 18 bp, Artificial Sequence
  Description of Artificial Sequence: Synthetic oligonucleotide
cacccgaccggccagata

SEQ ID NO: 3768 - DNA, 18 bp, Artificial Sequence
  Description of Artificial Sequence: Synthetic oligonucleotide
gtccccacccgaccggcc

SEQ ID NO: 3769 - DNA, 18 bp, Artificial Sequence
  Description of Artificial Sequence: Synthetic oligonucleotide
ccctagtccccacccgac

SEQ ID NO: 3770 - DNA, 18 bp, Artificial Sequence
  Description of Artificial Sequence: Synthetic oligonucleotide
tggacccctagtccccac

SEQ ID NO: 3771 - DNA, 18 bp, Artificial Sequence
  Description of Artificial Sequence: Synthetic oligonucleotide
caccctggacccctagtc

SEQ ID NO: 3772 - DNA, 18 bp, Artificial Sequence
  Description of Artificial Sequence: Synthetic oligonucleotide
gggaccaccctggacccc

SEQ ID NO: 3773 - DNA, 18 bp, Artificial Sequence
  Description of Artificial Sequence: Synthetic oligonucleotide
gtctggggaccaccctgg

SEQ ID NO: 3774 - DNA, 18 bp, Artificial Sequence
  Description of Artificial Sequence: Synthetic oligonucleotide
gggatgtctggggaccac

SEQ ID NO: 3775 - DNA, 18 bp, Artificial Sequence
  Description of Artificial Sequence: Synthetic oligonucleotide
gccgggggatgtctgggg

SEQ ID NO: 3776 - DNA, 18 bp, Artificial Sequence
  Description of Artificial Sequence: Synthetic oligonucleotide
gagaggccgggggatgtc

SEQ ID NO: 3777 - DNA, 18 bp, Artificial Sequence
  Description of Artificial Sequence: Synthetic oligonucleotide
cggctgagaggccggggg

SEQ ID NO: 3778 - DNA, 18 bp, Artificial Sequence
  Description of Artificial Sequence: Synthetic oligonucleotide
agctgcggctgagaggcc

SEQ ID NO: 3779 - DNA, 18 bp, Artificial Sequence
  Description of Artificial Sequence: Synthetic oligonucleotide
gtcacagctgcggctgag

SEQ ID NO: 3780 - DNA, 18 bp, Artificial Sequence
  Description of Artificial Sequence: Synthetic oligonucleotide
tccgggtcacagctgcgg

SEQ ID NO: 3781 - DNA, 18 bp, Artificial Sequence
  Description of Artificial Sequence: Synthetic oligonucleotide
gcagctccgggtcacagc

SEQ ID NO: 3782 - DNA, 18 bp, Artificial Sequence
  Description of Artificial Sequence: Synthetic oligonucleotide
cccaggcagctccgggtc

SEQ ID NO: 3783 - DNA, 18 bp, Artificial Sequence
  Description of Artificial Sequence: Synthetic oligonucleotide
tctctcccaggcagctcc

SEQ ID NO: 3784 - DNA, 18 bp, Artificial Sequence
  Description of Artificial Sequence: Synthetic oligonucleotide
ttgcatctctcccaggca

SEQ ID NO: 3785 - DNA, 18 bp, Artificial Sequence
  Description of Artificial Sequence: Synthetic oligonucleotide
gggacttgcatctctccc

SEQ ID NO: 3786 - DNA, 18 bp, Artificial Sequence
  Description of Artificial Sequence: Synthetic oligonucleotide
ggtcggggacttgcatct

SEQ ID NO: 3787 - DNA, 18 bp, Artificial Sequence
  Description of Artificial Sequence: Synthetic oligonucleotide
catggggtcggggacttg

SEQ ID NO: 3788 - DNA, 18 bp, Artificial Sequence
  Description of Artificial Sequence: Synthetic oligonucleotide
gtcgccatggggtcgggg

SEQ ID NO: 3789 - DNA, 18 bp, Artificial Sequence
  Description of Artificial Sequence: Synthetic oligonucleotide
gtggggtcgccatggggt

SEQ ID NO: 3790 - DNA, 18 bp, Artificial Sequence
  Description of Artificial Sequence: Synthetic oligonucleotide
cagcggtggggtcgccat

SEQ ID NO: 3791 - DNA, 18 bp, Artificial Sequence
  Description of Artificial Sequence: Synthetic oligonucleotide
agccccagcggtggggtc

SEQ ID NO: 3792 - DNA, 18 bp, Artificial Sequence
  Description of Artificial Sequence: Synthetic oligonucleotide
cggggagccccagcggtg

SEQ ID NO: 3793 - DNA, 18 bp, Artificial Sequence
  Description of Artificial Sequence: Synthetic oligonucleotide
ggtgccggggagccccag

SEQ ID NO: 3794 - DNA, 18 bp, Artificial Sequence
  Description of Artificial Sequence: Synthetic oligonucleotide
tgcctggtgccggggagc

SEQ ID NO: 3795 - DNA, 18 bp, Artificial Sequence
  Description of Artificial Sequence: Synthetic oligonucleotide
atgcctgcctggtgccgg

SEQ ID NO: 3796 - DNA, 18 bp, Artificial Sequence
  Description of Artificial Sequence: Synthetic oligonucleotide
aggccatgcctgcctggt

SEQ ID NO: 3797 - DNA, 18 bp, Artificial Sequence
  Description of Artificial Sequence: Synthetic oligonucleotide
agctgaggccatgcctgc

SEQ ID NO: 3798 - DNA, 18 bp, Artificial Sequence
  Description of Artificial Sequence: Synthetic oligonucleotide
tgcccagctgaggccatg

SEQ ID NO: 3799 - DNA, 18 bp, Artificial Sequence
  Description of Artificial Sequence: Synthetic oligonucleotide
atcccaccacccacccct

SEQ ID NO: 3800 - DNA, 18 bp, Artificial Sequence
  Description of Artificial Sequence: Synthetic oligonucleotide
cactcatcccaccaccca

SEQ ID NO: 3801 - DNA, 18 bp, Artificial Sequence
  Description of Artificial Sequence: Synthetic oligonucleotide
caatccactcatcccacc

SEQ ID NO: 3802 - DNA, 18 bp, Artificial Sequence
  Description of Artificial Sequence: Synthetic oligonucleotide
cccaccaatccactcatc

SEQ ID NO: 3803 - DNA, 18 bp, Artificial Sequence
  Description of Artificial Sequence: Synthetic oligonucleotide
ctatgcccaccaatccac

SEQ ID NO: 3804 - DNA, 18 bp, Artificial Sequence
  Description of Artificial Sequence: Synthetic oligonucleotide
gggtcctatgcccaccaa

SEQ ID NO: 3805 - DNA, 18 bp, Artificial Sequence
  Description of Artificial Sequence: Synthetic oligonucleotide
tgagggggtcctatgccc

SEQ ID NO: 3806 - DNA, 18 bp, Artificial Sequence
  Description of Artificial Sequence: Synthetic oligonucleotide
atgggtgagggggtccta

SEQ ID NO: 3807 - DNA, 18 bp, Artificial Sequence
  Description of Artificial Sequence: Synthetic oligonucleotide
tcttcatgggtgaggggg

SEQ ID NO: 3808 - DNA, 18 bp, Artificial Sequence
  Description of Artificial Sequence: Synthetic oligonucleotide
gaagctcttcatgggtga

SEQ ID NO: 3809 - DNA, 18 bp, Artificial Sequence
  Description of Artificial Sequence: Synthetic oligonucleotide
ggcaggaagctcttcatg

SEQ ID NO: 3810 - DNA, 18 bp, Artificial Sequence
  Description of Artificial Sequence: Synthetic oligonucleotide
atcaaggcaggaagctct

SEQ ID NO: 3811 - DNA, 18 bp, Artificial Sequence
  Description of Artificial Sequence: Synthetic oligonucleotide
gctttatcaaggcaggaa

SEQ ID NO: 3812 - DNA, 18 bp, Artificial Sequence
  Description of Artificial Sequence: Synthetic oligonucleotide
ggcaggctttatcaaggc

SEQ ID NO: 3813 - DNA, 18 bp, Artificial Sequence
  Description of Artificial Sequence: Synthetic oligonucleotide
aagaaggcaggctttatc

SEQ ID NO: 3814 - DNA, 18 bp, Artificial Sequence
  Description of Artificial Sequence: Synthetic oligonucleotide
cctttaagaaggcaggct

SEQ ID NO: 3815 - DNA, 18 bp, Artificial Sequence
  Description of Artificial Sequence: Synthetic oligonucleotide
ggaaccctttaagaaggc

SEQ ID NO: 3816 - DNA, 18 bp, Artificial Sequence
  Description of Artificial Sequence: Synthetic oligonucleotide
tgtgaggaaccctttaag

SEQ ID NO: 3817 - DNA, 18 bp, Artificial Sequence
  Description of Artificial Sequence: Synthetic oligonucleotide
tcaagtgtgaggaaccct

SEQ ID NO: 3818 - DNA, 18 bp, Artificial Sequence
  Description of Artificial Sequence: Synthetic oligonucleotide
agggatcaagtgtgagga

SEQ ID NO: 3819 - DNA, 18 bp, Artificial Sequence
  Description of Artificial Sequence: Synthetic oligonucleotide
tccctagggatcaagtgt

SEQ ID NO: 3820 - DNA, 18 bp, Artificial Sequence
  Description of Artificial Sequence: Synthetic oligonucleotide
aagagtccctagggatca

SEQ ID NO: 3821 - DNA, 18 bp, Artificial Sequence
  Description of Artificial Sequence: Synthetic oligonucleotide
gctcgaagagtccctagg

SEQ ID NO: 3822 - DNA, 18 bp, Artificial Sequence
  Description of Artificial Sequence: Synthetic oligonucleotide
ggtaggctcgaagagtcc

SEQ ID NO: 3823 - DNA, 18 bp, Artificial Sequence
  Description of Artificial Sequence: Synthetic oligonucleotide
ccatgggtaggctcgaag

SEQ ID NO: 3824 - DNA, 18 bp, Artificial Sequence
  Description of Artificial Sequence: Synthetic oligonucleotide
ggaggccatgggtaggct

SEQ ID NO: 3825 - DNA, 18 bp, Artificial Sequence
  Description of Artificial Sequence: Synthetic oligonucleotide
gagaaggaggccatgggt

SEQ ID NO: 3826 - DNA, 18 bp, Artificial Sequence
  Description of Artificial Sequence: Synthetic oligonucleotide
actcagagaaggaggcca

SEQ ID NO: 3827 - DNA, 18 bp, Artificial Sequence
  Description of Artificial Sequence: Synthetic oligonucleotide
aagatactcagagaagga

SEQ ID NO: 3828 - DNA, 18 bp, Artificial Sequence
  Description of Artificial Sequence: Synthetic oligonucleotide
gtgggaagatactcagag

SEQ ID NO: 3829 - DNA, 18 bp, Artificial Sequence
  Description of Artificial Sequence: Synthetic oligonucleotide
gcagagtgggaagatact

SEQ ID NO: 3830 - DNA, 18 bp, Artificial Sequence
  Description of Artificial Sequence: Synthetic oligonucleotide
gaggaaaaaaactttgca

SEQ ID NO: 3831 - DNA, 18 bp, Artificial Sequence
  Description of Artificial Sequence: Synthetic oligonucleotide
agagagaggaaaaaaact

SEQ ID NO: 3832 - DNA, 18 bp, Artificial Sequence
  Description of Artificial Sequence: Synthetic oligonucleotide
gagacagagagaggaaaa

SEQ ID NO: 3833 - DNA, 18 bp, Artificial Sequence
  Description of Artificial Sequence: Synthetic oligonucleotide
acagagagacagagagag

SEQ ID NO: 3834 - DNA, 18 bp, Artificial Sequence
  Description of Artificial Sequence: Synthetic oligonucleotide
aatgcacagagagacaga

SEQ ID NO: 3835 - DNA, 18 bp, Artificial Sequence
  Description of Artificial Sequence: Synthetic oligonucleotide
ggaagaatgcacagagag

SEQ ID NO: 3836 - DNA, 18 bp, Artificial Sequence
  Description of Artificial Sequence: Synthetic oligonucleotide
cccaaggaagaatgcaca

SEQ ID NO: 3837 - DNA, 18 bp, Artificial Sequence
  Description of Artificial Sequence: Synthetic oligonucleotide
aataacccaaggaagaat

SEQ ID NO: 3838 - DNA, 18 bp, Artificial Sequence
  Description of Artificial Sequence: Synthetic oligonucleotide
aataaaataacccaagga

SEQ ID NO: 3839 - DNA, 18 bp, Artificial Sequence
  Description of Artificial Sequence: Synthetic oligonucleotide
cacaaaataaaataaccc

SEQ ID NO: 3840 - DNA, 18 bp, Artificial Sequence
  Description of Artificial Sequence: Synthetic oligonucleotide
cacaacacaaaataaaat

SEQ ID NO: 3841 - DNA, 18 bp, Artificial Sequence
  Description of Artificial Sequence: Synthetic oligonucleotide
aagttcacaacacaaaat

SEQ ID NO: 3842 - DNA, 18 bp, Artificial Sequence
  Description of Artificial Sequence: Synthetic oligonucleotide
agaccaagttcacaacac

SEQ ID NO: 3843 - DNA, 18 bp, Artificial Sequence
  Description of Artificial Sequence: Synthetic oligonucleotide
gaagaagaccaagttcac

SEQ ID NO: 3844 - DNA, 18 bp, Artificial Sequence
  Description of Artificial Sequence: Synthetic oligonucleotide
gtggggaagaagaccaag

SEQ ID NO: 3845 - DNA, 18 bp, Artificial Sequence
  Description of Artificial Sequence: Synthetic oligonucleotide
ccatggtggggaagaaga

SEQ ID NO: 3846 - DNA, 18 bp, Artificial Sequence
  Description of Artificial Sequence: Synthetic oligonucleotide
aaaagccatggtggggaa

SEQ ID NO: 3847 - DNA, 18 bp, Artificial Sequence
  Description of Artificial Sequence: Synthetic oligonucleotide
aaaacaaaagccatggtg

SEQ ID NO: 3848 - DNA, 18 bp, Artificial Sequence
  Description of Artificial Sequence: Synthetic oligonucleotide
gataaaaaacaaaagcca

SEQ ID NO: 3849 - DNA, 18 bp, Artificial Sequence
  Description of Artificial Sequence: Synthetic oligonucleotide
cttgtgataaaaaacaaa

SEQ ID NO: 3850 - DNA, 18 bp, Artificial Sequence
  Description of Artificial Sequence: Synthetic oligonucleotide
atgaacttgtgataaaaa

SEQ ID NO: 3851 - DNA, 18 bp, Artificial Sequence
  Description of Artificial Sequence: Synthetic oligonucleotide
caccccgacccccatcct

SEQ ID NO: 3852 - DNA, 18 bp, Artificial Sequence
  Description of Artificial Sequence: Synthetic oligonucleotide
catcccaccccgaccccc

SEQ ID NO: 3853 - DNA, 18 bp, Artificial Sequence
  Description of Artificial Sequence: Synthetic oligonucleotide
cagtccatcccaccccga

SEQ ID NO: 3854 - DNA, 18 bp, Artificial Sequence
  Description of Artificial Sequence: Synthetic oligonucleotide
aagctcagtccatcccac

SEQ ID NO: 3855 - DNA, 18 bp, Artificial Sequence
  Description of Artificial Sequence: Synthetic oligonucleotide
ggcacaagctcagtccat

SEQ ID NO: 3856 - DNA, 18 bp, Artificial Sequence
  Description of Artificial Sequence: Synthetic oligonucleotide
cgccaggcacaagctcag

SEQ ID NO: 3857 - DNA, 18 bp, Artificial Sequence
  Description of Artificial Sequence: Synthetic oligonucleotide
ggacgcgccaggcacaag

SEQ ID NO: 3858 - DNA, 18 bp, Artificial Sequence
  Description of Artificial Sequence: Synthetic oligonucleotide
gcttgggacgcgccaggc

SEQ ID NO: 3859 - DNA, 18 bp, Artificial Sequence
  Description of Artificial Sequence: Synthetic oligonucleotide
cagaggcttgggacgcgc

SEQ ID NO: 3860 - DNA, 18 bp, Artificial Sequence
  Description of Artificial Sequence: Synthetic oligonucleotide
ggggccagaggcttggga

SEQ ID NO: 3861 - DNA, 18 bp, Artificial Sequence
  Description of Artificial Sequence: Synthetic oligonucleotide
caaaaggggccagaggct

SEQ ID NO: 3862 - DNA, 18 bp, Artificial Sequence
  Description of Artificial Sequence: Synthetic oligonucleotide
actaccaaaaggggccag

SEQ ID NO: 3863 - DNA, 18 bp, Artificial Sequence
  Description of Artificial Sequence: Synthetic oligonucleotide
tgcaaactaccaaaaggg

SEQ ID NO: 3864 - DNA, 18 bp, Artificial Sequence
  Description of Artificial Sequence: Synthetic oligonucleotide
gggactgcaaactaccaa

SEQ ID NO: 3865 - DNA, 18 bp, Artificial Sequence
  Description of Artificial Sequence: Synthetic oligonucleotide
aacccgggactgcaaact

SEQ ID NO: 3866 - DNA, 18 bp, Artificial Sequence
  Description of Artificial Sequence: Synthetic oligonucleotide
actcaaacccgggactgc

SEQ ID NO: 3867 - DNA, 18 bp, Artificial Sequence
  Description of Artificial Sequence: Synthetic oligonucleotide
cctgtactcaaacccggg

SEQ ID NO: 3868 - DNA, 18 bp, Artificial Sequence
  Description of Artificial Sequence: Synthetic oligonucleotide
cagagcctgtactcaaac

SEQ ID NO: 3869 - DNA, 18 bp, Artificial Sequence
  Description of Artificial Sequence: Synthetic oligonucleotide
aaagccagagcctgtact

SEQ ID NO: 3870 - DNA, 18 bp, Artificial Sequence
  Description of Artificial Sequence: Synthetic oligonucleotide
ctaacaaagccagagcct

SEQ ID NO: 3871 - DNA, 18 bp, Artificial Sequence
  Description of Artificial Sequence: Synthetic oligonucleotide
acagtctaacaaagccag

SEQ ID NO: 3872 - DNA, 18 bp, Artificial Sequence
  Description of Artificial Sequence: Synthetic oligonucleotide
gtcacacagtctaacaaa

SEQ ID NO: 3873 - DNA, 18 bp, Artificial Sequence
  Description of Artificial Sequence: Synthetic oligonucleotide
ctcaggtcacacagtcta

SEQ ID NO: 3874 - DNA, 18 bp, Artificial Sequence
  Description of Artificial Sequence: Synthetic oligonucleotide
tacgcctcaggtcacaca

SEQ ID NO: 3875 - DNA, 18 bp, Artificial Sequence
  Description of Artificial Sequence: Synthetic oligonucleotide
ggtcttacgcctcaggtc

SEQ ID NO: 3876 - DNA, 18 bp, Artificial Sequence
  Description of Artificial Sequence: Synthetic oligonucleotide
actgaggtcttacgcctc

SEQ ID NO: 3877 - DNA, 18 bp, Artificial Sequence
  Description of Artificial Sequence: Synthetic oligonucleotide
ggaacactgaggtcttac

SEQ ID NO: 3878 - DNA, 18 bp, Artificial Sequence
  Description of Artificial Sequence: Synthetic oligonucleotide
agatgggaacactgaggt

SEQ ID NO: 3879 - DNA, 18 bp, Artificial Sequence
  Description of Artificial Sequence: Synthetic oligonucleotide
tcgacagatgggaacact

SEQ ID NO: 3880 - DNA, 18 bp, Artificial Sequence
  Description of Artificial Sequence: Synthetic oligonucleotide
tccactcgacagatggga

SEQ ID NO: 3881 - DNA, 18 bp, Artificial Sequence
  Description of Artificial Sequence: Synthetic oligonucleotide
cttcttccactcgacaga

SEQ ID NO: 3882 - DNA, 18 bp, Artificial Sequence
  Description of Artificial Sequence: Synthetic oligonucleotide
gatcccttcttccactcg

SEQ ID NO: 3883 - DNA, 18 bp, Artificial Sequence
  Description of Artificial Sequence: Synthetic oligonucleotide
tcagggatcccttcttcc

SEQ ID NO: 3884 - DNA, 18 bp, Artificial Sequence
  Description of Artificial Sequence: Synthetic oligonucleotide
atcggtcagggatccctt

SEQ ID NO: 3885 - DNA, 18 bp, Artificial Sequence
  Description of Artificial Sequence: Synthetic oligonucleotide
ctcccatcggtcagggat

SEQ ID NO: 3886 - DNA, 18 bp, Artificial Sequence
  Description of Artificial Sequence: Synthetic oligonucleotide
cctgcctcccatcggtca

SEQ ID NO: 3887 - DNA, 18 bp, Artificial Sequence
  Description of Artificial Sequence: Synthetic oligonucleotide
ccacgcctgcctcccatc

SEQ ID NO: 3888 - DNA, 18 bp, Artificial Sequence
  Description of Artificial Sequence: Synthetic oligonucleotide
cgaccccacgcctgcctc

SEQ ID NO: 3889 - DNA, 18 bp, Artificial Sequence
  Description of Artificial Sequence: Synthetic oligonucleotide
gagggcgaccccacgcct

SEQ ID NO: 3890 - DNA, 18 bp, Artificial Sequence
  Description of Artificial Sequence: Synthetic oligonucleotide
tgaccgagggcgacccca

SEQ ID NO: 3891 - DNA, 18 bp, Artificial Sequence
  Description of Artificial Sequence: Synthetic oligonucleotide
tgggctgaccgagggcga

SEQ ID NO: 3892 - DNA, 18 bp, Artificial Sequence
  Description of Artificial Sequence: Synthetic oligonucleotide
ggctctgggctgaccgag

SEQ ID NO: 3893 - DNA, 18 bp, Artificial Sequence
  Description of Artificial Sequence: Synthetic oligonucleotide
ttccccaggtcaaagggg

SEQ ID NO: 3894 - DNA, 18 bp, Artificial Sequence
  Description of Artificial Sequence: Synthetic oligonucleotide
agagtttccccaggtcaa

SEQ ID NO: 3895 - DNA, 18 bp, Artificial Sequence
  Description of Artificial Sequence: Synthetic oligonucleotide
gtggaagagtttccccag

SEQ ID NO: 3896 - DNA, 18 bp, Artificial Sequence
  Description of Artificial Sequence: Synthetic oligonucleotide
ccaaggtggaagagtttc

SEQ ID NO: 3897 - DNA, 18 bp, Artificial Sequence
  Description of Artificial Sequence: Synthetic oligonucleotide
ttgtgccaaggtggaaga

SEQ ID NO: 3898 - DNA, 18 bp, Artificial Sequence
  Description of Artificial Sequence: Synthetic oligonucleotide
gagctttgtgccaaggtg

SEQ ID NO: 3899 - DNA, 18 bp, Artificial Sequence
  Description of Artificial Sequence: Synthetic oligonucleotide
agctggagctttgtgcca

SEQ ID NO: 3900 - DNA, 18 bp, Artificial Sequence
  Description of Artificial Sequence: Synthetic oligonucleotide
attggagctggagctttg

SEQ ID NO: 3901 - DNA, 18 bp, Artificial Sequence
  Description of Artificial Sequence: Synthetic oligonucleotide
agggcattggagctggag

SEQ ID NO: 3902 - DNA, 18 bp, Artificial Sequence
  Description of Artificial Sequence: Synthetic oligonucleotide
cccctagggcattggagc

SEQ ID NO: 3903 - DNA, 18 bp, Artificial Sequence
  Description of Artificial Sequence: Synthetic oligonucleotide
aaacccccctagggcatt

SEQ ID NO: 3904 - DNA, 18 bp, Artificial Sequence
  Description of Artificial Sequence: Synthetic oligonucleotide
ggcccaaacccccctagg

SEQ ID NO: 3905 - DNA, 18 bp, Artificial Sequence
  Description of Artificial Sequence: Synthetic oligonucleotide
accagggcccaaaccccc

SEQ ID NO: 3906 - DNA, 18 bp, Artificial Sequence
  Description of Artificial Sequence: Synthetic oligonucleotide
cccccaccagggcccaaa

SEQ ID NO: 3907 - DNA, 18 bp, Artificial Sequence
  Description of Artificial Sequence: Synthetic oligonucleotide
cccttcccccaccagggc

SEQ ID NO: 3908 - DNA, 18 bp, Artificial Sequence
  Description of Artificial Sequence: Synthetic oligonucleotide
tcagccccttcccccacc

SEQ ID NO: 3909 - DNA, 18 bp, Artificial Sequence
  Description of Artificial Sequence: Synthetic oligonucleotide
cagcctcagccccttccc

SEQ ID NO: 3910 - DNA, 18 bp, Artificial Sequence
  Description of Artificial Sequence: Synthetic oligonucleotide
ggtaccagcctcagcccc

SEQ ID NO: 3911 - DNA, 18 bp, Artificial Sequence
  Description of Artificial Sequence: Synthetic oligonucleotide
gaaggggtaccagcctca

SEQ ID NO: 3912 - DNA, 18 bp, Artificial Sequence
  Description of Artificial Sequence: Synthetic oligonucleotide
ctggggaaggggtaccag

SEQ ID NO: 3913 - DNA, 18 bp, Artificial Sequence
  Description of Artificial Sequence: Synthetic oligonucleotide
ggatgctggggaaggggt

SEQ ID NO: 3914 - DNA, 18 bp, Artificial Sequence
  Description of Artificial Sequence: Synthetic oligonucleotide
gctggggatgctggggaa

SEQ ID NO: 3915 - DNA, 18 bp, Artificial Sequence
  Description of Artificial Sequence: Synthetic oligonucleotide
gtggggctggggatgctg

SEQ ID NO: 3916 - DNA, 18 bp, Artificial Sequence
  Description of Artificial Sequence: Synthetic oligonucleotide
cctcagtggggctgggga

SEQ ID NO: 3917 - DNA, 18 bp, Artificial Sequence
  Description of Artificial Sequence: Synthetic oligonucleotide
cagggcctcagtggggct

SEQ ID NO: 3918 - DNA, 18 bp, Artificial Sequence
  Description of Artificial Sequence: Synthetic oligonucleotide
gctgtttggagatcttgg

SEQ ID NO: 3919 - DNA, 18 bp, Artificial Sequence
  Description of Artificial Sequence: Synthetic oligonucleotide
ggggagctgtttggagat

SEQ ID NO: 3920 - DNA, 18 bp, Artificial Sequence
  Description of Artificial Sequence: Synthetic oligonucleotide
tgagtggggagctgtttg

SEQ ID NO: 3921 - DNA, 18 bp, Artificial Sequence
  Description of Artificial Sequence: Synthetic oligonucleotide
aaccatgagtggggagct

SEQ ID NO: 3922 - DNA, 18 bp, Artificial Sequence
  Description of Artificial Sequence: Synthetic oligonucleotide
tggggaaccatgagtggg

SEQ ID NO: 3923 - DNA, 18 bp, Artificial Sequence
  Description of Artificial Sequence: Synthetic oligonucleotide
ttccctggggaaccatga

SEQ ID NO: 3924 - DNA, 18 bp, Artificial Sequence
  Description of Artificial Sequence: Synthetic oligonucleotide
ccttcttccctggggaac

SEQ ID NO: 3925 - DNA, 18 bp, Artificial Sequence
  Description of Artificial Sequence: Synthetic oligonucleotide
atctcccttcttccctgg

SEQ ID NO: 3926 - DNA, 18 bp, Artificial Sequence
  Description of Artificial Sequence: Synthetic oligonucleotide
gccccatctcccttcttc

SEQ ID NO: 3927 - DNA, 18 bp, Artificial Sequence
  Description of Artificial Sequence: Synthetic oligonucleotide
gcattgccccatctccct

SEQ ID NO: 3928 - DNA, 18 bp, Artificial Sequence
  Description of Artificial Sequence: Synthetic oligonucleotide
aggtggcattgccccatc

SEQ ID NO: 3929 - DNA, 18 bp, Artificial Sequence
  Description of Artificial Sequence: Synthetic oligonucleotide
acaggaggtggcattgcc

SEQ ID NO: 3930 - DNA, 18 bp, Artificial Sequence
  Description of Artificial Sequence: Synthetic oligonucleotide
gggggacaggaggtggca

SEQ ID NO: 3931 - DNA, 18 bp, Artificial Sequence
  Description of Artificial Sequence: Synthetic oligonucleotide
gtgaggggggacaggagg

SEQ ID NO: 3932 - DNA, 18 bp, Artificial Sequence
  Description of Artificial Sequence: Synthetic oligonucleotide
caggggtgaggggggaca

SEQ ID NO: 3933 - DNA, 18 bp, Artificial Sequence
  Description of Artificial Sequence: Synthetic oligonucleotide
taatgcaggggtgagggg

SEQ ID NO: 3934 - DNA, 18 bp, Artificial Sequence
  Description of Artificial Sequence: Synthetic oligonucleotide
gtttgtaatgcaggggtg

SEQ ID NO: 3935 - DNA, 18 bp, Artificial Sequence
  Description of Artificial Sequence: Synthetic oligonucleotide
gggaggtttgtaatgcag

SEQ ID NO: 3936 - DNA, 18 bp, Artificial Sequence
  Description of Artificial Sequence: Synthetic oligonucleotide
aagtggggaggtttgtaa

SEQ ID NO: 3937 - DNA, 18 bp, Artificial Sequence
  Description of Artificial Sequence: Synthetic oligonucleotide
gggggaagtggggaggtt

SEQ ID NO: 3938 - DNA, 18 bp, Artificial Sequence
  Description of Artificial Sequence: Synthetic oligonucleotide
ggtctgggggaagtgggg

SEQ ID NO: 3939 - DNA, 18 bp, Artificial Sequence
  Description of Artificial Sequence: Synthetic oligonucleotide
gcaagggtctgggggaag

SEQ ID NO: 3940 - DNA, 18 bp, Artificial Sequence
  Description of Artificial Sequence: Synthetic oligonucleotide
gaaaaaccatttgataaa

SEQ ID NO: 3941 - DNA, 18 bp, Artificial Sequence
  Description of Artificial Sequence: Synthetic oligonucleotide
agtacgaaaaaccatttg

SEQ ID NO: 3942 - DNA, 18 bp, Artificial Sequence
  Description of Artificial Sequence: Synthetic oligonucleotide
aactcagtacgaaaaacc

SEQ ID NO: 3943 - DNA, 18 bp, Artificial Sequence
  Description of Artificial Sequence: Synthetic oligonucleotide
gtcaaaactcagtacgaa

SEQ ID NO: 3944 - DNA, 18 bp, Artificial Sequence
  Description of Artificial Sequence: Synthetic oligonucleotide
agcctgtcaaaactcagt

SEQ ID NO: 3945 - DNA, 18 bp, Artificial Sequence
  Description of Artificial Sequence: Synthetic oligonucleotide
aacaaagcctgtcaaaac

SEQ ID NO: 3946 - DNA, 18 bp, Artificial Sequence
  Description of Artificial Sequence: Synthetic oligonucleotide
gttaaaacaaagcctgtc

SEQ ID NO: 3947 - DNA, 18 bp, Artificial Sequence
  Description of Artificial Sequence: Synthetic oligonucleotide
tcacggttaaaacaaagc

SEQ ID NO: 3948 - DNA, 18 bp, Artificial Sequence
  Description of Artificial Sequence: Synthetic oligonucleotide
ccaaatcacggttaaaac

SEQ ID NO: 3949 - DNA, 18 bp, Artificial Sequence
  Description of Artificial Sequence: Synthetic oligonucleotide
tggagccaaatcacggtt

SEQ ID NO: 3950 - DNA, 18 bp, Artificial Sequence
  Description of Artificial Sequence: Synthetic oligonucleotide
ctagctggagccaaatca

SEQ ID NO: 3951 - DNA, 18 bp, Artificial Sequence
  Description of Artificial Sequence: Synthetic oligonucleotide
ggcacctagctggagcca

SEQ ID NO: 3952 - DNA, 18 bp, Artificial Sequence
  Description of Artificial Sequence: Synthetic oligonucleotide
aaaggggcacctagctgg

SEQ ID NO: 3953 - DNA, 18 bp, Artificial Sequence
  Description of Artificial Sequence: Synthetic oligonucleotide
ggagcaaaggggcaccta

SEQ ID NO: 3954 - DNA, 18 bp, Artificial Sequence
  Description of Artificial Sequence: Synthetic oligonucleotide
gcaggggagcaaaggggc

SEQ ID NO: 3955 - DNA, 18 bp, Artificial Sequence
  Description of Artificial Sequence: Synthetic oligonucleotide
ataaggcaggggagcaaa

SEQ ID NO: 3956 - DNA, 18 bp, Artificial Sequence
  Description of Artificial Sequence: Synthetic oligonucleotide
ccagaataaggcagggga

SEQ ID NO: 3957 - DNA, 18 bp, Artificial Sequence
  Description of Artificial Sequence: Synthetic oligonucleotide
atcaaccagaataaggca

SEQ ID NO: 3958 - DNA, 18 bp, Artificial Sequence
  Description of Artificial Sequence: Synthetic oligonucleotide
gcgccatcaaccagaata

SEQ ID NO: 3959 - DNA, 18 bp, Artificial Sequence
  Description of Artificial Sequence: Synthetic oligonucleotide
tacatgcgccatcaacca

SEQ ID NO: 3960 - DNA, 18 bp, Artificial Sequence
  Description of Artificial Sequence: Synthetic oligonucleotide
tcacctacatgcgccatc

SEQ ID NO: 3961 - DNA, 18 bp, Artificial Sequence
  Description of Artificial Sequence: Synthetic oligonucleotide
ccgtatcacctacatgcg

SEQ ID NO: 3962 - DNA, 18 bp, Artificial Sequence
  Description of Artificial Sequence: Synthetic oligonucleotide
catgcccgtatcacctac

SEQ ID NO: 3963 - DNA, 18 bp, Artificial Sequence
  Description of Artificial Sequence: Synthetic oligonucleotide
gttttcatgcccgtatca

SEQ ID NO: 3964 - DNA, 18 bp, Artificial Sequence
  Description of Artificial Sequence: Synthetic oligonucleotide
gcctggttttcatgcccg

SEQ ID NO: 3965 - DNA, 18 bp, Artificial Sequence
  Description of Artificial Sequence: Synthetic oligonucleotide
ctcaagcctggttttcat

SEQ ID NO: 3966 - DNA, 18 bp, Artificial Sequence
  Description of Artificial Sequence: Synthetic oligonucleotide
atgtcctcaagcctggtt

SEQ ID NO: 3967 - DNA, 18 bp, Artificial Sequence
  Description of Artificial Sequence: Synthetic oligonucleotide
ttgtgatgtcctcaagcc

SEQ ID NO: 3968 - DNA, 18 bp, Artificial Sequence
  Description of Artificial Sequence: Synthetic oligonucleotide
tggggttgtgatgtcctc

SEQ ID NO: 3969 - DNA, 18 bp, Artificial Sequence
  Description of Artificial Sequence: Synthetic oligonucleotide
ccccttggggttgtgatg

SEQ ID NO: 3970 - DNA, 18 bp, Artificial Sequence
  Description of Artificial Sequence: Synthetic oligonucleotide
cacagccccttggggttg

SEQ ID NO: 3971 - DNA, 18 bp, Artificial Sequence
  Description of Artificial Sequence: Synthetic oligonucleotide
ggaggcacagccccttgg

SEQ ID NO: 3972 - DNA, 18 bp, Artificial Sequence
  Description of Artificial Sequence: Synthetic oligonucleotide
tggaaggaggcacagccc

SEQ ID NO: 3973 - DNA, 18 bp, Artificial Sequence
  Description of Artificial Sequence: Synthetic oligonucleotide
actcctggaaggaggcac

SEQ ID NO: 3974 - DNA, 18 bp, Artificial Sequence
  Description of Artificial Sequence: Synthetic oligonucleotide
gcaggactcctggaagga

SEQ ID NO: 3975 - DNA, 18 bp, Artificial Sequence
  Description of Artificial Sequence: Synthetic oligonucleotide
gcttggcaggactcctgg

SEQ ID NO: 3976 - DNA, 18 bp, Artificial Sequence
  Description of Artificial Sequence: Synthetic oligonucleotide
tctgggcttggcaggact

SEQ ID NO: 3977 - DNA, 18 bp, Artificial Sequence
  Description of Artificial Sequence: Synthetic oligonucleotide
caacttctgggcttggca

SEQ ID NO: 3978 - DNA, 18 bp, Artificial Sequence
  Description of Artificial Sequence: Synthetic oligonucleotide
gagcacaacttctgggct

SEQ ID NO: 3979 - DNA, 18 bp, Artificial Sequence
  Description of Artificial Sequence: Synthetic oligonucleotide
gccaagagcacaacttct

SEQ ID NO: 3980 - DNA, 18 bp, Artificial Sequence
  Description of Artificial Sequence: Synthetic oligonucleotide
gcaaggccaagagcacaa

SEQ ID NO: 3981 - DNA, 18 bp, Artificial Sequence
  Description of Artificial Sequence: Synthetic oligonucleotide
agcacgcaaggccaagag

SEQ ID NO: 3982 - DNA, 18 bp, Artificial Sequence
  Description of Artificial Sequence: Synthetic oligonucleotide
agatgagcacgcaaggcc

SEQ ID NO: 3983 - DNA, 18 bp, Artificial Sequence
  Description of Artificial Sequence: Synthetic oligonucleotide
ctccgagatgagcacgca

SEQ ID NO: 3984 - DNA, 18 bp, Artificial Sequence
  Description of Artificial Sequence: Synthetic oligonucleotide
gccgcctccgagatgagc

SEQ ID NO: 3985 - DNA, 18 bp, Artificial Sequence
  Description of Artificial Sequence: Synthetic oligonucleotide
ttgctgccgcctccgaga

SEQ ID NO: 3986 - DNA, 18 bp, Artificial Sequence
  Description of Artificial Sequence: Synthetic oligonucleotide
aagtgttgctgccgcctc

SEQ ID NO: 3987 - DNA, 18 bp, Artificial Sequence
  Description of Artificial Sequence: Synthetic oligonucleotide
aagcgaagtgttgctgcc

SEQ ID NO: 3988 - DNA, 18 bp, Artificial Sequence
  Description of Artificial Sequence: Synthetic oligonucleotide
gagttaccacccagggtc

SEQ ID NO: 3989 - DNA, 18 bp, Artificial Sequence
  Description of Artificial Sequence: Synthetic oligonucleotide
cttgggagttaccaccca

SEQ ID NO: 3990 - DNA, 18 bp, Artificial Sequence
  Description of Artificial Sequence: Synthetic oligonucleotide
cccagcttgggagttacc

SEQ ID NO: 3991 - DNA, 18 bp, Artificial Sequence
  Description of Artificial Sequence: Synthetic oligonucleotide
ctactcccagcttgggag

SEQ ID NO: 3992 - DNA, 18 bp, Artificial Sequence
  Description of Artificial Sequence: Synthetic oligonucleotide
agcccctactcccagctt

SEQ ID NO: 3993 - DNA, 18 bp, Artificial Sequence
  Description of Artificial Sequence: Synthetic oligonucleotide
ggaaaagcccctactccc

SEQ ID NO: 3994 - DNA, 18 bp, Artificial Sequence
  Description of Artificial Sequence: Synthetic oligonucleotide
acagaggaaaagccccta

SEQ ID NO: 3995 - DNA, 18 bp, Artificial Sequence
  Description of Artificial Sequence: Synthetic oligonucleotide
ggaccacagaggaaaagc

SEQ ID NO: 3996 - DNA, 18 bp, Artificial Sequence
  Description of Artificial Sequence: Synthetic oligonucleotide
acaggggaccacagagga

SEQ ID NO: 3997 - DNA, 18 bp, Artificial Sequence
  Description of Artificial Sequence: Synthetic oligonucleotide
agtctacaggggaccaca

SEQ ID NO: 3998 - DNA, 18 bp, Artificial Sequence
  Description of Artificial Sequence: Synthetic oligonucleotide
cggtcagtctacagggga

SEQ ID NO: 3999 - DNA, 18 bp, Artificial Sequence
  Description of Artificial Sequence: Synthetic oligonucleotide
gggggcggtcagtctaca

SEQ ID NO: 4000 - DNA, 18 bp, Artificial Sequence
  Description of Artificial Sequence: Synthetic oligonucleotide
gagatgggggcggtcagt

SEQ ID NO: 4001 - DNA, 18 bp, Artificial Sequence
  Description of Artificial Sequence: Synthetic oligonucleotide
gggctgagatgggggcgg

SEQ ID NO: 4002 - DNA, 18 bp, Artificial Sequence
  Description of Artificial Sequence: Synthetic oligonucleotide
gacaagggctgagatggg

SEQ ID NO: 4003 - DNA, 18 bp, Artificial Sequence
  Description of Artificial Sequence: Synthetic oligonucleotide
ctgaggacaagggctgag

SEQ ID NO: 4004 - DNA, 18 bp, Artificial Sequence
  Description of Artificial Sequence: Synthetic oligonucleotide
gtgcactgaggacaaggg

SEQ ID NO: 4005 - DNA, 18 bp, Artificial Sequence
  Description of Artificial Sequence: Synthetic oligonucleotide
caggggtgcactgaggac

SEQ ID NO: 4006 - DNA, 18 bp, Artificial Sequence
  Description of Artificial Sequence: Synthetic oligonucleotide
cttagcaggggtgcactg

SEQ ID NO: 4007 - DNA, 18 bp, Artificial Sequence
  Description of Artificial Sequence: Synthetic oligonucleotide
tgccccttagcaggggtg

SEQ ID NO: 4008 - DNA, 18 bp, Artificial Sequence
  Description of Artificial Sequence: Synthetic oligonucleotide
ctccttgccccttagcag

SEQ ID NO: 4009 - DNA, 18 bp, Artificial Sequence
  Description of Artificial Sequence: Synthetic oligonucleotide
gccttctccttgcccctt

SEQ ID NO: 4010 - DNA, 18 bp, Artificial Sequence
  Description of Artificial Sequence: Synthetic oligonucleotide
cgtcagccttctccttgc

SEQ ID NO: 4011 - DNA, 18 bp, Artificial Sequence
  Description of Artificial Sequence: Synthetic oligonucleotide
attgcacaatttaacaga

SEQ ID NO: 4012 - DNA, 18 bp, Artificial Sequence
  Description of Artificial Sequence: Synthetic oligonucleotide
cataaattgcacaattta

SEQ ID NO: 4013 - DNA, 18 bp, Artificial Sequence
  Description of Artificial Sequence: Synthetic oligonucleotide
gtaatcataaattgcaca

SEQ ID NO: 4014 - DNA, 18 bp, Artificial Sequence
  Description of Artificial Sequence: Synthetic oligonucleotide
ttggagtaatcataaatt

SEQ ID NO: 4015 - DNA, 18 bp, Artificial Sequence
  Description of Artificial Sequence: Synthetic oligonucleotide
gtctattggagtaatcat

SEQ ID NO: 4016 - DNA, 18 bp, Artificial Sequence
  Description of Artificial Sequence: Synthetic oligonucleotide
tatcagtctattggagta

SEQ ID NO: 4017 - DNA, 18 bp, Artificial Sequence
  Description of Artificial Sequence: Synthetic oligonucleotide
ttttctatcagtctattg

SEQ ID NO: 4018 - DNA, 18 bp, Artificial Sequence
  Description of Artificial Sequence: Synthetic oligonucleotide
tatttttttctatcagtc

SEQ ID NO: 4019 - DNA, 18 bp, Artificial Sequence
  Description of Artificial Sequence: Synthetic oligonucleotide
tatgctatttttttctat

SEQ ID NO: 4020 - DNA, 18 bp, Artificial Sequence
  Description of Artificial Sequence: Synthetic oligonucleotide
caatatatgctatttttt

SEQ ID NO: 4021 - DNA, 18 bp, Artificial Sequence
  Description of Artificial Sequence: Synthetic oligonucleotide
tctgtcaatatatgctat

SEQ ID NO: 4022 - DNA, 18 bp, Artificial Sequence
  Description of Artificial Sequence: Synthetic oligonucleotide
atgcatctgtcaatatat

SEQ ID NO: 4023 - DNA, 18 bp, Artificial Sequence
  Description of Artificial Sequence: Synthetic oligonucleotide
taaatatgcatctgtcaa

SEQ ID NO: 4024 - DNA, 18 bp, Artificial Sequence
  Description of Artificial Sequence: Synthetic oligonucleotide
acttataaatatgcatct

SEQ ID NO: 4025 - DNA, 18 bp, Artificial Sequence
  Description of Artificial Sequence: Synthetic oligonucleotide
taaacacttataaatatg

SEQ ID NO: 4026 - DNA, 18 bp, Artificial Sequence
  Description of Artificial Sequence: Synthetic oligonucleotide
gtcattaaacacttataa

SEQ ID NO: 4027 - DNA, 18 bp, Artificial Sequence
  Description of Artificial Sequence: Synthetic oligonucleotide
agaaagtcattaaacact

SEQ ID NO: 4028 - DNA, 18 bp, Artificial Sequence
  Description of Artificial Sequence: Synthetic oligonucleotide
tataaagaaagtcattaa

SEQ ID NO: 4029 - DNA, 18 bp, Artificial Sequence
  Description of Artificial Sequence: Synthetic oligonucleotide
aaaaatataaagaaagtc

SEQ ID NO: 4030 - DNA, 18 bp, Artificial Sequence
  Description of Artificial Sequence: Synthetic oligonucleotide
tgatgaaaaatataaaga

SEQ ID NO: 4031 - DNA, 18 bp, Artificial Sequence
  Description of Artificial Sequence: Synthetic oligonucleotide
gaagctgatgaaaaatat

SEQ ID NO: 4032 - DNA, 18 bp, Artificial Sequence
  Description of Artificial Sequence: Synthetic oligonucleotide
ttatagaagctgatgaaa

SEQ ID NO: 4033 - DNA, 18 bp, Artificial Sequence
  Description of Artificial Sequence: Synthetic oligonucleotide
tccagccctgactggttc

SEQ ID NO: 4034 - DNA, 18 bp, Artificial Sequence
  Description of Artificial Sequence: Synthetic oligonucleotide
tgtgatccagccctgact

SEQ ID NO: 4035 - DNA, 18 bp, Artificial Sequence
  Description of Artificial Sequence: Synthetic oligonucleotide
ctcattgtgatccagccc

SEQ ID NO: 4036 - DNA, 18 bp, Artificial Sequence
  Description of Artificial Sequence: Synthetic oligonucleotide
actgcctcattgtgatcc

SEQ ID NO: 4037 - DNA, 18 bp, Artificial Sequence
  Description of Artificial Sequence: Synthetic oligonucleotide
tgtagactgcctcattgt

SEQ ID NO: 4038 - DNA, 18 bp, Artificial Sequence
  Description of Artificial Sequence: Synthetic oligonucleotide
caaactgtagactgcctc

SEQ ID NO: 4039 - DNA, 18 bp, Artificial Sequence
  Description of Artificial Sequence: Synthetic oligonucleotide
gttaccaaactgtagact

SEQ ID NO: 4040 - DNA, 18 bp, Artificial Sequence
  Description of Artificial Sequence: Synthetic oligonucleotide
gatttgttaccaaactgt

SEQ ID NO: 4041 - DNA, 18 bp, Artificial Sequence
  Description of Artificial Sequence: Synthetic oligonucleotide
actgagatttgttaccaa

SEQ ID NO: 4042 - DNA, 18 bp, Artificial Sequence
  Description of Artificial Sequence: Synthetic oligonucleotide
aaaccactgagatttgtt

SEQ ID NO: 4043 - DNA, 18 bp, Artificial Sequence
  Description of Artificial Sequence: Synthetic oligonucleotide
ttcctaaaccactgagat

SEQ ID NO: 4044 - DNA, 18 bp, Artificial Sequence
  Description of Artificial Sequence: Synthetic oligonucleotide
ttgctttcctaaaccact

SEQ ID NO: 4045 - DNA, 18 bp, Artificial Sequence
  Description of Artificial Sequence: Synthetic oligonucleotide
aacttttgctttcctaaa

SEQ ID NO: 4046 - DNA, 18 bp, Artificial Sequence
  Description of Artificial Sequence: Synthetic oligonucleotide
aaataaacttttgctttc

SEQ ID NO: 4047 - DNA, 18 bp, Artificial Sequence
  Description of Artificial Sequence: Synthetic oligonucleotide
ggagcaaataaacttttg

SEQ ID NO: 4048 - DNA, 18 bp, Artificial Sequence
  Description of Artificial Sequence: Synthetic oligonucleotide
aatctggagcaaataaac

SEQ ID NO: 4049 - DNA, 18 bp, Artificial Sequence
  Description of Artificial Sequence: Synthetic oligonucleotide
ccatcaatctggagcaaa

SEQ ID NO: 4050 - DNA, 18 bp, Artificial Sequence
  Description of Artificial Sequence: Synthetic oligonucleotide
agtccccatcaatctgga

SEQ ID NO: 4051 - DNA, 18 bp, Artificial Sequence
  Description of Artificial Sequence: Synthetic oligonucleotide
agaagagtccccatcaat

SEQ ID NO: 4052 - DNA, 18 bp, Artificial Sequence
  Description of Artificial Sequence: Synthetic oligonucleotide
aatgtagaagagtcccca

SEQ ID NO: 4053 - DNA, 18 bp, Artificial Sequence
  Description of Artificial Sequence: Synthetic oligonucleotide
gactgaatgtagaagagt

SEQ ID NO: 4054 - DNA, 18 bp, Artificial Sequence
  Description of Artificial Sequence: Synthetic oligonucleotide
tgagagactgaatgtaga

SEQ ID NO: 4055 - DNA, 18 bp, Artificial Sequence
  Description of Artificial Sequence: Synthetic oligonucleotide
ggatctgagagactgaat

SEQ ID NO: 4056 - DNA, 18 bp, Artificial Sequence
  Description of Artificial Sequence: Synthetic oligonucleotide
ggcttggatctgagagac

SEQ ID NO: 4057 - DNA, 18 bp, Artificial Sequence
  Description of Artificial Sequence: Synthetic oligonucleotide
aaggaggcttggatctga

SEQ ID NO: 4058 - DNA, 18 bp, Artificial Sequence
  Description of Artificial Sequence: Synthetic oligonucleotide
agctgaaggaggcttgga

SEQ ID NO: 4059 - DNA, 18 bp, Artificial Sequence
  Description of Artificial Sequence: Synthetic oligonucleotide
ctttgagctgaaggaggc

SEQ ID NO: 4060 - DNA, 18 bp, Artificial Sequence
  Description of Artificial Sequence: Synthetic oligonucleotide
agtcactttgagctgaag

SEQ ID NO: 4061 - DNA, 18 bp, Artificial Sequence
  Description of Artificial Sequence: Synthetic oligonucleotide
ttggaagtcactttgagc

SEQ ID NO: 4062 - DNA, 18 bp, Artificial Sequence
  Description of Artificial Sequence: Synthetic oligonucleotide
caactttggaagtcactt

SEQ ID NO: 4063 - DNA, 18 bp, Artificial Sequence
  Description of Artificial Sequence: Synthetic oligonucleotide
cacagcaactttggaagt

SEQ ID NO: 4064 - DNA, 18 bp, Artificial Sequence
  Description of Artificial Sequence: Synthetic oligonucleotide
ttggccacagcaactttg

SEQ ID NO: 4065 - DNA, 18 bp, Artificial Sequence
  Description of Artificial Sequence: Synthetic oligonucleotide
ctcttttggccacagcaa

SEQ ID NO: 4066 - DNA, 18 bp, Artificial Sequence
  Description of Artificial Sequence: Synthetic oligonucleotide
tctccctcttttggccac

SEQ ID NO: 4067 - DNA, 18 bp, Artificial Sequence
  Description of Artificial Sequence: Synthetic oligonucleotide
cgatttctccctcttttg

SEQ ID NO: 4068 - DNA, 18 bp, Artificial Sequence
  Description of Artificial Sequence: Synthetic oligonucleotide
ctcttcgatttctccctc

SEQ ID NO: 4069 - DNA, 18 bp, Artificial Sequence
  Description of Artificial Sequence: Synthetic oligonucleotide
ctggtctcttcgatttct

SEQ ID NO: 4070 - DNA, 18 bp, Artificial Sequence
  Description of Artificial Sequence: Synthetic oligonucleotide
gctggctggtctcttcga

SEQ ID NO: 4071 - DNA, 18 bp, Artificial Sequence
  Description of Artificial Sequence: Synthetic oligonucleotide
tgagagctggctggtctc

SEQ ID NO: 4072 - DNA, 18 bp, Artificial Sequence
  Description of Artificial Sequence: Synthetic oligonucleotide
ccaggtgagagctggctg

SEQ ID NO: 4073 - DNA, 18 bp, Artificial Sequence
  Description of Artificial Sequence: Synthetic oligonucleotide
ctgagccaggtgagagct

SEQ ID NO: 4074 - DNA, 18 bp, Artificial Sequence
  Description of Artificial Sequence: Synthetic oligonucleotide
atgcgctgagccaggtga

SEQ ID NO: 4075 - DNA, 18 bp, Artificial Sequence
  Description of Artificial Sequence: Synthetic oligonucleotide
gtgacatgcgctgagcca

SEQ ID NO: 4076 - DNA, 18 bp, Artificial Sequence
  Description of Artificial Sequence: Synthetic oligonucleotide
ggaaagtgacatgcgctg

SEQ ID NO: 4077 - DNA, 18 bp, Artificial Sequence
  Description of Artificial Sequence: Synthetic oligonucleotide
gccaaggaaagtgacatg

SEQ ID NO: 4078 - DNA, 18 bp, Artificial Sequence
  Description of Artificial Sequence: Synthetic oligonucleotide
ttttggccaaggaaagtg

SEQ ID NO: 4079 - DNA, 18 bp, Artificial Sequence
  Description of Artificial Sequence: Synthetic oligonucleotide
acttgttttggccaagga

SEQ ID NO: 4080 - DNA, 18 bp, Artificial Sequence
  Description of Artificial Sequence: Synthetic oligonucleotide
ttgggacttgttttggcc

SEQ ID NO: 4081 - DNA, 18 bp, Artificial Sequence
  Description of Artificial Sequence: Synthetic oligonucleotide
gggccttgggacttgttt

SEQ ID NO: 4082 - DNA, 18 bp, Artificial Sequence
  Description of Artificial Sequence: Synthetic oligonucleotide
gcttggggccttgggact

SEQ ID NO: 4083 - DNA, 18 bp, Artificial Sequence
  Description of Artificial Sequence: Synthetic oligonucleotide
agtaagcttggggccttg

SEQ ID NO: 4084 - DNA, 18 bp, Artificial Sequence
  Description of Artificial Sequence: Synthetic oligonucleotide
tgtgcagtaagcttgggg

SEQ ID NO: 4085 - DNA, 18 bp, Artificial Sequence
  Description of Artificial Sequence: Synthetic oligonucleotide
tctcttgtgcagtaagct

SEQ ID NO: 4086 - DNA, 18 bp, Artificial Sequence
  Description of Artificial Sequence: Synthetic oligonucleotide
tccactctcttgtgcagt

SEQ ID NO: 4087 - DNA, 18 bp, Artificial Sequence
  Description of Artificial Sequence: Synthetic oligonucleotide
cattttccactctcttgt

SEQ ID NO: 4088 - DNA, 18 bp, Artificial Sequence
  Description of Artificial Sequence: Synthetic oligonucleotide
ctctgcattttccactct

SEQ ID NO: 4089 - DNA, 18 bp, Artificial Sequence
  Description of Artificial Sequence: Synthetic oligonucleotide
tgcttctctgcattttcc

SEQ ID NO: 4090 - DNA, 18 bp, Artificial Sequence
  Description of Artificial Sequence: Synthetic oligonucleotide
ccatgtgcttctctgcat

SEQ ID NO: 4091 - DNA, 18 bp, Artificial Sequence
  Description of Artificial Sequence: Synthetic oligonucleotide
ggattccatgtgcttctc

SEQ ID NO: 4092 - DNA, 18 bp, Artificial Sequence
  Description of Artificial Sequence: Synthetic oligonucleotide
atactggattccatgtgc

SEQ ID NO: 4093 - DNA, 18 bp, Artificial Sequence
  Description of Artificial Sequence: Synthetic oligonucleotide
accatatactggattcca

SEQ ID NO: 4094 - DNA, 18 bp, Artificial Sequence
  Description of Artificial Sequence: Synthetic oligonucleotide
tgctcaccatatactgga

SEQ ID NO: 4095 - DNA, 18 bp, Artificial Sequence
  Description of Artificial Sequence: Synthetic oligonucleotide
actggtgctcaccatata

SEQ ID NO: 4096 - DNA, 18 bp, Artificial Sequence
  Description of Artificial Sequence: Synthetic oligonucleotide
agacaactggtgctcacc

SEQ ID NO: 4097 - DNA, 18 bp, Artificial Sequence
  Description of Artificial Sequence: Synthetic oligonucleotide
ggcagagacaactggtgc

SEQ ID NO: 4098 - DNA, 18 bp, Artificial Sequence
  Description of Artificial Sequence: Synthetic oligonucleotide
atgttggcagagacaact

SEQ ID NO: 4099 - DNA, 18 bp, Artificial Sequence
  Description of Artificial Sequence: Synthetic oligonucleotide
ccgtcatgttggcagaga

SEQ ID NO: 4100 - DNA, 18 bp, Artificial Sequence
  Description of Artificial Sequence: Synthetic oligonucleotide
agttaccgtcatgttggc

SEQ ID NO: 4101 - DNA, 18 bp, Artificial Sequence
  Description of Artificial Sequence: Synthetic oligonucleotide
tcagaacagtacattttg

SEQ ID NO: 4102 - DNA, 18 bp, Artificial Sequence
  Description of Artificial Sequence: Synthetic oligonucleotide
acagctcagaacagtaca

SEQ ID NO: 4103 - DNA, 18 bp, Artificial Sequence
  Description of Artificial Sequence: Synthetic oligonucleotide
cacccacagctcagaaca

SEQ ID NO: 4104 - DNA, 18 bp, Artificial Sequence
  Description of Artificial Sequence: Synthetic oligonucleotide
ctgcacacccacagctca

SEQ ID NO: 4105 - DNA, 18 bp, Artificial Sequence
  Description of Artificial Sequence: Synthetic oligonucleotide
cccttctgcacacccaca

SEQ ID NO: 4106 - DNA, 18 bp, Artificial Sequence
  Description of Artificial Sequence: Synthetic oligonucleotide
ggagacccttctgcacac

SEQ ID NO: 4107 - DNA, 18 bp, Artificial Sequence
  Description of Artificial Sequence: Synthetic oligonucleotide
ttaagggagacccttctg

SEQ ID NO: 4108 - DNA, 18 bp, Artificial Sequence
  Description of Artificial Sequence: Synthetic oligonucleotide
ctagcttaagggagaccc

SEQ ID NO: 4109 - DNA, 18 bp, Artificial Sequence
  Description of Artificial Sequence: Synthetic oligonucleotide
ttctactagcttaaggga

SEQ ID NO: 4110 - DNA, 18 bp, Artificial Sequence
  Description of Artificial Sequence: Synthetic oligonucleotide
taaatttctactagctta

SEQ ID NO: 4111 - DNA, 18 bp, Artificial Sequence
  Description of Artificial Sequence: Synthetic oligonucleotide
tattttaaatttctacta

SEQ ID NO: 4112 - DNA, 18 bp, Artificial Sequence
  Description of Artificial Sequence: Synthetic oligonucleotide
tttgttattttaaatttc

SEQ ID NO: 4113 - DNA, 18 bp, Artificial Sequence
  Description of Artificial Sequence: Synthetic oligonucleotide
aaagttttgttattttaa

SEQ ID NO: 4114 - DNA, 18 bp, Artificial Sequence
  Description of Artificial Sequence: Synthetic oligonucleotide
aaaataaagttttgttat

SEQ ID NO: 4115 - DNA, 18 bp, Artificial Sequence
  Description of Artificial Sequence: Synthetic oligonucleotide
gactcaaaataaagtttt

SEQ ID NO: 4116 - DNA, 18 bp, Artificial Sequence
  Description of Artificial Sequence: Synthetic oligonucleotide
caatggactcaaaataaa

SEQ ID NO: 4117 - DNA, 18 bp, Artificial Sequence
  Description of Artificial Sequence: Synthetic oligonucleotide
aaaaccaatggactcaaa

SEQ ID NO: 4118 - DNA, 18 bp, Artificial Sequence
  Description of Artificial Sequence: Synthetic oligonucleotide
aaaaaaaaaccaatggac

SEQ ID NO: 4119 - DNA, 18 bp, Artificial Sequence
  Description of Artificial Sequence: Synthetic oligonucleotide
caaacaaaaaaaaaccaa

SEQ ID NO: 4120 - DNA, 18 bp, Artificial Sequence
  Description of Artificial Sequence: Synthetic oligonucleotide
acaaacaaacaaaaaaaa

SEQ ID NO: 4121 - DNA, 18 bp, Artificial Sequence
  Description of Artificial Sequence: Synthetic oligonucleotide
gttctacaaacaaacaaa

SEQ ID NO: 4122 - DNA, 18 bp, Artificial Sequence
  Description of Artificial Sequence: Synthetic oligonucleotide
tataagttctacaaacaa

SEQ ID NO: 4123 - DNA, 18 bp, Artificial Sequence
  Description of Artificial Sequence: Synthetic oligonucleotide
ttgtgtataagttctaca

SEQ ID NO: 4124 - DNA, 18 bp, Artificial Sequence
  Description of Artificial Sequence: Synthetic oligonucleotide
ttgtgttgtgtataagtt

SEQ ID NO: 4125 - DNA, 18 bp, Artificial Sequence
  Description of Artificial Sequence: Synthetic oligonucleotide
aaaccttgtgttgtgtat

SEQ ID NO: 4126 - DNA, 18 bp, Artificial Sequence
  Description of Artificial Sequence: Synthetic oligonucleotide
aataaaatgaaccccata

SEQ ID NO: 4127 - DNA, 18 bp, Artificial Sequence
  Description of Artificial Sequence: Synthetic oligonucleotide
attataataaaatgaacc

SEQ ID NO: 4128 - DNA, 18 bp, Artificial Sequence
  Description of Artificial Sequence: Synthetic oligonucleotide
taatcattataataaaat

SEQ ID NO: 4129 - DNA, 18 bp, Artificial Sequence
  Description of Artificial Sequence: Synthetic oligonucleotide
tcaattaatcattataat

SEQ ID NO: 4130 - DNA, 18 bp, Artificial Sequence
  Description of Artificial Sequence: Synthetic oligonucleotide
tgttatcaattaatcatt

SEQ ID NO: 4131 - DNA, 18 bp, Artificial Sequence
  Description of Artificial Sequence: Synthetic oligonucleotide
ttagttgttatcaattaa

SEQ ID NO: 4132 - DNA, 18 bp, Artificial Sequence
  Description of Artificial Sequence: Synthetic oligonucleotide
gttaattagttgttatca

SEQ ID NO: 4133 - DNA, 18 bp, Artificial Sequence
  Description of Artificial Sequence: Synthetic oligonucleotide
tctatgttaattagttgt

SEQ ID NO: 4134 - DNA, 18 bp, Artificial Sequence
  Description of Artificial Sequence: Synthetic oligonucleotide
caagttctatgttaatta

SEQ ID NO: 4135 - DNA, 18 bp, Artificial Sequence
  Description of Artificial Sequence: Synthetic oligonucleotide
aaggacaagttctatgtt

SEQ ID NO: 4136 - DNA, 18 bp, Artificial Sequence
  Description of Artificial Sequence: Synthetic oligonucleotide
gcaataaggacaagttct

SEQ ID NO: 4137 - DNA, 18 bp, Artificial Sequence
  Description of Artificial Sequence: Synthetic oligonucleotide
ggttggcaataaggacaa

SEQ ID NO: 4138 - DNA, 18 bp, Artificial Sequence
  Description of Artificial Sequence: Synthetic oligonucleotide
actagggttggcaataag

SEQ ID NO: 4139 - DNA, 18 bp, Artificial Sequence
  Description of Artificial Sequence: Synthetic oligonucleotide
ttaaaactagggttggca

SEQ ID NO: 4140 - DNA, 18 bp, Artificial Sequence
  Description of Artificial Sequence: Synthetic oligonucleotide
acattttaaaactagggt

SEQ ID NO: 4141 - DNA, 18 bp, Artificial Sequence
  Description of Artificial Sequence: Synthetic oligonucleotide
gcacaacattttaaaact

SEQ ID NO: 4142 - DNA, 18 bp, Artificial Sequence
  Description of Artificial Sequence: Synthetic oligonucleotide
aataagcacaacatttta

SEQ ID NO: 4143 - DNA, 18 bp, Artificial Sequence
  Description of Artificial Sequence: Synthetic oligonucleotide
aaacaaataagcacaaca

SEQ ID NO: 4144 - DNA, 18 bp, Artificial Sequence
  Description of Artificial Sequence: Synthetic oligonucleotide
aagataaacaaataagca

SEQ ID NO: 4145 - DNA, 18 bp, Artificial Sequence
  Description of Artificial Sequence: Synthetic oligonucleotide
ctcaaaagataaacaaat

SEQ ID NO: 4146 - DNA, 18 bp, Artificial Sequence
  Description of Artificial Sequence: Synthetic oligonucleotide
ggcatctcaaaagataaa

SEQ ID NO: 4147 - DNA, 18 bp, Artificial Sequence
  Description of Artificial Sequence: Synthetic oligonucleotide
aagatggcatctcaaaag

SEQ ID NO: 4148 - DNA, 18 bp, Artificial Sequence
  Description of Artificial Sequence: Synthetic oligonucleotide
ctttaaagatggcatctc

SEQ ID NO: 4149 - DNA, 18 bp, Artificial Sequence
  Description of Artificial Sequence: Synthetic oligonucleotide
ccaaactttaaagatggc

SEQ ID NO: 4150 - DNA, 18 bp, Artificial Sequence
  Description of Artificial Sequence: Synthetic oligonucleotide
tgcctccaaactttaaag

SEQ ID NO: 4151 - DNA, 18 bp, Artificial Sequence
  Description of Artificial Sequence: Synthetic oligonucleotide
cttcatgcctccaaactt

SEQ ID NO: 4152 - DNA, 18 bp, Artificial Sequence
  Description of Artificial Sequence: Synthetic oligonucleotide
agaaacttcatgcctcca

SEQ ID NO: 4153 - DNA, 18 bp, Artificial Sequence
  Description of Artificial Sequence: Synthetic oligonucleotide
aagacagaaacttcatgc

SEQ ID NO: 4154 - DNA, 18 bp, Artificial Sequence
  Description of Artificial Sequence: Synthetic oligonucleotide
tcagcaagacagaaactt

SEQ ID NO: 4155 - DNA, 18 bp, Artificial Sequence
  Description of Artificial Sequence: Synthetic oligonucleotide
tcatatcagcaagacaga

SEQ ID NO: 4156 - DNA, 18 bp, Artificial Sequence
  Description of Artificial Sequence: Synthetic oligonucleotide
tggacgtgggcactaata

SEQ ID NO: 4157 - DNA, 18 bp, Artificial Sequence
  Description of Artificial Sequence: Synthetic oligonucleotide
gcccatggacgtgggcac

SEQ ID NO: 4158 - DNA, 18 bp, Artificial Sequence
  Description of Artificial Sequence: Synthetic oligonucleotide
catatgcccatggacgtg

SEQ ID NO: 4159 - DNA, 18 bp, Artificial Sequence
  Description of Artificial Sequence: Synthetic oligonucleotide
atacacatatgcccatgg

SEQ ID NO: 4160 - DNA, 18 bp, Artificial Sequence
  Description of Artificial Sequence: Synthetic oligonucleotide
cactgatacacatatgcc

SEQ ID NO: 4161 - DNA, 18 bp, Artificial Sequence
  Description of Artificial Sequence: Synthetic oligonucleotide
ctgcacactgatacacat

SEQ ID NO: 4162 - DNA, 18 bp, Artificial Sequence
  Description of Artificial Sequence: Synthetic oligonucleotide
tctaactgcacactgata

SEQ ID NO: 4163 - DNA, 18 bp, Artificial Sequence
  Description of Artificial Sequence: Synthetic oligonucleotide
caccctctaactgcacac

SEQ ID NO: 4164 - DNA, 18 bp, Artificial Sequence
  Description of Artificial Sequence: Synthetic oligonucleotide
gtgcacaccctctaactg

SEQ ID NO: 4165 - DNA, 18 bp, Artificial Sequence
  Description of Artificial Sequence: Synthetic oligonucleotide
tggctgtgcacaccctct

SEQ ID NO: 4166 - DNA, 18 bp, Artificial Sequence
  Description of Artificial Sequence: Synthetic oligonucleotide
gcatgtggctgtgcacac

SEQ ID NO: 4167 - DNA, 18 bp, Artificial Sequence
  Description of Artificial Sequence: Synthetic oligonucleotide
gaagggcatgtggctgtg

SEQ ID NO: 4168 - DNA, 18 bp, Artificial Sequence
  Description of Artificial Sequence: Synthetic oligonucleotide
tggcagaagggcatgtgg

SEQ ID NO: 4169 - DNA, 18 bp, Artificial Sequence
  Description of Artificial Sequence: Synthetic oligonucleotide
aaccttggcagaagggca

SEQ ID NO: 4170 - DNA, 18 bp, Artificial Sequence
  Description of Artificial Sequence: Synthetic oligonucleotide
cccagaaccttggcagaa

SEQ ID NO: 4171 - DNA, 18 bp, Artificial Sequence
  Description of Artificial Sequence: Synthetic oligonucleotide
gagtacccagaaccttgg

SEQ ID NO: 4172 - DNA, 18 bp, Artificial Sequence
  Description of Artificial Sequence: Synthetic oligonucleotide
gaacagagtacccagaac

SEQ ID NO: 4173 - DNA, 18 bp, Artificial Sequence
  Description of Artificial Sequence: Synthetic oligonucleotide
agccagaacagagtaccc

SEQ ID NO: 4174 - DNA, 18 bp, Artificial Sequence
  Description of Artificial Sequence: Synthetic oligonucleotide
gtaggagccagaacagag

SEQ ID NO: 4175 - DNA, 18 bp, Artificial Sequence
  Description of Artificial Sequence: Synthetic oligonucleotide
taagggtaggagccagaa

SEQ ID NO: 4176 - DNA, 18 bp, Artificial Sequence
  Description of Artificial Sequence: Synthetic oligonucleotide
tgggctaagggtaggagc

SEQ ID NO: 4177 - DNA, 18 bp, Artificial Sequence
  Description of Artificial Sequence: Synthetic oligonucleotide
ggatgtgggctaagggta

SEQ ID NO: 4178 - DNA, 18 bp, Artificial Sequence
  Description of Artificial Sequence: Synthetic oligonucleotide
gtggaggatgtgggctaa

SEQ ID NO: 4179 - DNA, 18 bp, Artificial Sequence
  Description of Artificial Sequence: Synthetic oligonucleotide
aggtcgtggaggatgtgg

SEQ ID NO: 4180 - DNA, 18 bp, Artificial Sequence
  Description of Artificial Sequence: Synthetic oligonucleotide
tggccaggtcgtggagga

SEQ ID NO: 4181 - DNA, 18 bp, Artificial Sequence
  Description of Artificial Sequence: Synthetic oligonucleotide
tgccatggccaggtcgtg

SEQ ID NO: 4182 - DNA, 18 bp, Artificial Sequence
  Description of Artificial Sequence: Synthetic oligonucleotide
accactgccatggccagg

SEQ ID NO: 4183 - DNA, 18 bp, Artificial Sequence
  Description of Artificial Sequence: Synthetic oligonucleotide
taaccaccactgccatgg

SEQ ID NO: 4184 - DNA, 18 bp, Artificial Sequence
  Description of Artificial Sequence: Synthetic oligonucleotide
gactgtaaccaccactgc

SEQ ID NO: 4185 - DNA, 18 bp, Artificial Sequence
  Description of Artificial Sequence: Synthetic oligonucleotide
ggaccctcagagacccct

SEQ ID NO: 4186 - DNA, 18 bp, Artificial Sequence
  Description of Artificial Sequence: Synthetic oligonucleotide
gcgggggaccctcagaga

SEQ ID NO: 4187 - DNA, 18 bp, Artificial Sequence
  Description of Artificial Sequence: Synthetic oligonucleotide
tgggtgcgggggaccctc

SEQ ID NO: 4188 - DNA, 18 bp, Artificial Sequence
  Description of Artificial Sequence: Synthetic oligonucleotide
ctggatgggtgcggggga

SEQ ID NO: 4189 - DNA, 18 bp, Artificial Sequence
  Description of Artificial Sequence: Synthetic oligonucleotide
gggtgctggatgggtgcg

SEQ ID NO: 4190 - DNA, 18 bp, Artificial Sequence
  Description of Artificial Sequence: Synthetic oligonucleotide
tgtgtgggtgctggatgg

SEQ ID NO: 4191 - DNA, 18 bp, Artificial Sequence
  Description of Artificial Sequence: Synthetic oligonucleotide
ggctgtgtgtgggtgctg

SEQ ID NO: 4192 - DNA, 18 bp, Artificial Sequence
  Description of Artificial Sequence: Synthetic oligonucleotide
cacatggctgtgtgtggg

SEQ ID NO: 4193 - DNA, 18 bp, Artificial Sequence
  Description of Artificial Sequence: Synthetic oligonucleotide
gcacacacatggctgtgt

SEQ ID NO: 4194 - DNA, 18 bp, Artificial Sequence
  Description of Artificial Sequence: Synthetic oligonucleotide
gtcaagcacacacatggc

SEQ ID NO: 4195 - DNA, 18 bp, Artificial Sequence
  Description of Artificial Sequence: Synthetic oligonucleotide
caagagtcaagcacacac

SEQ ID NO: 4196 - DNA, 18 bp, Artificial Sequence
  Description of Artificial Sequence: Synthetic oligonucleotide
tgacccaagagtcaagca

SEQ ID NO: 4197 - DNA, 18 bp, Artificial Sequence
  Description of Artificial Sequence: Synthetic oligonucleotide
gaggctgacccaagagtc

SEQ ID NO: 4198 - DNA, 18 bp, Artificial Sequence
  Description of Artificial Sequence: Synthetic oligonucleotide
caggagaggctgacccaa

SEQ ID NO: 4199 - DNA, 18 bp, Artificial Sequence
  Description of Artificial Sequence: Synthetic oligonucleotide
agagacaggagaggctga

SEQ ID NO: 4200 - DNA, 18 bp, Artificial Sequence
  Description of Artificial Sequence: Synthetic oligonucleotide
cagagagagacaggagag

SEQ ID NO: 4201 - DNA, 18 bp, Artificial Sequence
  Description of Artificial Sequence: Synthetic oligonucleotide
agggccagagagagacag

SEQ ID NO: 4202 - DNA, 18 bp, Artificial Sequence
  Description of Artificial Sequence: Synthetic oligonucleotide
cgcacagggccagagaga

SEQ ID NO: 4203 - DNA, 18 bp, Artificial Sequence
  Description of Artificial Sequence: Synthetic oligonucleotide
ggggacgcacagggccag

SEQ ID NO: 4204 - DNA, 18 bp, Artificial Sequence
  Description of Artificial Sequence: Synthetic oligonucleotide
tggagggggacgcacagg

SEQ ID NO: 4205 - DNA, 18 bp, Artificial Sequence
  Description of Artificial Sequence: Synthetic oligonucleotide
caccctggagggggacgc

SEQ ID NO: 4206 - DNA, 18 bp, Artificial Sequence
  Description of Artificial Sequence: Synthetic oligonucleotide
gagggcaccctggagggg

SEQ ID NO: 4207 - DNA, 18 bp, Artificial Sequence
  Description of Artificial Sequence: Synthetic oligonucleotide
ggggtgagggcaccctgg

SEQ ID NO: 4208 - DNA, 18 bp, Artificial Sequence
  Description of Artificial Sequence: Synthetic oligonucleotide
gggacggggtgagggcac

SEQ ID NO: 4209 - DNA, 18 bp, Artificial Sequence
  Description of Artificial Sequence: Synthetic oligonucleotide
agatggggacggggtgag

SEQ ID NO: 4210 - DNA, 18 bp, Artificial Sequence
  Description of Artificial Sequence: Synthetic oligonucleotide
gggagagatggggacggg

SEQ ID NO: 4211 - DNA, 18 bp, Artificial Sequence
  Description of Artificial Sequence: Synthetic oligonucleotide
gatgggggagagatgggg

SEQ ID NO: 4212 - DNA, 18 bp, Artificial Sequence
  Description of Artificial Sequence: Synthetic oligonucleotide
tgagggatgggggagaga

SEQ ID NO: 4213 - DNA, 18 bp, Artificial Sequence
  Description of Artificial Sequence: Synthetic oligonucleotide
atggatgagggatggggg

SEQ ID NO: 4214 - DNA, 18 bp, Artificial Sequence
  Description of Artificial Sequence: Synthetic oligonucleotide
gcgagatggatgagggat

SEQ ID NO: 4215 - DNA, 18 bp, Artificial Sequence
  Description of Artificial Sequence: Synthetic oligonucleotide
gcacagcgagatggatga

SEQ ID NO: 4216 - DNA, 18 bp, Artificial Sequence
  Description of Artificial Sequence: Synthetic oligonucleotide
acagtgcacagcgagatg

SEQ ID NO: 4217 - DNA, 18 bp, Artificial Sequence
  Description of Artificial Sequence: Synthetic oligonucleotide
gagaaacagtgcacagcg

SEQ ID NO: 4218 - DNA, 18 bp, Artificial Sequence
  Description of Artificial Sequence: Synthetic oligonucleotide
atatggagaaacagtgca

SEQ ID NO: 4219 - DNA, 18 bp, Artificial Sequence
  Description of Artificial Sequence: Synthetic oligonucleotide
gagagatatggagaaaca

SEQ ID NO: 4220 - DNA, 18 bp, Artificial Sequence
  Description of Artificial Sequence: Synthetic oligonucleotide
agagagagagatatggag

SEQ ID NO: 4221 - DNA, 18 bp, Artificial Sequence
  Description of Artificial Sequence: Synthetic oligonucleotide
gggtgagagagagagata

SEQ ID NO: 4222 - DNA, 18 bp, Artificial Sequence
  Description of Artificial Sequence: Synthetic oligonucleotide
gagaagggtgagagagag

SEQ ID NO: 4223 - DNA, 18 bp, Artificial Sequence
  Description of Artificial Sequence: Synthetic oligonucleotide
gcagagagaagggtgaga

SEQ ID NO: 4224 - DNA, 18 bp, Artificial Sequence
  Description of Artificial Sequence: Synthetic oligonucleotide
ggaaggcagagagaaggg

SEQ ID NO: 4225 - DNA, 18 bp, Artificial Sequence
  Description of Artificial Sequence: Synthetic oligonucleotide
aaaggggaaggcagagag

SEQ ID NO: 4226 - DNA, 18 bp, Artificial Sequence
  Description of Artificial Sequence: Synthetic oligonucleotide
gagagaaaggggaaggca

SEQ ID NO: 4227 - DNA, 18 bp, Artificial Sequence
  Description of Artificial Sequence: Synthetic oligonucleotide
gaacagagagaaagggga

SEQ ID NO: 4228 - DNA, 18 bp, Artificial Sequence
  Description of Artificial Sequence: Synthetic oligonucleotide
acagagaacagagagaaa

SEQ ID NO: 4229 - DNA, 18 bp, Artificial Sequence
  Description of Artificial Sequence: Synthetic oligonucleotide
gcaagacagagaacagag

SEQ ID NO: 4230 - DNA, 18 bp, Artificial Sequence
  Description of Artificial Sequence: Synthetic oligonucleotide
ggggagcaagacagagaa

SEQ ID NO: 4231 - DNA, 18 bp, Artificial Sequence
  Description of Artificial Sequence: Synthetic oligonucleotide
ggggaggggagcaagaca

SEQ ID NO: 4232 - DNA, 18 bp, Artificial Sequence
  Description of Artificial Sequence: Synthetic oligonucleotide
ggagaggggaggggagca

SEQ ID NO: 4233 - DNA, 18 bp, Artificial Sequence
  Description of Artificial Sequence: Synthetic oligonucleotide
gggacggagaggggaggg

SEQ ID NO: 4234 - DNA, 18 bp, Artificial Sequence
  Description of Artificial Sequence: Synthetic oligonucleotide
gaagggggacggagaggg

SEQ ID NO: 4235 - DNA, 18 bp, Artificial Sequence
  Description of Artificial Sequence: Synthetic oligonucleotide
ggacagaagggggacgga

SEQ ID NO: 4236 - DNA, 18 bp, Artificial Sequence
  Description of Artificial Sequence: Synthetic oligonucleotide
gatggggacagaaggggg

SEQ ID NO: 4237 - DNA, 18 bp, Artificial Sequence
  Description of Artificial Sequence: Synthetic oligonucleotide
aggaagatggggacagaa

SEQ ID NO: 4238 - DNA, 18 bp, Artificial Sequence
  Description of Artificial Sequence: Synthetic oligonucleotide
gagagaggaagatgggga

SEQ ID NO: 4239 - DNA, 18 bp, Artificial Sequence
  Description of Artificial Sequence: Synthetic oligonucleotide
aaacagagagaggaagat

SEQ ID NO: 4240 - DNA, 18 bp, Artificial Sequence
  Description of Artificial Sequence: Synthetic oligonucleotide
gcaggaaacagagagagg

SEQ ID NO: 4241 - DNA, 18 bp, Artificial Sequence
  Description of Artificial Sequence: Synthetic oligonucleotide
atgaagcaggaaacagag

SEQ ID NO: 4242 - DNA, 18 bp, Artificial Sequence
  Description of Artificial Sequence: Synthetic oligonucleotide
aagagatgaagcaggaaa

SEQ ID NO: 4243 - DNA, 18 bp, Artificial Sequence
  Description of Artificial Sequence: Synthetic oligonucleotide
gagacaagagatgaagca

SEQ ID NO: 4244 - DNA, 18 bp, Artificial Sequence
  Description of Artificial Sequence: Synthetic oligonucleotide
agagagagacaagagatg

SEQ ID NO: 4245 - DNA, 18 bp, Artificial Sequence
  Description of Artificial Sequence: Synthetic oligonucleotide
ggcaaagagagagacaag

SEQ ID NO: 4246 - DNA, 18 bp, Artificial Sequence
  Description of Artificial Sequence: Synthetic oligonucleotide
atgaaggcaaagagagag

SEQ ID NO: 4247 - DNA, 18 bp, Artificial Sequence
  Description of Artificial Sequence: Synthetic oligonucleotide
aaagtatgaaggcaaaga

SEQ ID NO: 4248 - DNA, 18 bp, Artificial Sequence
  Description of Artificial Sequence: Synthetic oligonucleotide
gagacaaagtatgaaggc

SEQ ID NO: 4249 - DNA, 18 bp, Artificial Sequence
  Description of Artificial Sequence: Synthetic oligonucleotide
gcagtgagacaaagtatg

SEQ ID NO: 4250 - DNA, 18 bp, Artificial Sequence
  Description of Artificial Sequence: Synthetic oligonucleotide
aagaagcagtgagacaaa

SEQ ID NO: 4251 - DNA, 18 bp, Artificial Sequence
  Description of Artificial Sequence: Synthetic oligonucleotide
gagataagaagcagtgag

SEQ ID NO: 4252 - DNA, 18 bp, Artificial Sequence
  Description of Artificial Sequence: Synthetic oligonucleotide
gcaaagagataagaagca

SEQ ID NO: 4253 - DNA, 18 bp, Artificial Sequence
  Description of Artificial Sequence: Synthetic oligonucleotide
gataggcaaagagataag

SEQ ID NO: 4254 - DNA, 18 bp, Artificial Sequence
  Description of Artificial Sequence: Synthetic oligonucleotide
gcagagataggcaaagag

SEQ ID NO: 4255 - DNA, 18 bp, Artificial Sequence
  Description of Artificial Sequence: Synthetic oligonucleotide
cagaggcagagataggca

SEQ ID NO: 4256 - DNA, 18 bp, Artificial Sequence
  Description of Artificial Sequence: Synthetic oligonucleotide
aaagacagaggcagagat

SEQ ID NO: 4257 - DNA, 18 bp, Artificial Sequence
  Description of Artificial Sequence: Synthetic oligonucleotide
aagacaaagacagaggca

SEQ ID NO: 4258 - DNA, 18 bp, Artificial Sequence
  Description of Artificial Sequence: Synthetic oligonucleotide
agagaaagacaaagacag

SEQ ID NO: 4259 - DNA, 18 bp, Artificial Sequence
  Description of Artificial Sequence: Synthetic oligonucleotide
gagccagagaaagacaaa

SEQ ID NO: 4260 - DNA, 18 bp, Artificial Sequence
  Description of Artificial Sequence: Synthetic oligonucleotide
agagcgagccagagaaag

SEQ ID NO: 4261 - DNA, 18 bp, Artificial Sequence
  Description of Artificial Sequence: Synthetic oligonucleotide
gagagagagcgagccaga

SEQ ID NO: 4262 - DNA, 18 bp, Artificial Sequence
  Description of Artificial Sequence: Synthetic oligonucleotide
aaagggagagagagcgag

SEQ ID NO: 4263 - DNA, 18 bp, Artificial Sequence
  Description of Artificial Sequence: Synthetic oligonucleotide
aagccaaagggagagaga

SEQ ID NO: 4264 - DNA, 18 bp, Artificial Sequence
  Description of Artificial Sequence: Synthetic oligonucleotide
agagaaagccaaagggag

SEQ ID NO: 4265 - DNA, 18 bp, Artificial Sequence
  Description of Artificial Sequence: Synthetic oligonucleotide
cggagagagaaagccaaa

SEQ ID NO: 4266 - DNA, 18 bp, Artificial Sequence
  Description of Artificial Sequence: Synthetic oligonucleotide
agagacggagagagaaag

SEQ ID NO: 4267 - DNA, 18 bp, Artificial Sequence
  Description of Artificial Sequence: Synthetic oligonucleotide
cagagagagacggagaga

SEQ ID NO: 4268 - DNA, 18 bp, Artificial Sequence
  Description of Artificial Sequence: Synthetic oligonucleotide
tgagccagagagagacgg

SEQ ID NO: 4269 - DNA, 18 bp, Artificial Sequence
  Description of Artificial Sequence: Synthetic oligonucleotide
aacagtgagccagagaga

SEQ ID NO: 4270 - DNA, 18 bp, Artificial Sequence
  Description of Artificial Sequence: Synthetic oligonucleotide
agagaaacagtgagccag

SEQ ID NO: 4271 - DNA, 18 bp, Artificial Sequence
  Description of Artificial Sequence: Synthetic oligonucleotide
gagagagagaaacagtga

SEQ ID NO: 4272 - DNA, 18 bp, Artificial Sequence
  Description of Artificial Sequence: Synthetic oligonucleotide
aaagcgagagagagaaac

SEQ ID NO: 4273 - DNA, 18 bp, Artificial Sequence
  Description of Artificial Sequence: Synthetic oligonucleotide
gcaagaaagcgagagaga

SEQ ID NO: 4274 - DNA, 18 bp, Artificial Sequence
  Description of Artificial Sequence: Synthetic oligonucleotide
agacagcaagaaagcgag

SEQ ID NO: 4275 - DNA, 18 bp, Artificial Sequence
  Description of Artificial Sequence: Synthetic oligonucleotide
gcgagagacagcaagaaa

SEQ ID NO: 4276 - DNA, 18 bp, Artificial Sequence
  Description of Artificial Sequence: Synthetic oligonucleotide
agagagcgagagacagca

SEQ ID NO: 4277 - DNA, 18 bp, Artificial Sequence
  Description of Artificial Sequence: Synthetic oligonucleotide
gcgagagagagcgagaga

SEQ ID NO: 4278 - DNA, 18 bp, Artificial Sequence
  Description of Artificial Sequence: Synthetic oligonucleotide
agagagcgagagagagcg

SEQ ID NO: 4279 - DNA, 18 bp, Artificial Sequence
  Description of Artificial Sequence: Synthetic oligonucleotide
ggaacagagagcgagaga

SEQ ID NO: 4280 - DNA, 18 bp, Artificial Sequence
  Description of Artificial Sequence: Synthetic oligonucleotide
gaagtggaacagagagcg

SEQ ID NO: 4281 - DNA, 18 bp, Artificial Sequence
  Description of Artificial Sequence: Synthetic oligonucleotide
atggggaagtggaacaga

SEQ ID NO: 4282 - DNA, 18 bp, Artificial Sequence
  Description of Artificial Sequence: Synthetic oligonucleotide
caaagatggggaagtgga

SEQ ID NO: 4283 - DNA, 18 bp, Artificial Sequence
  Description of Artificial Sequence: Synthetic oligonucleotide
gcaggcaaagatggggaa

SEQ ID NO: 4284 - DNA, 18 bp, Artificial Sequence
  Description of Artificial Sequence: Synthetic oligonucleotide
ggatggcaggcaaagatg

SEQ ID NO: 4285 - DNA, 18 bp, Artificial Sequence
  Description of Artificial Sequence: Synthetic oligonucleotide
gtgggggatggcaggcaa

SEQ ID NO: 4286 - DNA, 18 bp, Artificial Sequence
  Description of Artificial Sequence: Synthetic oligonucleotide
gtagggtgggggatggca

SEQ ID NO: 4287 - DNA, 18 bp, Artificial Sequence
  Description of Artificial Sequence: Synthetic oligonucleotide
ggctggtagggtggggga

SEQ ID NO: 4288 - DNA, 18 bp, Artificial Sequence
  Description of Artificial Sequence: Synthetic oligonucleotide
ggtgtggctggtagggtg

SEQ ID NO: 4289 - DNA, 18 bp, Artificial Sequence
  Description of Artificial Sequence: Synthetic oligonucleotide
cgcctggtgtggctggta

SEQ ID NO: 4290 - DNA, 18 bp, Artificial Sequence
  Description of Artificial Sequence: Synthetic oligonucleotide
ggctgcgcctggtgtggc

SEQ ID NO: 4291 - DNA, 18 bp, Artificial Sequence
  Description of Artificial Sequence: Synthetic oligonucleotide
agaggggctgcgcctggt

SEQ ID NO: 4292 - DNA, 18 bp, Artificial Sequence
  Description of Artificial Sequence: Synthetic oligonucleotide
gtcacagaggggctgcgc

SEQ ID NO: 4293 - DNA, 18 bp, Artificial Sequence
  Description of Artificial Sequence: Synthetic oligonucleotide
ggctggtcacagaggggc

SEQ ID NO: 4294 - DNA, 18 bp, Artificial Sequence
  Description of Artificial Sequence: Synthetic oligonucleotide
aaggaggctggtcacaga

SEQ ID NO: 4295 - DNA, 18 bp, Artificial Sequence
  Description of Artificial Sequence: Synthetic oligonucleotide
aggggaaggaggctggtc

SEQ ID NO: 4296 - DNA, 18 bp, Artificial Sequence
  Description of Artificial Sequence: Synthetic oligonucleotide
gattgaggggaaggaggc

SEQ ID NO: 4297 - DNA, 18 bp, Artificial Sequence
  Description of Artificial Sequence: Synthetic oligonucleotide
agggggattgaggggaag

SEQ ID NO: 4298 - DNA, 18 bp, Artificial Sequence
  Description of Artificial Sequence: Synthetic oligonucleotide
gcagcagggggattgagg

SEQ ID NO: 4299 - DNA, 18 bp, Artificial Sequence
  Description of Artificial Sequence: Synthetic oligonucleotide
ggagggcagcagggggat

SEQ ID NO: 4300 - DNA, 18 bp, Artificial Sequence
  Description of Artificial Sequence: Synthetic oligonucleotide
tggaggggtgtgggagag

SEQ ID NO: 4301 - DNA, 18 bp, Artificial Sequence
  Description of Artificial Sequence: Synthetic oligonucleotide
agagatggaggggtgtgg

SEQ ID NO: 4302 - DNA, 18 bp, Artificial Sequence
  Description of Artificial Sequence: Synthetic oligonucleotide
gggagagagatggagggg

SEQ ID NO: 4303 - DNA, 18 bp, Artificial Sequence
  Description of Artificial Sequence: Synthetic oligonucleotide
cacgtgggagagagatgg

SEQ ID NO: 4304 - DNA, 18 bp, Artificial Sequence
  Description of Artificial Sequence: Synthetic oligonucleotide
agagacacgtgggagaga

SEQ ID NO: 4305 - DNA, 18 bp, Artificial Sequence
  Description of Artificial Sequence: Synthetic oligonucleotide
aggggagagacacgtggg

SEQ ID NO: 4306 - DNA, 18 bp, Artificial Sequence
  Description of Artificial Sequence: Synthetic oligonucleotide
aggtgaggggagagacac

SEQ ID NO: 4307 - DNA, 18 bp, Artificial Sequence
  Description of Artificial Sequence: Synthetic oligonucleotide
agagaaggtgaggggaga

SEQ ID NO: 4308 - DNA, 18 bp, Artificial Sequence
  Description of Artificial Sequence: Synthetic oligonucleotide
gggggagagaaggtgagg

SEQ ID NO: 4309 - DNA, 18 bp, Artificial Sequence
  Description of Artificial Sequence: Synthetic oligonucleotide
atggagggggagagaagg

SEQ ID NO: 4310 - DNA, 18 bp, Artificial Sequence
  Description of Artificial Sequence: Synthetic oligonucleotide
gagaaatggagggggaga

SEQ ID NO: 4311 - DNA, 18 bp, Artificial Sequence
  Description of Artificial Sequence: Synthetic oligonucleotide
ggagagagaaatggaggg

SEQ ID NO: 4312 - DNA, 18 bp, Artificial Sequence
  Description of Artificial Sequence: Synthetic oligonucleotide
attagggagagagaaatg

SEQ ID NO: 4313 - DNA, 18 bp, Artificial Sequence
  Description of Artificial Sequence: Synthetic oligonucleotide
gacagattagggagagag

SEQ ID NO: 4314 - DNA, 18 bp, Artificial Sequence
  Description of Artificial Sequence: Synthetic oligonucleotide
gaacagacagattaggga

SEQ ID NO: 4315 - DNA, 18 bp, Artificial Sequence
  Description of Artificial Sequence: Synthetic oligonucleotide
agagggaacagacagatt

SEQ ID NO: 4316 - DNA, 18 bp, Artificial Sequence
  Description of Artificial Sequence: Synthetic oligonucleotide
atggcagagggaacagac

SEQ ID NO: 4317 - DNA, 18 bp, Artificial Sequence
  Description of Artificial Sequence: Synthetic oligonucleotide
gggccatggcagagggaa

SEQ ID NO: 4318 - DNA, 18 bp, Artificial Sequence
  Description of Artificial Sequence: Synthetic oligonucleotide
gaagggggccatggcaga

SEQ ID NO: 4319 - DNA, 18 bp, Artificial Sequence
  Description of Artificial Sequence: Synthetic oligonucleotide
ttgaagaagggggccatg

SEQ ID NO: 4320 - DNA, 18 bp, Artificial Sequence
  Description of Artificial Sequence: Synthetic oligonucleotide
gctgcttgaagaaggggg

SEQ ID NO: 4321 - DNA, 18 bp, Artificial Sequence
  Description of Artificial Sequence: Synthetic oligonucleotide
gggaggctgcttgaagaa

SEQ ID NO: 4322 - DNA, 18 bp, Artificial Sequence
  Description of Artificial Sequence: Synthetic oligonucleotide
aagatgggaggctgcttg

SEQ ID NO: 4323 - DNA, 18 bp, Artificial Sequence
  Description of Artificial Sequence: Synthetic oligonucleotide
ggagcaagatgggaggct

SEQ ID NO: 4324 - DNA, 18 bp, Artificial Sequence
  Description of Artificial Sequence: Synthetic oligonucleotide
ccgcaggagcaagatggg

SEQ ID NO: 4325 - DNA, 18 bp, Artificial Sequence
  Description of Artificial Sequence: Synthetic oligonucleotide
agggaccgcaggagcaag

SEQ ID NO: 4326 - DNA, 18 bp, Artificial Sequence
  Description of Artificial Sequence: Synthetic oligonucleotide
gaaggagggaccgcagga

SEQ ID NO: 4327 - DNA, 18 bp, Artificial Sequence
  Description of Artificial Sequence: Synthetic oligonucleotide
acagggaaggagggaccg

SEQ ID NO: 4328 - DNA, 18 bp, Artificial Sequence
  Description of Artificial Sequence: Synthetic oligonucleotide
gagagacagggaaggagg

SEQ ID NO: 4329 - DNA, 18 bp, Artificial Sequence
  Description of Artificial Sequence: Synthetic oligonucleotide
ggtgagagagacagggaa

SEQ ID NO: 4330 - DNA, 18 bp, Artificial Sequence
  Description of Artificial Sequence: Synthetic oligonucleotide
acaggggtgagagagaca

SEQ ID NO: 4331 - DNA, 18 bp, Artificial Sequence
  Description of Artificial Sequence: Synthetic oligonucleotide
tggaaacaggggtgagag

SEQ ID NO: 4332 - DNA, 18 bp, Artificial Sequence
  Description of Artificial Sequence: Synthetic oligonucleotide
gggtgtggaaacaggggt

SEQ ID NO: 4333 - DNA, 18 bp, Artificial Sequence
  Description of Artificial Sequence: Synthetic oligonucleotide
ggtgagggtgtggaaaca

SEQ ID NO: 4334 - DNA, 18 bp, Artificial Sequence
  Description of Artificial Sequence: Synthetic oligonucleotide
taggaggtgagggtgtgg

SEQ ID NO: 4335 - DNA, 18 bp, Artificial Sequence
  Description of Artificial Sequence: Synthetic oligonucleotide
ggtggtaggaggtgaggg

SEQ ID NO: 4336 - DNA, 18 bp, Artificial Sequence
  Description of Artificial Sequence: Synthetic oligonucleotide
aggggggtggtaggaggt

SEQ ID NO: 4337 - DNA, 18 bp, Artificial Sequence
  Description of Artificial Sequence: Synthetic oligonucleotide
tgctgaggggggtggtag

SEQ ID NO: 4338 - DNA, 18 bp, Artificial Sequence
  Description of Artificial Sequence: Synthetic oligonucleotide
gaacatgctgaggggggt

SEQ ID NO: 4339 - DNA, 18 bp, Artificial Sequence
  Description of Artificial Sequence: Synthetic oligonucleotide
ccagggaacatgctgagg

SEQ ID NO: 4340 - DNA, 18 bp, Artificial Sequence
  Description of Artificial Sequence: Synthetic oligonucleotide
agcttccagggaacatgc

SEQ ID NO: 4341 - DNA, 18 bp, Artificial Sequence
  Description of Artificial Sequence: Synthetic oligonucleotide
ccctcagcttccagggaa

SEQ ID NO: 4342 - DNA, 18 bp, Artificial Sequence
  Description of Artificial Sequence: Synthetic oligonucleotide
agagaccctcagcttcca

SEQ ID NO: 4343 - DNA, 18 bp, Artificial Sequence
  Description of Artificial Sequence: Synthetic oligonucleotide
gccccagagaccctcagc

SEQ ID NO: 4344 - DNA, 18 bp, Artificial Sequence
  Description of Artificial Sequence: Synthetic oligonucleotide
actgagccccagagaccc

SEQ ID NO: 4345 - DNA, 18 bp, Artificial Sequence
  Description of Artificial Sequence: Synthetic oligonucleotide
ccgggactgagccccaga

SEQ ID NO: 4346 - DNA, 18 bp, Artificial Sequence
  Description of Artificial Sequence: Synthetic oligonucleotide
agagaccgggactgagcc

SEQ ID NO: 4347 - DNA, 18 bp, Artificial Sequence
  Description of Artificial Sequence: Synthetic oligonucleotide
aagagagagaccgggact

SEQ ID NO: 4348 - DNA, 18 bp, Artificial Sequence
  Description of Artificial Sequence: Synthetic oligonucleotide
agagaaagagagagaccg

SEQ ID NO: 4349 - DNA, 18 bp, Artificial Sequence
  Description of Artificial Sequence: Synthetic oligonucleotide
gagagagagaaagagaga

SEQ ID NO: 4350 - DNA, 18 bp, Artificial Sequence
  Description of Artificial Sequence: Synthetic oligonucleotide
agagagagagagagaaag

SEQ ID NO: 4351 - DNA, 18 bp, Artificial Sequence
  Description of Artificial Sequence: Synthetic oligonucleotide
gacagagagagagagaga

SEQ ID NO: 4352 - DNA, 18 bp, Artificial Sequence
  Description of Artificial Sequence: Synthetic oligonucleotide
ggggagacagagagagag

SEQ ID NO: 4353 - DNA, 18 bp, Artificial Sequence
  Description of Artificial Sequence: Synthetic oligonucleotide
gaggctgtttacagtaag

SEQ ID NO: 4354 - DNA, 18 bp, Artificial Sequence
  Description of Artificial Sequence: Synthetic oligonucleotide
ctgaggaggctgtttaca

SEQ ID NO: 4355 - DNA, 18 bp, Artificial Sequence
  Description of Artificial Sequence: Synthetic oligonucleotide
gactactgaggaggctgt

SEQ ID NO: 4356 - DNA, 18 bp, Artificial Sequence
  Description of Artificial Sequence: Synthetic oligonucleotide
tgactgactactgaggag

SEQ ID NO: 4357 - DNA, 18 bp, Artificial Sequence
  Description of Artificial Sequence: Synthetic oligonucleotide
actactgactgactactg

SEQ ID NO: 4358 - DNA, 18 bp, Artificial Sequence
  Description of Artificial Sequence: Synthetic oligonucleotide
tctctactactgactgac

SEQ ID NO: 4359 - DNA, 18 bp, Artificial Sequence
  Description of Artificial Sequence: Synthetic oligonucleotide
ttctgtctctactactga

SEQ ID NO: 4360 - DNA, 18 bp, Artificial Sequence
  Description of Artificial Sequence: Synthetic oligonucleotide
ttggattctgtctctact

SEQ ID NO: 4361 - DNA, 18 bp, Artificial Sequence
  Description of Artificial Sequence: Synthetic oligonucleotide
tgggtttggattctgtct

SEQ ID NO: 4362 - DNA, 18 bp, Artificial Sequence
  Description of Artificial Sequence: Synthetic oligonucleotide
agacctgggtttggattc

SEQ ID NO: 4363 - DNA, 18 bp, Artificial Sequence
  Description of Artificial Sequence: Synthetic oligonucleotide
gaatcagacctgggtttg

SEQ ID NO: 4364 - DNA, 18 bp, Artificial Sequence
  Description of Artificial Sequence: Synthetic oligonucleotide
ctttggaatcagacctgg

SEQ ID NO: 4365 - DNA, 18 bp, Artificial Sequence
  Description of Artificial Sequence: Synthetic oligonucleotide
agaggctttggaatcaga

SEQ ID NO: 4366 - DNA, 18 bp, Artificial Sequence
  Description of Artificial Sequence: Synthetic oligonucleotide
aaaacagaggctttggaa

SEQ ID NO: 4367 - DNA, 18 bp, Artificial Sequence
  Description of Artificial Sequence: Synthetic oligonucleotide
gaaacaaaacagaggctt

SEQ ID NO: 4368 - DNA, 18 bp, Artificial Sequence
  Description of Artificial Sequence: Synthetic oligonucleotide
aaacagaaacaaaacaga

SEQ ID NO: 4369 - DNA, 18 bp, Artificial Sequence
  Description of Artificial Sequence: Synthetic oligonucleotide
acagaaaacagaaacaaa

SEQ ID NO: 4370 - DNA, 18 bp, Artificial Sequence
  Description of Artificial Sequence: Synthetic oligonucleotide
aacaaacagaaaacagaa

SEQ ID NO: 4371 - DNA, 18 bp, Artificial Sequence
  Description of Artificial Sequence: Synthetic oligonucleotide
aaaaaaacaaacagaaaa

SEQ ID NO: 4372 - DNA, 18 bp, Artificial Sequence
  Description of Artificial Sequence: Synthetic oligonucleotide
ctcaaaaaaaaacaaaca

SEQ ID NO: 4373 - DNA, 18 bp, Artificial Sequence
  Description of Artificial Sequence: Synthetic oligonucleotide
cctgtctcaaaaaaaaac

SEQ ID NO: 4374 - DNA, 18 bp, Artificial Sequence
  Description of Artificial Sequence: Synthetic oligonucleotide
aagaccctgtctcaaaaa

SEQ ID NO: 4375 - DNA, 18 bp, Artificial Sequence
  Description of Artificial Sequence: Synthetic oligonucleotide
agagcaagaccctgtctc

SEQ ID NO: 4376 - DNA, 18 bp, Artificial Sequence
  Description of Artificial Sequence: Synthetic oligonucleotide
gtgacagagcaagaccct

SEQ ID NO: 4377 - DNA, 18 bp, Artificial Sequence
  Description of Artificial Sequence: Synthetic oligonucleotide
cctgagtgacagagcaag

SEQ ID NO: 4378 - DNA, 18 bp, Artificial Sequence
  Description of Artificial Sequence: Synthetic oligonucleotide
tccatcctgagtgacaga

SEQ ID NO: 4379 - DNA, 18 bp, Artificial Sequence
  Description of Artificial Sequence: Synthetic oligonucleotide
tgcattccatcctgagtg

SEQ ID NO: 4380 - DNA, 18 bp, Artificial Sequence
  Description of Artificial Sequence: Synthetic oligonucleotide
actactgcattccatcct

SEQ ID NO: 4381 - DNA, 18 bp, Artificial Sequence
  Description of Artificial Sequence: Synthetic oligonucleotide
acaacactactgcattcc

SEQ ID NO: 4382 - DNA, 18 bp, Artificial Sequence
  Description of Artificial Sequence: Synthetic oligonucleotide
tgatcacaacactactgc

SEQ ID NO: 4383 - DNA, 18 bp, Artificial Sequence
  Description of Artificial Sequence: Synthetic oligonucleotide
agctatgatcacaacact

SEQ ID NO: 4384 - DNA, 18 bp, Artificial Sequence
  Description of Artificial Sequence: Synthetic oligonucleotide
cagtaagctatgatcaca

SEQ ID NO: 4385 - DNA, 18 bp, Artificial Sequence
  Description of Artificial Sequence: Synthetic oligonucleotide
ggctgcagtaagctatga

SEQ ID NO: 4386 - DNA, 18 bp, Artificial Sequence
  Description of Artificial Sequence: Synthetic oligonucleotide
ttcgaggctgcagtaagc

SEQ ID NO: 4387 - DNA, 18 bp, Artificial Sequence
  Description of Artificial Sequence: Synthetic oligonucleotide
aggagttcgaggctgcag

SEQ ID NO: 4388 - DNA, 18 bp, Artificial Sequence
  Description of Artificial Sequence: Synthetic oligonucleotide
agcccaggagttcgaggc

SEQ ID NO: 4389 - DNA, 18 bp, Artificial Sequence
  Description of Artificial Sequence: Synthetic oligonucleotide
atttgagcccaggagttc

SEQ ID NO: 4390 - DNA, 18 bp, Artificial Sequence
  Description of Artificial Sequence: Synthetic oligonucleotide
ggatcatttgagcccagg

SEQ ID NO: 4391 - DNA, 18 bp, Artificial Sequence
  Description of Artificial Sequence: Synthetic oligonucleotide
gctttggatcatttgagc

SEQ ID NO: 4392 - DNA, 18 bp, Artificial Sequence
  Description of Artificial Sequence: Synthetic oligonucleotide
ccaatgctttggatcatt

SEQ ID NO: 4393 - DNA, 18 bp, Artificial Sequence
  Description of Artificial Sequence: Synthetic oligonucleotide
taatcccaatgctttgga

SEQ ID NO: 4394 - DNA, 18 bp, Artificial Sequence
  Description of Artificial Sequence: Synthetic oligonucleotide
gcctgtaatcccaatgct

SEQ ID NO: 4395 - DNA, 18 bp, Artificial Sequence
  Description of Artificial Sequence: Synthetic oligonucleotide
ctcatgcctgtaatccca

SEQ ID NO: 4396 - DNA, 18 bp, Artificial Sequence
  Description of Artificial Sequence: Synthetic oligonucleotide
ggtggctcatgcctgtaa

SEQ ID NO: 4397 - DNA, 18 bp, Artificial Sequence
  Description of Artificial Sequence: Synthetic oligonucleotide
ggtatggtggctcatgcc

SEQ ID NO: 4398 - DNA, 18 bp, Artificial Sequence
  Description of Artificial Sequence: Synthetic oligonucleotide
ggctgggtatggtggctc

SEQ ID NO: 4399 - DNA, 18 bp, Artificial Sequence
  Description of Artificial Sequence: Synthetic oligonucleotide
tggctggctgggtatggt

SEQ ID NO: 4400 - DNA, 18 bp, Artificial Sequence
  Description of Artificial Sequence: Synthetic oligonucleotide
ggctttggctggctgggt

SEQ ID NO: 4401 - DNA, 18 bp, Artificial Sequence
  Description of Artificial Sequence: Synthetic oligonucleotide
acagaggctttggctggc

SEQ ID NO: 4402 - DNA, 18 bp, Artificial Sequence
  Description of Artificial Sequence: Synthetic oligonucleotide
caaaaacagaggctttgg

SEQ ID NO: 4403 - DNA, 18 bp, Artificial Sequence
  Description of Artificial Sequence: Synthetic oligonucleotide
atgggcaaaaacagaggc

SEQ ID NO: 4404 - DNA, 18 bp, Artificial Sequence
  Description of Artificial Sequence: Synthetic oligonucleotide
gtgatatgggcaaaaaca

SEQ ID NO: 4405 - DNA, 18 bp, Artificial Sequence
  Description of Artificial Sequence: Synthetic oligonucleotide
tgagtgtgatatgggcaa

SEQ ID NO: 4406 - DNA, 18 bp, Artificial Sequence
  Description of Artificial Sequence: Synthetic oligonucleotide
gagaatgagtgtgatatg

SEQ ID NO: 4407 - DNA, 18 bp, Artificial Sequence
  Description of Artificial Sequence: Synthetic oligonucleotide
tggaggagaatgagtgtg

SEQ ID NO: 4408 - DNA, 18 bp, Artificial Sequence
  Description of Artificial Sequence: Synthetic oligonucleotide
tcttctggaggagaatga

SEQ ID NO: 4409 - DNA, 18 bp, Artificial Sequence
  Description of Artificial Sequence: Synthetic oligonucleotide
ccttgtcttctggaggag

SEQ ID NO: 4410 - DNA, 18 bp, Artificial Sequence
  Description of Artificial Sequence: Synthetic oligonucleotide
atggcccttgtcttctgg

SEQ ID NO: 4411 - DNA, 18 bp, Artificial Sequence
  Description of Artificial Sequence: Synthetic oligonucleotide
cagatatggcccttgtct

SEQ ID NO: 4412 - DNA, 18 bp, Artificial Sequence
  Description of Artificial Sequence: Synthetic oligonucleotide
ttaaccagatatggccct

SEQ ID NO: 4413 - DNA, 18 bp, Artificial Sequence
  Description of Artificial Sequence: Synthetic oligonucleotide
ggagattaaccagatatg

SEQ ID NO: 4414 - DNA, 18 bp, Artificial Sequence
  Description of Artificial Sequence: Synthetic oligonucleotide
cagcaggagattaaccag

SEQ ID NO: 4415 - DNA, 18 bp, Artificial Sequence
  Description of Artificial Sequence: Synthetic oligonucleotide
tggaacagcaggagatta

SEQ ID NO: 4416 - DNA, 18 bp, Artificial Sequence
  Description of Artificial Sequence: Synthetic oligonucleotide
ttgagtggaacagcagga

SEQ ID NO: 4417 - DNA, 18 bp, Artificial Sequence
  Description of Artificial Sequence: Synthetic oligonucleotide
aggcattgagtggaacag

SEQ ID NO: 4418 - DNA, 18 bp, Artificial Sequence
  Description of Artificial Sequence: Synthetic oligonucleotide
gagccaggcattgagtgg

SEQ ID NO: 4419 - DNA, 18 bp, Artificial Sequence
  Description of Artificial Sequence: Synthetic oligonucleotide
atgatgagccaggcattg

SEQ ID NO: 4420 - DNA, 18 bp, Artificial Sequence
  Description of Artificial Sequence: Synthetic oligonucleotide
cacctatgatgagccagg

SEQ ID NO: 4421 - DNA, 18 bp, Artificial Sequence
  Description of Artificial Sequence: Synthetic oligonucleotide
ctgcccacctatgatgag

SEQ ID NO: 4422 - DNA, 18 bp, Artificial Sequence
  Description of Artificial Sequence: Synthetic oligonucleotide
atttactgcccacctatg

SEQ ID NO: 4423 - DNA, 18 bp, Artificial Sequence
  Description of Artificial Sequence: Synthetic oligonucleotide
taagcatttactgcccac

SEQ ID NO: 4424 - DNA, 18 bp, Artificial Sequence
  Description of Artificial Sequence: Synthetic oligonucleotide
actgataagcatttactg

SEQ ID NO: 4425 - DNA, 18 bp, Artificial Sequence
  Description of Artificial Sequence: Synthetic oligonucleotide
tactcactgataagcatt

SEQ ID NO: 4426 - DNA, 18 bp, Artificial Sequence
  Description of Artificial Sequence: Synthetic oligonucleotide
ccagttactcactgataa

SEQ ID NO: 4427 - DNA, 18 bp, Artificial Sequence
  Description of Artificial Sequence: Synthetic oligonucleotide
gttctccagttactcact

SEQ ID NO: 4428 - DNA, 18 bp, Artificial Sequence
  Description of Artificial Sequence: Synthetic oligonucleotide
atgttgttctccagttac

SEQ ID NO: 4429 - DNA, 18 bp, Artificial Sequence
  Description of Artificial Sequence: Synthetic oligonucleotide
gtcaaaggacagaagggc

SEQ ID NO: 4430 - DNA, 18 bp, Artificial Sequence
  Description of Artificial Sequence: Synthetic oligonucleotide
cagaagtcaaaggacaga

SEQ ID NO: 4431 - DNA, 18 bp, Artificial Sequence
  Description of Artificial Sequence: Synthetic oligonucleotide
aaagccagaagtcaaagg

SEQ ID NO: 4432 - DNA, 18 bp, Artificial Sequence
  Description of Artificial Sequence: Synthetic oligonucleotide
caccgaaagccagaagtc

SEQ ID NO: 4433 - DNA, 18 bp, Artificial Sequence
  Description of Artificial Sequence: Synthetic oligonucleotide
aaagccaccgaaagccag

SEQ ID NO: 4434 - DNA, 18 bp, Artificial Sequence
  Description of Artificial Sequence: Synthetic oligonucleotide
ccagcaaagccaccgaaa

SEQ ID NO: 4435 - DNA, 18 bp, Artificial Sequence
  Description of Artificial Sequence: Synthetic oligonucleotide
cagggccagcaaagccac

SEQ ID NO: 4436 - DNA, 18 bp, Artificial Sequence
  Description of Artificial Sequence: Synthetic oligonucleotide
gttggcagggccagcaaa

SEQ ID NO: 4437 - DNA, 18 bp, Artificial Sequence
  Description of Artificial Sequence: Synthetic oligonucleotide
gaccagttggcagggcca

SEQ ID NO: 4438 - DNA, 18 bp, Artificial Sequence
  Description of Artificial Sequence: Synthetic oligonucleotide
aggacgaccagttggcag

SEQ ID NO: 4439 - DNA, 18 bp, Artificial Sequence
  Description of Artificial Sequence: Synthetic oligonucleotide
gggaaaggacgaccagtt

SEQ ID NO: 4440 - DNA, 18 bp, Artificial Sequence
  Description of Artificial Sequence: Synthetic oligonucleotide
gccgagggaaaggacgac

SEQ ID NO: 4441 - DNA, 18 bp, Artificial Sequence
  Description of Artificial Sequence: Synthetic oligonucleotide
caggagccgagggaaagg

SEQ ID NO: 4442 - DNA, 18 bp, Artificial Sequence
  Description of Artificial Sequence: Synthetic oligonucleotide
tggggcaggagccgaggg

SEQ ID NO: 4443 - DNA, 18 bp, Artificial Sequence
  Description of Artificial Sequence: Synthetic oligonucleotide
gggcttggggcaggagcc

SEQ ID NO: 4444 - DNA, 18 bp, Artificial Sequence
  Description of Artificial Sequence: Synthetic oligonucleotide
gggctgggcttggggcag

SEQ ID NO: 4445 - DNA, 18 bp, Artificial Sequence
  Description of Artificial Sequence: Synthetic oligonucleotide
atgatgggctgggcttgg

SEQ ID NO: 4446 - DNA, 18 bp, Artificial Sequence
  Description of Artificial Sequence: Synthetic oligonucleotide
tgcccatgatgggctggg

SEQ ID NO: 4447 - DNA, 18 bp, Artificial Sequence
  Description of Artificial Sequence: Synthetic oligonucleotide
cggagtgcccatgatggg

SEQ ID NO: 4448 - DNA, 18 bp, Artificial Sequence
  Description of Artificial Sequence: Synthetic oligonucleotide
ggggacggagtgcccatg

SEQ ID NO: 4449 - DNA, 18 bp, Artificial Sequence
  Description of Artificial Sequence: Synthetic oligonucleotide
cctgcggggacggagtgc

SEQ ID NO: 4450 - DNA, 18 bp, Artificial Sequence
  Description of Artificial Sequence: Synthetic oligonucleotide
gggtccctgcggggacgg

SEQ ID NO: 4451 - DNA, 18 bp, Artificial Sequence
  Description of Artificial Sequence: Synthetic oligonucleotide
caccagggtccctgcggg

SEQ ID NO: 4452 - DNA, 18 bp, Artificial Sequence
  Description of Artificial Sequence: Synthetic oligonucleotide
acctccaccagggtccct

SEQ ID NO: 4453 - DNA, 18 bp, Artificial Sequence
  Description of Artificial Sequence: Synthetic oligonucleotide
tgcacacctccaccaggg

SEQ ID NO: 4454 - DNA, 18 bp, Artificial Sequence
  Description of Artificial Sequence: Synthetic oligonucleotide
gacgctgcacacctccac

SEQ ID NO: 4455 - DNA, 18 bp, Artificial Sequence
  Description of Artificial Sequence: Synthetic oligonucleotide
cttgtgacgctgcacacc

SEQ ID NO: 4456 - DNA, 18 bp, Artificial Sequence
  Description of Artificial Sequence: Synthetic oligonucleotide
cgactcttgtgacgctgc

SEQ ID NO: 4457 - DNA, 18 bp, Artificial Sequence
  Description of Artificial Sequence: Synthetic oligonucleotide
caagccgactcttgtgac

SEQ ID NO: 4458 - DNA, 18 bp, Artificial Sequence
  Description of Artificial Sequence: Synthetic oligonucleotide
cttcccaagccgactctt

SEQ ID NO: 4459 - DNA, 18 bp, Artificial Sequence
  Description of Artificial Sequence: Synthetic oligonucleotide
cgctgcttcccaagccga

SEQ ID NO: 4460 - DNA, 18 bp, Artificial Sequence
  Description of Artificial Sequence: Synthetic oligonucleotide
tgggccgctgcttcccaa

SEQ ID NO: 4461 - DNA, 18 bp, Artificial Sequence
  Description of Artificial Sequence: Synthetic oligonucleotide
cgggatgggccgctgctt

SEQ ID NO: 4462 - DNA, 18 bp, Artificial Sequence
  Description of Artificial Sequence: Synthetic oligonucleotide
atggacgggatgggccgc

SEQ ID NO: 4463 - DNA, 18 bp, Artificial Sequence
  Description of Artificial Sequence: Synthetic oligonucleotide
ctgccatggacgggatgg

SEQ ID NO: 4464 - DNA, 18 bp, Artificial Sequence
  Description of Artificial Sequence: Synthetic oligonucleotide
agcccctgccatggacgg

SEQ ID NO: 4465 - DNA, 18 bp, Artificial Sequence
  Description of Artificial Sequence: Synthetic oligonucleotide
tcctgagcccctgccatg

SEQ ID NO: 4466 - DNA, 18 bp, Artificial Sequence
  Description of Artificial Sequence: Synthetic oligonucleotide
gtccctcctgagcccctg

SEQ ID NO: 4467 - DNA, 18 bp, Artificial Sequence
  Description of Artificial Sequence: Synthetic oligonucleotide
cacaaccccccaggcccc

SEQ ID NO: 4468 - DNA, 18 bp, Artificial Sequence
  Description of Artificial Sequence: Synthetic oligonucleotide
tcctccacaaccccccag

SEQ ID NO: 4469 - DNA, 18 bp, Artificial Sequence
  Description of Artificial Sequence: Synthetic oligonucleotide
ggtggtcctccacaaccc

SEQ ID NO: 4470 - DNA, 18 bp, Artificial Sequence
  Description of Artificial Sequence: Synthetic oligonucleotide
gcagaggtggtcctccac

SEQ ID NO: 4471 - DNA, 18 bp, Artificial Sequence
  Description of Artificial Sequence: Synthetic oligonucleotide
caagggcagaggtggtcc

SEQ ID NO: 4472 - DNA, 18 bp, Artificial Sequence
  Description of Artificial Sequence: Synthetic oligonucleotide
ccctacaagggcagaggt

SEQ ID NO: 4473 - DNA, 18 bp, Artificial Sequence
  Description of Artificial Sequence: Synthetic oligonucleotide
ctacaccctacaagggca

SEQ ID NO: 4474 - DNA, 18 bp, Artificial Sequence
  Description of Artificial Sequence: Synthetic oligonucleotide
tccaactacaccctacaa

SEQ ID NO: 4475 - DNA, 18 bp, Artificial Sequence
  Description of Artificial Sequence: Synthetic oligonucleotide
gggactccaactacaccc

SEQ ID NO: 4476 - DNA, 18 bp, Artificial Sequence
  Description of Artificial Sequence: Synthetic oligonucleotide
cctcagggactccaacta

SEQ ID NO: 4477 - DNA, 18 bp, Artificial Sequence
  Description of Artificial Sequence: Synthetic oligonucleotide
taggacctcagggactcc

SEQ ID NO: 4478 - DNA, 18 bp, Artificial Sequence
  Description of Artificial Sequence: Synthetic oligonucleotide
aagcctaggacctcaggg

SEQ ID NO: 4479 - DNA, 18 bp, Artificial Sequence
  Description of Artificial Sequence: Synthetic oligonucleotide
atggaaagcctaggacct

SEQ ID NO: 4480 - DNA, 18 bp, Artificial Sequence
  Description of Artificial Sequence: Synthetic oligonucleotide
ccaggatggaaagcctag

SEQ ID NO: 4481 - DNA, 18 bp, Artificial Sequence
  Description of Artificial Sequence: Synthetic oligonucleotide
tgaccccaggatggaaag

SEQ ID NO: 4482 - DNA, 18 bp, Artificial Sequence
  Description of Artificial Sequence: Synthetic oligonucleotide
acacctgaccccaggatg

SEQ ID NO: 4483 - DNA, 18 bp, Artificial Sequence
  Description of Artificial Sequence: Synthetic oligonucleotide
aaaggacacctgacccca

SEQ ID NO: 4484 - DNA, 18 bp, Artificial Sequence
  Description of Artificial Sequence: Synthetic oligonucleotide
cagagaaaggacacctga

SEQ ID NO: 4485 - DNA, 18 bp, Artificial Sequence
  Description of Artificial Sequence: Synthetic oligonucleotide
gaaggcagagaaaggaca

SEQ ID NO: 4486 - DNA, 18 bp, Artificial Sequence
  Description of Artificial Sequence: Synthetic oligonucleotide
ggagagaaggcagagaaa

SEQ ID NO: 4487 - DNA, 18 bp, Artificial Sequence
  Description of Artificial Sequence: Synthetic oligonucleotide
gtcctggagagaaggcag

SEQ ID NO: 4488 - DNA, 18 bp, Artificial Sequence
  Description of Artificial Sequence: Synthetic oligonucleotide
ggggtgtcctggagagaa

SEQ ID NO: 4489 - DNA, 18 bp, Artificial Sequence
  Description of Artificial Sequence: Synthetic oligonucleotide
gctggggggtgtcctgga

SEQ ID NO: 4490 - DNA, 18 bp, Artificial Sequence
  Description of Artificial Sequence: Synthetic oligonucleotide
tctcagctggggggtgtc

SEQ ID NO: 4491 - DNA, 18 bp, Artificial Sequence
  Description of Artificial Sequence: Synthetic oligonucleotide
gcacgtctcagctggggg

SEQ ID NO: 4492 - DNA, 18 bp, Artificial Sequence
  Description of Artificial Sequence: Synthetic oligonucleotide
tgaccgcacgtctcagct

SEQ ID NO: 4493 - DNA, 18 bp, Artificial Sequence
  Description of Artificial Sequence: Synthetic oligonucleotide
gaacctgaccgcacgtct

SEQ ID NO: 4494 - DNA, 18 bp, Artificial Sequence
  Description of Artificial Sequence: Synthetic oligonucleotide
ccacagaacctgaccgca

SEQ ID NO: 4495 - DNA, 18 bp, Artificial Sequence
  Description of Artificial Sequence: Synthetic oligonucleotide
ccagtccacagaacctga

SEQ ID NO: 4496 - DNA, 18 bp, Artificial Sequence
  Description of Artificial Sequence: Synthetic oligonucleotide
gcctcccagtccacagaa

SEQ ID NO: 4497 - DNA, 18 bp, Artificial Sequence
  Description of Artificial Sequence: Synthetic oligonucleotide
ctcccgcctcccagtcca

SEQ ID NO: 4498 - DNA, 18 bp, Artificial Sequence
  Description of Artificial Sequence: Synthetic oligonucleotide
caggcctcccgcctccca

SEQ ID NO: 4499 - DNA, 18 bp, Artificial Sequence
  Description of Artificial Sequence: Synthetic oligonucleotide
aagcacaggcctcccgcc

SEQ ID NO: 4500 - DNA, 18 bp, Artificial Sequence
  Description of Artificial Sequence: Synthetic oligonucleotide
gtctgaagcacaggcctc

SEQ ID NO: 4501 - DNA, 18 bp, Artificial Sequence
  Description of Artificial Sequence: Synthetic oligonucleotide
cttgggtctgaagcacag

SEQ ID NO: 4502 - DNA, 18 bp, Artificial Sequence
  Description of Artificial Sequence: Synthetic oligonucleotide
gtagtcttgggtctgaag

SEQ ID NO: 4503 - DNA, 18 bp, Artificial Sequence
  Description of Artificial Sequence: Synthetic oligonucleotide
cgggtgtagtcttgggtc

SEQ ID NO: 4504 - DNA, 18 bp, Artificial Sequence
  Description of Artificial Sequence: Synthetic oligonucleotide
gaaaccgggtgtagtctt

SEQ ID NO: 4505 - DNA, 18 bp, Artificial Sequence
  Description of Artificial Sequence: Synthetic oligonucleotide
tggaggaaaccgggtgta

SEQ ID NO: 4506 - DNA, 18 bp, Artificial Sequence
  Description of Artificial Sequence: Synthetic oligonucleotide
cgtcctggaggaaaccgg

SEQ ID NO: 4507 - DNA, 18 bp, Artificial Sequence
  Description of Artificial Sequence: Synthetic oligonucleotide
cccttcgtcctggaggaa

SEQ ID NO: 4508 - DNA, 18 bp, Artificial Sequence
  Description of Artificial Sequence: Synthetic oligonucleotide
agagccccttcgtcctgg

SEQ ID NO: 4509 - DNA, 18 bp, Artificial Sequence
  Description of Artificial Sequence: Synthetic oligonucleotide
tcatcagagccccttcgt

SEQ ID NO: 4510 - DNA, 18 bp, Artificial Sequence
  Description of Artificial Sequence: Synthetic oligonucleotide
gaatctcatcagagcccc

SEQ ID NO: 4511 - DNA, 18 bp, Artificial Sequence
  Description of Artificial Sequence: Synthetic oligonucleotide
tggcagaatctcatcaga

SEQ ID NO: 4512 - DNA, 18 bp, Artificial Sequence
  Description of Artificial Sequence: Synthetic oligonucleotide
aggggtggcagaatctca

SEQ ID NO: 4513 - DNA, 18 bp, Artificial Sequence
  Description of Artificial Sequence: Synthetic oligonucleotide
tgtggaggggtggcagaa

SEQ ID NO: 4514 - DNA, 18 bp, Artificial Sequence
  Description of Artificial Sequence: Synthetic oligonucleotide
aagcgtgtggaggggtgg

SEQ ID NO: 4515 - DNA, 18 bp, Artificial Sequence
  Description of Artificial Sequence: Synthetic oligonucleotide
aggggaagcgtgtggagg

SEQ ID NO: 4516 - DNA, 18 bp, Artificial Sequence
  Description of Artificial Sequence: Synthetic oligonucleotide
agagcaggggaagcgtgt

SEQ ID NO: 4517 - DNA, 18 bp, Artificial Sequence
  Description of Artificial Sequence: Synthetic oligonucleotide
tcaagagagcaggggaag

SEQ ID NO: 4518 - DNA, 18 bp, Artificial Sequence
  Description of Artificial Sequence: Synthetic oligonucleotide
ctgggtcaagagagcagg

SEQ ID NO: 4519 - DNA, 18 bp, Artificial Sequence
  Description of Artificial Sequence: Synthetic oligonucleotide
ccctcaaccatttcctca

SEQ ID NO: 4520 - DNA, 18 bp, Artificial Sequence
  Description of Artificial Sequence: Synthetic oligonucleotide
cctttccctcaaccattt

SEQ ID NO: 4521 - DNA, 18 bp, Artificial Sequence
  Description of Artificial Sequence: Synthetic oligonucleotide
ccacccctttccctcaac

SEQ ID NO: 4522 - DNA, 18 bp, Artificial Sequence
  Description of Artificial Sequence: Synthetic oligonucleotide
aggccccacccctttccc

SEQ ID NO: 4523 - DNA, 18 bp, Artificial Sequence
  Description of Artificial Sequence: Synthetic oligonucleotide
gtatcaggccccacccct

SEQ ID NO: 4524 - DNA, 18 bp, Artificial Sequence
  Description of Artificial Sequence: Synthetic oligonucleotide
aactcgtatcaggcccca

SEQ ID NO: 4525 - DNA, 18 bp, Artificial Sequence
  Description of Artificial Sequence: Synthetic oligonucleotide
aaataaactcgtatcagg

SEQ ID NO: 4526 - DNA, 18 bp, Artificial Sequence
  Description of Artificial Sequence: Synthetic oligonucleotide
gaatgaaataaactcgta

SEQ ID NO: 4527 - DNA, 18 bp, Artificial Sequence
  Description of Artificial Sequence: Synthetic oligonucleotide
taagtgaatgaaataaac

SEQ ID NO: 4528 - DNA, 18 bp, Artificial Sequence
  Description of Artificial Sequence: Synthetic oligonucleotide
tatcttaagtgaatgaaa

SEQ ID NO: 4529 - DNA, 18 bp, Artificial Sequence
  Description of Artificial Sequence: Synthetic oligonucleotide
ataaatatcttaagtgaa

SEQ ID NO: 4530 - DNA, 18 bp, Artificial Sequence
  Description of Artificial Sequence: Synthetic oligonucleotide
gctcaataaatatcttaa

SEQ ID NO: 4531 - DNA, 18 bp, Artificial Sequence
  Description of Artificial Sequence: Synthetic oligonucleotide
taggagctcaataaatat

SEQ ID NO: 4532 - DNA, 18 bp, Artificial Sequence
  Description of Artificial Sequence: Synthetic oligonucleotide
catggtaggagctcaata

SEQ ID NO: 4533 - DNA, 18 bp, Artificial Sequence
  Description of Artificial Sequence: Synthetic oligonucleotide
gggcacatggtaggagct

SEQ ID NO: 4534 - DNA, 18 bp, Artificial Sequence
  Description of Artificial Sequence: Synthetic oligonucleotide
tgcctgggcacatggtag

SEQ ID NO: 4535 - DNA, 18 bp, Artificial Sequence
  Description of Artificial Sequence: Synthetic oligonucleotide
aacactgcctgggcacat

SEQ ID NO: 4536 - DNA, 18 bp, Artificial Sequence
  Description of Artificial Sequence: Synthetic oligonucleotide
cctaaaacactgcctggg

SEQ ID NO: 4537 - DNA, 18 bp, Artificial Sequence
  Description of Artificial Sequence: Synthetic oligonucleotide
cagcacctaaaacactgc

SEQ ID NO: 4538 - DNA, 18 bp, Artificial Sequence
  Description of Artificial Sequence: Synthetic oligonucleotide
atcctcagcacctaaaac

SEQ ID NO: 4539 - DNA, 18 bp, Artificial Sequence
  Description of Artificial Sequence: Synthetic oligonucleotide
gctgaatcctcagcacct

SEQ ID NO: 4540 - DNA, 18 bp, Artificial Sequence
  Description of Artificial Sequence: Synthetic oligonucleotide
tcactgctgaatcctcag

SEQ ID NO: 4541 - DNA, 18 bp, Artificial Sequence
  Description of Artificial Sequence: Synthetic oligonucleotide
tttgttcactgctgaatc

SEQ ID NO: 4542 - DNA, 18 bp, Artificial Sequence
  Description of Artificial Sequence: Synthetic oligonucleotide
tctgttttgttcactgct

SEQ ID NO: 4543 - DNA, 18 bp, Artificial Sequence
  Description of Artificial Sequence: Synthetic oligonucleotide
tgtggtctgttttgttca

SEQ ID NO: 4544 - DNA, 18 bp, Artificial Sequence
  Description of Artificial Sequence: Synthetic oligonucleotide
ggttttgtggtctgtttt

SEQ ID NO: 4545 - DNA, 18 bp, Artificial Sequence
  Description of Artificial Sequence: Synthetic oligonucleotide
agcagggttttgtggtct

SEQ ID NO: 4546 - DNA, 18 bp, Artificial Sequence
  Description of Artificial Sequence: Synthetic oligonucleotide
ataagagcagggttttgt

SEQ ID NO: 4547 - DNA, 18 bp, Artificial Sequence
  Description of Artificial Sequence: Synthetic oligonucleotide
gctccataagagcagggt

SEQ ID NO: 4548 - DNA, 18 bp, Artificial Sequence
  Description of Artificial Sequence: Synthetic oligonucleotide
tataagctccataagagc

SEQ ID NO: 4549 - DNA, 18 bp, Artificial Sequence
  Description of Artificial Sequence: Synthetic oligonucleotide
tagcatataagctccata

SEQ ID NO: 4550 - DNA, 18 bp, Artificial Sequence
  Description of Artificial Sequence: Synthetic oligonucleotide
tccactagcatataagct

SEQ ID NO: 4551 - DNA, 18 bp, Artificial Sequence
  Description of Artificial Sequence: Synthetic oligonucleotide
aatggtccactagcatat

SEQ ID NO: 4552 - DNA, 18 bp, Artificial Sequence
  Description of Artificial Sequence: Synthetic oligonucleotide
agggtaatggtccactag

SEQ ID NO: 4553 - DNA, 18 bp, Artificial Sequence
  Description of Artificial Sequence: Synthetic oligonucleotide
caccgaagtctagtctga

SEQ ID NO: 4554 - DNA, 18 bp, Artificial Sequence
  Description of Artificial Sequence: Synthetic oligonucleotide
gtggccaccgaagtctag

SEQ ID NO: 4555 - DNA, 18 bp, Artificial Sequence
  Description of Artificial Sequence: Synthetic oligonucleotide
ggtttgtggccaccgaag

SEQ ID NO: 4556 - DNA, 18 bp, Artificial Sequence
  Description of Artificial Sequence: Synthetic oligonucleotide
ataggggtttgtggccac

SEQ ID NO: 4557 - DNA, 18 bp, Artificial Sequence
  Description of Artificial Sequence: Synthetic oligonucleotide
ccaggataggggtttgtg

SEQ ID NO: 4558 - DNA, 18 bp, Artificial Sequence
  Description of Artificial Sequence: Synthetic oligonucleotide
aaaacccaggataggggt

SEQ ID NO: 4559 - DNA, 18 bp, Artificial Sequence
  Description of Artificial Sequence: Synthetic oligonucleotide
ttttcaaaacccaggata

SEQ ID NO: 4560 - DNA, 18 bp, Artificial Sequence
  Description of Artificial Sequence: Synthetic oligonucleotide
aaagtttttcaaaaccca

SEQ ID NO: 4561 - DNA, 18 bp, Artificial Sequence
  Description of Artificial Sequence: Synthetic oligonucleotide
aaagcaaagtttttcaaa

SEQ ID NO: 4562 - DNA, 18 bp, Artificial Sequence
  Description of Artificial Sequence: Synthetic oligonucleotide
gagcaaaagcaaagtttt

SEQ ID NO: 4563 - DNA, 18 bp, Artificial Sequence
  Description of Artificial Sequence: Synthetic oligonucleotide
agggtgagcaaaagcaaa

SEQ ID NO: 4564 - DNA, 18 bp, Artificial Sequence
  Description of Artificial Sequence: Synthetic oligonucleotide
caggaagggtgagcaaaa

SEQ ID NO: 4565 - DNA, 18 bp, Artificial Sequence
  Description of Artificial Sequence: Synthetic oligonucleotide
atcaacaggaagggtgag

SEQ ID NO: 4566 - DNA, 18 bp, Artificial Sequence
  Description of Artificial Sequence: Synthetic oligonucleotide
gggagatcaacaggaagg

SEQ ID NO: 4567 - DNA, 18 bp, Artificial Sequence
  Description of Artificial Sequence: Synthetic oligonucleotide
aagcagggagatcaacag

SEQ ID NO: 4568 - DNA, 18 bp, Artificial Sequence
  Description of Artificial Sequence: Synthetic oligonucleotide
acacaaagcagggagatc

SEQ ID NO: 4569 - DNA, 18 bp, Artificial Sequence
  Description of Artificial Sequence: Synthetic oligonucleotide
agaaaacacaaagcaggg

SEQ ID NO: 4570 - DNA, 18 bp, Artificial Sequence
  Description of Artificial Sequence: Synthetic oligonucleotide
ccagaagaaaacacaaag

SEQ ID NO: 4571 - DNA, 18 bp, Artificial Sequence
  Description of Artificial Sequence: Synthetic oligonucleotide
tgttaccagaagaaaaca

SEQ ID NO: 4572 - DNA, 18 bp, Artificial Sequence
  Description of Artificial Sequence: Synthetic oligonucleotide
tgtgatgttaccagaaga

SEQ ID NO: 4573 - DNA, 18 bp, Artificial Sequence
  Description of Artificial Sequence: Synthetic oligonucleotide
aactatgtgatgttacca

SEQ ID NO: 4574 - DNA, 18 bp, Artificial Sequence
  Description of Artificial Sequence: Synthetic oligonucleotide
ctgacaactatgtgatgt

SEQ ID NO: 4575 - DNA, 18 bp, Artificial Sequence
  Description of Artificial Sequence: Synthetic oligonucleotide
aacagctgacaactatgt

SEQ ID NO: 4576 - DNA, 18 bp, Artificial Sequence
  Description of Artificial Sequence: Synthetic oligonucleotide
agaggaacagctgacaac

SEQ ID NO: 4577 - DNA, 18 bp, Artificial Sequence
  Description of Artificial Sequence: Synthetic oligonucleotide
aaacaagaggaacagctg

SEQ ID NO: 4578 - DNA, 18 bp, Artificial Sequence
  Description of Artificial Sequence: Synthetic oligonucleotide
cagtcaaacaagaggaac

SEQ ID NO: 4579 - DNA, 18 bp, Artificial Sequence
  Description of Artificial Sequence: Synthetic oligonucleotide
gctggcagtcaaacaaga

SEQ ID NO: 4580 - DNA, 18 bp, Artificial Sequence
  Description of Artificial Sequence: Synthetic oligonucleotide
caggggctggcagtcaaa

SEQ ID NO: 4581 - DNA, 18 bp, Artificial Sequence
  Description of Artificial Sequence: Synthetic oligonucleotide
ccccacaggggctggcag

SEQ ID NO: 4582 - DNA, 18 bp, Artificial Sequence
  Description of Artificial Sequence: Synthetic oligonucleotide
gatttccccacaggggct

SEQ ID NO: 4583 - DNA, 18 bp, Artificial Sequence
  Description of Artificial Sequence: Synthetic oligonucleotide
accctgatttccccacag

SEQ ID NO: 4584 - DNA, 18 bp, Artificial Sequence
  Description of Artificial Sequence: Synthetic oligonucleotide
tggaaaccctgatttccc

SEQ ID NO: 4585 - DNA, 18 bp, Artificial Sequence
  Description of Artificial Sequence: Synthetic oligonucleotide
gggcctggaaaccctgat

SEQ ID NO: 4586 - DNA, 18 bp, Artificial Sequence
  Description of Artificial Sequence: Synthetic oligonucleotide
cgcttgggcctggaaacc

SEQ ID NO: 4587 - DNA, 18 bp, Artificial Sequence
  Description of Artificial Sequence: Synthetic oligonucleotide
cccagcgcttgggcctgg

SEQ ID NO: 4588 - DNA, 18 bp, Artificial Sequence
  Description of Artificial Sequence: Synthetic oligonucleotide
ggctgcccagcgcttggg

SEQ ID NO: 4589 - DNA, 18 bp, Artificial Sequence
  Description of Artificial Sequence: Synthetic oligonucleotide
accctggctgcccagcgc

SEQ ID NO: 4590 - DNA, 18 bp, Artificial Sequence
  Description of Artificial Sequence: Synthetic oligonucleotide
accttaccctggctgccc

SEQ ID NO: 4591 - DNA, 18 bp, Artificial Sequence
  Description of Artificial Sequence: Synthetic oligonucleotide
gctgcaccttaccctggc

SEQ ID NO: 4592 - DNA, 18 bp, Artificial Sequence
  Description of Artificial Sequence: Synthetic oligonucleotide
tgacccatgtcaccctac

SEQ ID NO: 4593 - DNA, 18 bp, Artificial Sequence
  Description of Artificial Sequence: Synthetic oligonucleotide
cacgctgacccatgtcac

SEQ ID NO: 4594 - DNA, 18 bp, Artificial Sequence
  Description of Artificial Sequence: Synthetic oligonucleotide
gcccacacgctgacccat

SEQ ID NO: 4595 - DNA, 18 bp, Artificial Sequence
  Description of Artificial Sequence: Synthetic oligonucleotide
cgctggcccacacgctga

SEQ ID NO: 4596 - DNA, 18 bp, Artificial Sequence
  Description of Artificial Sequence: Synthetic oligonucleotide
gagcacgctggcccacac

SEQ ID NO: 4597 - DNA, 18 bp, Artificial Sequence
  Description of Artificial Sequence: Synthetic oligonucleotide
gagcggagcacgctggcc

SEQ ID NO: 4598 - DNA, 18 bp, Artificial Sequence
  Description of Artificial Sequence: Synthetic oligonucleotide
ctagtgagcggagcacgc

SEQ ID NO: 4599 - DNA, 18 bp, Artificial Sequence
  Description of Artificial Sequence: Synthetic oligonucleotide
gaggcctagtgagcggag

SEQ ID NO: 4600 - DNA, 18 bp, Artificial Sequence
  Description of Artificial Sequence: Synthetic oligonucleotide
aagctgaggcctagtgag

SEQ ID NO: 4601 - DNA, 18 bp, Artificial Sequence
  Description of Artificial Sequence: Synthetic oligonucleotide
ggagaaagctgaggccta

SEQ ID NO: 4602 - DNA, 18 bp, Artificial Sequence
  Description of Artificial Sequence: Synthetic oligonucleotide
ctggaggagaaagctgag

SEQ ID NO: 4603 - DNA, 18 bp, Artificial Sequence
  Description of Artificial Sequence: Synthetic oligonucleotide
atttgctggaggagaaag

SEQ ID NO: 4604 - DNA, 18 bp, Artificial Sequence
  Description of Artificial Sequence: Synthetic oligonucleotide
ttctcatttgctggagga

SEQ ID NO: 4605 - DNA, 18 bp, Artificial Sequence
  Description of Artificial Sequence: Synthetic oligonucleotide
tgtcattctcatttgctg

SEQ ID NO: 4606 - DNA, 18 bp, Artificial Sequence
  Description of Artificial Sequence: Synthetic oligonucleotide
gagggtgtcattctcatt

SEQ ID NO: 4607 - DNA, 18 bp, Artificial Sequence
  Description of Artificial Sequence: Synthetic oligonucleotide
aggtggagggtgtcattc

SEQ ID NO: 4608 - DNA, 18 bp, Artificial Sequence
  Description of Artificial Sequence: Synthetic oligonucleotide
cagagaggtggagggtgt

SEQ ID NO: 4609 - DNA, 18 bp, Artificial Sequence
  Description of Artificial Sequence: Synthetic oligonucleotide
acccacagagaggtggag

SEQ ID NO: 4610 - DNA, 18 bp, Artificial Sequence
  Description of Artificial Sequence: Synthetic oligonucleotide
agcacacccacagagagg

SEQ ID NO: 4611 - DNA, 18 bp, Artificial Sequence
  Description of Artificial Sequence: Synthetic oligonucleotide
gtgtgagcacacccacag

SEQ ID NO: 4612 - DNA, 18 bp, Artificial Sequence
  Description of Artificial Sequence: Synthetic oligonucleotide
actgagtgtgagcacacc

SEQ ID NO: 4613 - DNA, 18 bp, Artificial Sequence
  Description of Artificial Sequence: Synthetic oligonucleotide
cactcactgagtgtgagc

SEQ ID NO: 4614 - DNA, 18 bp, Artificial Sequence
  Description of Artificial Sequence: Synthetic oligonucleotide
ggtggcactcactgagtg

SEQ ID NO: 4615 - DNA, 18 bp, Artificial Sequence
  Description of Artificial Sequence: Synthetic oligonucleotide
gcctcctctctgcctatc

SEQ ID NO: 4616 - DNA, 18 bp, Artificial Sequence
  Description of Artificial Sequence: Synthetic oligonucleotide
gttccgcctcctctctgc

SEQ ID NO: 4617 - DNA, 18 bp, Artificial Sequence
  Description of Artificial Sequence: Synthetic oligonucleotide
cgcccgttccgcctcctc

SEQ ID NO: 4618 - DNA, 18 bp, Artificial Sequence
  Description of Artificial Sequence: Synthetic oligonucleotide
ctttccgcccgttccgcc

SEQ ID NO: 4619 - DNA, 18 bp, Artificial Sequence
  Description of Artificial Sequence: Synthetic oligonucleotide
cctggctttccgcccgtt

SEQ ID NO: 4620 - DNA, 18 bp, Artificial Sequence
  Description of Artificial Sequence: Synthetic oligonucleotide
caaaccctggctttccgc

SEQ ID NO: 4621 - DNA, 18 bp, Artificial Sequence
  Description of Artificial Sequence: Synthetic oligonucleotide
gctcccaaaccctggctt

SEQ ID NO: 4622 - DNA, 18 bp, Artificial Sequence
  Description of Artificial Sequence: Synthetic oligonucleotide
ggccagctcccaaaccct

SEQ ID NO: 4623 - DNA, 18 bp, Artificial Sequence
  Description of Artificial Sequence: Synthetic oligonucleotide
ctccaggccagctcccaa

SEQ ID NO: 4624 - DNA, 18 bp, Artificial Sequence
  Description of Artificial Sequence: Synthetic oligonucleotide
acctcctccaggccagct

SEQ ID NO: 4625 - DNA, 18 bp, Artificial Sequence
  Description of Artificial Sequence: Synthetic oligonucleotide
tatctacctcctccaggc

SEQ ID NO: 4626 - DNA, 18 bp, Artificial Sequence
  Description of Artificial Sequence: Synthetic oligonucleotide
accgctatctacctcctc

SEQ ID NO: 4627 - DNA, 18 bp, Artificial Sequence
  Description of Artificial Sequence: Synthetic oligonucleotide
ccaggaccgctatctacc

SEQ ID NO: 4628 - DNA, 18 bp, Artificial Sequence
  Description of Artificial Sequence: Synthetic oligonucleotide
tcagtccaggaccgctat

SEQ ID NO: 4629 - DNA, 18 bp, Artificial Sequence
  Description of Artificial Sequence: Synthetic oligonucleotide
ccgattcagtccaggacc

SEQ ID NO: 4630 - DNA, 18 bp, Artificial Sequence
  Description of Artificial Sequence: Synthetic oligonucleotide
taaggccgattcagtcca

SEQ ID NO: 4631 - DNA, 18 bp, Artificial Sequence
  Description of Artificial Sequence: Synthetic oligonucleotide
gttcataaggccgattca

SEQ ID NO: 4632 - DNA, 18 bp, Artificial Sequence
  Description of Artificial Sequence: Synthetic oligonucleotide
cgcgggttcataaggccg

SEQ ID NO: 4633 - DNA, 18 bp, Artificial Sequence
  Description of Artificial Sequence: Synthetic oligonucleotide
gaaagcgcgggttcataa

SEQ ID NO: 4634 - DNA, 18 bp, Artificial Sequence
  Description of Artificial Sequence: Synthetic oligonucleotide
ctggggaaagcgcgggtt

SEQ ID NO: 4635 - DNA, 18 bp, Artificial Sequence
  Description of Artificial Sequence: Synthetic oligonucleotide
ggaggctggggaaagcgc

SEQ ID NO: 4636 - DNA, 18 bp, Artificial Sequence
  Description of Artificial Sequence: Synthetic oligonucleotide
acgctggaggctggggaa

SEQ ID NO: 4637 - DNA, 18 bp, Artificial Sequence
  Description of Artificial Sequence: Synthetic oligonucleotide
atgctacgctggaggctg

SEQ ID NO: 4638 - DNA, 18 bp, Artificial Sequence
  Description of Artificial Sequence: Synthetic oligonucleotide
tcagtatgctacgctgga

SEQ ID NO: 4639 - DNA, 18 bp, Artificial Sequence
  Description of Artificial Sequence: Synthetic oligonucleotide
aggtgtcagtatgctacg

SEQ ID NO: 4640 - DNA, 18 bp, Artificial Sequence
  Description of Artificial Sequence: Synthetic oligonucleotide
ggggtaggtgtcagtatg

SEQ ID NO: 4641 - DNA, 18 bp, Artificial Sequence
  Description of Artificial Sequence: Synthetic oligonucleotide
gggtgggggtaggtgtca

SEQ ID NO: 4642 - DNA, 18 bp, Artificial Sequence
  Description of Artificial Sequence: Synthetic oligonucleotide
gctattccagggactccc

SEQ ID NO: 4643 - DNA, 18 bp, Artificial Sequence
  Description of Artificial Sequence: Synthetic oligonucleotide
aaggagctattccaggga

SEQ ID NO: 4644 - DNA, 18 bp, Artificial Sequence
  Description of Artificial Sequence: Synthetic oligonucleotide
ccaggaaggagctattcc

SEQ ID NO: 4645 - DNA, 18 bp, Artificial Sequence
  Description of Artificial Sequence: Synthetic oligonucleotide
ctggcccaggaaggagct

SEQ ID NO: 4646 - DNA, 18 bp, Artificial Sequence
  Description of Artificial Sequence: Synthetic oligonucleotide
ctgttctggcccaggaag

SEQ ID NO: 4647 - DNA, 18 bp, Artificial Sequence
  Description of Artificial Sequence: Synthetic oligonucleotide
cagggctgttctggccca

SEQ ID NO: 4648 - DNA, 18 bp, Artificial Sequence
  Description of Artificial Sequence: Synthetic oligonucleotide
tgctacagggctgttctg

SEQ ID NO: 4649 - DNA, 18 bp, Artificial Sequence
  Description of Artificial Sequence: Synthetic oligonucleotide
ccatctgctacagggctg

SEQ ID NO: 4650 - DNA, 18 bp, Artificial Sequence
  Description of Artificial Sequence: Synthetic oligonucleotide
ctcccccatctgctacag

SEQ ID NO: 4651 - DNA, 18 bp, Artificial Sequence
  Description of Artificial Sequence: Synthetic oligonucleotide
gccacctcccccatctgc

SEQ ID NO: 4652 - DNA, 18 bp, Artificial Sequence
  Description of Artificial Sequence: Synthetic oligonucleotide
caaaagccacctccccca

SEQ ID NO: 4653 - DNA, 18 bp, Artificial Sequence
  Description of Artificial Sequence: Synthetic oligonucleotide
gtgcccaaaagccacctc

SEQ ID NO: 4654 - DNA, 18 bp, Artificial Sequence
  Description of Artificial Sequence: Synthetic oligonucleotide
aggatgtgcccaaaagcc

SEQ ID NO: 4655 - DNA, 18 bp, Artificial Sequence
  Description of Artificial Sequence: Synthetic oligonucleotide
gccacaggatgtgcccaa

SEQ ID NO: 4656 - DNA, 18 bp, Artificial Sequence
  Description of Artificial Sequence: Synthetic oligonucleotide
gcattgccacaggatgtg

SEQ ID NO: 4657 - DNA, 18 bp, Artificial Sequence
  Description of Artificial Sequence: Synthetic oligonucleotide
agatggcattgccacagg

SEQ ID NO: 4658 - DNA, 18 bp, Artificial Sequence
  Description of Artificial Sequence: Synthetic oligonucleotide
gccgaagatggcattgcc

SEQ ID NO: 4659 - DNA, 18 bp, Artificial Sequence
  Description of Artificial Sequence: Synthetic oligonucleotide
tcaaggccgaagatggca

SEQ ID NO: 4660 - DNA, 18 bp, Artificial Sequence
  Description of Artificial Sequence: Synthetic oligonucleotide
ggttgtcaaggccgaaga

SEQ ID NO: 4661 - DNA, 18 bp, Artificial Sequence
  Description of Artificial Sequence: Synthetic oligonucleotide
tagagggttgtcaaggcc

SEQ ID NO: 4662 - DNA, 18 bp, Artificial Sequence
  Description of Artificial Sequence: Synthetic oligonucleotide
agggctagagggttgtca

SEQ ID NO: 4663 - DNA, 18 bp, Artificial Sequence
  Description of Artificial Sequence: Synthetic oligonucleotide
tgggcagggctagagggt

SEQ ID NO: 4664 - DNA, 18 bp, Artificial Sequence
  Description of Artificial Sequence: Synthetic oligonucleotide
tgtactgggcagggctag

SEQ ID NO: 4665 - DNA, 18 bp, Artificial Sequence
  Description of Artificial Sequence: Synthetic oligonucleotide
ggctctgtactgggcagg

SEQ ID NO: 4666 - DNA, 18 bp, Artificial Sequence
  Description of Artificial Sequence: Synthetic oligonucleotide
tgctgggctctgtactgg

SEQ ID NO: 4667 - DNA, 18 bp, Artificial Sequence
  Description of Artificial Sequence: Synthetic oligonucleotide
actgctgctgggctctgt

SEQ ID NO: 4668 - DNA, 18 bp, Artificial Sequence
  Description of Artificial Sequence: Synthetic oligonucleotide
tcgttactgctgctgggc

SEQ ID NO: 4669 - DNA, 18 bp, Artificial Sequence
  Description of Artificial Sequence: Synthetic oligonucleotide
gttcgagaccagcctggc

SEQ ID NO: 4670 - DNA, 18 bp, Artificial Sequence
  Description of Artificial Sequence: Synthetic oligonucleotide
caggagttcgagaccagc

SEQ ID NO: 4671 - DNA, 18 bp, Artificial Sequence
  Description of Artificial Sequence: Synthetic oligonucleotide
gaggtcaggagttcgaga

SEQ ID NO: 4672 - DNA, 18 bp, Artificial Sequence
  Description of Artificial Sequence: Synthetic oligonucleotide
cacttgaggtcaggagtt

SEQ ID NO: 4673 - DNA, 18 bp, Artificial Sequence
  Description of Artificial Sequence: Synthetic oligonucleotide
tggatcacttgaggtcag

SEQ ID NO: 4674 - DNA, 18 bp, Artificial Sequence
  Description of Artificial Sequence: Synthetic oligonucleotide
gcaggtggatcacttgag

SEQ ID NO: 4675 - DNA, 18 bp, Artificial Sequence
  Description of Artificial Sequence: Synthetic oligonucleotide
ccaaggcaggtggatcac

SEQ ID NO: 4676 - DNA, 18 bp, Artificial Sequence
  Description of Artificial Sequence: Synthetic oligonucleotide
ggaggccaaggcaggtgg

SEQ ID NO: 4677 - DNA, 18 bp, Artificial Sequence
  Description of Artificial Sequence: Synthetic oligonucleotide
ctttgggaggccaaggca

SEQ ID NO: 4678 - DNA, 18 bp, Artificial Sequence
  Description of Artificial Sequence: Synthetic oligonucleotide
cagcactttgggaggcca

SEQ ID NO: 4679 - DNA, 18 bp, Artificial Sequence
  Description of Artificial Sequence: Synthetic oligonucleotide
aatcccagcactttggga

SEQ ID NO: 4680 - DNA, 18 bp, Artificial Sequence
  Description of Artificial Sequence: Synthetic oligonucleotide
cctgtaatcccagcactt

SEQ ID NO: 4681 - DNA, 18 bp, Artificial Sequence
  Description of Artificial Sequence: Synthetic oligonucleotide
tcatgcctgtaatcccag

SEQ ID NO: 4682 - DNA, 18 bp, Artificial Sequence
  Description of Artificial Sequence: Synthetic oligonucleotide
gtggctcatgcctgtaat

SEQ ID NO: 4683 - DNA, 18 bp, Artificial Sequence
  Description of Artificial Sequence: Synthetic oligonucleotide
gcacagtggctcatgcct

SEQ ID NO: 4684 - DNA, 18 bp, Artificial Sequence
  Description of Artificial Sequence: Synthetic oligonucleotide
gccgggcacagtggctca

SEQ ID NO: 4685 - DNA, 18 bp, Artificial Sequence
  Description of Artificial Sequence: Synthetic oligonucleotide
gaatggccgggcacagtg

SEQ ID NO: 4686 - DNA, 18 bp, Artificial Sequence
  Description of Artificial Sequence: Synthetic oligonucleotide
gggaggaatggccgggca

SEQ ID NO: 4687 - DNA, 18 bp, Artificial Sequence
  Description of Artificial Sequence: Synthetic oligonucleotide
ggaaggggaggaatggcc

SEQ ID NO: 4688 - DNA, 18 bp, Artificial Sequence
  Description of Artificial Sequence: Synthetic oligonucleotide
tcaaaggaaggggaggaa

SEQ ID NO: 4689 - DNA, 18 bp, Artificial Sequence
  Description of Artificial Sequence: Synthetic oligonucleotide
tgctgtcaaaggaagggg

SEQ ID NO: 4690 - DNA, 18 bp, Artificial Sequence
  Description of Artificial Sequence: Synthetic oligonucleotide
cccggtgctgtcaaagga

SEQ ID NO: 4691 - DNA, 18 bp, Artificial Sequence
  Description of Artificial Sequence: Synthetic oligonucleotide
gaaaccccggtgctgtca

SEQ ID NO: 4692 - DNA, 18 bp, Artificial Sequence
  Description of Artificial Sequence: Synthetic oligonucleotide
acactgaaaccccggtgc

SEQ ID NO: 4693 - DNA, 18 bp, Artificial Sequence
  Description of Artificial Sequence: Synthetic oligonucleotide
atagtaaagaaagagatt

SEQ ID NO: 4694 - DNA, 18 bp, Artificial Sequence
  Description of Artificial Sequence: Synthetic oligonucleotide
aaaatatagtaaagaaag

SEQ ID NO: 4695 - DNA, 18 bp, Artificial Sequence
  Description of Artificial Sequence: Synthetic oligonucleotide
aaagcaaaatatagtaaa

SEQ ID NO: 4696 - DNA, 18 bp, Artificial Sequence
  Description of Artificial Sequence: Synthetic oligonucleotide
aaataaaagcaaaatata

SEQ ID NO: 4697 - DNA, 18 bp, Artificial Sequence
  Description of Artificial Sequence: Synthetic oligonucleotide
aataaaaataaaagcaaa

SEQ ID NO: 4698 - DNA, 18 bp, Artificial Sequence
  Description of Artificial Sequence: Synthetic oligonucleotide
tcttcaataaaaataaaa

SEQ ID NO: 4699 - DNA, 18 bp, Artificial Sequence
  Description of Artificial Sequence: Synthetic oligonucleotide
tattttcttcaataaaaa

SEQ ID NO: 4700 - DNA, 18 bp, Artificial Sequence
  Description of Artificial Sequence: Synthetic oligonucleotide
tcatttattttcttcaat

SEQ ID NO: 4701 - DNA, 18 bp, Artificial Sequence
  Description of Artificial Sequence: Synthetic oligonucleotide
aacattcatttattttct

SEQ ID NO: 4702 - DNA, 18 bp, Artificial Sequence
  Description of Artificial Sequence: Synthetic oligonucleotide
acaaaaacattcatttat

SEQ ID NO: 4703 - DNA, 18 bp, Artificial Sequence
  Description of Artificial Sequence: Synthetic oligonucleotide
acaagacaaaaacattca

SEQ ID NO: 4704 - DNA, 18 bp, Artificial Sequence
  Description of Artificial Sequence: Synthetic oligonucleotide
ctctaacaagacaaaaac

SEQ ID NO: 4705 - DNA, 18 bp, Artificial Sequence
  Description of Artificial Sequence: Synthetic oligonucleotide
tgggtctctaacaagaca

SEQ ID NO: 4706 - DNA, 18 bp, Artificial Sequence
  Description of Artificial Sequence: Synthetic oligonucleotide
catcatgggtctctaaca

SEQ ID NO: 4707 - DNA, 18 bp, Artificial Sequence
  Description of Artificial Sequence: Synthetic oligonucleotide
gactccatcatgggtctc

SEQ ID NO: 4708 - DNA, 18 bp, Artificial Sequence
  Description of Artificial Sequence: Synthetic oligonucleotide
tcctggactccatcatgg

SEQ ID NO: 4709 - DNA, 18 bp, Artificial Sequence
  Description of Artificial Sequence: Synthetic oligonucleotide
ttttgtcctggactccat

SEQ ID NO: 4710 - DNA, 18 bp, Artificial Sequence
  Description of Artificial Sequence: Synthetic oligonucleotide
atttattttgtcctggac

SEQ ID NO: 4711 - DNA, 18 bp, Artificial Sequence
  Description of Artificial Sequence: Synthetic oligonucleotide
tattcatttattttgtcc

SEQ ID NO: 4712 - DNA, 18 bp, Artificial Sequence
  Description of Artificial Sequence: Synthetic oligonucleotide
ccaaaatagaagatacta

SEQ ID NO: 4713 - DNA, 18 bp, Artificial Sequence
  Description of Artificial Sequence: Synthetic oligonucleotide
ataagccaaaatagaaga

SEQ ID NO: 4714 - DNA, 18 bp, Artificial Sequence
  Description of Artificial Sequence: Synthetic oligonucleotide
attttataagccaaaata

SEQ ID NO: 4715 - DNA, 18 bp, Artificial Sequence
  Description of Artificial Sequence: Synthetic oligonucleotide
taggaattttataagcca

SEQ ID NO: 4716 - DNA, 18 bp, Artificial Sequence
  Description of Artificial Sequence: Synthetic oligonucleotide
ttccttaggaattttata

SEQ ID NO: 4717 - DNA, 18 bp, Artificial Sequence
  Description of Artificial Sequence: Synthetic oligonucleotide
acatcttccttaggaatt

SEQ ID NO: 4718 - DNA, 18 bp, Artificial Sequence
  Description of Artificial Sequence: Synthetic oligonucleotide
actgaacatcttccttag

SEQ ID NO: 4719 - DNA, 18 bp, Artificial Sequence
  Description of Artificial Sequence: Synthetic oligonucleotide
aagggactgaacatcttc

SEQ ID NO: 4720 - DNA, 18 bp, Artificial Sequence
  Description of Artificial Sequence: Synthetic oligonucleotide
tgtgaaagggactgaaca

SEQ ID NO: 4721 - DNA, 18 bp, Artificial Sequence
  Description of Artificial Sequence: Synthetic oligonucleotide
aagattgtgaaagggact

SEQ ID NO: 4722 - DNA, 18 bp, Artificial Sequence
  Description of Artificial Sequence: Synthetic oligonucleotide
aaaaaaagattgtgaaag

SEQ ID NO: 4723 - DNA, 18 bp, Artificial Sequence
  Description of Artificial Sequence: Synthetic oligonucleotide
agcttaaaaaaagattgt

SEQ ID NO: 4724 - DNA, 18 bp, Artificial Sequence
  Description of Artificial Sequence: Synthetic oligonucleotide
cttccagcttaaaaaaag

SEQ ID NO: 4725 - DNA, 18 bp, Artificial Sequence
  Description of Artificial Sequence: Synthetic oligonucleotide
accttcttccagcttaaa

SEQ ID NO: 4726 - DNA, 18 bp, Artificial Sequence
  Description of Artificial Sequence: Synthetic oligonucleotide
tacttaccttcttccagc

SEQ ID NO: 4727 - DNA, 18 bp, Artificial Sequence
  Description of Artificial Sequence: Synthetic oligonucleotide
tcaactacttaccttctt

SEQ ID NO: 4728 - DNA, 18 bp, Artificial Sequence
  Description of Artificial Sequence: Synthetic oligonucleotide
gcttttcaactacttacc

SEQ ID NO: 4729 - DNA, 18 bp, Artificial Sequence
  Description of Artificial Sequence: Synthetic oligonucleotide
taagtgcttttcaactac

SEQ ID NO: 4730 - DNA, 18 bp, Artificial Sequence
  Description of Artificial Sequence: Synthetic oligonucleotide
caacataagtgcttttca

SEQ ID NO: 4731 - DNA, 18 bp, Artificial Sequence
  Description of Artificial Sequence: Synthetic oligonucleotide
agctacaacataagtgct

SEQ ID NO: 4732 - DNA, 18 bp, Artificial Sequence
  Description of Artificial Sequence: Synthetic oligonucleotide
ttgagagctacaacataa

SEQ ID NO: 4733 - DNA, 18 bp, Artificial Sequence
  Description of Artificial Sequence: Synthetic oligonucleotide
ataatttgagagctacaa

SEQ ID NO: 4734 - DNA, 18 bp, Artificial Sequence
  Description of Artificial Sequence: Synthetic oligonucleotide
ctttcataatttgagagc

SEQ ID NO: 4735 - DNA, 18 bp, Artificial Sequence
  Description of Artificial Sequence: Synthetic oligonucleotide
aaattctttcataatttg

SEQ ID NO: 4736 - DNA, 18 bp, Artificial Sequence
  Description of Artificial Sequence: Synthetic oligonucleotide
aaataaaattctttcata

SEQ ID NO: 4737 - DNA, 18 bp, Artificial Sequence
  Description of Artificial Sequence: Synthetic oligonucleotide
tttttaaataaaattctt

SEQ ID NO: 4738 - DNA, 18 bp, Artificial Sequence
  Description of Artificial Sequence: Synthetic oligonucleotide
taaactttttaaataaaa

SEQ ID NO: 4739 - DNA, 18 bp, Artificial Sequence
  Description of Artificial Sequence: Synthetic oligonucleotide
agttttaaactttttaaa

SEQ ID NO: 4740 - DNA, 18 bp, Artificial Sequence
  Description of Artificial Sequence: Synthetic oligonucleotide
tccccagttttaaacttt

SEQ ID NO: 4741 - DNA, 18 bp, Artificial Sequence
  Description of Artificial Sequence: Synthetic oligonucleotide
ccgagtccccagttttaa

SEQ ID NO: 4742 - DNA, 18 bp, Artificial Sequence
  Description of Artificial Sequence: Synthetic oligonucleotide
ataaaccgagtccccagt

SEQ ID NO: 4743 - DNA, 18 bp, Artificial Sequence
  Description of Artificial Sequence: Synthetic oligonucleotide
ctaaaataaaccgagtcc

SEQ ID NO: 4744 - DNA, 18 bp, Artificial Sequence
  Description of Artificial Sequence: Synthetic oligonucleotide
agtttctaaaataaaccg

SEQ ID NO: 4745 - DNA, 18 bp, Artificial Sequence
  Description of Artificial Sequence: Synthetic oligonucleotide
gccatagtttctaaaata

SEQ ID NO: 4746 - DNA, 18 bp, Artificial Sequence
  Description of Artificial Sequence: Synthetic oligonucleotide
tatctgccatagtttcta

SEQ ID NO: 4747 - DNA, 18 bp, Artificial Sequence
  Description of Artificial Sequence: Synthetic oligonucleotide
cttcttatctgccatagt

SEQ ID NO: 4748 - DNA, 18 bp, Artificial Sequence
  Description of Artificial Sequence: Synthetic oligonucleotide
gttatcttcttatctgcc

SEQ ID NO: 4749 - DNA, 18 bp, Artificial Sequence
  Description of Artificial Sequence: Synthetic oligonucleotide
cagggcatcagagcccgg

SEQ ID NO: 4750 - DNA, 18 bp, Artificial Sequence
  Description of Artificial Sequence: Synthetic oligonucleotide
cagcccagggcatcagag

SEQ ID NO: 4751 - DNA, 18 bp, Artificial Sequence
  Description of Artificial Sequence: Synthetic oligonucleotide
aaccacagcccagggcat

SEQ ID NO: 4752 - DNA, 18 bp, Artificial Sequence
  Description of Artificial Sequence: Synthetic oligonucleotide
accttaaccacagcccag

SEQ ID NO: 4753 - DNA, 18 bp, Artificial Sequence
  Description of Artificial Sequence: Synthetic oligonucleotide
ggatcaccttaaccacag

SEQ ID NO: 4754 - DNA, 18 bp, Artificial Sequence
  Description of Artificial Sequence: Synthetic oligonucleotide
ggcctggatcaccttaac

SEQ ID NO: 4755 - DNA, 18 bp, Artificial Sequence
  Description of Artificial Sequence: Synthetic oligonucleotide
ctccaggcctggatcacc

SEQ ID NO: 4756 - DNA, 18 bp, Artificial Sequence
  Description of Artificial Sequence: Synthetic oligonucleotide
tctctctccaggcctgga

SEQ ID NO: 4757 - DNA, 18 bp, Artificial Sequence
  Description of Artificial Sequence: Synthetic oligonucleotide
ggggctctctctccaggc

SEQ ID NO: 4758 - DNA, 18 bp, Artificial Sequence
  Description of Artificial Sequence: Synthetic oligonucleotide
gctttggggctctctctc

SEQ ID NO: 4759 - DNA, 18 bp, Artificial Sequence
  Description of Artificial Sequence: Synthetic oligonucleotide
cttgtgctttggggctct

SEQ ID NO: 4760 - DNA, 18 bp, Artificial Sequence
  Description of Artificial Sequence: Synthetic oligonucleotide
gtggccttgtgctttggg

SEQ ID NO: 4761 - DNA, 18 bp, Artificial Sequence
  Description of Artificial Sequence: Synthetic oligonucleotide
cccctgtggccttgtgct

SEQ ID NO: 4762 - DNA, 18 bp, Artificial Sequence
  Description of Artificial Sequence: Synthetic oligonucleotide
cccatcccctgtggcctt

SEQ ID NO: 4763 - DNA, 18 bp, Artificial Sequence
  Description of Artificial Sequence: Synthetic oligonucleotide
gaccccccatcccctgtg

SEQ ID NO: 4764 - DNA, 18 bp, Artificial Sequence
  Description of Artificial Sequence: Synthetic oligonucleotide
gccaggaccccccatccc

SEQ ID NO: 4765 - DNA, 18 bp, Artificial Sequence
  Description of Artificial Sequence: Synthetic oligonucleotide
ctagggccaggacccccc

SEQ ID NO: 4766 - DNA, 18 bp, Artificial Sequence
  Description of Artificial Sequence: Synthetic oligonucleotide
ccccactagggccaggac

SEQ ID NO: 4767 - DNA, 18 bp, Artificial Sequence
  Description of Artificial Sequence: Synthetic oligonucleotide
cctcgccccactagggcc

SEQ ID NO: 4768 - DNA, 18 bp, Artificial Sequence
  Description of Artificial Sequence: Synthetic oligonucleotide
ggcgccctcgccccacta

SEQ ID NO: 4769 - DNA, 18 bp, Artificial Sequence
  Description of Artificial Sequence: Synthetic oligonucleotide
ggcctggcgccctcgccc

SEQ ID NO: 4770 - DNA, 18 bp, Artificial Sequence
  Description of Artificial Sequence: Synthetic oligonucleotide
cccggggcctggcgccct

SEQ ID NO: 4771 - DNA, 18 bp, Artificial Sequence
  Description of Artificial Sequence: Synthetic oligonucleotide
tacaccccggggcctggc

SEQ ID NO: 4772 - DNA, 18 bp, Artificial Sequence
  Description of Artificial Sequence: Synthetic oligonucleotide
gtccttacaccccggggc

SEQ ID NO: 4773 - DNA, 18 bp, Artificial Sequence
  Description of Artificial Sequence: Synthetic oligonucleotide
tgtgtgtccttacacccc

SEQ ID NO: 4774 - DNA, 18 bp, Artificial Sequence
  Description of Artificial Sequence: Synthetic oligonucleotide
acctctgtgtgtccttac

SEQ ID NO: 4775 - DNA, 18 bp, Artificial Sequence
  Description of Artificial Sequence: Synthetic oligonucleotide
gtcccacctctgtgtgtc

SEQ ID NO: 4776 - DNA, 18 bp, Artificial Sequence
  Description of Artificial Sequence: Synthetic oligonucleotide
tcatagggaggggacagc

SEQ ID NO: 4777 - DNA, 18 bp, Artificial Sequence
  Description of Artificial Sequence: Synthetic oligonucleotide
gtcactcatagggagggg

SEQ ID NO: 4778 - DNA, 18 bp, Artificial Sequence
  Description of Artificial Sequence: Synthetic oligonucleotide
gcggggtcactcataggg

SEQ ID NO: 4779 - DNA, 18 bp, Artificial Sequence
  Description of Artificial Sequence: Synthetic oligonucleotide
caggggcggggtcactca

SEQ ID NO: 4780 - DNA, 18 bp, Artificial Sequence
  Description of Artificial Sequence: Synthetic oligonucleotide
agcagcaggggcggggtc

SEQ ID NO: 4781 - DNA, 18 bp, Artificial Sequence
  Description of Artificial Sequence: Synthetic oligonucleotide
gcagcagcagcaggggcg

SEQ ID NO: 4782 - DNA, 18 bp, Artificial Sequence
  Description of Artificial Sequence: Synthetic oligonucleotide
cacctgcagcagcagcag

SEQ ID NO: 4783 - DNA, 18 bp, Artificial Sequence
  Description of Artificial Sequence: Synthetic oligonucleotide
gtcagcacctgcagcagc

SEQ ID NO: 4784 - DNA, 18 bp, Artificial Sequence
  Description of Artificial Sequence: Synthetic oligonucleotide
agcaggtcagcacctgca

SEQ ID NO: 4785 - DNA, 18 bp, Artificial Sequence
  Description of Artificial Sequence: Synthetic oligonucleotide
ggggcagcaggtcagcac

SEQ ID NO: 4786 - DNA, 18 bp, Artificial Sequence
  Description of Artificial Sequence: Synthetic oligonucleotide
gagctggggcagcaggtc

SEQ ID NO: 4787 - DNA, 18 bp, Artificial Sequence
  Description of Artificial Sequence: Synthetic oligonucleotide
aggaggagctggggcagc

SEQ ID NO: 4788 - DNA, 18 bp, Artificial Sequence
  Description of Artificial Sequence: Synthetic oligonucleotide
ggaataggaggagctggg

SEQ ID NO: 4789 - DNA, 18 bp, Artificial Sequence
  Description of Artificial Sequence: Synthetic oligonucleotide
gagcgggaataggaggag

SEQ ID NO: 4790 - DNA, 18 bp, Artificial Sequence
  Description of Artificial Sequence: Synthetic oligonucleotide
tgagggagcgggaatagg

SEQ ID NO: 4791 - DNA, 18 bp, Artificial Sequence
  Description of Artificial Sequence: Synthetic oligonucleotide
ctgagtgagggagcggga

SEQ ID NO: 4792 - DNA, 18 bp, Artificial Sequence
  Description of Artificial Sequence: Synthetic oligonucleotide
ggtccctgagtgagggag

SEQ ID NO: 4793 - DNA, 18 bp, Artificial Sequence
  Description of Artificial Sequence: Synthetic oligonucleotide
atggaggtccctgagtga

SEQ ID NO: 4794 - DNA, 18 bp, Artificial Sequence
  Description of Artificial Sequence: Synthetic oligonucleotide
agcacatggaggtccctg

SEQ ID NO: 4795 - DNA, 18 bp, Artificial Sequence
  Description of Artificial Sequence: Synthetic oligonucleotide
ccagaagcacatggaggt

SEQ ID NO: 4796 - DNA, 18 bp, Artificial Sequence
  Description of Artificial Sequence: Synthetic oligonucleotide
atgggccagaagcacatg

SEQ ID NO: 4797 - DNA, 18 bp, Artificial Sequence
  Description of Artificial Sequence: Synthetic oligonucleotide
ctgggatgggccagaagc

SEQ ID NO: 4798 - DNA, 18 bp, Artificial Sequence
  Description of Artificial Sequence: Synthetic oligonucleotide
gtggactgggatgggcca

SEQ ID NO: 4799 - DNA, 18 bp, Artificial Sequence
  Description of Artificial Sequence: Synthetic oligonucleotide
cctgggtggactgggatg

SEQ ID NO: 4800 - DNA, 18 bp, Artificial Sequence
  Description of Artificial Sequence: Synthetic oligonucleotide
cccgtcctgggtggactg

SEQ ID NO: 4801 - DNA, 18 bp, Artificial Sequence
  Description of Artificial Sequence: Synthetic oligonucleotide
gccctcccgtcctgggtg

SEQ ID NO: 4802 - DNA, 18 bp, Artificial Sequence
  Description of Artificial Sequence: Synthetic oligonucleotide
cggcagccctcccgtcct

SEQ ID NO: 4803 - DNA, 18 bp, Artificial Sequence
  Description of Artificial Sequence: Synthetic oligonucleotide
ctgcccggcagccctccc

SEQ ID NO: 4804 - DNA, 18 bp, Artificial Sequence
  Description of Artificial Sequence: Synthetic oligonucleotide
agaccctgcccggcagcc

SEQ ID NO: 4805 - DNA, 18 bp, Artificial Sequence
  Description of Artificial Sequence: Synthetic oligonucleotide
ctcaaagaccctgcccgg

SEQ ID NO: 4806 - DNA, 18 bp, Artificial Sequence
  Description of Artificial Sequence: Synthetic oligonucleotide
aagtcctcaaagaccctg

SEQ ID NO: 4807 - DNA, 18 bp, Artificial Sequence
  Description of Artificial Sequence: Synthetic oligonucleotide
ggccgaagtcctcaaaga

SEQ ID NO: 4808 - DNA, 18 bp, Artificial Sequence
  Description of Artificial Sequence: Synthetic oligonucleotide
gaccaggccgaagtcctc

SEQ ID NO: 4809 - DNA, 18 bp, Artificial Sequence
  Description of Artificial Sequence: Synthetic oligonucleotide
agctcgaccaggccgaag

SEQ ID NO: 4810 - DNA, 18 bp, Artificial Sequence
  Description of Artificial Sequence: Synthetic oligonucleotide
ggcccagctcgaccaggc

SEQ ID NO: 4811 - DNA, 18 bp, Artificial Sequence
  Description of Artificial Sequence: Synthetic oligonucleotide
ccaggggcccagctcgac

SEQ ID NO: 4812 - DNA, 18 bp, Artificial Sequence
  Description of Artificial Sequence: Synthetic oligonucleotide
accctccaggggcccagc

SEQ ID NO: 4813 - DNA, 18 bp, Artificial Sequence
  Description of Artificial Sequence: Synthetic oligonucleotide
aggaaaccctccaggggc

SEQ ID NO: 4814 - DNA, 18 bp, Artificial Sequence
  Description of Artificial Sequence: Synthetic oligonucleotide
tctgcaggaaaccctcca

SEQ ID NO: 4815 - DNA, 18 bp, Artificial Sequence
  Description of Artificial Sequence: Synthetic oligonucleotide
acctctctgcaggaaacc

SEQ ID NO: 4816 - DNA, 18 bp, Artificial Sequence
  Description of Artificial Sequence: Synthetic oligonucleotide
ccagcacctctctgcagg

SEQ ID NO: 4817 - DNA, 18 bp, Artificial Sequence
  Description of Artificial Sequence: Synthetic oligonucleotide
gcggaccagcacctctct

SEQ ID NO: 4818 - DNA, 18 bp, Artificial Sequence
  Description of Artificial Sequence: Synthetic oligonucleotide
ggcgggcggaccagcacc

SEQ ID NO: 4819 - DNA, 18 bp, Artificial Sequence
  Description of Artificial Sequence: Synthetic oligonucleotide
aggaaggcgggcggacca

SEQ ID NO: 4820 - DNA, 18 bp, Artificial Sequence
  Description of Artificial Sequence: Synthetic oligonucleotide
tgggaaggaaggcgggcg

SEQ ID NO: 4821 - DNA, 18 bp, Artificial Sequence
  Description of Artificial Sequence: Synthetic oligonucleotide
ctgtctgggaaggaaggc

SEQ ID NO: 4822 - DNA, 18 bp, Artificial Sequence
  Description of Artificial Sequence: Synthetic oligonucleotide
agctactgtctgggaagg

SEQ ID NO: 4823 - DNA, 18 bp, Artificial Sequence
  Description of Artificial Sequence: Synthetic oligonucleotide
ccggcagctactgtctgg

SEQ ID NO: 4824 - DNA, 18 bp, Artificial Sequence
  Description of Artificial Sequence: Synthetic oligonucleotide
ggtggccggcagctactg

SEQ ID NO: 4825 - DNA, 18 bp, Artificial Sequence
  Description of Artificial Sequence: Synthetic oligonucleotide
agtacggtggccggcagc

SEQ ID NO: 4826 - DNA, 18 bp, Artificial Sequence
  Description of Artificial Sequence: Synthetic oligonucleotide
gagtcagtacggtggccg

SEQ ID NO: 4827 - DNA, 18 bp, Artificial Sequence
  Description of Artificial Sequence: Synthetic oligonucleotide
agggcgagtcagtacggt

SEQ ID NO: 4828 - DNA, 18 bp, Artificial Sequence
  Description of Artificial Sequence: Synthetic oligonucleotide
ctcaaagggcgagtcagt

SEQ ID NO: 4829 - DNA, 18 bp, Artificial Sequence
  Description of Artificial Sequence: Synthetic oligonucleotide
aggccctcaaagggcgag

SEQ ID NO: 4830 - DNA, 18 bp, Artificial Sequence
  Description of Artificial Sequence: Synthetic oligonucleotide
ggctgaggccctcaaagg

SEQ ID NO: 4831 - DNA, 18 bp, Artificial Sequence
  Description of Artificial Sequence: Synthetic oligonucleotide
atccaggctgaggccctc

SEQ ID NO: 4832 - DNA, 18 bp, Artificial Sequence
  Description of Artificial Sequence: Synthetic oligonucleotide
gaataatccaggctgagg

SEQ ID NO: 4833 - DNA, 18 bp, Artificial Sequence
  Description of Artificial Sequence: Synthetic oligonucleotide
tgaatgaataatccaggc

SEQ ID NO: 4834 - DNA, 18 bp, Artificial Sequence
  Description of Artificial Sequence: Synthetic oligonucleotide
tgttttgaatgaataatc

SEQ ID NO: 4835 - DNA, 18 bp, Artificial Sequence
  Description of Artificial Sequence: Synthetic oligonucleotide
ccccttgttttgaatgaa

SEQ ID NO: 4836 - DNA, 18 bp, Artificial Sequence
  Description of Artificial Sequence: Synthetic oligonucleotide
acatcccccttgttttga

SEQ ID NO: 4837 - DNA, 18 bp, Artificial Sequence
  Description of Artificial Sequence: Synthetic oligonucleotide
ggaccacatcccccttgt

SEQ ID NO: 4838 - DNA, 18 bp, Artificial Sequence
  Description of Artificial Sequence: Synthetic oligonucleotide
tgaggggaccacatcccc

SEQ ID NO: 4839 - DNA, 18 bp, Artificial Sequence
  Description of Artificial Sequence: Synthetic oligonucleotide
atgggtgaggggaccaca

SEQ ID NO: 4840 - DNA, 18 bp, Artificial Sequence
  Description of Artificial Sequence: Synthetic oligonucleotide
cctgcatgggtgagggga

SEQ ID NO: 4841 - DNA, 18 bp, Artificial Sequence
  Description of Artificial Sequence: Synthetic oligonucleotide
gctgtcctgcatgggtga

SEQ ID NO: 4842 - DNA, 18 bp, Artificial Sequence
  Description of Artificial Sequence: Synthetic oligonucleotide
ctcttgctgtcctgcatg

SEQ ID NO: 4843 - DNA, 18 bp, Artificial Sequence
  Description of Artificial Sequence: Synthetic oligonucleotide
actttctcttgctgtcct

SEQ ID NO: 4844 - DNA, 18 bp, Artificial Sequence
  Description of Artificial Sequence: Synthetic oligonucleotide
ctggaactttctcttgct

SEQ ID NO: 4845 - DNA, 18 bp, Artificial Sequence
  Description of Artificial Sequence: Synthetic oligonucleotide
actgactggaactttctc

SEQ ID NO: 4846 - DNA, 18 bp, Artificial Sequence
  Description of Artificial Sequence: Synthetic oligonucleotide
ggcacactgactggaact

SEQ ID NO: 4847 - DNA, 18 bp, Artificial Sequence
  Description of Artificial Sequence: Synthetic oligonucleotide
cagctggcacactgactg

SEQ ID NO: 4848 - DNA, 18 bp, Artificial Sequence
  Description of Artificial Sequence: Synthetic oligonucleotide
gccagcagctggcacact

SEQ ID NO: 4849 - DNA, 18 bp, Artificial Sequence
  Description of Artificial Sequence: Synthetic oligonucleotide
tggcagccagcagctggc

SEQ ID NO: 4850 - DNA, 18 bp, Artificial Sequence
  Description of Artificial Sequence: Synthetic oligonucleotide
tcccgtggcagccagcag

SEQ ID NO: 4851 - DNA, 18 bp, Artificial Sequence
  Description of Artificial Sequence: Synthetic oligonucleotide
ctgcctcccgtggcagcc

SEQ ID NO: 4852 - DNA, 18 bp, Artificial Sequence
  Description of Artificial Sequence: Synthetic oligonucleotide
agcacctgcctcccgtgg

SEQ ID NO: 4853 - DNA, 18 bp, Artificial Sequence
  Description of Artificial Sequence: Synthetic oligonucleotide
tctgcagcacctgcctcc

SEQ ID NO: 4854 - DNA, 18 bp, Artificial Sequence
  Description of Artificial Sequence: Synthetic oligonucleotide
tcccttctgcagcacctg

SEQ ID NO: 4855 - DNA, 18 bp, Artificial Sequence
  Description of Artificial Sequence: Synthetic oligonucleotide
gccactcccttctgcagc

SEQ ID NO: 4856 - DNA, 18 bp, Artificial Sequence
  Description of Artificial Sequence: Synthetic oligonucleotide
gggccgccactcccttct

SEQ ID NO: 4857 - DNA, 18 bp, Artificial Sequence
  Description of Artificial Sequence: Synthetic oligonucleotide
gccctgggccgccactcc

SEQ ID NO: 4858 - DNA, 18 bp, Artificial Sequence
  Description of Artificial Sequence: Synthetic oligonucleotide
acagtgccctgggccgcc

SEQ ID NO: 4859 - DNA, 18 bp, Artificial Sequence
  Description of Artificial Sequence: Synthetic oligonucleotide
ctaatacagtgccctggg

SEQ ID NO: 4860 - DNA, 18 bp, Artificial Sequence
  Description of Artificial Sequence: Synthetic oligonucleotide
agtgtctaatacagtgcc

SEQ ID NO: 4861 - DNA, 18 bp, Artificial Sequence
  Description of Artificial Sequence: Synthetic oligonucleotide
cccccagtgtctaataca

SEQ ID NO: 4862 - DNA, 18 bp, Artificial Sequence
  Description of Artificial Sequence: Synthetic oligonucleotide
ctcttcccccagtgtcta

SEQ ID NO: 4863 - DNA, 18 bp, Artificial Sequence
  Description of Artificial Sequence: Synthetic oligonucleotide
ctgaactcttcccccagt

SEQ ID NO: 4864 - DNA, 18 bp, Artificial Sequence
  Description of Artificial Sequence: Synthetic oligonucleotide
acaagctgaactcttccc

SEQ ID NO: 4865 - DNA, 18 bp, Artificial Sequence
  Description of Artificial Sequence: Synthetic oligonucleotide
ttccaacaagctgaactc

SEQ ID NO: 4866 - DNA, 18 bp, Artificial Sequence
  Description of Artificial Sequence: Synthetic oligonucleotide
aggtcttccaacaagctg

SEQ ID NO: 4867 - DNA, 18 bp, Artificial Sequence
  Description of Artificial Sequence: Synthetic oligonucleotide
cagccaggtcttccaaca

SEQ ID NO: 4868 - DNA, 18 bp, Artificial Sequence
  Description of Artificial Sequence: Synthetic oligonucleotide
gaacacagccaggtcttc

SEQ ID NO: 4869 - DNA, 18 bp, Artificial Sequence
  Description of Artificial Sequence: Synthetic oligonucleotide
ctagggaacacagccagg

SEQ ID NO: 4870 - DNA, 18 bp, Artificial Sequence
  Description of Artificial Sequence: Synthetic oligonucleotide
ggtccctagggaacacag

SEQ ID NO: 4871 - DNA, 18 bp, Artificial Sequence
  Description of Artificial Sequence: Synthetic oligonucleotide
tccagggtccctagggaa

SEQ ID NO: 4872 - DNA, 18 bp, Artificial Sequence
  Description of Artificial Sequence: Synthetic oligonucleotide
tgtggtccagggtcccta

SEQ ID NO: 4873 - DNA, 18 bp, Artificial Sequence
  Description of Artificial Sequence: Synthetic oligonucleotide
cagcctgtggtccagggt

SEQ ID NO: 4874 - DNA, 18 bp, Artificial Sequence
  Description of Artificial Sequence: Synthetic oligonucleotide
accagcagcctgtggtcc

SEQ ID NO: 4875 - DNA, 18 bp, Artificial Sequence
  Description of Artificial Sequence: Synthetic oligonucleotide
gggcccgggcggtgccag

SEQ ID NO: 4876 - DNA, 18 bp, Artificial Sequence
  Description of Artificial Sequence: Synthetic oligonucleotide
gccacgggcccgggcggt

SEQ ID NO: 4877 - DNA, 18 bp, Artificial Sequence
  Description of Artificial Sequence: Synthetic oligonucleotide
cgccagccacgggcccgg

SEQ ID NO: 4878 - DNA, 18 bp, Artificial Sequence
  Description of Artificial Sequence: Synthetic oligonucleotide
ccctccgccagccacggg

SEQ ID NO: 4879 - DNA, 18 bp, Artificial Sequence
  Description of Artificial Sequence: Synthetic oligonucleotide
cgtcaccctccgccagcc

SEQ ID NO: 4880 - DNA, 18 bp, Artificial Sequence
  Description of Artificial Sequence: Synthetic oligonucleotide
gggaccgtcaccctccgc

SEQ ID NO: 4881 - DNA, 18 bp, Artificial Sequence
  Description of Artificial Sequence: Synthetic oligonucleotide
gtcatgggaccgtcaccc

SEQ ID NO: 4882 - DNA, 18 bp, Artificial Sequence
  Description of Artificial Sequence: Synthetic oligonucleotide
atgacgtcatgggaccgt

SEQ ID NO: 4883 - DNA, 18 bp, Artificial Sequence
  Description of Artificial Sequence: Synthetic oligonucleotide
gcgccatgacgtcatggg

SEQ ID NO: 4884 - DNA, 18 bp, Artificial Sequence
  Description of Artificial Sequence: Synthetic oligonucleotide
tacctgcgccatgacgtc

SEQ ID NO: 4885 - DNA, 18 bp, Artificial Sequence
  Description of Artificial Sequence: Synthetic oligonucleotide
cagggtacctgcgccatg

SEQ ID NO: 4886 - DNA, 18 bp, Artificial Sequence
  Description of Artificial Sequence: Synthetic oligonucleotide
ggtgccagggtacctgcg

SEQ ID NO: 4887 - DNA, 18 bp, Artificial Sequence
  Description of Artificial Sequence: Synthetic oligonucleotide
cgggcggtgccagggtac

SEQ ID NO: 4888 - DNA, 18 bp, Artificial Sequence
  Description of Artificial Sequence: Synthetic oligonucleotide
gggcccgggcggtgccag

SEQ ID NO: 4889 - DNA, 18 bp, Artificial Sequence
  Description of Artificial Sequence: Synthetic oligonucleotide
gccacgggcccgggcggt

SEQ ID NO: 4890 - DNA, 18 bp, Artificial Sequence
  Description of Artificial Sequence: Synthetic oligonucleotide
cgccagccacgggcccgg

SEQ ID NO: 4891 - DNA, 18 bp, Artificial Sequence
  Description of Artificial Sequence: Synthetic oligonucleotide
ccctccgccagccacggg

SEQ ID NO: 4892 - DNA, 18 bp, Artificial Sequence
  Description of Artificial Sequence: Synthetic oligonucleotide
cgtcaccctccgccagcc

SEQ ID NO: 4893 - DNA, 18 bp, Artificial Sequence
  Description of Artificial Sequence: Synthetic oligonucleotide
gggaccgtcaccctccgc

SEQ ID NO: 4894 - DNA, 18 bp, Artificial Sequence
  Description of Artificial Sequence: Synthetic oligonucleotide
gtcatgggaccgtcaccc

SEQ ID NO: 4895 - DNA, 18 bp, Artificial Sequence
  Description of Artificial Sequence: Synthetic oligonucleotide
atgacgtcatgggaccgt

SEQ ID NO: 4896 - DNA, 18 bp, Artificial Sequence
  Description of Artificial Sequence: Synthetic oligonucleotide
gcgccatgacgtcatggg

SEQ ID NO: 4897 - DNA, 18 bp, Artificial Sequence
  Description of Artificial Sequence: Synthetic oligonucleotide
tacctgcgccatgacgtc

SEQ ID NO: 4898 - DNA, 18 bp, Artificial Sequence
  Description of Artificial Sequence: Synthetic oligonucleotide
cagggtacctgcgccatg

SEQ ID NO: 4899 - DNA, 18 bp, Artificial Sequence
  Description of Artificial Sequence: Synthetic oligonucleotide
ggtgccagggtacctgcg

SEQ ID NO: 4900 - DNA, 18 bp, Artificial Sequence
  Description of Artificial Sequence: Synthetic oligonucleotide
cgggcggtgccagggtac

SEQ ID NO: 4901 - DNA, 18 bp, Artificial Sequence
  Description of Artificial Sequence: Synthetic oligonucleotide
gggcccgggcggtgccag

SEQ ID NO: 4902 - DNA, 18 bp, Artificial Sequence
  Description of Artificial Sequence: Synthetic oligonucleotide
gccacgggcccgggcggt

SEQ ID NO: 4903 - DNA, 18 bp, Artificial Sequence
  Description of Artificial Sequence: Synthetic oligonucleotide
cgccagccacgggcccgg

SEQ ID NO: 4904 - DNA, 18 bp, Artificial Sequence
  Description of Artificial Sequence: Synthetic oligonucleotide
ccctccgccagccacggg

SEQ ID NO: 4905 - DNA, 18 bp, Artificial Sequence
  Description of Artificial Sequence: Synthetic oligonucleotide
cgtcaccctccgccagcc

SEQ ID NO: 4906 - DNA, 18 bp, Artificial Sequence
  Description of Artificial Sequence: Synthetic oligonucleotide
gggaccgtcaccctccgc

SEQ ID NO: 4907 - DNA, 18 bp, Artificial Sequence
  Description of Artificial Sequence: Synthetic oligonucleotide
gtcatgggaccgtcaccc

SEQ ID NO: 4908 - DNA, 18 bp, Artificial Sequence
  Description of Artificial Sequence: Synthetic oligonucleotide
atgacgtcatgggaccgt

SEQ ID NO: 4909 - DNA, 18 bp, Artificial Sequence
  Description of Artificial Sequence: Synthetic oligonucleotide
acgccatgacgtcatggg

SEQ ID NO: 4910 - DNA, 18 bp, Artificial Sequence
  Description of Artificial Sequence: Synthetic oligonucleotide
tacctacgccatgacgtc

SEQ ID NO: 4911 - DNA, 18 bp, Artificial Sequence
  Description of Artificial Sequence: Synthetic oligonucleotide
cagggtacctacgccatg

SEQ ID NO: 4912 - DNA, 18 bp, Artificial Sequence
  Description of Artificial Sequence: Synthetic oligonucleotide
ggtgccagggtacctacg

SEQ ID NO: 4913 - DNA, 18 bp, Artificial Sequence
  Description of Artificial Sequence: Synthetic oligonucleotide
cgggcggtgccagggtac

SEQ ID NO: 4914 - DNA, 18 bp, Artificial Sequence
  Description of Artificial Sequence: Synthetic oligonucleotide
gggcccgggcggtgccag

SEQ ID NO: 4915 - DNA, 18 bp, Artificial Sequence
  Description of Artificial Sequence: Synthetic oligonucleotide
gccacgggcccgggcggt

SEQ ID NO: 4916 - DNA, 18 bp, Artificial Sequence
  Description of Artificial Sequence: Synthetic oligonucleotide
cgccagccacgggcccgg

SEQ ID NO: 4917 - DNA, 18 bp, Artificial Sequence
  Description of Artificial Sequence: Synthetic oligonucleotide
ccctccgccagccacggg

SEQ ID NO: 4918 - DNA, 18 bp, Artificial Sequence
  Description of Artificial Sequence: Synthetic oligonucleotide
cgtcaccctccgccagcc

SEQ ID NO: 4919 - DNA, 18 bp, Artificial Sequence
  Description of Artificial Sequence: Synthetic oligonucleotide
gggaccgtcaccctccgc

SEQ ID NO: 4920 - DNA, 18 bp, Artificial Sequence
  Description of Artificial Sequence: Synthetic oligonucleotide
gtcatgggaccgtcaccc

SEQ ID NO: 4921 - DNA, 18 bp, Artificial Sequence
  Description of Artificial Sequence: Synthetic oligonucleotide
atgacgtcatgggaccgt

SEQ ID NO: 4922 - DNA, 18 bp, Artificial Sequence
  Description of Artificial Sequence: Synthetic oligonucleotide
gcgccatgacgtcatggg

SEQ ID NO: 4923 - DNA, 18 bp, Artificial Sequence
  Description of Artificial Sequence: Synthetic oligonucleotide
tacctgcgccatgacgtc

SEQ ID NO: 4924 - DNA, 18 bp, Artificial Sequence
  Description of Artificial Sequence: Synthetic oligonucleotide
cagggtacctgcgccatg

SEQ ID NO: 4925 - DNA, 18 bp, Artificial Sequence
  Description of Artificial Sequence: Synthetic oligonucleotide
ggtgccagggtacctgcg

SEQ ID NO: 4926 - DNA, 18 bp, Artificial Sequence
  Description of Artificial Sequence: Synthetic oligonucleotide
cgggcggtgccagggtac

SEQ ID NO: 4927 - DNA, 18 bp, Artificial Sequence
  Description of Artificial Sequence: Synthetic oligonucleotide
gggcccgggcggtgccag

SEQ ID NO: 4928 - DNA, 18 bp, Artificial Sequence
  Description of Artificial Sequence: Synthetic oligonucleotide
gccacgggcccgggcggt

SEQ ID NO: 4929 - DNA, 18 bp, Artificial Sequence
  Description of Artificial Sequence: Synthetic oligonucleotide
cgccagccacgggcccgg

SEQ ID NO: 4930 - DNA, 18 bp, Artificial Sequence
  Description of Artificial Sequence: Synthetic oligonucleotide
ccctccgccagccacggg

SEQ ID NO: 4931 - DNA, 18 bp, Artificial Sequence
  Description of Artificial Sequence: Synthetic oligonucleotide
cgtcaccctccgccagcc

SEQ ID NO: 4932 - DNA, 18 bp, Artificial Sequence
  Description of Artificial Sequence: Synthetic oligonucleotide
gggaccgtcaccctccgc

SEQ ID NO: 4933 - DNA, 18 bp, Artificial Sequence
  Description of Artificial Sequence: Synthetic oligonucleotide
gtcatgggaccgtcaccc

SEQ ID NO: 4934 - DNA, 18 bp, Artificial Sequence
  Description of Artificial Sequence: Synthetic oligonucleotide
atgacgtcatgggaccgt

SEQ ID NO: 4935 - DNA, 18 bp, Artificial Sequence
  Description of Artificial Sequence: Synthetic oligonucleotide
gcgccatgacgtcatggg

SEQ ID NO: 4936 - DNA, 18 bp, Artificial Sequence
  Description of Artificial Sequence: Synthetic oligonucleotide
tacctgcgccatgacgtc

SEQ ID NO: 4937 - DNA, 18 bp, Artificial Sequence
  Description of Artificial Sequence: Synthetic oligonucleotide
cagggtacctgcgccatg

SEQ ID NO: 4938 - DNA, 18 bp, Artificial Sequence
  Description of Artificial Sequence: Synthetic oligonucleotide
ggtgccagggtacctgcg

SEQ ID NO: 4939 - DNA, 18 bp, Artificial Sequence
  Description of Artificial Sequence: Synthetic oligonucleotide
cgggcggtgccagggtac

SEQ ID NO: 4940 - DNA, 18 bp, Artificial Sequence
  Description of Artificial Sequence: Synthetic oligonucleotide
gggcccgggcggtgccag

SEQ ID NO: 4941 - DNA, 18 bp, Artificial Sequence
  Description of Artificial Sequence: Synthetic oligonucleotide
gccacgggcccgggcggt

SEQ ID NO: 4942 - DNA, 18 bp, Artificial Sequence
  Description of Artificial Sequence: Synthetic oligonucleotide
cgccagccacgggcccgg

SEQ ID NO: 4943 - DNA, 18 bp, Artificial Sequence
  Description of Artificial Sequence: Synthetic oligonucleotide
ccctccgccagccacggg

SEQ ID NO: 4944 - DNA, 18 bp, Artificial Sequence
  Description of Artificial Sequence: Synthetic oligonucleotide
cgtcaccctccgccagcc

SEQ ID NO: 4945 - DNA, 18 bp, Artificial Sequence
  Description of Artificial Sequence: Synthetic oligonucleotide
gggaccgtcaccctccgc

SEQ ID NO: 4946 - DNA, 18 bp, Artificial Sequence
  Description of Artificial Sequence: Synthetic oligonucleotide
gtcatgggaccgtcaccc

SEQ ID NO: 4947 - DNA, 18 bp, Artificial Sequence
  Description of Artificial Sequence: Synthetic oligonucleotide
atgacgtcatgggaccgt

SEQ ID NO: 4948 - DNA, 18 bp, Artificial Sequence
  Description of Artificial Sequence: Synthetic oligonucleotide
gcgccatgacgtcatggg

SEQ ID NO: 4949 - DNA, 18 bp, Artificial Sequence
  Description of Artificial Sequence: Synthetic oligonucleotide
tacctgcgccatgacgtc

SEQ ID NO: 4950 - DNA, 18 bp, Artificial Sequence
  Description of Artificial Sequence: Synthetic oligonucleotide
cagggtacctgcgccatg

SEQ ID NO: 4951 - DNA, 18 bp, Artificial Sequence
  Description of Artificial Sequence: Synthetic oligonucleotide
ggtgccagggtacctgcg

SEQ ID NO: 4952 - DNA, 18 bp, Artificial Sequence
  Description of Artificial Sequence: Synthetic oligonucleotide
cgggcggtgccagggtac

SEQ ID NO: 4953 - DNA, 18 bp, Artificial Sequence
  Description of Artificial Sequence: Synthetic oligonucleotide
gggcccgggcggtgccag

SEQ ID NO: 4954 - DNA, 18 bp, Artificial Sequence
  Description of Artificial Sequence: Synthetic oligonucleotide
gccacgggcccgggcggt

SEQ ID NO: 4955 - DNA, 18 bp, Artificial Sequence
  Description of Artificial Sequence: Synthetic oligonucleotide
cgccagccacgggcccgg

SEQ ID NO: 4956 - DNA, 18 bp, Artificial Sequence
  Description of Artificial Sequence: Synthetic oligonucleotide
ccctccgccagccacggg

SEQ ID NO: 4957 - DNA, 18 bp, Artificial Sequence
  Description of Artificial Sequence: Synthetic oligonucleotide
tctcaccctccgccagcc

SEQ ID NO: 4958 - DNA, 18 bp, Artificial Sequence
  Description of Artificial Sequence: Synthetic oligonucleotide
gctggtctcaccctccgc

SEQ ID NO: 4959 - DNA, 18 bp, Artificial Sequence
  Description of Artificial Sequence: Synthetic oligonucleotide
aaggggctggtctcaccc

SEQ ID NO: 4960 - DNA, 18 bp, Artificial Sequence
  Description of Artificial Sequence: Synthetic oligonucleotide
ctcctaaggggctggtct

SEQ ID NO: 4961 - DNA, 18 bp, Artificial Sequence
  Description of Artificial Sequence: Synthetic oligonucleotide
ctctcctcctaaggggct

SEQ ID NO: 4962 - DNA, 18 bp, Artificial Sequence
  Description of Artificial Sequence: Synthetic oligonucleotide
gttctctctcctcctaag

SEQ ID NO: 4963 - DNA, 18 bp, Artificial Sequence
  Description of Artificial Sequence: Synthetic oligonucleotide
gagctgttctctctcctc

SEQ ID NO: 4964 - DNA, 18 bp, Artificial Sequence
  Description of Artificial Sequence: Synthetic oligonucleotide
actctgagctgttctctc

SEQ ID NO: 4965 - DNA, 18 bp, Artificial Sequence
  Description of Artificial Sequence: Synthetic oligonucleotide
tggggactctgagctgtt

SEQ ID NO: 4966 - DNA, 18 bp, Artificial Sequence
  Description of Artificial Sequence: Synthetic oligonucleotide
aggtgtggggactctgag

SEQ ID NO: 4967 - DNA, 18 bp, Artificial Sequence
  Description of Artificial Sequence: Synthetic oligonucleotide
ggaagaggtgtggggact

SEQ ID NO: 4968 - DNA, 18 bp, Artificial Sequence
  Description of Artificial Sequence: Synthetic oligonucleotide
acgagggaagaggtgtgg

SEQ ID NO: 4969 - DNA, 18 bp, Artificial Sequence
  Description of Artificial Sequence: Synthetic oligonucleotide
ttcccacgagggaagagg

SEQ ID NO: 4970 - DNA, 18 bp, Artificial Sequence
  Description of Artificial Sequence: Synthetic oligonucleotide
ccagcttcccacgaggga

SEQ ID NO: 4971 - DNA, 18 bp, Artificial Sequence
  Description of Artificial Sequence: Synthetic oligonucleotide
tcaacccagcttcccacg

SEQ ID NO: 4972 - DNA, 18 bp, Artificial Sequence
  Description of Artificial Sequence: Synthetic oligonucleotide
ggttcgcccagggctcgc

SEQ ID NO: 4973 - DNA, 18 bp, Artificial Sequence
  Description of Artificial Sequence: Synthetic oligonucleotide
gcaagggttcgcccaggg

SEQ ID NO: 4974 - DNA, 18 bp, Artificial Sequence
  Description of Artificial Sequence: Synthetic oligonucleotide
agacagcaagggttcgcc

SEQ ID NO: 4975 - DNA, 18 bp, Artificial Sequence
  Description of Artificial Sequence: Synthetic oligonucleotide
gagccagacagcaagggt

SEQ ID NO: 4976 - DNA, 18 bp, Artificial Sequence
  Description of Artificial Sequence: Synthetic oligonucleotide
agcgggagccagacagca

SEQ ID NO: 4977 - DNA, 18 bp, Artificial Sequence
  Description of Artificial Sequence: Synthetic oligonucleotide
tgaaaagcgggagccaga

SEQ ID NO: 4978 - DNA, 18 bp, Artificial Sequence
  Description of Artificial Sequence: Synthetic oligonucleotide
gagggtgaaaagcgggag

SEQ ID NO: 4979 - DNA, 18 bp, Artificial Sequence
  Description of Artificial Sequence: Synthetic oligonucleotide
cagctgagggtgaaaagc

SEQ ID NO: 4980 - DNA, 18 bp, Artificial Sequence
  Description of Artificial Sequence: Synthetic oligonucleotide
tcttgcagctgagggtga

SEQ ID NO: 4981 - DNA, 18 bp, Artificial Sequence
  Description of Artificial Sequence: Synthetic oligonucleotide
accagtcttgcagctgag

SEQ ID NO: 4982 - DNA, 18 bp, Artificial Sequence
  Description of Artificial Sequence: Synthetic oligonucleotide
tcaacaccagtcttgcag

SEQ ID NO: 4983 - DNA, 18 bp, Artificial Sequence
  Description of Artificial Sequence: Synthetic oligonucleotide
aaagttcaacaccagtct

SEQ ID NO: 4984 - DNA, 18 bp, Artificial Sequence
  Description of Artificial Sequence: Synthetic oligonucleotide
ctcacaaagttcaacacc

SEQ ID NO: 4985 - DNA, 18 bp, Artificial Sequence
  Description of Artificial Sequence: Synthetic oligonucleotide
ggaatctcacaaagttca

SEQ ID NO: 4986 - DNA, 18 bp, Artificial Sequence
  Description of Artificial Sequence: Synthetic oligonucleotide
tttggggaatctcacaaa

SEQ ID NO: 4987 - DNA, 18 bp, Artificial Sequence
  Description of Artificial Sequence: Synthetic oligonucleotide
gcaggtttggggaatctc

SEQ ID NO: 4988 - DNA, 18 bp, Artificial Sequence
  Description of Artificial Sequence: Synthetic oligonucleotide
ctctggcaggtttgggga

SEQ ID NO: 4989 - DNA, 18 bp, Artificial Sequence
  Description of Artificial Sequence: Synthetic oligonucleotide
tatctctctggcaggttt

SEQ ID NO: 4990 - DNA, 18 bp, Artificial Sequence
  Description of Artificial Sequence: Synthetic oligonucleotide
gggtgtatctctctggca

SEQ ID NO: 4991 - DNA, 18 bp, Artificial Sequence
  Description of Artificial Sequence: Synthetic oligonucleotide
ccgcagggtgtatctctc

SEQ ID NO: 4992 - DNA, 18 bp, Artificial Sequence
  Description of Artificial Sequence: Synthetic oligonucleotide
ctcggccgcagggtgtat

SEQ ID NO: 4993 - DNA, 18 bp, Artificial Sequence
  Description of Artificial Sequence: Synthetic oligonucleotide
cacgcctcggccgcaggg

SEQ ID NO: 4994 - DNA, 18 bp, Artificial Sequence
  Description of Artificial Sequence: Synthetic oligonucleotide
gttaacacgcctcggccg

SEQ ID NO: 4995 - DNA, 18 bp, Artificial Sequence
  Description of Artificial Sequence: Synthetic oligonucleotide
ggagtgttaacacgcctc

SEQ ID NO: 4996 - DNA, 18 bp, Artificial Sequence
  Description of Artificial Sequence: Synthetic oligonucleotide
aatccggagtgttaacac

SEQ ID NO: 4997 - DNA, 18 bp, Artificial Sequence
  Description of Artificial Sequence: Synthetic oligonucleotide
tcaggaatccggagtgtt

SEQ ID NO: 4998 - DNA, 18 bp, Artificial Sequence
  Description of Artificial Sequence: Synthetic oligonucleotide
ggaactcaggaatccgga

SEQ ID NO: 4999 - DNA, 18 bp, Artificial Sequence
  Description of Artificial Sequence: Synthetic oligonucleotide
ttcctggaactcaggaat

SEQ ID NO: 5000 - DNA, 18 bp, Artificial Sequence
  Description of Artificial Sequence: Synthetic oligonucleotide
aggttttcctggaactca

SEQ ID NO: 5001 - DNA, 18 bp, Artificial Sequence
  Description of Artificial Sequence: Synthetic oligonucleotide
tgggaaggttttcctgga

SEQ ID NO: 5002 - DNA, 18 bp, Artificial Sequence
  Description of Artificial Sequence: Synthetic oligonucleotide
ttctctgggaaggttttc

SEQ ID NO: 5003 - DNA, 18 bp, Artificial Sequence
  Description of Artificial Sequence: Synthetic oligonucleotide
accctttctctgggaagg

SEQ ID NO: 5004 - DNA, 18 bp, Artificial Sequence
  Description of Artificial Sequence: Synthetic oligonucleotide
gtctcaccctttctctgg

SEQ ID NO: 5005 - DNA, 18 bp, Artificial Sequence
  Description of Artificial Sequence: Synthetic oligonucleotide
gaaatgtctcaccctttc

SEQ ID NO: 5006 - DNA, 18 bp, Artificial Sequence
  Description of Artificial Sequence: Synthetic oligonucleotide
tcttggaaatgtctcacc

SEQ ID NO: 5007 - DNA, 18 bp, Artificial Sequence
  Description of Artificial Sequence: Synthetic oligonucleotide
ccccgtcttggaaatgtc

SEQ ID NO: 5008 - DNA, 18 bp, Artificial Sequence
  Description of Artificial Sequence: Synthetic oligonucleotide
gggtcccccgtcttggaa

SEQ ID NO: 5009 - DNA, 18 bp, Artificial Sequence
  Description of Artificial Sequence: Synthetic oligonucleotide
tccaagggtcccccgtct

SEQ ID NO: 5010 - DNA, 18 bp, Artificial Sequence
  Description of Artificial Sequence: Synthetic oligonucleotide
acatttccaagggtcccc

SEQ ID NO: 5011 - DNA, 18 bp, Artificial Sequence
  Description of Artificial Sequence: Synthetic oligonucleotide
ccaccacatttccaaggg

SEQ ID NO: 5012 - DNA, 18 bp, Artificial Sequence
  Description of Artificial Sequence: Synthetic oligonucleotide
cgtcaccaccacatttcc

SEQ ID NO: 5013 - DNA, 18 bp, Artificial Sequence
  Description of Artificial Sequence: Synthetic oligonucleotide
gaacacgtcaccaccaca

SEQ ID NO: 5014 - DNA, 18 bp, Artificial Sequence
  Description of Artificial Sequence: Synthetic oligonucleotide
agctggaacacgtcacca

SEQ ID NO: 5015 - DNA, 18 bp, Artificial Sequence
  Description of Artificial Sequence: Synthetic oligonucleotide
aatttagctggaacacgt

SEQ ID NO: 5016 - DNA, 18 bp, Artificial Sequence
  Description of Artificial Sequence: Synthetic oligonucleotide
gacaaaatttagctggaa

SEQ ID NO: 5017 - DNA, 18 bp, Artificial Sequence
  Description of Artificial Sequence: Synthetic oligonucleotide
cccctgacaaaatttagc

SEQ ID NO: 5018 - DNA, 18 bp, Artificial Sequence
  Description of Artificial Sequence: Synthetic oligonucleotide
gaattcccctgacaaaat

SEQ ID NO: 5019 - DNA, 18 bp, Artificial Sequence
  Description of Artificial Sequence: Synthetic oligonucleotide
tttccgaattcccctgac

SEQ ID NO: 5020 - DNA, 18 bp, Artificial Sequence
  Description of Artificial Sequence: Synthetic oligonucleotide
agagttttccgaattccc

SEQ ID NO: 5021 - DNA, 18 bp, Artificial Sequence
  Description of Artificial Sequence: Synthetic oligonucleotide
agcctagagttttccgaa

SEQ ID NO: 5022 - DNA, 18 bp, Artificial Sequence
  Description of Artificial Sequence: Synthetic oligonucleotide
tacctagcctagagtttt

SEQ ID NO: 5023 - DNA, 18 bp, Artificial Sequence
  Description of Artificial Sequence: Synthetic oligonucleotide
ttaattacctagcctaga

SEQ ID NO: 5024 - DNA, 18 bp, Artificial Sequence
  Description of Artificial Sequence: Synthetic oligonucleotide
ctttgttaattacctagc

SEQ ID NO: 5025 - DNA, 18 bp, Artificial Sequence
  Description of Artificial Sequence: Synthetic oligonucleotide
ggctgctttgttaattac

SEQ ID NO: 5026 - DNA, 18 bp, Artificial Sequence
  Description of Artificial Sequence: Synthetic oligonucleotide
atgaaggctgctttgtta

SEQ ID NO: 5027 - DNA, 18 bp, Artificial Sequence
  Description of Artificial Sequence: Synthetic oligonucleotide
cccgccccttcaggcatt

SEQ ID NO: 5028 - DNA, 18 bp, Artificial Sequence
  Description of Artificial Sequence: Synthetic oligonucleotide
ccagccccgccccttcag

SEQ ID NO: 5029 - DNA, 18 bp, Artificial Sequence
  Description of Artificial Sequence: Synthetic oligonucleotide
cagcgccagccccgcccc

SEQ ID NO: 5030 - DNA, 18 bp, Artificial Sequence
  Description of Artificial Sequence: Synthetic oligonucleotide
agtcccagcgccagcccc

SEQ ID NO: 5031 - DNA, 18 bp, Artificial Sequence
  Description of Artificial Sequence: Synthetic oligonucleotide
gggggagtcccagcgcca

SEQ ID NO: 5032 - DNA, 18 bp, Artificial Sequence
  Description of Artificial Sequence: Synthetic oligonucleotide
gggtggggggagtcccag

SEQ ID NO: 5033 - DNA, 18 bp, Artificial Sequence
  Description of Artificial Sequence: Synthetic oligonucleotide
ggcgggggtggggggagt

SEQ ID NO: 5034 - DNA, 18 bp, Artificial Sequence
  Description of Artificial Sequence: Synthetic oligonucleotide
gggtgggcgggggtgggg

SEQ ID NO: 5035 - DNA, 18 bp, Artificial Sequence
  Description of Artificial Sequence: Synthetic oligonucleotide
aacgtgggtgggcggggg

SEQ ID NO: 5036 - DNA, 18 bp, Artificial Sequence
  Description of Artificial Sequence: Synthetic oligonucleotide
gcccgaacgtgggtgggc

SEQ ID NO: 5037 - DNA, 18 bp, Artificial Sequence
  Description of Artificial Sequence: Synthetic oligonucleotide
cgcccgcccgaacgtggg

SEQ ID NO: 5038 - DNA, 18 bp, Artificial Sequence
  Description of Artificial Sequence: Synthetic oligonucleotide
ccgcccgcccgcccgaac

SEQ ID NO: 5039 - DNA, 18 bp, Artificial Sequence
  Description of Artificial Sequence: Synthetic oligonucleotide
cagccccgcccgcccgcc

SEQ ID NO: 5040 - DNA, 18 bp, Artificial Sequence
  Description of Artificial Sequence: Synthetic oligonucleotide
ggcgtcagccccgcccgc

SEQ ID NO: 5041 - DNA, 18 bp, Artificial Sequence
  Description of Artificial Sequence: Synthetic oligonucleotide
gtttcggcgtcagccccg

SEQ ID NO: 5042 - DNA, 18 bp, Artificial Sequence
  Description of Artificial Sequence: Synthetic oligonucleotide
cttctgtttcggcgtcag

SEQ ID NO: 5043 - DNA, 18 bp, Artificial Sequence
  Description of Artificial Sequence: Synthetic oligonucleotide
acaggcttctgtttcggc

SEQ ID NO: 5044 - DNA, 18 bp, Artificial Sequence
  Description of Artificial Sequence: Synthetic oligonucleotide
acagcacaggcttctgtt

SEQ ID NO: 5045 - DNA, 18 bp, Artificial Sequence
  Description of Artificial Sequence: Synthetic oligonucleotide
gccccacagcacaggctt

SEQ ID NO: 5046 - DNA, 18 bp, Artificial Sequence
  Description of Artificial Sequence: Synthetic oligonucleotide
ccgaggccccacagcaca

SEQ ID NO: 5047 - DNA, 18 bp, Artificial Sequence
  Description of Artificial Sequence: Synthetic oligonucleotide
cctttccgaggccccaca

SEQ ID NO: 5048 - DNA, 18 bp, Artificial Sequence
  Description of Artificial Sequence: Synthetic oligonucleotide
cagcccctttccgaggcc

SEQ ID NO: 5049 - DNA, 18 bp, Artificial Sequence
  Description of Artificial Sequence: Synthetic oligonucleotide
tggcccagcccctttccg

SEQ ID NO: 5050 - DNA, 18 bp, Artificial Sequence
  Description of Artificial Sequence: Synthetic oligonucleotide
ggcgctggcccagcccct

SEQ ID NO: 5051 - DNA, 18 bp, Artificial Sequence
  Description of Artificial Sequence: Synthetic oligonucleotide
gccccggcgctggcccag

SEQ ID NO: 5052 - DNA, 18 bp, Artificial Sequence
  Description of Artificial Sequence: Synthetic oligonucleotide
gcctggccccggcgctgg

SEQ ID NO: 5053 - DNA, 18 bp, Artificial Sequence
  Description of Artificial Sequence: Synthetic oligonucleotide
ctcgagcctggccccggc

SEQ ID NO: 5054 - DNA, 18 bp, Artificial Sequence
  Description of Artificial Sequence: Synthetic oligonucleotide
cctttctcgagcctggcc

SEQ ID NO: 5055 - DNA, 18 bp, Artificial Sequence
  Description of Artificial Sequence: Synthetic oligonucleotide
cgcagcctttctcgagcc

SEQ ID NO: 5056 - DNA, 18 bp, Artificial Sequence
  Description of Artificial Sequence: Synthetic oligonucleotide
cttcgcgcagcctttctc

SEQ ID NO: 5057 - DNA, 18 bp, Artificial Sequence
  Description of Artificial Sequence: Synthetic oligonucleotide
gcacacttcgcgcagcct

SEQ ID NO: 5058 - DNA, 18 bp, Artificial Sequence
  Description of Artificial Sequence: Synthetic oligonucleotide
ccagtgcacacttcgcgc

SEQ ID NO: 5059 - DNA, 18 bp, Artificial Sequence
  Description of Artificial Sequence: Synthetic oligonucleotide
acgtcccagtgcacactt

SEQ ID NO: 5060 - DNA, 18 bp, Artificial Sequence
  Description of Artificial Sequence: Synthetic oligonucleotide
actccacgtcccagtgca

SEQ ID NO: 5061 - DNA, 18 bp, Artificial Sequence
  Description of Artificial Sequence: Synthetic oligonucleotide
cttctactccacgtccca

SEQ ID NO: 5062 - DNA, 18 bp, Artificial Sequence
  Description of Artificial Sequence: Synthetic oligonucleotide
cctgccttctactccacg

SEQ ID NO: 5063 - DNA, 18 bp, Artificial Sequence
  Description of Artificial Sequence: Synthetic oligonucleotide
tcccgcctgccttctact

SEQ ID NO: 5064 - DNA, 18 bp, Artificial Sequence
  Description of Artificial Sequence: Synthetic oligonucleotide
cgccctcccgcctgcctt

SEQ ID NO: 5065 - DNA, 18 bp, Artificial Sequence
  Description of Artificial Sequence: Synthetic oligonucleotide
ctgcccgccctcccgcct

SEQ ID NO: 5066 - DNA, 18 bp, Artificial Sequence
  Description of Artificial Sequence: Synthetic oligonucleotide
gcaccctgcccgccctcc

SEQ ID NO: 5067 - DNA, 18 bp, Artificial Sequence
  Description of Artificial Sequence: Synthetic oligonucleotide
tccttgcaccctgcccgc

SEQ ID NO: 5068 - DNA, 18 bp, Artificial Sequence
  Description of Artificial Sequence: Synthetic oligonucleotide
aagcatccttgcaccctg

SEQ ID NO: 5069 - DNA, 18 bp, Artificial Sequence
  Description of Artificial Sequence: Synthetic oligonucleotide
gggccaagcatccttgca

SEQ ID NO: 5070 - DNA, 18 bp, Artificial Sequence
  Description of Artificial Sequence: Synthetic oligonucleotide
agggtgggccaagcatcc

SEQ ID NO: 5071 - DNA, 18 bp, Artificial Sequence
  Description of Artificial Sequence: Synthetic oligonucleotide
ctctcagggtgggccaag

SEQ ID NO: 5072 - DNA, 18 bp, Artificial Sequence
  Description of Artificial Sequence: Synthetic oligonucleotide
tacgcctctcagggtggg

SEQ ID NO: 5073 - DNA, 18 bp, Artificial Sequence
  Description of Artificial Sequence: Synthetic oligonucleotide
cgaattacgcctctcagg

SEQ ID NO: 5074 - DNA, 18 bp, Artificial Sequence
  Description of Artificial Sequence: Synthetic oligonucleotide
atgggcgaattacgcctc

SEQ ID NO: 5075 - DNA, 18 bp, Artificial Sequence
  Description of Artificial Sequence: Synthetic oligonucleotide
tgttgatgggcgaattac

SEQ ID NO: 5076 - DNA, 18 bp, Artificial Sequence
  Description of Artificial Sequence: Synthetic oligonucleotide
agcaatgttgatgggcga

SEQ ID NO: 5077 - DNA, 18 bp, Artificial Sequence
  Description of Artificial Sequence: Synthetic oligonucleotide
ctgacagcaatgttgatg

SEQ ID NO: 5078 - DNA, 18 bp, Artificial Sequence
  Description of Artificial Sequence: Synthetic oligonucleotide
gatgcctgacagcaatgt

SEQ ID NO: 5079 - DNA, 18 bp, Artificial Sequence
  Description of Artificial Sequence: Synthetic oligonucleotide
aaaaagatgcctgacagc

SEQ ID NO: 5080 - DNA, 18 bp, Artificial Sequence
  Description of Artificial Sequence: Synthetic oligonucleotide
gtgctaaaaagatgcctg

SEQ ID NO: 5081 - DNA, 18 bp, Artificial Sequence
  Description of Artificial Sequence: Synthetic oligonucleotide
gtctagtgctaaaaagat

SEQ ID NO: 5082 - DNA, 18 bp, Artificial Sequence
  Description of Artificial Sequence: Synthetic oligonucleotide
gtcacgtctagtgctaaa

SEQ ID NO: 5083 - DNA, 18 bp, Artificial Sequence
  Description of Artificial Sequence: Synthetic oligonucleotide
ccggggtcacgtctagtg

SEQ ID NO: 5084 - DNA, 18 bp, Artificial Sequence
  Description of Artificial Sequence: Synthetic oligonucleotide
cacccccggggtcacgtc

SEQ ID NO: 5085 - DNA, 18 bp, Artificial Sequence
  Description of Artificial Sequence: Synthetic oligonucleotide
cgctggggcccagggtgc

SEQ ID NO: 5086 - DNA, 18 bp, Artificial Sequence
  Description of Artificial Sequence: Synthetic oligonucleotide
tggtccgctggggcccag

SEQ ID NO: 5087 - DNA, 18 bp, Artificial Sequence
  Description of Artificial Sequence: Synthetic oligonucleotide
tgccatggtccgctgggg

SEQ ID NO: 5088 - DNA, 18 bp, Artificial Sequence
  Description of Artificial Sequence: Synthetic oligonucleotide
gttaatgccatggtccgc

SEQ ID NO: 5089 - DNA, 18 bp, Artificial Sequence
  Description of Artificial Sequence: Synthetic oligonucleotide
gagcagttaatgccatgg

SEQ ID NO: 5090 - DNA, 18 bp, Artificial Sequence
  Description of Artificial Sequence: Synthetic oligonucleotide
agagagagcagttaatgc

SEQ ID NO: 5091 - DNA, 18 bp, Artificial Sequence
  Description of Artificial Sequence: Synthetic oligonucleotide
gagagagagagagcagtt

SEQ ID NO: 5092 - DNA, 18 bp, Artificial Sequence
  Description of Artificial Sequence: Synthetic oligonucleotide
ggagagagagagagagag

SEQ ID NO: 5093 - DNA, 18 bp, Artificial Sequence
  Description of Artificial Sequence: Synthetic oligonucleotide
gagaaggagagagagaga

SEQ ID NO: 5094 - DNA, 18 bp, Artificial Sequence
  Description of Artificial Sequence: Synthetic oligonucleotide
aaagagagaaggagagag

SEQ ID NO: 5095 - DNA, 18 bp, Artificial Sequence
  Description of Artificial Sequence: Synthetic oligonucleotide
gggagaaagagagaagga

SEQ ID NO: 5096 - DNA, 18 bp, Artificial Sequence
  Description of Artificial Sequence: Synthetic oligonucleotide
gcgaggggagaaagagag

SEQ ID NO: 5097 - DNA, 18 bp, Artificial Sequence
  Description of Artificial Sequence: Synthetic oligonucleotide
ggatggcgaggggagaaa

SEQ ID NO: 5098 - DNA, 18 bp, Artificial Sequence
  Description of Artificial Sequence: Synthetic oligonucleotide
gggtgggatggcgagggg

SEQ ID NO: 5099 - DNA, 18 bp, Artificial Sequence
  Description of Artificial Sequence: Synthetic oligonucleotide
ggcaggggtgggatggcg

SEQ ID NO: 5100 - DNA, 18 bp, Artificial Sequence
  Description of Artificial Sequence: Synthetic oligonucleotide
aggatggcaggggtggga

SEQ ID NO: 5101 - DNA, 18 bp, Artificial Sequence
  Description of Artificial Sequence: Synthetic oligonucleotide
cacacaggatggcagggg

SEQ ID NO: 5102 - DNA, 18 bp, Artificial Sequence
  Description of Artificial Sequence: Synthetic oligonucleotide
gatggcacacaggatggc

SEQ ID NO: 5103 - DNA, 18 bp, Artificial Sequence
  Description of Artificial Sequence: Synthetic oligonucleotide
catgagatggcacacagg

SEQ ID NO: 5104 - DNA, 18 bp, Artificial Sequence
  Description of Artificial Sequence: Synthetic oligonucleotide
agagccatgagatggcac

SEQ ID NO: 5105 - DNA, 18 bp, Artificial Sequence
  Description of Artificial Sequence: Synthetic oligonucleotide
gcaagagagccatgagat

SEQ ID NO: 5106 - DNA, 18 bp, Artificial Sequence
  Description of Artificial Sequence: Synthetic oligonucleotide
gggaggcaagagagccat

SEQ ID NO: 5107 - DNA, 18 bp, Artificial Sequence
  Description of Artificial Sequence: Synthetic oligonucleotide
gggcagggaggcaagaga

SEQ ID NO: 5108 - DNA, 18 bp, Artificial Sequence
  Description of Artificial Sequence: Synthetic oligonucleotide
gatgtgggcagggaggca

SEQ ID NO: 5109 - DNA, 18 bp, Artificial Sequence
  Description of Artificial Sequence: Synthetic oligonucleotide
agggagatgtgggcaggg

SEQ ID NO: 5110 - DNA, 18 bp, Artificial Sequence
  Description of Artificial Sequence: Synthetic oligonucleotide
ggtccagggagatgtggg

SEQ ID NO: 5111 - DNA, 18 bp, Artificial Sequence
  Description of Artificial Sequence: Synthetic oligonucleotide
gaaggggtccagggagat

SEQ ID NO: 5112 - DNA, 18 bp, Artificial Sequence
  Description of Artificial Sequence: Synthetic oligonucleotide
aaagggaaggggtccagg

SEQ ID NO: 5113 - DNA, 18 bp, Artificial Sequence
  Description of Artificial Sequence: Synthetic oligonucleotide
aggtaaaagggaaggggt

SEQ ID NO: 5114 - DNA, 18 bp, Artificial Sequence
  Description of Artificial Sequence: Synthetic oligonucleotide
agaccaggtaaaagggaa

SEQ ID NO: 5115 - DNA, 18 bp, Artificial Sequence
  Description of Artificial Sequence: Synthetic oligonucleotide
ccaagagaccaggtaaaa

SEQ ID NO: 5116 - DNA, 18 bp, Artificial Sequence
  Description of Artificial Sequence: Synthetic oligonucleotide
cggccccaagagaccagg

SEQ ID NO: 5117 - DNA, 18 bp, Artificial Sequence
  Description of Artificial Sequence: Synthetic oligonucleotide
gacagcggccccaagaga

SEQ ID NO: 5118 - DNA, 18 bp, Artificial Sequence
  Description of Artificial Sequence: Synthetic oligonucleotide
agggagacagcggcccca

SEQ ID NO: 5119 - DNA, 18 bp, Artificial Sequence
  Description of Artificial Sequence: Synthetic oligonucleotide
ggagcagggagacagcgg

SEQ ID NO: 5120 - DNA, 18 bp, Artificial Sequence
  Description of Artificial Sequence: Synthetic oligonucleotide
ggcggggagcagggagac

SEQ ID NO: 5121 - DNA, 18 bp, Artificial Sequence
  Description of Artificial Sequence: Synthetic oligonucleotide
acagtggcggggagcagg

SEQ ID NO: 5122 - DNA, 18 bp, Artificial Sequence
  Description of Artificial Sequence: Synthetic oligonucleotide
acaggacagtggcgggga

SEQ ID NO: 5123 - DNA, 18 bp, Artificial Sequence
  Description of Artificial Sequence: Synthetic oligonucleotide
ggcagacaggacagtggc

SEQ ID NO: 5124 - DNA, 18 bp, Artificial Sequence
  Description of Artificial Sequence: Synthetic oligonucleotide
cagcaggcagacaggaca

SEQ ID NO: 5125 - DNA, 18 bp, Artificial Sequence
  Description of Artificial Sequence: Synthetic oligonucleotide
gtgcacagcaggcagaca

SEQ ID NO: 5126 - DNA, 18 bp, Artificial Sequence
  Description of Artificial Sequence: Synthetic oligonucleotide
cccatgtgcacagcaggc

SEQ ID NO: 5127 - DNA, 18 bp, Artificial Sequence
  Description of Artificial Sequence: Synthetic oligonucleotide
gccgccccatgtgcacag

SEQ ID NO: 5128 - DNA, 18 bp, Artificial Sequence
  Description of Artificial Sequence: Synthetic oligonucleotide
gaggggccgccccatgtg

SEQ ID NO: 5129 - DNA, 18 bp, Artificial Sequence
  Description of Artificial Sequence: Synthetic oligonucleotide
ggcaagaggggccgcccc

SEQ ID NO: 5130 - DNA, 18 bp, Artificial Sequence
  Description of Artificial Sequence: Synthetic oligonucleotide
gagtaggcaagaggggcc

SEQ ID NO: 5131 - DNA, 18 bp, Artificial Sequence
  Description of Artificial Sequence: Synthetic oligonucleotide
gcccagagtaggcaagag

SEQ ID NO: 5132 - DNA, 18 bp, Artificial Sequence
  Description of Artificial Sequence: Synthetic oligonucleotide
gccgggcccagagtaggc

SEQ ID NO: 5133 - DNA, 18 bp, Artificial Sequence
  Description of Artificial Sequence: Synthetic oligonucleotide
aggaggccgggcccagag

SEQ ID NO: 5134 - DNA, 18 bp, Artificial Sequence
  Description of Artificial Sequence: Synthetic oligonucleotide
agcagaggaggccgggcc

SEQ ID NO: 5135 - DNA, 18 bp, Artificial Sequence
  Description of Artificial Sequence: Synthetic oligonucleotide
ggcatagcagaggaggcc

SEQ ID NO: 5136 - DNA, 18 bp, Artificial Sequence
  Description of Artificial Sequence: Synthetic oligonucleotide
acgcaggcatagcagagg

SEQ ID NO: 5137 - DNA, 18 bp, Artificial Sequence
  Description of Artificial Sequence: Synthetic oligonucleotide
cgaggacgcaggcatagc

SEQ ID NO: 5138 - DNA, 18 bp, Artificial Sequence
  Description of Artificial Sequence: Synthetic oligonucleotide
tgctccgaggacgcaggc

SEQ ID NO: 5139 - DNA, 18 bp, Artificial Sequence
  Description of Artificial Sequence: Synthetic oligonucleotide
gcttctgctccgaggacg

SEQ ID NO: 5140 - DNA, 18 bp, Artificial Sequence
  Description of Artificial Sequence: Synthetic oligonucleotide
tgtctgcttctgctccga

SEQ ID NO: 5141 - DNA, 18 bp, Artificial Sequence
  Description of Artificial Sequence: Synthetic oligonucleotide
ctgcctgtctgcttctgc

SEQ ID NO: 5142 - DNA, 18 bp, Artificial Sequence
  Description of Artificial Sequence: Synthetic oligonucleotide
ccatgctgcctgtctgct

SEQ ID NO: 5143 - DNA, 18 bp, Artificial Sequence
  Description of Artificial Sequence: Synthetic oligonucleotide
ggagtccatgctgcctgt

SEQ ID NO: 5144 - DNA, 18 bp, Artificial Sequence
  Description of Artificial Sequence: Synthetic oligonucleotide
tcatcggagtccatgctg

SEQ ID NO: 5145 - DNA, 18 bp, Artificial Sequence
  Description of Artificial Sequence: Synthetic oligonucleotide
tgaagtcatcggagtcca

SEQ ID NO: 5146 - DNA, 18 bp, Artificial Sequence
  Description of Artificial Sequence: Synthetic oligonucleotide
agccctgaagtcatcgga

SEQ ID NO: 5147 - DNA, 18 bp, Artificial Sequence
  Description of Artificial Sequence: Synthetic oligonucleotide
agcagagccctgaagtca

SEQ ID NO: 5148 - DNA, 18 bp, Artificial Sequence
  Description of Artificial Sequence: Synthetic oligonucleotide
agataagcagagccctga

SEQ ID NO: 5149 - DNA, 18 bp, Artificial Sequence
  Description of Artificial Sequence: Synthetic oligonucleotide
tgtggagataagcagagc

SEQ ID NO: 5150 - DNA, 18 bp, Artificial Sequence
  Description of Artificial Sequence: Synthetic oligonucleotide
tatcctgtggagataagc

SEQ ID NO: 5151 - DNA, 18 bp, Artificial Sequence
  Description of Artificial Sequence: Synthetic oligonucleotide
ggctgtatcctgtggaga

SEQ ID NO: 5152 - DNA, 18 bp, Artificial Sequence
  Description of Artificial Sequence: Synthetic oligonucleotide
taccaggctgtatcctgt

SEQ ID NO: 5153 - DNA, 18 bp, Artificial Sequence
  Description of Artificial Sequence: Synthetic oligonucleotide
ctgcataccaggctgtat

SEQ ID NO: 5154 - DNA, 18 bp, Artificial Sequence
  Description of Artificial Sequence: Synthetic oligonucleotide
cagagctgcataccaggc

SEQ ID NO: 5155 - DNA, 18 bp, Artificial Sequence
  Description of Artificial Sequence: Synthetic oligonucleotide
ggagacagagctgcatac

SEQ ID NO: 5156 - DNA, 18 bp, Artificial Sequence
  Description of Artificial Sequence: Synthetic oligonucleotide
gctggggagacagagctg

SEQ ID NO: 5157 - DNA, 18 bp, Artificial Sequence
  Description of Artificial Sequence: Synthetic oligonucleotide
gggtggctggggagacag

SEQ ID NO: 5158 - DNA, 18 bp, Artificial Sequence
  Description of Artificial Sequence: Synthetic oligonucleotide
ggagcgggtggctgggga

SEQ ID NO: 5159 - DNA, 18 bp, Artificial Sequence
  Description of Artificial Sequence: Synthetic oligonucleotide
gaggaggagcgggtggct

SEQ ID NO: 5160 - DNA, 18 bp, Artificial Sequence
  Description of Artificial Sequence: Synthetic oligonucleotide
aggaggaggaggagcggg

SEQ ID NO: 5161 - DNA, 18 bp, Artificial Sequence
  Description of Artificial Sequence: Synthetic oligonucleotide
ggaggaggaggaggagga

SEQ ID NO: 5162 - DNA, 18 bp, Artificial Sequence
  Description of Artificial Sequence: Synthetic oligonucleotide
gaggaggaggaggaggag

SEQ ID NO: 5163 - DNA, 18 bp, Artificial Sequence
  Description of Artificial Sequence: Synthetic oligonucleotide
aggaggaggaggaggagg

SEQ ID NO: 5164 - DNA, 18 bp, Artificial Sequence
  Description of Artificial Sequence: Synthetic oligonucleotide
ggaggaggaggaggagga

SEQ ID NO: 5165 - DNA, 18 bp, Artificial Sequence
  Description of Artificial Sequence: Synthetic oligonucleotide
gaggaggaggaggaggag

SEQ ID NO: 5166 - DNA, 18 bp, Artificial Sequence
  Description of Artificial Sequence: Synthetic oligonucleotide
ggggggaggaggaggagg

SEQ ID NO: 5167 - DNA, 18 bp, Artificial Sequence
  Description of Artificial Sequence: Synthetic oligonucleotide
aggtgggggggaggagga

SEQ ID NO: 5168 - DNA, 18 bp, Artificial Sequence
  Description of Artificial Sequence: Synthetic oligonucleotide
gggagaggtgggggggag

SEQ ID NO: 5169 - DNA, 18 bp, Artificial Sequence
  Description of Artificial Sequence: Synthetic oligonucleotide
tgagggggagaggtgggg

SEQ ID NO: 5170 - DNA, 18 bp, Artificial Sequence
  Description of Artificial Sequence: Synthetic oligonucleotide
ggcggtgagggggagagg

SEQ ID NO: 5171 - DNA, 18 bp, Artificial Sequence
  Description of Artificial Sequence: Synthetic oligonucleotide
ctggaggcggtgaggggg

SEQ ID NO: 5172 - DNA, 18 bp, Artificial Sequence
  Description of Artificial Sequence: Synthetic oligonucleotide
aagctctggaggcggtga

SEQ ID NO: 5173 - DNA, 18 bp, Artificial Sequence
  Description of Artificial Sequence: Synthetic oligonucleotide
cgaggaagctctggaggc

SEQ ID NO: 5174 - DNA, 18 bp, Artificial Sequence
  Description of Artificial Sequence: Synthetic oligonucleotide
gaggacgaggaagctctg

SEQ ID NO: 5175 - DNA, 18 bp, Artificial Sequence
  Description of Artificial Sequence: Synthetic oligonucleotide
caggccaccgccggcaga

SEQ ID NO: 5176 - DNA, 18 bp, Artificial Sequence
  Description of Artificial Sequence: Synthetic oligonucleotide
aatcccaggccaccgccg

SEQ ID NO: 5177 - DNA, 18 bp, Artificial Sequence
  Description of Artificial Sequence: Synthetic oligonucleotide
cagccaatcccaggccac

SEQ ID NO: 5178 - DNA, 18 bp, Artificial Sequence
  Description of Artificial Sequence: Synthetic oligonucleotide
cctcacagccaatcccag

SEQ ID NO: 5179 - DNA, 18 bp, Artificial Sequence
  Description of Artificial Sequence: Synthetic oligonucleotide
agggacctcacagccaat

SEQ ID NO: 5180 - DNA, 18 bp, Artificial Sequence
  Description of Artificial Sequence: Synthetic oligonucleotide
tgcggagggacctcacag

SEQ ID NO: 5181 - DNA, 18 bp, Artificial Sequence
  Description of Artificial Sequence: Synthetic oligonucleotide
ggtgatgcggagggacct

SEQ ID NO: 5182 - DNA, 18 bp, Artificial Sequence
  Description of Artificial Sequence: Synthetic oligonucleotide
agctgggtgatgcggagg

SEQ ID NO: 5183 - DNA, 18 bp, Artificial Sequence
  Description of Artificial Sequence: Synthetic oligonucleotide
acgtgagctgggtgatgc

SEQ ID NO: 5184 - DNA, 18 bp, Artificial Sequence
  Description of Artificial Sequence: Synthetic oligonucleotide
gggggacgtgagctgggt

SEQ ID NO: 5185 - DNA, 18 bp, Artificial Sequence
  Description of Artificial Sequence: Synthetic oligonucleotide
gttttgggggacgtgagc

SEQ ID NO: 5186 - DNA, 18 bp, Artificial Sequence
  Description of Artificial Sequence: Synthetic oligonucleotide
tgcacgttttgggggacg

SEQ ID NO: 5187 - DNA, 18 bp, Artificial Sequence
  Description of Artificial Sequence: Synthetic oligonucleotide
caccatgcacgttttggg

SEQ ID NO: 5188 - DNA, 18 bp, Artificial Sequence
  Description of Artificial Sequence: Synthetic oligonucleotide
gttctcaccatgcacgtt

SEQ ID NO: 5189 - DNA, 18 bp, Artificial Sequence
  Description of Artificial Sequence: Synthetic oligonucleotide
agcaggttctcaccatgc

SEQ ID NO: 5190 - DNA, 18 bp, Artificial Sequence
  Description of Artificial Sequence: Synthetic oligonucleotide
cacccagcaggttctcac

SEQ ID NO: 5191 - DNA, 18 bp, Artificial Sequence
  Description of Artificial Sequence: Synthetic oligonucleotide
cacggcacccagcaggtt

SEQ ID NO: 5192 - DNA, 18 bp, Artificial Sequence
  Description of Artificial Sequence: Synthetic oligonucleotide
cctagcacggcacccagc

SEQ ID NO: 5193 - DNA, 18 bp, Artificial Sequence
  Description of Artificial Sequence: Synthetic oligonucleotide
ctcagcctagcacggcac

SEQ ID NO: 5194 - DNA, 18 bp, Artificial Sequence
  Description of Artificial Sequence: Synthetic oligonucleotide
agtacctcagcctagcac

SEQ ID NO: 5195 - DNA, 18 bp, Artificial Sequence
  Description of Artificial Sequence: Synthetic oligonucleotide
ggcttagtacctcagcct

SEQ ID NO: 5196 - DNA, 18 bp, Artificial Sequence
  Description of Artificial Sequence: Synthetic oligonucleotide
gccctggcttagtacctc

SEQ ID NO: 5197 - DNA, 18 bp, Artificial Sequence
  Description of Artificial Sequence: Synthetic oligonucleotide
aagccgccctggcttagt

SEQ ID NO: 5198 - DNA, 18 bp, Artificial Sequence
  Description of Artificial Sequence: Synthetic oligonucleotide
aaactaagccgccctggc

SEQ ID NO: 5199 - DNA, 18 bp, Artificial Sequence
  Description of Artificial Sequence: Synthetic oligonucleotide
gcattaaactaagccgcc

SEQ ID NO: 5200 - DNA, 18 bp, Artificial Sequence
  Description of Artificial Sequence: Synthetic oligonucleotide
agacagcattaaactaag

SEQ ID NO: 5201 - DNA, 18 bp, Artificial Sequence
  Description of Artificial Sequence: Synthetic oligonucleotide
ggcacagacagcattaaa

SEQ ID NO: 5202 - DNA, 18 bp, Artificial Sequence
  Description of Artificial Sequence: Synthetic oligonucleotide
tagagggcacagacagca

SEQ ID NO: 5203 - DNA, 18 bp, Artificial Sequence
  Description of Artificial Sequence: Synthetic oligonucleotide
atttctagagggcacaga

SEQ ID NO: 5204 - DNA, 18 bp, Artificial Sequence
  Description of Artificial Sequence: Synthetic oligonucleotide
aaataatttctagagggc

SEQ ID NO: 5205 - DNA, 18 bp, Artificial Sequence
  Description of Artificial Sequence: Synthetic oligonucleotide
attttaaataatttctag

SEQ ID NO: 5206 - DNA, 18 bp, Artificial Sequence
  Description of Artificial Sequence: Synthetic oligonucleotide
caaacattttaaataatt

SEQ ID NO: 5207 - DNA, 18 bp, Artificial Sequence
  Description of Artificial Sequence: Synthetic oligonucleotide
ttgttcaaacattttaaa

SEQ ID NO: 5208 - DNA, 18 bp, Artificial Sequence
  Description of Artificial Sequence: Synthetic oligonucleotide
agcttttgttcaaacatt

SEQ ID NO: 5209 - DNA, 18 bp, Artificial Sequence
  Description of Artificial Sequence: Synthetic oligonucleotide
gttggagcttttgttcaa

SEQ ID NO: 5210 - DNA, 18 bp, Artificial Sequence
  Description of Artificial Sequence: Synthetic oligonucleotide
taaaaagaaggagccata

SEQ ID NO: 5211 - DNA, 18 bp, Artificial Sequence
  Description of Artificial Sequence: Synthetic oligonucleotide
tgttttaaaaagaaggag

SEQ ID NO: 5212 - DNA, 18 bp, Artificial Sequence
  Description of Artificial Sequence: Synthetic oligonucleotide
ccctctgttttaaaaaga

SEQ ID NO: 5213 - DNA, 18 bp, Artificial Sequence
  Description of Artificial Sequence: Synthetic oligonucleotide
ttcttccctctgttttaa

SEQ ID NO: 5214 - DNA, 18 bp, Artificial Sequence
  Description of Artificial Sequence: Synthetic oligonucleotide
gtatattcttccctctgt

SEQ ID NO: 5215 - DNA, 18 bp, Artificial Sequence
  Description of Artificial Sequence: Synthetic oligonucleotide
aatctgtatattcttccc

SEQ ID NO: 5216 - DNA, 18 bp, Artificial Sequence
  Description of Artificial Sequence: Synthetic oligonucleotide
cattcaatctgtatattc

SEQ ID NO: 5217 - DNA, 18 bp, Artificial Sequence
  Description of Artificial Sequence: Synthetic oligonucleotide
ccaatcattcaatctgta

SEQ ID NO: 5218 - DNA, 18 bp, Artificial Sequence
  Description of Artificial Sequence: Synthetic oligonucleotide
agacaccaatcattcaat

SEQ ID NO: 5219 - DNA, 18 bp, Artificial Sequence
  Description of Artificial Sequence: Synthetic oligonucleotide
tattcagacaccaatcat

SEQ ID NO: 5220 - DNA, 18 bp, Artificial Sequence
  Description of Artificial Sequence: Synthetic oligonucleotide
atacctattcagacacca

SEQ ID NO: 5221 - DNA, 18 bp, Artificial Sequence
  Description of Artificial Sequence: Synthetic oligonucleotide
gataaatacctattcaga

SEQ ID NO: 5222 - DNA, 18 bp, Artificial Sequence
  Description of Artificial Sequence: Synthetic oligonucleotide
tgtatgataaatacctat

SEQ ID NO: 5223 - DNA, 18 bp, Artificial Sequence
  Description of Artificial Sequence: Synthetic oligonucleotide
aaatgtgtatgataaata

SEQ ID NO: 5224 - DNA, 18 bp, Artificial Sequence
  Description of Artificial Sequence: Synthetic oligonucleotide
atctaaaatgtgtatgat

SEQ ID NO: 5225 - DNA, 18 bp, Artificial Sequence
  Description of Artificial Sequence: Synthetic oligonucleotide
aattaatctaaaatgtgt

SEQ ID NO: 5226 - DNA, 18 bp, Artificial Sequence
  Description of Artificial Sequence: Synthetic oligonucleotide
agtttaattaatctaaaa

SEQ ID NO: 5227 - DNA, 18 bp, Artificial Sequence
  Description of Artificial Sequence: Synthetic oligonucleotide
gagaaagtttaattaatc

SEQ ID NO: 5228 - DNA, 18 bp, Artificial Sequence
  Description of Artificial Sequence: Synthetic oligonucleotide
ataatgagaaagtttaat

SEQ ID NO: 5229 - DNA, 18 bp, Artificial Sequence
  Description of Artificial Sequence: Synthetic oligonucleotide
gaattataatgagaaagt

SEQ ID NO: 5230 - DNA, 18 bp, Artificial Sequence
  Description of Artificial Sequence: Synthetic oligonucleotide
ggaaagaattataatgag

SEQ ID NO: 5231 - DNA, 18 bp, Artificial Sequence
  Description of Artificial Sequence: Synthetic oligonucleotide
aaacaggaaagaattata

SEQ ID NO: 5232 - DNA, 18 bp, Artificial Sequence
  Description of Artificial Sequence: Synthetic oligonucleotide
tcttcaaacaggaaagaa

SEQ ID NO: 5233 - DNA, 18 bp, Artificial Sequence
  Description of Artificial Sequence: Synthetic oligonucleotide
gctcatcttcaaacagga

SEQ ID NO: 5234 - DNA, 18 bp, Artificial Sequence
  Description of Artificial Sequence: Synthetic oligonucleotide
cagtggctcatcttcaaa

SEQ ID NO: 5235 - DNA, 18 bp, Artificial Sequence
  Description of Artificial Sequence: Synthetic oligonucleotide
tcattcagtggctcatct

SEQ ID NO: 5236 - DNA, 18 bp, Artificial Sequence
  Description of Artificial Sequence: Synthetic oligonucleotide
tagcttcattcagtggct

SEQ ID NO: 5237 - DNA, 18 bp, Artificial Sequence
  Description of Artificial Sequence: Synthetic oligonucleotide
gaaattagcttcattcag

SEQ ID NO: 5238 - DNA, 18 bp, Artificial Sequence
  Description of Artificial Sequence: Synthetic oligonucleotide
tgcatgaaattagcttca

SEQ ID NO: 5239 - DNA, 18 bp, Artificial Sequence
  Description of Artificial Sequence: Synthetic oligonucleotide
cccagtgcatgaaattag

SEQ ID NO: 5240 - DNA, 18 bp, Artificial Sequence
  Description of Artificial Sequence: Synthetic oligonucleotide
aactccccagtgcatgaa

SEQ ID NO: 5241 - DNA, 18 bp, Artificial Sequence
  Description of Artificial Sequence: Synthetic oligonucleotide
ttttaaactccccagtgc

SEQ ID NO: 5242 - DNA, 18 bp, Artificial Sequence
  Description of Artificial Sequence: Synthetic oligonucleotide
tatacttttaaactcccc

SEQ ID NO: 5243 - DNA, 18 bp, Artificial Sequence
  Description of Artificial Sequence: Synthetic oligonucleotide
agaaaagcaacattcctg

SEQ ID NO: 5244 - DNA, 18 bp, Artificial Sequence
  Description of Artificial Sequence: Synthetic oligonucleotide
tgtccagaaaagcaacat

SEQ ID NO: 5245 - DNA, 18 bp, Artificial Sequence
  Description of Artificial Sequence: Synthetic oligonucleotide
acgaatgtccagaaaagc

SEQ ID NO: 5246 - DNA, 18 bp, Artificial Sequence
  Description of Artificial Sequence: Synthetic oligonucleotide
ttagaacgaatgtccaga

SEQ ID NO: 5247 - DNA, 18 bp, Artificial Sequence
  Description of Artificial Sequence: Synthetic oligonucleotide
ctaatttagaacgaatgt

SEQ ID NO: 5248 - DNA, 18 bp, Artificial Sequence
  Description of Artificial Sequence: Synthetic oligonucleotide
aggcgctaatttagaacg

SEQ ID NO: 5249 - DNA, 18 bp, Artificial Sequence
  Description of Artificial Sequence: Synthetic oligonucleotide
tacacaggcgctaattta

SEQ ID NO: 5250 - DNA, 18 bp, Artificial Sequence
  Description of Artificial Sequence: Synthetic oligonucleotide
ctgggtacacaggcgcta

SEQ ID NO: 5251 - DNA, 18 bp, Artificial Sequence
  Description of Artificial Sequence: Synthetic oligonucleotide
cagccctgggtacacagg

SEQ ID NO: 5252 - DNA, 18 bp, Artificial Sequence
  Description of Artificial Sequence: Synthetic oligonucleotide
atacccagccctgggtac

SEQ ID NO: 5253 - DNA, 18 bp, Artificial Sequence
  Description of Artificial Sequence: Synthetic oligonucleotide
agtttatacccagccctg

SEQ ID NO: 5254 - DNA, 18 bp, Artificial Sequence
  Description of Artificial Sequence: Synthetic oligonucleotide
tcctcagtttatacccag

SEQ ID NO: 5255 - DNA, 18 bp, Artificial Sequence
  Description of Artificial Sequence: Synthetic oligonucleotide
cttactcctcagtttata

SEQ ID NO: 5256 - DNA, 18 bp, Artificial Sequence
  Description of Artificial Sequence: Synthetic oligonucleotide
aatgtcttactcctcagt

SEQ ID NO: 5257 - DNA, 18 bp, Artificial Sequence
  Description of Artificial Sequence: Synthetic oligonucleotide
gggacaatgtcttactcc

SEQ ID NO: 5258 - DNA, 18 bp, Artificial Sequence
  Description of Artificial Sequence: Synthetic oligonucleotide
gagcagggacaatgtctt

SEQ ID NO: 5259 - DNA, 18 bp, Artificial Sequence
  Description of Artificial Sequence: Synthetic oligonucleotide
cataggagcagggacaat

SEQ ID NO: 5260 - DNA, 18 bp, Artificial Sequence
  Description of Artificial Sequence: Synthetic oligonucleotide
cgctccataggagcaggg

SEQ ID NO: 5261 - DNA, 18 bp, Artificial Sequence
  Description of Artificial Sequence: Synthetic oligonucleotide
ctccacgctccataggag

SEQ ID NO: 5262 - DNA, 18 bp, Artificial Sequence
  Description of Artificial Sequence: Synthetic oligonucleotide
atgcactccacgctccat

SEQ ID NO: 5263 - DNA, 18 bp, Artificial Sequence
  Description of Artificial Sequence: Synthetic oligonucleotide
ctctgatgcactccacgc

SEQ ID NO: 5264 - DNA, 18 bp, Artificial Sequence
  Description of Artificial Sequence: Synthetic oligonucleotide
gtctcctctgatgcactc

SEQ ID NO: 5265 - DNA, 18 bp, Artificial Sequence
  Description of Artificial Sequence: Synthetic oligonucleotide
catttgtctcctctgatg

SEQ ID NO: 5266 - DNA, 18 bp, Artificial Sequence
  Description of Artificial Sequence: Synthetic oligonucleotide
ttctgcatttgtctcctc

SEQ ID NO: 5267 - DNA, 18 bp, Artificial Sequence
  Description of Artificial Sequence: Synthetic oligonucleotide
aatttttctgcatttgtc

SEQ ID NO: 5268 - DNA, 18 bp, Artificial Sequence
  Description of Artificial Sequence: Synthetic oligonucleotide
aatgtaatttttctgcat

SEQ ID NO: 5269 - DNA, 18 bp, Artificial Sequence
  Description of Artificial Sequence: Synthetic oligonucleotide
actaaaatgtaatttttc

SEQ ID NO: 5270 - DNA, 18 bp, Artificial Sequence
  Description of Artificial Sequence: Synthetic oligonucleotide
actccactaaaatgtaat

SEQ ID NO: 5271 - DNA, 18 bp, Artificial Sequence
  Description of Artificial Sequence: Synthetic oligonucleotide
catttactccactaaaat

SEQ ID NO: 5272 - DNA, 18 bp, Artificial Sequence
  Description of Artificial Sequence: Synthetic oligonucleotide
gtcttcatttactccact

SEQ ID NO: 5273 - DNA, 18 bp, Artificial Sequence
  Description of Artificial Sequence: Synthetic oligonucleotide
agccagtcttcatttact

SEQ ID NO: 5274 - DNA, 18 bp, Artificial Sequence
  Description of Artificial Sequence: Synthetic oligonucleotide
cgagtagccagtcttcat

SEQ ID NO: 5275 - DNA, 18 bp, Artificial Sequence
  Description of Artificial Sequence: Synthetic oligonucleotide
cgatccgagtagccagtc

SEQ ID NO: 5276 - DNA, 18 bp, Artificial Sequence
  Description of Artificial Sequence: Synthetic oligonucleotide
agcgccgatccgagtagc

SEQ ID NO: 5277 - DNA, 18 bp, Artificial Sequence
  Description of Artificial Sequence: Synthetic oligonucleotide
ggctaagcgccgatccga

SEQ ID NO: 5278 - DNA, 18 bp, Artificial Sequence
  Description of Artificial Sequence: Synthetic oligonucleotide
caccaggctaagcgccga

SEQ ID NO: 5279 - DNA, 18 bp, Artificial Sequence
  Description of Artificial Sequence: Synthetic oligonucleotide
cgtcccaccaggctaagc

SEQ ID NO: 5280 - DNA, 18 bp, Artificial Sequence
  Description of Artificial Sequence: Synthetic oligonucleotide
cctggcgtcccaccaggc

SEQ ID NO: 5281 - DNA, 18 bp, Artificial Sequence
  Description of Artificial Sequence: Synthetic oligonucleotide
ccgtgcctggcgtcccac

SEQ ID NO: 5282 - DNA, 18 bp, Artificial Sequence
  Description of Artificial Sequence: Synthetic oligonucleotide
gcttcccgtgcctggcgt

SEQ ID NO: 5283 - DNA, 18 bp, Artificial Sequence
  Description of Artificial Sequence: Synthetic oligonucleotide
gttccgcttcccgtgcct

SEQ ID NO: 5284 - DNA, 18 bp, Artificial Sequence
  Description of Artificial Sequence: Synthetic oligonucleotide
cttaggttccgcttcccg

SEQ ID NO: 5285 - DNA, 18 bp, Artificial Sequence
  Description of Artificial Sequence: Synthetic oligonucleotide
cgacacttaggttccgct

SEQ ID NO: 5286 - DNA, 18 bp, Artificial Sequence
  Description of Artificial Sequence: Synthetic oligonucleotide
accttcgacacttaggtt

SEQ ID NO: 5287 - DNA, 18 bp, Artificial Sequence
  Description of Artificial Sequence: Synthetic oligonucleotide
cccgaaccttcgacactt

SEQ ID NO: 5288 - DNA, 18 bp, Artificial Sequence
  Description of Artificial Sequence: Synthetic oligonucleotide
ggaaacccgaaccttcga

SEQ ID NO: 5289 - DNA, 18 bp, Artificial Sequence
  Description of Artificial Sequence: Synthetic oligonucleotide
cccccggaaacccgaacc

SEQ ID NO: 5290 - DNA, 18 bp, Artificial Sequence
  Description of Artificial Sequence: Synthetic oligonucleotide
caccacccccggaaaccc

SEQ ID NO: 5291 - DNA, 18 bp, Artificial Sequence
  Description of Artificial Sequence: Synthetic oligonucleotide
gggcccaccacccccgga

SEQ ID NO: 5292 - DNA, 18 bp, Artificial Sequence
  Description of Artificial Sequence: Synthetic oligonucleotide
tgtgtgggcccaccaccc

SEQ ID NO: 5293 - DNA, 18 bp, Artificial Sequence
  Description of Artificial Sequence: Synthetic oligonucleotide
ccgcttgtgtgggcccac

SEQ ID NO: 5294 - DNA, 18 bp, Artificial Sequence
  Description of Artificial Sequence: Synthetic oligonucleotide
gtgcgccgcttgtgtggg

SEQ ID NO: 5295 - DNA, 18 bp, Artificial Sequence
  Description of Artificial Sequence: Synthetic oligonucleotide
taacggtgcgccgcttgt

SEQ ID NO: 5296 - DNA, 18 bp, Artificial Sequence
  Description of Artificial Sequence: Synthetic oligonucleotide
catcttaacggtgcgccg

SEQ ID NO: 5297 - DNA, 18 bp, Artificial Sequence
  Description of Artificial Sequence: Synthetic oligonucleotide
gccgccatcttaacggtg

SEQ ID NO: 5298 - DNA, 18 bp, Artificial Sequence
  Description of Artificial Sequence: Synthetic oligonucleotide
gcccagccgccatcttaa

SEQ ID NO: 5299 - DNA, 18 bp, Artificial Sequence
  Description of Artificial Sequence: Synthetic oligonucleotide
ccgcagcccagccgccat

SEQ ID NO: 5300 - DNA, 18 bp, Artificial Sequence
  Description of Artificial Sequence: Synthetic oligonucleotide
cgtttccgcagcccagcc

SEQ ID NO: 5301 - DNA, 18 bp, Artificial Sequence
  Description of Artificial Sequence: Synthetic oligonucleotide
ggccgcgtttccgcagcc

SEQ ID NO: 5302 - DNA, 18 bp, Artificial Sequence
  Description of Artificial Sequence: Synthetic oligonucleotide
ggaccggccgcgtttccg

SEQ ID NO: 5303 - DNA, 18 bp, Artificial Sequence
  Description of Artificial Sequence: Synthetic oligonucleotide
gaaccggaccggccgcgt

SEQ ID NO: 5304 - DNA, 18 bp, Artificial Sequence
  Description of Artificial Sequence: Synthetic oligonucleotide
ccgcggaaccggaccggc

SEQ ID NO: 5305 - DNA, 18 bp, Artificial Sequence
  Description of Artificial Sequence: Synthetic oligonucleotide
ctgggccgcggaaccgga

SEQ ID NO: 5306 - DNA, 18 bp, Artificial Sequence
  Description of Artificial Sequence: Synthetic oligonucleotide
tctgcctgggccgcggaa

SEQ ID NO: 5307 - DNA, 18 bp, Artificial Sequence
  Description of Artificial Sequence: Synthetic oligonucleotide
gtccctctgcctgggccg

SEQ ID NO: 5308 - DNA, 18 bp, Artificial Sequence
  Description of Artificial Sequence: Synthetic oligonucleotide
gcagagtccctctgcctg

SEQ ID NO: 5309 - DNA, 18 bp, Artificial Sequence
  Description of Artificial Sequence: Synthetic oligonucleotide
tgcttgcagagtccctct

SEQ ID NO: 5310 - DNA, 18 bp, Artificial Sequence
  Description of Artificial Sequence: Synthetic oligonucleotide
gccattgcttgcagagtc

SEQ ID NO: 5311 - DNA, 18 bp, Artificial Sequence
  Description of Artificial Sequence: Synthetic oligonucleotide
ctgcagccattgcttgca

SEQ ID NO: 5312 - DNA, 18 bp, Artificial Sequence
  Description of Artificial Sequence: Synthetic oligonucleotide
gcgcgctgcagccattgc

SEQ ID NO: 5313 - DNA, 18 bp, Artificial Sequence
  Description of Artificial Sequence: Synthetic oligonucleotide
gccaggcgcgctgcagcc

SEQ ID NO: 5314 - DNA, 18 bp, Artificial Sequence
  Description of Artificial Sequence: Synthetic oligonucleotide
ctcttgccaggcgcgctg

SEQ ID NO: 5315 - DNA, 18 bp, Artificial Sequence
  Description of Artificial Sequence: Synthetic oligonucleotide
cgccgctcttgccaggcg

SEQ ID NO: 5316 - DNA, 18 bp, Artificial Sequence
  Description of Artificial Sequence: Synthetic oligonucleotide
gcaggcgccgctcttgcc

SEQ ID NO: 5317 - DNA, 18 bp, Artificial Sequence
  Description of Artificial Sequence: Synthetic oligonucleotide
cagcagcaggcgccgctc

SEQ ID NO: 5318 - DNA, 18 bp, Artificial Sequence
  Description of Artificial Sequence: Synthetic oligonucleotide
tcccgcagcagcaggcgc

SEQ ID NO: 5319 - DNA, 18 bp, Artificial Sequence
  Description of Artificial Sequence: Synthetic oligonucleotide
gcggctcccgcagcagca

SEQ ID NO: 5320 - DNA, 18 bp, Artificial Sequence
  Description of Artificial Sequence: Synthetic oligonucleotide
gtagcgcggctcccgcag

SEQ ID NO: 5321 - DNA, 18 bp, Artificial Sequence
  Description of Artificial Sequence: Synthetic oligonucleotide
agcgtgtagcgcggctcc

SEQ ID NO: 5322 - DNA, 18 bp, Artificial Sequence
  Description of Artificial Sequence: Synthetic oligonucleotide
ccagcagcgtgtagcgcg

SEQ ID NO: 5323 - DNA, 18 bp, Artificial Sequence
  Description of Artificial Sequence: Synthetic oligonucleotide
ggccaccagcagcgtgta

SEQ ID NO: 5324 - DNA, 18 bp, Artificial Sequence
  Description of Artificial Sequence: Synthetic oligonucleotide
caggcggccaccagcagc

SEQ ID NO: 5325 - DNA, 18 bp, Artificial Sequence
  Description of Artificial Sequence: Synthetic oligonucleotide
agaggcaggcggccacca

SEQ ID NO: 5326 - DNA, 18 bp, Artificial Sequence
  Description of Artificial Sequence: Synthetic oligonucleotide
caggcagaggcaggcggc

SEQ ID NO: 5327 - DNA, 18 bp, Artificial Sequence
  Description of Artificial Sequence: Synthetic oligonucleotide
tccgccaggcagaggcag

SEQ ID NO: 5328 - DNA, 18 bp, Artificial Sequence
  Description of Artificial Sequence: Synthetic oligonucleotide
ccacctccgccaggcaga

SEQ ID NO: 5329 - DNA, 18 bp, Artificial Sequence
  Description of Artificial Sequence: Synthetic oligonucleotide
gatgcccacctccgccag

SEQ ID NO: 5330 - DNA, 18 bp, Artificial Sequence
  Description of Artificial Sequence: Synthetic oligonucleotide
aaggtgatgcccacctcc

SEQ ID NO: 5331 - DNA, 18 bp, Artificial Sequence
  Description of Artificial Sequence: Synthetic oligonucleotide
cccagaaggtgatgccca

SEQ ID NO: 5332 - DNA, 18 bp, Artificial Sequence
  Description of Artificial Sequence: Synthetic oligonucleotide
aatgacccagaaggtgat

SEQ ID NO: 5333 - DNA, 18 bp, Artificial Sequence
  Description of Artificial Sequence: Synthetic oligonucleotide
ctgtgaatgacccagaag

SEQ ID NO: 5334 - DNA, 18 bp, Artificial Sequence
  Description of Artificial Sequence: Synthetic oligonucleotide
ccaccctgtgaatgaccc

SEQ ID NO: 5335 - DNA, 18 bp, Artificial Sequence
  Description of Artificial Sequence: Synthetic oligonucleotide
acatgccaccctgtgaat

SEQ ID NO: 5336 - DNA, 18 bp, Artificial Sequence
  Description of Artificial Sequence: Synthetic oligonucleotide
cactcacatgccaccctg

SEQ ID NO: 5337 - DNA, 18 bp, Artificial Sequence
  Description of Artificial Sequence: Synthetic oligonucleotide
cggcgcactcacatgcca

SEQ ID NO: 5338 - DNA, 18 bp, Artificial Sequence
  Description of Artificial Sequence: Synthetic oligonucleotide
cccctcggcgcactcaca

SEQ ID NO: 5339 - DNA, 18 bp, Artificial Sequence
  Description of Artificial Sequence: Synthetic oligonucleotide
ccctccccctcggcgcac

SEQ ID NO: 5340 - DNA, 18 bp, Artificial Sequence
  Description of Artificial Sequence: Synthetic oligonucleotide
ccctcccctccccctcgg

SEQ ID NO: 5341 - DNA, 18 bp, Artificial Sequence
  Description of Artificial Sequence: Synthetic oligonucleotide
ccctcccctcccctcccc

SEQ ID NO: 5342 - DNA, 18 bp, Artificial Sequence
  Description of Artificial Sequence: Synthetic oligonucleotide
tccctccctcccctcccc

SEQ ID NO: 5343 - DNA, 18 bp, Artificial Sequence
  Description of Artificial Sequence: Synthetic oligonucleotide
aggtctccctccctcccc

SEQ ID NO: 5344 - DNA, 18 bp, Artificial Sequence
  Description of Artificial Sequence: Synthetic oligonucleotide
ggttcaggtctccctccc

SEQ ID NO: 5345 - DNA, 18 bp, Artificial Sequence
  Description of Artificial Sequence: Synthetic oligonucleotide
tcgcgggttcaggtctcc

SEQ ID NO: 5346 - DNA, 18 bp, Artificial Sequence
  Description of Artificial Sequence: Synthetic oligonucleotide
ttgggtcgcgggttcagg

SEQ ID NO: 5347 - DNA, 18 bp, Artificial Sequence
  Description of Artificial Sequence: Synthetic oligonucleotide
ccagtttgggtcgcgggt

SEQ ID NO: 5348 - DNA, 18 bp, Artificial Sequence
  Description of Artificial Sequence: Synthetic oligonucleotide
gagatccagtttgggtcg

SEQ ID NO: 5349 - DNA, 18 bp, Artificial Sequence
  Description of Artificial Sequence: Synthetic oligonucleotide
ggtctgagatccagtttg

SEQ ID NO: 5350 - DNA, 18 bp, Artificial Sequence
  Description of Artificial Sequence: Synthetic oligonucleotide
ttccaggtctgagatcca

SEQ ID NO: 5351 - DNA, 18 bp, Artificial Sequence
  Description of Artificial Sequence: Synthetic oligonucleotide
ccaccacccccggaaacc

SEQ ID NO: 5352 - DNA, 18 bp, Artificial Sequence
  Description of Artificial Sequence: Synthetic oligonucleotide
tgggcccaccacccccgg

SEQ ID NO: 5353 - DNA, 18 bp, Artificial Sequence
  Description of Artificial Sequence: Synthetic oligonucleotide
ttgtgtgggcccaccacc

SEQ ID NO: 5354 - DNA, 18 bp, Artificial Sequence
  Description of Artificial Sequence: Synthetic oligonucleotide
gccgcttgtgtgggccca

SEQ ID NO: 5355 - DNA, 18 bp, Artificial Sequence
  Description of Artificial Sequence: Synthetic oligonucleotide
ggtgcgccgcttgtgtgg

SEQ ID NO: 5356 - DNA, 18 bp, Artificial Sequence
  Description of Artificial Sequence: Synthetic oligonucleotide
ttaacggtgcgccgcttg

SEQ ID NO: 5357 - DNA, 18 bp, Artificial Sequence
  Description of Artificial Sequence: Synthetic oligonucleotide
ccatcttaacggtgcgcc

SEQ ID NO: 5358 - DNA, 18 bp, Artificial Sequence
  Description of Artificial Sequence: Synthetic oligonucleotide
agccgccatcttaacggt

SEQ ID NO: 5359 - DNA, 18 bp, Artificial Sequence
  Description of Artificial Sequence: Synthetic oligonucleotide
agcccagccgccatctta

SEQ ID NO: 5360 - DNA, 18 bp, Artificial Sequence
  Description of Artificial Sequence: Synthetic oligonucleotide
tccgcagcccagccgcca

SEQ ID NO: 5361 - DNA, 18 bp, Artificial Sequence
  Description of Artificial Sequence: Synthetic oligonucleotide
gcgtttccgcagcccagc

SEQ ID NO: 5362 - DNA, 18 bp, Artificial Sequence
  Description of Artificial Sequence: Synthetic oligonucleotide
cggccgcgtttccgcagc

SEQ ID NO: 5363 - DNA, 18 bp, Artificial Sequence
  Description of Artificial Sequence: Synthetic oligonucleotide
cggaccggccgcgtttcc

SEQ ID NO: 5364 - DNA, 18 bp, Artificial Sequence
  Description of Artificial Sequence: Synthetic oligonucleotide
ggaaccggaccggccgcg

SEQ ID NO: 5365 - DNA, 18 bp, Artificial Sequence
  Description of Artificial Sequence: Synthetic oligonucleotide
gccgcggaaccggaccgg

SEQ ID NO: 5366 - DNA, 18 bp, Artificial Sequence
  Description of Artificial Sequence: Synthetic oligonucleotide
cctgggccgcggaaccgg

SEQ ID NO: 5367 - DNA, 18 bp, Artificial Sequence
  Description of Artificial Sequence: Synthetic oligonucleotide
ctctgcctgggccgcgga

SEQ ID NO: 5368 - DNA, 18 bp, Artificial Sequence
  Description of Artificial Sequence: Synthetic oligonucleotide
agtccctctgcctgggcc

SEQ ID NO: 5369 - DNA, 18 bp, Artificial Sequence
  Description of Artificial Sequence: Synthetic oligonucleotide
tgcagagtccctctgcct

SEQ ID NO: 5370 - DNA, 18 bp, Artificial Sequence
  Description of Artificial Sequence: Synthetic oligonucleotide
ttgcttgcagagtccctc

SEQ ID NO: 5371 - DNA, 18 bp, Artificial Sequence
  Description of Artificial Sequence: Synthetic oligonucleotide
agccattgcttgcagagt

SEQ ID NO: 5372 - DNA, 18 bp, Artificial Sequence
  Description of Artificial Sequence: Synthetic oligonucleotide
gctgcagccattgcttgc

SEQ ID NO: 5373 - DNA, 18 bp, Artificial Sequence
  Description of Artificial Sequence: Synthetic oligonucleotide
ggcgcgctgcagccattg

SEQ ID NO: 5374 - DNA, 18 bp, Artificial Sequence
  Description of Artificial Sequence: Synthetic oligonucleotide
tgccaggcgcgctgcagc

SEQ ID NO: 5375 - DNA, 18 bp, Artificial Sequence
  Description of Artificial Sequence: Synthetic oligonucleotide
gctcttgccaggcgcgct

SEQ ID NO: 5376 - DNA, 18 bp, Artificial Sequence
  Description of Artificial Sequence: Synthetic oligonucleotide
gcgccgctcttgccaggc

SEQ ID NO: 5377 - DNA, 18 bp, Artificial Sequence
  Description of Artificial Sequence: Synthetic oligonucleotide
agcaggcgccgctcttgc

SEQ ID NO: 5378 - DNA, 18 bp, Artificial Sequence
  Description of Artificial Sequence: Synthetic oligonucleotide
gcagcagcaggcgccgct

SEQ ID NO: 5379 - DNA, 18 bp, Artificial Sequence
  Description of Artificial Sequence: Synthetic oligonucleotide
ctcccgcagcagcaggcg

SEQ ID NO: 5380 - DNA, 18 bp, Artificial Sequence
  Description of Artificial Sequence: Synthetic oligonucleotide
cgcggctcccgcagcagc

SEQ ID NO: 5381 - DNA, 18 bp, Artificial Sequence
  Description of Artificial Sequence: Synthetic oligonucleotide
tgtagcgcggctcccgca

SEQ ID NO: 5382 - DNA, 18 bp, Artificial Sequence
  Description of Artificial Sequence: Synthetic oligonucleotide
cagcgtgtagcgcggctc

SEQ ID NO: 5383 - DNA, 18 bp, Artificial Sequence
  Description of Artificial Sequence: Synthetic oligonucleotide
accagcagcgtgtagcgc

SEQ ID NO: 5384 - DNA, 18 bp, Artificial Sequence
  Description of Artificial Sequence: Synthetic oligonucleotide
cggccaccagcagcgtgt

SEQ ID NO: 5385 - DNA, 18 bp, Artificial Sequence
  Description of Artificial Sequence: Synthetic oligonucleotide
gcaggcggccaccagcag

SEQ ID NO: 5386 - DNA, 18 bp, Artificial Sequence
  Description of Artificial Sequence: Synthetic oligonucleotide
cagaggcaggcggccacc

SEQ ID NO: 5387 - DNA, 18 bp, Artificial Sequence
  Description of Artificial Sequence: Synthetic oligonucleotide
ccaggcagaggcaggcgg

SEQ ID NO: 5388 - DNA, 18 bp, Artificial Sequence
  Description of Artificial Sequence: Synthetic oligonucleotide
ctccgccaggcagaggca

SEQ ID NO: 5389 - DNA, 18 bp, Artificial Sequence
  Description of Artificial Sequence: Synthetic oligonucleotide
cccacctccgccaggcag

SEQ ID NO: 5390 - DNA, 18 bp, Artificial Sequence
  Description of Artificial Sequence: Synthetic oligonucleotide
tgatgcccacctccgcca

SEQ ID NO: 5391 - DNA, 18 bp, Artificial Sequence
  Description of Artificial Sequence: Synthetic oligonucleotide
gaaggtgatgcccacctc

SEQ ID NO: 5392 - DNA, 18 bp, Artificial Sequence
  Description of Artificial Sequence: Synthetic oligonucleotide
acccagaaggtgatgccc

SEQ ID NO: 5393 - DNA, 18 bp, Artificial Sequence
  Description of Artificial Sequence: Synthetic oligonucleotide
gaatgacccagaaggtga

SEQ ID NO: 5394 - DNA, 18 bp, Artificial Sequence
  Description of Artificial Sequence: Synthetic oligonucleotide
cctgtgaatgacccagaa

SEQ ID NO: 5395 - DNA, 18 bp, Artificial Sequence
  Description of Artificial Sequence: Synthetic oligonucleotide
gccaccctgtgaatgacc

SEQ ID NO: 5396 - DNA, 18 bp, Artificial Sequence
  Description of Artificial Sequence: Synthetic oligonucleotide
cacatgccaccctgtgaa

SEQ ID NO: 5397 - DNA, 18 bp, Artificial Sequence
  Description of Artificial Sequence: Synthetic oligonucleotide
gcactcacatgccaccct

SEQ ID NO: 5398 - DNA, 18 bp, Artificial Sequence
  Description of Artificial Sequence: Synthetic oligonucleotide
tcggcgcactcacatgcc

SEQ ID NO: 5399 - DNA, 18 bp, Artificial Sequence
  Description of Artificial Sequence: Synthetic oligonucleotide
ccccctcggcgcactcac

SEQ ID NO: 5400 - DNA, 18 bp, Artificial Sequence
  Description of Artificial Sequence: Synthetic oligonucleotide
cccctccccctcggcgca

SEQ ID NO: 5401 - DNA, 18 bp, Artificial Sequence
  Description of Artificial Sequence: Synthetic oligonucleotide
cccctcccctccccctcg

SEQ ID NO: 5402 - DNA, 18 bp, Artificial Sequence
  Description of Artificial Sequence: Synthetic oligonucleotide
tccctcccctcccctccc

SEQ ID NO: 5403 - DNA, 18 bp, Artificial Sequence
  Description of Artificial Sequence: Synthetic oligonucleotide
ctccctccctcccctccc

SEQ ID NO: 5404 - DNA, 18 bp, Artificial Sequence
  Description of Artificial Sequence: Synthetic oligonucleotide
caggtctccctccctccc

SEQ ID NO: 5405 - DNA, 18 bp, Artificial Sequence
  Description of Artificial Sequence: Synthetic oligonucleotide
gggttcaggtctccctcc

SEQ ID NO: 5406 - DNA, 18 bp, Artificial Sequence
  Description of Artificial Sequence: Synthetic oligonucleotide
gtcgcgggttcaggtctc

SEQ ID NO: 5407 - DNA, 18 bp, Artificial Sequence
  Description of Artificial Sequence: Synthetic oligonucleotide
tttgggtcgcgggttcag

SEQ ID NO: 5408 - DNA, 18 bp, Artificial Sequence
  Description of Artificial Sequence: Synthetic oligonucleotide
tccagtttgggtcgcggg

SEQ ID NO: 5409 - DNA, 18 bp, Artificial Sequence
  Description of Artificial Sequence: Synthetic oligonucleotide
tgagatccagtttgggtc

SEQ ID NO: 5410 - DNA, 18 bp, Artificial Sequence
  Description of Artificial Sequence: Synthetic oligonucleotide
aggtctgagatccagttt

SEQ ID NO: 5411 - DNA, 18 bp, Artificial Sequence
  Description of Artificial Sequence: Synthetic oligonucleotide
gttccaggtctgagatcc

SEQ ID NO: 5412 - DNA, 18 bp, Artificial Sequence
  Description of Artificial Sequence: Synthetic oligonucleotide
ggccgcgcgactcgggca

SEQ ID NO: 5413 - DNA, 18 bp, Artificial Sequence
  Description of Artificial Sequence: Synthetic oligonucleotide
tctttggccgcgcgactc

SEQ ID NO: 5414 - DNA, 18 bp, Artificial Sequence
  Description of Artificial Sequence: Synthetic oligonucleotide
ttcgctctttggccgcgc

SEQ ID NO: 5415 - DNA, 18 bp, Artificial Sequence
  Description of Artificial Sequence: Synthetic oligonucleotide
gaggcttcgctctttggc

SEQ ID NO: 5416 - DNA, 18 bp, Artificial Sequence
  Description of Artificial Sequence: Synthetic oligonucleotide
gccgggaggcttcgctct

SEQ ID NO: 5417 - DNA, 18 bp, Artificial Sequence
  Description of Artificial Sequence: Synthetic oligonucleotide
ggcgcgccgggaggcttc

SEQ ID NO: 5418 - DNA, 18 bp, Artificial Sequence
  Description of Artificial Sequence: Synthetic oligonucleotide
acacaggcgcgccgggag

SEQ ID NO: 5419 - DNA, 18 bp, Artificial Sequence
  Description of Artificial Sequence: Synthetic oligonucleotide
tctccacacaggcgcgcc

SEQ ID NO: 5420 - DNA, 18 bp, Artificial Sequence
  Description of Artificial Sequence: Synthetic oligonucleotide
cgttttctccacacaggc

SEQ ID NO: 5421 - DNA, 18 bp, Artificial Sequence
  Description of Artificial Sequence: Synthetic oligonucleotide
agacccgttttctccaca

SEQ ID NO: 5422 - DNA, 18 bp, Artificial Sequence
  Description of Artificial Sequence: Synthetic oligonucleotide
agtcaagacccgttttct

SEQ ID NO: 5423 - DNA, 18 bp, Artificial Sequence
  Description of Artificial Sequence: Synthetic oligonucleotide
gactcagtcaagacccgt

SEQ ID NO: 5424 - DNA, 18 bp, Artificial Sequence
  Description of Artificial Sequence: Synthetic oligonucleotide
ctgcagactcagtcaaga

SEQ ID NO: 5425 - DNA, 18 bp, Artificial Sequence
  Description of Artificial Sequence: Synthetic oligonucleotide
gtgggctgcagactcagt

SEQ ID NO: 5426 - DNA, 18 bp, Artificial Sequence
  Description of Artificial Sequence: Synthetic oligonucleotide
cccatgtgggctgcagac

SEQ ID NO: 5427 - DNA, 18 bp, Artificial Sequence
  Description of Artificial Sequence: Synthetic oligonucleotide
ggaaacccatgtgggctg

SEQ ID NO: 5428 - DNA, 18 bp, Artificial Sequence
  Description of Artificial Sequence: Synthetic oligonucleotide
tgggaggaaacccatgtg

SEQ ID NO: 5429 - DNA, 18 bp, Artificial Sequence
  Description of Artificial Sequence: Synthetic oligonucleotide
gaggttgggaggaaaccc

SEQ ID NO: 5430 - DNA, 18 bp, Artificial Sequence
  Description of Artificial Sequence: Synthetic oligonucleotide
ggaaggaggttgggagga

SEQ ID NO: 5431 - DNA, 18 bp, Artificial Sequence
  Description of Artificial Sequence: Synthetic oligonucleotide
ctcaaggaaggaggttgg

SEQ ID NO: 5432 - DNA, 18 bp, Artificial Sequence
  Description of Artificial Sequence: Synthetic oligonucleotide
tcctgctcaaggaaggag

SEQ ID NO: 5433 - DNA, 18 bp, Artificial Sequence
  Description of Artificial Sequence: Synthetic oligonucleotide
tgttttcctgctcaagga

SEQ ID NO: 5434 - DNA, 18 bp, Artificial Sequence
  Description of Artificial Sequence: Synthetic oligonucleotide
gactttgttttcctgctc

SEQ ID NO: 5435 - DNA, 18 bp, Artificial Sequence
  Description of Artificial Sequence: Synthetic oligonucleotide
accttgactttgttttcc

SEQ ID NO: 5436 - DNA, 18 bp, Artificial Sequence
  Description of Artificial Sequence: Synthetic oligonucleotide
atcagaccttgactttgt

SEQ ID NO: 5437 - DNA, 18 bp, Artificial Sequence
  Description of Artificial Sequence: Synthetic oligonucleotide
accgaatcagaccttgac

SEQ ID NO: 5438 - DNA, 18 bp, Artificial Sequence
  Description of Artificial Sequence: Synthetic oligonucleotide
gcagcaccgaatcagacc

SEQ ID NO: 5439 - DNA, 18 bp, Artificial Sequence
  Description of Artificial Sequence: Synthetic oligonucleotide
accgagcagcaccgaatc

SEQ ID NO: 5440 - DNA, 18 bp, Artificial Sequence
  Description of Artificial Sequence: Synthetic oligonucleotide
gagagaccgagcagcacc

SEQ ID NO: 5441 - DNA, 18 bp, Artificial Sequence
  Description of Artificial Sequence: Synthetic oligonucleotide
gaggagagagaccgagca

SEQ ID NO: 5442 - DNA, 18 bp, Artificial Sequence
  Description of Artificial Sequence: Synthetic oligonucleotide
tggaggaggagagagacc

SEQ ID NO: 5443 - DNA, 18 bp, Artificial Sequence
  Description of Artificial Sequence: Synthetic oligonucleotide
tcgggtggaggaggagag

SEQ ID NO: 5444 - DNA, 18 bp, Artificial Sequence
  Description of Artificial Sequence: Synthetic oligonucleotide
tcatctcgggtggaggag

SEQ ID NO: 5445 - DNA, 18 bp, Artificial Sequence
  Description of Artificial Sequence: Synthetic oligonucleotide
caaggtcatctcgggtgg

SEQ ID NO: 5446 - DNA, 18 bp, Artificial Sequence
  Description of Artificial Sequence: Synthetic oligonucleotide
cgtcccaaggtcatctcg

SEQ ID NO: 5447 - DNA, 18 bp, Artificial Sequence
  Description of Artificial Sequence: Synthetic oligonucleotide
tagtgcgtcccaaggtca

SEQ ID NO: 5448 - DNA, 18 bp, Artificial Sequence
  Description of Artificial Sequence: Synthetic oligonucleotide
ctctctagtgcgtcccaa

SEQ ID NO: 5449 - DNA, 18 bp, Artificial Sequence
  Description of Artificial Sequence: Synthetic oligonucleotide
ccaccctctctagtgcgt

SEQ ID NO: 5450 - DNA, 18 bp, Artificial Sequence
  Description of Artificial Sequence: Synthetic oligonucleotide
agattccaccctctctag

SEQ ID NO: 5451 - DNA, 18 bp, Artificial Sequence
  Description of Artificial Sequence: Synthetic oligonucleotide
ggctaagattccaccctc

SEQ ID NO: 5452 - DNA, 18 bp, Artificial Sequence
  Description of Artificial Sequence: Synthetic oligonucleotide
cctaaggctaagattcca

SEQ ID NO: 5453 - DNA, 18 bp, Artificial Sequence
  Description of Artificial Sequence: Synthetic oligonucleotide
tcaggcctaaggctaaga

SEQ ID NO: 5454 - DNA, 18 bp, Artificial Sequence
  Description of Artificial Sequence: Synthetic oligonucleotide
cgccctcaggcctaaggc

SEQ ID NO: 5455 - DNA, 18 bp, Artificial Sequence
  Description of Artificial Sequence: Synthetic oligonucleotide
tctaccgccctcaggcct

SEQ ID NO: 5456 - DNA, 18 bp, Artificial Sequence
  Description of Artificial Sequence: Synthetic oligonucleotide
ccgtctctaccgccctca

SEQ ID NO: 5457 - DNA, 18 bp, Artificial Sequence
  Description of Artificial Sequence: Synthetic oligonucleotide
aggccccgtctctaccgc

SEQ ID NO: 5458 - DNA, 18 bp, Artificial Sequence
  Description of Artificial Sequence: Synthetic oligonucleotide
gcgggaggccccgtctct

SEQ ID NO: 5459 - DNA, 18 bp, Artificial Sequence
  Description of Artificial Sequence: Synthetic oligonucleotide
ctcttgatttgaagtggc

SEQ ID NO: 5460 - DNA, 18 bp, Artificial Sequence
  Description of Artificial Sequence: Synthetic oligonucleotide
gctcactcttgatttgaa

SEQ ID NO: 5461 - DNA, 18 bp, Artificial Sequence
  Description of Artificial Sequence: Synthetic oligonucleotide
cacttgctcactcttgat

SEQ ID NO: 5462 - DNA, 18 bp, Artificial Sequence
  Description of Artificial Sequence: Synthetic oligonucleotide
agaaacacttgctcactc

SEQ ID NO: 5463 - DNA, 18 bp, Artificial Sequence
  Description of Artificial Sequence: Synthetic oligonucleotide
attgcagaaacacttgct

SEQ ID NO: 5464 - DNA, 18 bp, Artificial Sequence
  Description of Artificial Sequence: Synthetic oligonucleotide
aatagattgcagaaacac

SEQ ID NO: 5465 - DNA, 18 bp, Artificial Sequence
  Description of Artificial Sequence: Synthetic oligonucleotide
cacaaaatagattgcaga

SEQ ID NO: 5466 - DNA, 18 bp, Artificial Sequence
  Description of Artificial Sequence: Synthetic oligonucleotide
caaatcacaaaatagatt

SEQ ID NO: 5467 - DNA, 18 bp, Artificial Sequence
  Description of Artificial Sequence: Synthetic oligonucleotide
ccccacaaatcacaaaat

SEQ ID NO: 5468 - DNA, 18 bp, Artificial Sequence
  Description of Artificial Sequence: Synthetic oligonucleotide
ttcctccccacaaatcac

SEQ ID NO: 5469 - DNA, 18 bp, Artificial Sequence
  Description of Artificial Sequence: Synthetic oligonucleotide
ctccattcctccccacaa

SEQ ID NO: 5470 - DNA, 18 bp, Artificial Sequence
  Description of Artificial Sequence: Synthetic oligonucleotide
tttccctccattcctccc

SEQ ID NO: 5471 - DNA, 18 bp, Artificial Sequence
  Description of Artificial Sequence: Synthetic oligonucleotide
aaacctttccctccattc

SEQ ID NO: 5472 - DNA, 18 bp, Artificial Sequence
  Description of Artificial Sequence: Synthetic oligonucleotide
gtgccaaacctttccctc

SEQ ID NO: 5473 - DNA, 18 bp, Artificial Sequence
  Description of Artificial Sequence: Synthetic oligonucleotide
acaaggtgccaaaccttt

SEQ ID NO: 5474 - DNA, 18 bp, Artificial Sequence
  Description of Artificial Sequence: Synthetic oligonucleotide
tttaaacaaggtgccaaa

SEQ ID NO: 5475 - DNA, 18 bp, Artificial Sequence
  Description of Artificial Sequence: Synthetic oligonucleotide
ttagttttaaacaaggtg

SEQ ID NO: 5476 - DNA, 18 bp, Artificial Sequence
  Description of Artificial Sequence: Synthetic oligonucleotide
gaactttagttttaaaca

SEQ ID NO: 5477 - DNA, 18 bp, Artificial Sequence
  Description of Artificial Sequence: Synthetic oligonucleotide
gatacgaactttagtttt

SEQ ID NO: 5478 - DNA, 18 bp, Artificial Sequence
  Description of Artificial Sequence: Synthetic oligonucleotide
gttttgatacgaacttta

SEQ ID NO: 5479 - DNA, 18 bp, Artificial Sequence
  Description of Artificial Sequence: Synthetic oligonucleotide
tctaggttttgatacgaa

SEQ ID NO: 5480 - DNA, 18 bp, Artificial Sequence
  Description of Artificial Sequence: Synthetic oligonucleotide
tgctctctaggttttgat

SEQ ID NO: 5481 - DNA, 18 bp, Artificial Sequence
  Description of Artificial Sequence: Synthetic oligonucleotide
cagtatgctctctaggtt

SEQ ID NO: 5482 - DNA, 18 bp, Artificial Sequence
  Description of Artificial Sequence: Synthetic oligonucleotide
cagcacagtatgctctct

SEQ ID NO: 5483 - DNA, 18 bp, Artificial Sequence
  Description of Artificial Sequence: Synthetic oligonucleotide
gtggcccttggaggggtt

SEQ ID NO: 5484 - DNA, 18 bp, Artificial Sequence
  Description of Artificial Sequence: Synthetic oligonucleotide
tataagtggcccttggag

SEQ ID NO: 5485 - DNA, 18 bp, Artificial Sequence
  Description of Artificial Sequence: Synthetic oligonucleotide
tgggttataagtggccct

SEQ ID NO: 5486 - DNA, 18 bp, Artificial Sequence
  Description of Artificial Sequence: Synthetic oligonucleotide
acaggtgggttataagtg

SEQ ID NO: 5487 - DNA, 18 bp, Artificial Sequence
  Description of Artificial Sequence: Synthetic oligonucleotide
gttagacaggtgggttat

SEQ ID NO: 5488 - DNA, 18 bp, Artificial Sequence
  Description of Artificial Sequence: Synthetic oligonucleotide
aatatgttagacaggtgg

SEQ ID NO: 5489 - DNA, 18 bp, Artificial Sequence
  Description of Artificial Sequence: Synthetic oligonucleotide
tggggaatatgttagaca

SEQ ID NO: 5490 - DNA, 18 bp, Artificial Sequence
  Description of Artificial Sequence: Synthetic oligonucleotide
agaactggggaatatgtt

SEQ ID NO: 5491 - DNA, 18 bp, Artificial Sequence
  Description of Artificial Sequence: Synthetic oligonucleotide
ggagaagaactggggaat

SEQ ID NO: 5492 - DNA, 18 bp, Artificial Sequence
  Description of Artificial Sequence: Synthetic oligonucleotide
gtcctggagaagaactgg

SEQ ID NO: 5493 - DNA, 18 bp, Artificial Sequence
  Description of Artificial Sequence: Synthetic oligonucleotide
agctggtcctggagaaga

SEQ ID NO: 5494 - DNA, 18 bp, Artificial Sequence
  Description of Artificial Sequence: Synthetic oligonucleotide
gtaacagctggtcctgga

SEQ ID NO: 5495 - DNA, 18 bp, Artificial Sequence
  Description of Artificial Sequence: Synthetic oligonucleotide
ggggagtaacagctggtc

SEQ ID NO: 5496 - DNA, 18 bp, Artificial Sequence
  Description of Artificial Sequence: Synthetic oligonucleotide
gtggaggggagtaacagc

SEQ ID NO: 5497 - DNA, 18 bp, Artificial Sequence
  Description of Artificial Sequence: Synthetic oligonucleotide
gtggggtggaggggagta

SEQ ID NO: 5498 - DNA, 18 bp, Artificial Sequence
  Description of Artificial Sequence: Synthetic oligonucleotide
cagaggtggggtggaggg

SEQ ID NO: 5499 - DNA, 18 bp, Artificial Sequence
  Description of Artificial Sequence: Synthetic oligonucleotide
gatgtcagaggtggggtg

SEQ ID NO: 5500 - DNA, 18 bp, Artificial Sequence
  Description of Artificial Sequence: Synthetic oligonucleotide
gagcagatgtcagaggtg

SEQ ID NO: 5501 - DNA, 18 bp, Artificial Sequence
  Description of Artificial Sequence: Synthetic oligonucleotide
gatctgagcagatgtcag

SEQ ID NO: 5502 - DNA, 18 bp, Artificial Sequence
  Description of Artificial Sequence: Synthetic oligonucleotide
ggtgagatctgagcagat

SEQ ID NO: 5503 - DNA, 18 bp, Artificial Sequence
  Description of Artificial Sequence: Synthetic oligonucleotide
tgatgggtgagatctgag

SEQ ID NO: 5504 - DNA, 18 bp, Artificial Sequence
  Description of Artificial Sequence: Synthetic oligonucleotide
cactctgatgggtgagat

SEQ ID NO: 5505 - DNA, 18 bp, Artificial Sequence
  Description of Artificial Sequence: Synthetic oligonucleotide
cttaccactctgatgggt

SEQ ID NO: 5506 - DNA, 18 bp, Artificial Sequence
  Description of Artificial Sequence: Synthetic oligonucleotide
tcccacttaccactctga

SEQ ID NO: 5507 - DNA, 18 bp, Artificial Sequence
  Description of Artificial Sequence: Synthetic oligonucleotide
ctctttcccacttaccac

SEQ ID NO: 5508 - DNA, 18 bp, Artificial Sequence
  Description of Artificial Sequence: Synthetic oligonucleotide
ctgtgctctttcccactt

SEQ ID NO: 5509 - DNA, 18 bp, Artificial Sequence
  Description of Artificial Sequence: Synthetic oligonucleotide
tgaagctgtgctctttcc

SEQ ID NO: 5510 - DNA, 18 bp, Artificial Sequence
  Description of Artificial Sequence: Synthetic oligonucleotide
ctgactgaagctgtgctc

SEQ ID NO: 5511 - DNA, 18 bp, Artificial Sequence
  Description of Artificial Sequence: Synthetic oligonucleotide
tctgcctgactgaagctg

SEQ ID NO: 5512 - DNA, 18 bp, Artificial Sequence
  Description of Artificial Sequence: Synthetic oligonucleotide
ccaggtctgcctgactga

SEQ ID NO: 5513 - DNA, 18 bp, Artificial Sequence
  Description of Artificial Sequence: Synthetic oligonucleotide
cccacccaggtctgcctg

SEQ ID NO: 5514 - DNA, 18 bp, Artificial Sequence
  Description of Artificial Sequence: Synthetic oligonucleotide
ggattcccacccaggtct

SEQ ID NO: 5515 - DNA, 18 bp, Artificial Sequence
  Description of Artificial Sequence: Synthetic oligonucleotide
agccaggattcccaccca

SEQ ID NO: 5516 - DNA, 18 bp, Artificial Sequence
  Description of Artificial Sequence: Synthetic oligonucleotide
aacagagccaggattccc

SEQ ID NO: 5517 - DNA, 18 bp, Artificial Sequence
  Description of Artificial Sequence: Synthetic oligonucleotide
gaaaaaacagagccagga

SEQ ID NO: 5518 - DNA, 18 bp, Artificial Sequence
  Description of Artificial Sequence: Synthetic oligonucleotide
gctaggaaaaaacagagc

SEQ ID NO: 5519 - DNA, 18 bp, Artificial Sequence
  Description of Artificial Sequence: Synthetic oligonucleotide
acacagctaggaaaaaac

SEQ ID NO: 5520 - DNA, 18 bp, Artificial Sequence
  Description of Artificial Sequence: Synthetic oligonucleotide
agatcacacagctaggaa

SEQ ID NO: 5521 - DNA, 18 bp, Artificial Sequence
  Description of Artificial Sequence: Synthetic oligonucleotide
gccctagatcacacagct

SEQ ID NO: 5522 - DNA, 18 bp, Artificial Sequence
  Description of Artificial Sequence: Synthetic oligonucleotide
aacctgccctagatcaca

SEQ ID NO: 5523 - DNA, 18 bp, Artificial Sequence
  Description of Artificial Sequence: Synthetic oligonucleotide
gaagtaacctgccctaga

SEQ ID NO: 5524 - DNA, 18 bp, Artificial Sequence
  Description of Artificial Sequence: Synthetic oligonucleotide
tcagagaagtaacctgcc

SEQ ID NO: 5525 - DNA, 18 bp, Artificial Sequence
  Description of Artificial Sequence: Synthetic oligonucleotide
gagactcagagaagtaac

SEQ ID NO: 5526 - DNA, 18 bp, Artificial Sequence
  Description of Artificial Sequence: Synthetic oligonucleotide
gaaatgagactcagagaa

SEQ ID NO: 5527 - DNA, 18 bp, Artificial Sequence
  Description of Artificial Sequence: Synthetic oligonucleotide
atgaggaaatgagactca

SEQ ID NO: 5528 - DNA, 18 bp, Artificial Sequence
  Description of Artificial Sequence: Synthetic oligonucleotide
catgagacggggttgcgt

SEQ ID NO: 5529 - DNA, 18 bp, Artificial Sequence
  Description of Artificial Sequence: Synthetic oligonucleotide
gggcccatgagacggggt

SEQ ID NO: 5530 - DNA, 18 bp, Artificial Sequence
  Description of Artificial Sequence: Synthetic oligonucleotide
cgctggggcccatgagac

SEQ ID NO: 5531 - DNA, 18 bp, Artificial Sequence
  Description of Artificial Sequence: Synthetic oligonucleotide
cagaccgctggggcccat

SEQ ID NO: 5532 - DNA, 18 bp, Artificial Sequence
  Description of Artificial Sequence: Synthetic oligonucleotide
gggcccagaccgctgggg

SEQ ID NO: 5533 - DNA, 18 bp, Artificial Sequence
  Description of Artificial Sequence: Synthetic oligonucleotide
tgcctgggcccagaccgc

SEQ ID NO: 5534 - DNA, 18 bp, Artificial Sequence
  Description of Artificial Sequence: Synthetic oligonucleotide
gacggtgcctgggcccag

SEQ ID NO: 5535 - DNA, 18 bp, Artificial Sequence
  Description of Artificial Sequence: Synthetic oligonucleotide
actcagacggtgcctggg

SEQ ID NO: 5536 - DNA, 18 bp, Artificial Sequence
  Description of Artificial Sequence: Synthetic oligonucleotide
acccgactcagacggtgc

SEQ ID NO: 5537 - DNA, 18 bp, Artificial Sequence
  Description of Artificial Sequence: Synthetic oligonucleotide
caaacacccgactcagac

SEQ ID NO: 5538 - DNA, 18 bp, Artificial Sequence
  Description of Artificial Sequence: Synthetic oligonucleotide
cttcccaaacacccgact

SEQ ID NO: 5539 - DNA, 18 bp, Artificial Sequence
  Description of Artificial Sequence: Synthetic oligonucleotide
aacgccttcccaaacacc

SEQ ID NO: 5540 - DNA, 18 bp, Artificial Sequence
  Description of Artificial Sequence: Synthetic oligonucleotide
aagcgaacgccttcccaa

SEQ ID NO: 5541 - DNA, 18 bp, Artificial Sequence
  Description of Artificial Sequence: Synthetic oligonucleotide
ccaccaagcgaacgcctt

SEQ ID NO: 5542 - DNA, 18 bp, Artificial Sequence
  Description of Artificial Sequence: Synthetic oligonucleotide
ctaacccaccaagcgaac

SEQ ID NO: 5543 - DNA, 18 bp, Artificial Sequence
  Description of Artificial Sequence: Synthetic oligonucleotide
caggcctaacccaccaag

SEQ ID NO: 5544 - DNA, 18 bp, Artificial Sequence
  Description of Artificial Sequence: Synthetic oligonucleotide
acacacaggcctaaccca

SEQ ID NO: 5545 - DNA, 18 bp, Artificial Sequence
  Description of Artificial Sequence: Synthetic oligonucleotide
aagcaacacacaggccta

SEQ ID NO: 5546 - DNA, 18 bp, Artificial Sequence
  Description of Artificial Sequence: Synthetic oligonucleotide
cggctaagcaacacacag

SEQ ID NO: 5547 - DNA, 18 bp, Artificial Sequence
  Description of Artificial Sequence: Synthetic oligonucleotide
tctttcggctaagcaaca

SEQ ID NO: 5548 - DNA, 18 bp, Artificial Sequence
  Description of Artificial Sequence: Synthetic oligonucleotide
atgcctctttcggctaag

SEQ ID NO: 5549 - DNA, 18 bp, Artificial Sequence
  Description of Artificial Sequence: Synthetic oligonucleotide
aaacgatgcctctttcgg

SEQ ID NO: 5550 - DNA, 18 bp, Artificial Sequence
  Description of Artificial Sequence: Synthetic oligonucleotide
agagaaaacgatgcctct

SEQ ID NO: 5551 - DNA, 18 bp, Artificial Sequence
  Description of Artificial Sequence: Synthetic oligonucleotide
cctaaagagaaaacgatg

SEQ ID NO: 5552 - DNA, 18 bp, Artificial Sequence
  Description of Artificial Sequence: Synthetic oligonucleotide
tctcacctaaagagaaaa

SEQ ID NO: 5553 - DNA, 18 bp, Artificial Sequence
  Description of Artificial Sequence: Synthetic oligonucleotide
acccttctcacctaaaga

SEQ ID NO: 5554 - DNA, 18 bp, Artificial Sequence
  Description of Artificial Sequence: Synthetic oligonucleotide
ccgaaacccttctcacct

SEQ ID NO: 5555 - DNA, 18 bp, Artificial Sequence
  Description of Artificial Sequence: Synthetic oligonucleotide
ataccccgaaacccttct

SEQ ID NO: 5556 - DNA, 18 bp, Artificial Sequence
  Description of Artificial Sequence: Synthetic oligonucleotide
cgccgataccccgaaacc

SEQ ID NO: 5557 - DNA, 18 bp, Artificial Sequence
  Description of Artificial Sequence: Synthetic oligonucleotide
ccttgcgccgataccccg

SEQ ID NO: 5558 - DNA, 18 bp, Artificial Sequence
  Description of Artificial Sequence: Synthetic oligonucleotide
cggagccttgcgccgata

SEQ ID NO: 5559 - DNA, 18 bp, Artificial Sequence
  Description of Artificial Sequence: Synthetic oligonucleotide
cccgtcggagccttgcgc

SEQ ID NO: 5560 - DNA, 18 bp, Artificial Sequence
  Description of Artificial Sequence: Synthetic oligonucleotide
ccacccccgtcggagcct

SEQ ID NO: 5561 - DNA, 18 bp, Artificial Sequence
  Description of Artificial Sequence: Synthetic oligonucleotide
cacccccacccccgtcgg

SEQ ID NO: 5562 - DNA, 18 bp, Artificial Sequence
  Description of Artificial Sequence: Synthetic oligonucleotide
atccccacccccaccccc

SEQ ID NO: 5563 - DNA, 18 bp, Artificial Sequence
  Description of Artificial Sequence: Synthetic oligonucleotide
accccatccccaccccca

SEQ ID NO: 5564 - DNA, 18 bp, Artificial Sequence
  Description of Artificial Sequence: Synthetic oligonucleotide
cccccaccccatccccac

SEQ ID NO: 5565 - DNA, 18 bp, Artificial Sequence
  Description of Artificial Sequence: Synthetic oligonucleotide
acctccccccaccccatc

SEQ ID NO: 5566 - DNA, 18 bp, Artificial Sequence
  Description of Artificial Sequence: Synthetic oligonucleotide
cccccacctccccccacc

SEQ ID NO: 5567 - DNA, 18 bp, Artificial Sequence
  Description of Artificial Sequence: Synthetic oligonucleotide
cgccccccccacctcccc

SEQ ID NO: 5568 - DNA, 18 bp, Artificial Sequence
  Description of Artificial Sequence: Synthetic oligonucleotide
ggccgcgccccccccacc

SEQ ID NO: 5569 - DNA, 18 bp, Artificial Sequence
  Description of Artificial Sequence: Synthetic oligonucleotide
ccctaggccgcgcccccc

SEQ ID NO: 5570 - DNA, 18 bp, Artificial Sequence
  Description of Artificial Sequence: Synthetic oligonucleotide
ccataccctaggccgcgc

SEQ ID NO: 5571 - DNA, 18 bp, Artificial Sequence
  Description of Artificial Sequence: Synthetic oligonucleotide
gcgccccataccctaggc

SEQ ID NO: 5572 - DNA, 18 bp, Artificial Sequence
  Description of Artificial Sequence: Synthetic oligonucleotide
aagaagcgccccataccc

SEQ ID NO: 5573 - DNA, 18 bp, Artificial Sequence
  Description of Artificial Sequence: Synthetic oligonucleotide
attgcaagaagcgcccca

SEQ ID NO: 5574 - DNA, 18 bp, Artificial Sequence
  Description of Artificial Sequence: Synthetic oligonucleotide
gggagattgcaagaagcg

SEQ ID NO: 5575 - DNA, 18 bp, Artificial Sequence
  Description of Artificial Sequence: Synthetic oligonucleotide
ctaaagagaatctcggcg

SEQ ID NO: 5576 - DNA, 18 bp, Artificial Sequence
  Description of Artificial Sequence: Synthetic oligonucleotide
ggcaactaaagagaatct

SEQ ID NO: 5577 - DNA, 18 bp, Artificial Sequence
  Description of Artificial Sequence: Synthetic oligonucleotide
ggccgggcaactaaagag

SEQ ID NO: 5578 - DNA, 18 bp, Artificial Sequence
  Description of Artificial Sequence: Synthetic oligonucleotide
cctgcggccgggcaacta

SEQ ID NO: 5579 - DNA, 18 bp, Artificial Sequence
  Description of Artificial Sequence: Synthetic oligonucleotide
cttgccctgcggccgggc

SEQ ID NO: 5580 - DNA, 18 bp, Artificial Sequence
  Description of Artificial Sequence: Synthetic oligonucleotide
cttgccttgccctgcggc

SEQ ID NO: 5581 - DNA, 18 bp, Artificial Sequence
  Description of Artificial Sequence: Synthetic oligonucleotide
gccagcttgccttgccct

SEQ ID NO: 5582 - DNA, 18 bp, Artificial Sequence
  Description of Artificial Sequence: Synthetic oligonucleotide
cacccgccagcttgcctt

SEQ ID NO: 5583 - DNA, 18 bp, Artificial Sequence
  Description of Artificial Sequence: Synthetic oligonucleotide
aaagccacccgccagctt

SEQ ID NO: 5584 - DNA, 18 bp, Artificial Sequence
  Description of Artificial Sequence: Synthetic oligonucleotide
ggacaaaagccacccgcc

SEQ ID NO: 5585 - DNA, 18 bp, Artificial Sequence
  Description of Artificial Sequence: Synthetic oligonucleotide
gcatgggacaaaagccac

SEQ ID NO: 5586 - DNA, 18 bp, Artificial Sequence
  Description of Artificial Sequence: Synthetic oligonucleotide
ccgctgcatgggacaaaa

SEQ ID NO: 5587 - DNA, 18 bp, Artificial Sequence
  Description of Artificial Sequence: Synthetic oligonucleotide
aggaaccgctgcatggga

SEQ ID NO: 5588 - DNA, 18 bp, Artificial Sequence
  Description of Artificial Sequence: Synthetic oligonucleotide
tctccaggaaccgctgca

SEQ ID NO: 5589 - DNA, 18 bp, Artificial Sequence
  Description of Artificial Sequence: Synthetic oligonucleotide
gcctctctccaggaaccg

SEQ ID NO: 5590 - DNA, 18 bp, Artificial Sequence
  Description of Artificial Sequence: Synthetic oligonucleotide
gctccgcctctctccagg

SEQ ID NO: 5591 - DNA, 18 bp, Artificial Sequence
  Description of Artificial Sequence: Synthetic oligonucleotide
acccagctccgcctctct

SEQ ID NO: 5592 - DNA, 18 bp, Artificial Sequence
  Description of Artificial Sequence: Synthetic oligonucleotide
tcggcacccagctccgcc

SEQ ID NO: 5593 - DNA, 18 bp, Artificial Sequence
  Description of Artificial Sequence: Synthetic oligonucleotide
gacgctcggcacccagct

SEQ ID NO: 5594 - DNA, 18 bp, Artificial Sequence
  Description of Artificial Sequence: Synthetic oligonucleotide
cctgagacgctcggcacc

SEQ ID NO: 5595 - DNA, 18 bp, Artificial Sequence
  Description of Artificial Sequence: Synthetic oligonucleotide
cccaccctgagacgctcg

SEQ ID NO: 5596 - DNA, 18 bp, Artificial Sequence
  Description of Artificial Sequence: Synthetic oligonucleotide
ccccgcccaccctgagac

SEQ ID NO: 5597 - DNA, 18 bp, Artificial Sequence
  Description of Artificial Sequence: Synthetic oligonucleotide
tgtcgccccgcccaccct

SEQ ID NO: 5598 - DNA, 18 bp, Artificial Sequence
  Description of Artificial Sequence: Synthetic oligonucleotide
gaccgtgtcgccccgccc

SEQ ID NO: 5599 - DNA, 18 bp, Artificial Sequence
  Description of Artificial Sequence: Synthetic oligonucleotide
aaggggaccgtgtcgccc

SEQ ID NO: 5600 - DNA, 18 bp, Artificial Sequence
  Description of Artificial Sequence: Synthetic oligonucleotide
gtaaaaaggggaccgtgt

SEQ ID NO: 5601 - DNA, 18 bp, Artificial Sequence
  Description of Artificial Sequence: Synthetic oligonucleotide
ggacagtaaaaaggggac

SEQ ID NO: 5602 - DNA, 18 bp, Artificial Sequence
  Description of Artificial Sequence: Synthetic oligonucleotide
tcccgggacagtaaaaag

SEQ ID NO: 5603 - DNA, 18 bp, Artificial Sequence
  Description of Artificial Sequence: Synthetic oligonucleotide
ccagttcccgggacagta

SEQ ID NO: 5604 - DNA, 18 bp, Artificial Sequence
  Description of Artificial Sequence: Synthetic oligonucleotide
ggcgaccagttcccggga

SEQ ID NO: 5605 - DNA, 18 bp, Artificial Sequence
  Description of Artificial Sequence: Synthetic oligonucleotide
ccccaggcgaccagttcc

SEQ ID NO: 5606 - DNA, 18 bp, Artificial Sequence
  Description of Artificial Sequence: Synthetic oligonucleotide
acttgccccaggcgacca

SEQ ID NO: 5607 - DNA, 18 bp, Artificial Sequence
  Description of Artificial Sequence: Synthetic oligonucleotide
tccagacttgccccaggc

SEQ ID NO: 5608 - DNA, 18 bp, Artificial Sequence
  Description of Artificial Sequence: Synthetic oligonucleotide
aagtatccagacttgccc

SEQ ID NO: 5609 - DNA, 18 bp, Artificial Sequence
  Description of Artificial Sequence: Synthetic oligonucleotide
ctgctaagtatccagact

SEQ ID NO: 5610 - DNA, 18 bp, Artificial Sequence
  Description of Artificial Sequence: Synthetic oligonucleotide
ctgtgctgctaagtatcc

SEQ ID NO: 5611 - DNA, 18 bp, Artificial Sequence
  Description of Artificial Sequence: Synthetic oligonucleotide
aggacctgtgctgctaag

SEQ ID NO: 5612 - DNA, 18 bp, Artificial Sequence
  Description of Artificial Sequence: Synthetic oligonucleotide
agaacaggacctgtgctg

SEQ ID NO: 5613 - DNA, 18 bp, Artificial Sequence
  Description of Artificial Sequence: Synthetic oligonucleotide
gtcctagaacaggacctg

SEQ ID NO: 5614 - DNA, 18 bp, Artificial Sequence
  Description of Artificial Sequence: Synthetic oligonucleotide
ctacagtcctagaacagg

SEQ ID NO: 5615 - DNA, 18 bp, Artificial Sequence
  Description of Artificial Sequence: Synthetic oligonucleotide
agggactacagtcctaga

SEQ ID NO: 5616 - DNA, 18 bp, Artificial Sequence
  Description of Artificial Sequence: Synthetic oligonucleotide
ccaagagggactacagtc

SEQ ID NO: 5617 - DNA, 18 bp, Artificial Sequence
  Description of Artificial Sequence: Synthetic oligonucleotide
gcaccccaagagggacta

SEQ ID NO: 5618 - DNA, 18 bp, Artificial Sequence
  Description of Artificial Sequence: Synthetic oligonucleotide
ccagcgcaccccaagagg

SEQ ID NO: 5619 - DNA, 18 bp, Artificial Sequence
  Description of Artificial Sequence: Synthetic oligonucleotide
tccgtccagcgcacccca

SEQ ID NO: 5620 - DNA, 18 bp, Artificial Sequence
  Description of Artificial Sequence: Synthetic oligonucleotide
ccttctccgtccagcgca

SEQ ID NO: 5621 - DNA, 18 bp, Artificial Sequence
  Description of Artificial Sequence: Synthetic oligonucleotide
gtctcccttctccgtcca

SEQ ID NO: 5622 - DNA, 18 bp, Artificial Sequence
  Description of Artificial Sequence: Synthetic oligonucleotide
gaaaagtctcccttctcc

SEQ ID NO: 5623 - DNA, 18 bp, Artificial Sequence
  Description of Artificial Sequence: Synthetic oligonucleotide
ctggtgaaaagtctccct

SEQ ID NO: 5624 - DNA, 18 bp, Artificial Sequence
  Description of Artificial Sequence: Synthetic oligonucleotide
cattactggtgaaaagtc

SEQ ID NO: 5625 - DNA, 18 bp, Artificial Sequence
  Description of Artificial Sequence: Synthetic oligonucleotide
agagccattactggtgaa

SEQ ID NO: 5626 - DNA, 18 bp, Artificial Sequence
  Description of Artificial Sequence: Synthetic oligonucleotide
cggtaagagccattactg

SEQ ID NO: 5627 - DNA, 18 bp, Artificial Sequence
  Description of Artificial Sequence: Synthetic oligonucleotide
cactacggtaagagccat

SEQ ID NO: 5628 - DNA, 18 bp, Artificial Sequence
  Description of Artificial Sequence: Synthetic oligonucleotide
gatggcactacggtaaga

SEQ ID NO: 5629 - DNA, 18 bp, Artificial Sequence
  Description of Artificial Sequence: Synthetic oligonucleotide
aaaaagatggcactacgg

SEQ ID NO: 5630 - DNA, 18 bp, Artificial Sequence
  Description of Artificial Sequence: Synthetic oligonucleotide
gacagaaaaagatggcac

SEQ ID NO: 5631 - DNA, 18 bp, Artificial Sequence
  Description of Artificial Sequence: Synthetic oligonucleotide
cccgagacagaaaaagat

SEQ ID NO: 5632 - DNA, 18 bp, Artificial Sequence
  Description of Artificial Sequence: Synthetic oligonucleotide
aaacccccgagacagaaa

SEQ ID NO: 5633 - DNA, 18 bp, Artificial Sequence
  Description of Artificial Sequence: Synthetic oligonucleotide
cttccaaacccccgagac

SEQ ID NO: 5634 - DNA, 18 bp, Artificial Sequence
  Description of Artificial Sequence: Synthetic oligonucleotide
attaccttccaaaccccc

SEQ ID NO: 5635 - DNA, 18 bp, Artificial Sequence
  Description of Artificial Sequence: Synthetic oligonucleotide
tagtcattaccttccaaa

SEQ ID NO: 5636 - DNA, 18 bp, Artificial Sequence
  Description of Artificial Sequence: Synthetic oligonucleotide
agtgctagtcattacctt

SEQ ID NO: 5637 - DNA, 18 bp, Artificial Sequence
  Description of Artificial Sequence: Synthetic oligonucleotide
acacaagtgctagtcatt

SEQ ID NO: 5638 - DNA, 18 bp, Artificial Sequence
  Description of Artificial Sequence: Synthetic oligonucleotide
tgtctacacaagtgctag

SEQ ID NO: 5639 - DNA, 18 bp, Artificial Sequence
  Description of Artificial Sequence: Synthetic oligonucleotide
ggaactgtctacacaagt

SEQ ID NO: 5640 - DNA, 18 bp, Artificial Sequence
  Description of Artificial Sequence: Synthetic oligonucleotide
taacaggaactgtctaca

SEQ ID NO: 5641 - DNA, 18 bp, Artificial Sequence
  Description of Artificial Sequence: Synthetic oligonucleotide
gggattaacaggaactgt

SEQ ID NO: 5642 - DNA, 18 bp, Artificial Sequence
  Description of Artificial Sequence: Synthetic oligonucleotide
ttcacgggattaacagga

SEQ ID NO: 5643 - DNA, 18 bp, Artificial Sequence
  Description of Artificial Sequence: Synthetic oligonucleotide
cccaattcacgggattaa

SEQ ID NO: 5644 - DNA, 18 bp, Artificial Sequence
  Description of Artificial Sequence: Synthetic oligonucleotide
aaattcccaattcacggg

SEQ ID NO: 5645 - DNA, 18 bp, Artificial Sequence
  Description of Artificial Sequence: Synthetic oligonucleotide
atgttaaattcccaattc

SEQ ID NO: 5646 - DNA, 18 bp, Artificial Sequence
  Description of Artificial Sequence: Synthetic oligonucleotide
caggcatgttaaattccc

SEQ ID NO: 5647 - DNA, 18 bp, Artificial Sequence
  Description of Artificial Sequence: Synthetic oligonucleotide
gcttccaggcatgttaaa

SEQ ID NO: 5648 - DNA, 18 bp, Artificial Sequence
  Description of Artificial Sequence: Synthetic oligonucleotide
tgcaagcttccaggcatg

SEQ ID NO: 5649 - DNA, 18 bp, Artificial Sequence
  Description of Artificial Sequence: Synthetic oligonucleotide
gacgctgcaagcttccag

SEQ ID NO: 5650 - DNA, 18 bp, Artificial Sequence
  Description of Artificial Sequence: Synthetic oligonucleotide
gcagtgacgctgcaagct

SEQ ID NO: 5651 - DNA, 18 bp, Artificial Sequence
  Description of Artificial Sequence: Synthetic oligonucleotide
agaaggcagtgacgctgc

SEQ ID NO: 5652 - DNA, 18 bp, Artificial Sequence
  Description of Artificial Sequence: Synthetic oligonucleotide
ctggcagaaggcagtgac

SEQ ID NO: 5653 - DNA, 18 bp, Artificial Sequence
  Description of Artificial Sequence: Synthetic oligonucleotide
ctccactggcagaaggca

SEQ ID NO: 5654 - DNA, 18 bp, Artificial Sequence
  Description of Artificial Sequence: Synthetic oligonucleotide
tcccgctccactggcaga

SEQ ID NO: 5655 - DNA, 18 bp, Artificial Sequence
  Description of Artificial Sequence: Synthetic oligonucleotide
cacagtcccgctccactg

SEQ ID NO: 5656 - DNA, 18 bp, Artificial Sequence
  Description of Artificial Sequence: Synthetic oligonucleotide
aaaaacacagtcccgctc

SEQ ID NO: 5657 - DNA, 18 bp, Artificial Sequence
  Description of Artificial Sequence: Synthetic oligonucleotide
tcgctcccttcctgtctc

SEQ ID NO: 5658 - DNA, 18 bp, Artificial Sequence
  Description of Artificial Sequence: Synthetic oligonucleotide
aggcctcgctcccttcct

SEQ ID NO: 5659 - DNA, 18 bp, Artificial Sequence
  Description of Artificial Sequence: Synthetic oligonucleotide
accccaggcctcgctccc

SEQ ID NO: 5660 - DNA, 18 bp, Artificial Sequence
  Description of Artificial Sequence: Synthetic oligonucleotide
ctcagaccccaggcctcg

SEQ ID NO: 5661 - DNA, 18 bp, Artificial Sequence
  Description of Artificial Sequence: Synthetic oligonucleotide
tcaccctcagaccccagg

SEQ ID NO: 5662 - DNA, 18 bp, Artificial Sequence
  Description of Artificial Sequence: Synthetic oligonucleotide
aggcctcaccctcagacc

SEQ ID NO: 5663 - DNA, 18 bp, Artificial Sequence
  Description of Artificial Sequence: Synthetic oligonucleotide
cccccaggcctcaccctc

SEQ ID NO: 5664 - DNA, 18 bp, Artificial Sequence
  Description of Artificial Sequence: Synthetic oligonucleotide
ccaggcccccaggcctca

SEQ ID NO: 5665 - DNA, 18 bp, Artificial Sequence
  Description of Artificial Sequence: Synthetic oligonucleotide
tccagccaggcccccagg

SEQ ID NO: 5666 - DNA, 18 bp, Artificial Sequence
  Description of Artificial Sequence: Synthetic oligonucleotide
agccctccagccaggccc

SEQ ID NO: 5667 - DNA, 18 bp, Artificial Sequence
  Description of Artificial Sequence: Synthetic oligonucleotide
cctccagccctccagcca

SEQ ID NO: 5668 - DNA, 18 bp, Artificial Sequence
  Description of Artificial Sequence: Synthetic oligonucleotide
ctttccctccagccctcc

SEQ ID NO: 5669 - DNA, 18 bp, Artificial Sequence
  Description of Artificial Sequence: Synthetic oligonucleotide
tgtccctttccctccagc

SEQ ID NO: 5670 - DNA, 18 bp, Artificial Sequence
  Description of Artificial Sequence: Synthetic oligonucleotide
ggcaatgtccctttccct

SEQ ID NO: 5671 - DNA, 18 bp, Artificial Sequence
  Description of Artificial Sequence: Synthetic oligonucleotide
gggcaggcaatgtccctt

SEQ ID NO: 5672 - DNA, 18 bp, Artificial Sequence
  Description of Artificial Sequence: Synthetic oligonucleotide
tagaggggcaggcaatgt

SEQ ID NO: 5673 - DNA, 18 bp, Artificial Sequence
  Description of Artificial Sequence: Synthetic oligonucleotide
ccttctagaggggcaggc

SEQ ID NO: 5674 - DNA, 18 bp, Artificial Sequence
  Description of Artificial Sequence: Synthetic oligonucleotide
catccccttctagagggg

SEQ ID NO: 5675 - DNA, 18 bp, Artificial Sequence
  Description of Artificial Sequence: Synthetic oligonucleotide
cgctccatccccttctag

SEQ ID NO: 5676 - DNA, 18 bp, Artificial Sequence
  Description of Artificial Sequence: Synthetic oligonucleotide
ctcagcgctccatcccct

SEQ ID NO: 5677 - DNA, 18 bp, Artificial Sequence
  Description of Artificial Sequence: Synthetic oligonucleotide
caagcctcagcgctccat

SEQ ID NO: 5678 - DNA, 18 bp, Artificial Sequence
  Description of Artificial Sequence: Synthetic oligonucleotide
atccacaagcctcagcgc

SEQ ID NO: 5679 - DNA, 18 bp, Artificial Sequence
  Description of Artificial Sequence: Synthetic oligonucleotide
ggctcatccacaagcctc

SEQ ID NO: 5680 - DNA, 18 bp, Artificial Sequence
  Description of Artificial Sequence: Synthetic oligonucleotide
ccacaggctcatccacaa

SEQ ID NO: 5681 - DNA, 18 bp, Artificial Sequence
  Description of Artificial Sequence: Synthetic oligonucleotide
tgcacccacaggctcatc

SEQ ID NO: 5682 - DNA, 18 bp, Artificial Sequence
  Description of Artificial Sequence: Synthetic oligonucleotide
ctcgttgcacccacaggc

SEQ ID NO: 5683 - DNA, 18 bp, Artificial Sequence
  Description of Artificial Sequence: Synthetic oligonucleotide
gtctcctcgttgcaccca

SEQ ID NO: 5684 - DNA, 18 bp, Artificial Sequence
  Description of Artificial Sequence: Synthetic oligonucleotide
tgtggctggagactggga

SEQ ID NO: 5685 - DNA, 18 bp, Artificial Sequence
  Description of Artificial Sequence: Synthetic oligonucleotide
ccacgtgtggctggagac

SEQ ID NO: 5686 - DNA, 18 bp, Artificial Sequence
  Description of Artificial Sequence: Synthetic oligonucleotide
atgacccacgtgtggctg

SEQ ID NO: 5687 - DNA, 18 bp, Artificial Sequence
  Description of Artificial Sequence: Synthetic oligonucleotide
ccttcatgacccacgtgt

SEQ ID NO: 5688 - DNA, 18 bp, Artificial Sequence
  Description of Artificial Sequence: Synthetic oligonucleotide
agtgaccttcatgaccca

SEQ ID NO: 5689 - DNA, 18 bp, Artificial Sequence
  Description of Artificial Sequence: Synthetic oligonucleotide
ggtgcagtgaccttcatg

SEQ ID NO: 5690 - DNA, 18 bp, Artificial Sequence
  Description of Artificial Sequence: Synthetic oligonucleotide
ctgtaggtgcagtgacct

SEQ ID NO: 5691 - DNA, 18 bp, Artificial Sequence
  Description of Artificial Sequence: Synthetic oligonucleotide
gaggcctgtaggtgcagt

SEQ ID NO: 5692 - DNA, 18 bp, Artificial Sequence
  Description of Artificial Sequence: Synthetic oligonucleotide
ggacagaggcctgtaggt

SEQ ID NO: 5693 - DNA, 18 bp, Artificial Sequence
  Description of Artificial Sequence: Synthetic oligonucleotide
tcaacggacagaggcctg

SEQ ID NO: 5694 - DNA, 18 bp, Artificial Sequence
  Description of Artificial Sequence: Synthetic oligonucleotide
ggtcttcaacggacagag

SEQ ID NO: 5695 - DNA, 18 bp, Artificial Sequence
  Description of Artificial Sequence: Synthetic oligonucleotide
tacatggtcttcaacgga

SEQ ID NO: 5696 - DNA, 18 bp, Artificial Sequence
  Description of Artificial Sequence: Synthetic oligonucleotide
cctcctacatggtcttca

SEQ ID NO: 5697 - DNA, 18 bp, Artificial Sequence
  Description of Artificial Sequence: Synthetic oligonucleotide
cctggcctcctacatggt

SEQ ID NO: 5698 - DNA, 18 bp, Artificial Sequence
  Description of Artificial Sequence: Synthetic oligonucleotide
ccacacctggcctcctac

SEQ ID NO: 5699 - DNA, 18 bp, Artificial Sequence
  Description of Artificial Sequence: Synthetic oligonucleotide
agctgccacacctggcct

SEQ ID NO: 5700 - DNA, 18 bp, Artificial Sequence
  Description of Artificial Sequence: Synthetic oligonucleotide
gtgtgagctgccacacct

SEQ ID NO: 5701 - DNA, 18 bp, Artificial Sequence
  Description of Artificial Sequence: Synthetic oligonucleotide
tatgggtgtgagctgcca

SEQ ID NO: 5702 - DNA, 18 bp, Artificial Sequence
  Description of Artificial Sequence: Synthetic oligonucleotide
tgggatatgggtgtgagc

SEQ ID NO: 5703 - DNA, 18 bp, Artificial Sequence
  Description of Artificial Sequence: Synthetic oligonucleotide
agcactgggatatgggtg

SEQ ID NO: 5704 - DNA, 18 bp, Artificial Sequence
  Description of Artificial Sequence: Synthetic oligonucleotide
accaaagcactgggatat

SEQ ID NO: 5705 - DNA, 18 bp, Artificial Sequence
  Description of Artificial Sequence: Synthetic oligonucleotide
aaatgaccaaagcactgg

SEQ ID NO: 5706 - DNA, 18 bp, Artificial Sequence
  Description of Artificial Sequence: Synthetic oligonucleotide
acaaaaaatgaccaaagc

SEQ ID NO: 5707 - DNA, 18 bp, Artificial Sequence
  Description of Artificial Sequence: Synthetic oligonucleotide
caacaacaaaaaatgacc

SEQ ID NO: 5708 - DNA, 18 bp, Artificial Sequence
  Description of Artificial Sequence: Synthetic oligonucleotide
caaaacaacaacaaaaaa

SEQ ID NO: 5709 - DNA, 18 bp, Artificial Sequence
  Description of Artificial Sequence: Synthetic oligonucleotide
aaaaacaaaacaacaaca

SEQ ID NO: 5710 - DNA, 18 bp, Artificial Sequence
  Description of Artificial Sequence: Synthetic oligonucleotide
aaacaaaaaacaaaacaa

SEQ ID NO: 5711 - DNA, 18 bp, Artificial Sequence
  Description of Artificial Sequence: Synthetic oligonucleotide
aaacaaaacaaaaaacaa

SEQ ID NO: 5712 - DNA, 18 bp, Artificial Sequence
  Description of Artificial Sequence: Synthetic oligonucleotide
aaacaaaacaaaacaaaa

SEQ ID NO: 5713 - DNA, 18 bp, Artificial Sequence
  Description of Artificial Sequence: Synthetic oligonucleotide
aaacaaaacaaaacaaaa

SEQ ID NO: 5714 - DNA, 18 bp, Artificial Sequence
  Description of Artificial Sequence: Synthetic oligonucleotide
tctaaaaacaaaacaaaa

SEQ ID NO: 5715 - DNA, 18 bp, Artificial Sequence
  Description of Artificial Sequence: Synthetic oligonucleotide
gactgtctaaaaacaaaa

SEQ ID NO: 5716 - DNA, 18 bp, Artificial Sequence
  Description of Artificial Sequence: Synthetic oligonucleotide
agcaagactgtctaaaaa

SEQ ID NO: 5717 - DNA, 18 bp, Artificial Sequence
  Description of Artificial Sequence: Synthetic oligonucleotide
gatagagcaagactgtct

SEQ ID NO: 5718 - DNA, 18 bp, Artificial Sequence
  Description of Artificial Sequence: Synthetic oligonucleotide
tgtgggatagagcaagac

SEQ ID NO: 5719 - DNA, 18 bp, Artificial Sequence
  Description of Artificial Sequence: Synthetic oligonucleotide
cagcctgtgggatagagc

SEQ ID NO: 5720 - DNA, 18 bp, Artificial Sequence
  Description of Artificial Sequence: Synthetic oligonucleotide
cactccagcctgtgggat

SEQ ID NO: 5721 - DNA, 18 bp, Artificial Sequence
  Description of Artificial Sequence: Synthetic oligonucleotide
ccgcggctccgtctccgc

SEQ ID NO: 5722 - DNA, 18 bp, Artificial Sequence
  Description of Artificial Sequence: Synthetic oligonucleotide
ccgccccgcggctccgtc

SEQ ID NO: 5723 - DNA, 18 bp, Artificial Sequence
  Description of Artificial Sequence: Synthetic oligonucleotide
acgccccgccccgcggct

SEQ ID NO: 5724 - DNA, 18 bp, Artificial Sequence
  Description of Artificial Sequence: Synthetic oligonucleotide
cgcgcacgccccgccccg

SEQ ID NO: 5725 - DNA, 18 bp, Artificial Sequence
  Description of Artificial Sequence: Synthetic oligonucleotide
cccctcgcgcacgccccg

SEQ ID NO: 5726 - DNA, 18 bp, Artificial Sequence
  Description of Artificial Sequence: Synthetic oligonucleotide
cccgccccctcgcgcacg

SEQ ID NO: 5727 - DNA, 18 bp, Artificial Sequence
  Description of Artificial Sequence: Synthetic oligonucleotide
cctggcccgccccctcgc

SEQ ID NO: 5728 - DNA, 18 bp, Artificial Sequence
  Description of Artificial Sequence: Synthetic oligonucleotide
ctcctcctggcccgcccc

SEQ ID NO: 5729 - DNA, 18 bp, Artificial Sequence
  Description of Artificial Sequence: Synthetic oligonucleotide
cgcccctcctcctggccc

SEQ ID NO: 5730 - DNA, 18 bp, Artificial Sequence
  Description of Artificial Sequence: Synthetic oligonucleotide
aatctcgcccctcctcct

SEQ ID NO: 5731 - DNA, 18 bp, Artificial Sequence
  Description of Artificial Sequence: Synthetic oligonucleotide
gacccaatctcgcccctc

SEQ ID NO: 5732 - DNA, 18 bp, Artificial Sequence
  Description of Artificial Sequence: Synthetic oligonucleotide
ctcgggacccaatctcgc

SEQ ID NO: 5733 - DNA, 18 bp, Artificial Sequence
  Description of Artificial Sequence: Synthetic oligonucleotide
ctgccctcgggacccaat

SEQ ID NO: 5734 - DNA, 18 bp, Artificial Sequence
  Description of Artificial Sequence: Synthetic oligonucleotide
cctctctgccctcgggac

SEQ ID NO: 5735 - DNA, 18 bp, Artificial Sequence
  Description of Artificial Sequence: Synthetic oligonucleotide
acctgcctctctgccctc

SEQ ID NO: 5736 - DNA, 18 bp, Artificial Sequence
  Description of Artificial Sequence: Synthetic oligonucleotide
agagaacctgcctctctg

SEQ ID NO: 5737 - DNA, 18 bp, Artificial Sequence
  Description of Artificial Sequence: Synthetic oligonucleotide
cctccagagaacctgcct

SEQ ID NO: 5738 - DNA, 18 bp, Artificial Sequence
  Description of Artificial Sequence: Synthetic oligonucleotide
tgtcccctccagagaacc

SEQ ID NO: 5739 - DNA, 18 bp, Artificial Sequence
  Description of Artificial Sequence: Synthetic oligonucleotide
gtgactgtcccctccaga

SEQ ID NO: 5740 - DNA, 18 bp, Artificial Sequence
  Description of Artificial Sequence: Synthetic oligonucleotide
cacctgtgactgtcccct

SEQ ID NO: 5741 - DNA, 18 bp, Artificial Sequence
  Description of Artificial Sequence: Synthetic oligonucleotide
ttctccacctgtgactgt

SEQ ID NO: 5742 - DNA, 18 bp, Artificial Sequence
  Description of Artificial Sequence: Synthetic oligonucleotide
cccatttctccacctgtg

SEQ ID NO: 5743 - DNA, 18 bp, Artificial Sequence
  Description of Artificial Sequence: Synthetic oligonucleotide
cctcacccatttctccac

SEQ ID NO: 5744 - DNA, 18 bp, Artificial Sequence
  Description of Artificial Sequence: Synthetic oligonucleotide
tttgtcctcacccatttc

SEQ ID NO: 5745 - DNA, 18 bp, Artificial Sequence
  Description of Artificial Sequence: Synthetic oligonucleotide
ctgaatttgtcctcaccc

SEQ ID NO: 5746 - DNA, 18 bp, Artificial Sequence
  Description of Artificial Sequence: Synthetic oligonucleotide
cctccctgaatttgtcct

SEQ ID NO: 5747 - DNA, 18 bp, Artificial Sequence
  Description of Artificial Sequence: Synthetic oligonucleotide
cgccacctccctgaattt

SEQ ID NO: 5748 - DNA, 18 bp, Artificial Sequence
  Description of Artificial Sequence: Synthetic oligonucleotide
ccagacgccacctccctg

SEQ ID NO: 5749 - DNA, 18 bp, Artificial Sequence
  Description of Artificial Sequence: Synthetic oligonucleotide
ctttcccagacgccacct

SEQ ID NO: 5750 - DNA, 18 bp, Artificial Sequence
  Description of Artificial Sequence: Synthetic oligonucleotide
aggccctttcccagacgc

SEQ ID NO: 5751 - DNA, 18 bp, Artificial Sequence
  Description of Artificial Sequence: Synthetic oligonucleotide
tctggaggccctttccca

SEQ ID NO: 5752 - DNA, 18 bp, Artificial Sequence
  Description of Artificial Sequence: Synthetic oligonucleotide
catcctctggaggccctt

SEQ ID NO: 5753 - DNA, 18 bp, Artificial Sequence
  Description of Artificial Sequence: Synthetic oligonucleotide
tgccccatcctctggagg

SEQ ID NO: 5754 - DNA, 18 bp, Artificial Sequence
  Description of Artificial Sequence: Synthetic oligonucleotide
acacctgccccatcctct

SEQ ID NO: 5755 - DNA, 18 bp, Artificial Sequence
  Description of Artificial Sequence: Synthetic oligonucleotide
cccctacacctgccccat

SEQ ID NO: 5756 - DNA, 18 bp, Artificial Sequence
  Description of Artificial Sequence: Synthetic oligonucleotide
ccactcccctacacctgc

SEQ ID NO: 5757 - DNA, 18 bp, Artificial Sequence
  Description of Artificial Sequence: Synthetic oligonucleotide
cccccccactcccctaca

SEQ ID NO: 5758 - DNA, 18 bp, Artificial Sequence
  Description of Artificial Sequence: Synthetic oligonucleotide
cacagcccccccactccc

SEQ ID NO: 5759 - DNA, 18 bp, Artificial Sequence
  Description of Artificial Sequence: Synthetic oligonucleotide
acttacacagccccccca

SEQ ID NO: 5760 - DNA, 18 bp, Artificial Sequence
  Description of Artificial Sequence: Synthetic oligonucleotide
gcatcacttacacagccc

SEQ ID NO: 5761 - DNA, 18 bp, Artificial Sequence
  Description of Artificial Sequence: Synthetic oligonucleotide
aggctgcatcacttacac

SEQ ID NO: 5762 - DNA, 18 bp, Artificial Sequence
  Description of Artificial Sequence: Synthetic oligonucleotide
ttccaaggctgcatcact

SEQ ID NO: 5763 - DNA, 18 bp, Artificial Sequence
  Description of Artificial Sequence: Synthetic oligonucleotide
cctccttccaaggctgca

SEQ ID NO: 5764 - DNA, 18 bp, Artificial Sequence
  Description of Artificial Sequence: Synthetic oligonucleotide
acagccctccttccaagg

SEQ ID NO: 5765 - DNA, 18 bp, Artificial Sequence
  Description of Artificial Sequence: Synthetic oligonucleotide
cgggaacagccctccttc

SEQ ID NO: 5766 - DNA, 18 bp, Artificial Sequence
  Description of Artificial Sequence: Synthetic oligonucleotide
ggaccaggtgtggggtta

SEQ ID NO: 5767 - DNA, 18 bp, Artificial Sequence
  Description of Artificial Sequence: Synthetic oligonucleotide
tgtggggaccaggtgtgg

SEQ ID NO: 5768 - DNA, 18 bp, Artificial Sequence
  Description of Artificial Sequence: Synthetic oligonucleotide
ggccttgtggggaccagg

SEQ ID NO: 5769 - DNA, 18 bp, Artificial Sequence
  Description of Artificial Sequence: Synthetic oligonucleotide
ttgagggccttgtgggga

SEQ ID NO: 5770 - DNA, 18 bp, Artificial Sequence
  Description of Artificial Sequence: Synthetic oligonucleotide
ggggtttgagggccttgt

SEQ ID NO: 5771 - DNA, 18 bp, Artificial Sequence
  Description of Artificial Sequence: Synthetic oligonucleotide
actcaggggtttgagggc

SEQ ID NO: 5772 - DNA, 18 bp, Artificial Sequence
  Description of Artificial Sequence: Synthetic oligonucleotide
agaggactcaggggtttg

SEQ ID NO: 5773 - DNA, 18 bp, Artificial Sequence
  Description of Artificial Sequence: Synthetic oligonucleotide
ctggtagaggactcaggg

SEQ ID NO: 5774 - DNA, 18 bp, Artificial Sequence
  Description of Artificial Sequence: Synthetic oligonucleotide
atctcctggtagaggact

SEQ ID NO: 5775 - DNA, 18 bp, Artificial Sequence
  Description of Artificial Sequence: Synthetic oligonucleotide
acaggatctcctggtaga

SEQ ID NO: 5776 - DNA, 18 bp, Artificial Sequence
  Description of Artificial Sequence: Synthetic oligonucleotide
catatacaggatctcctg

SEQ ID NO: 5777 - DNA, 18 bp, Artificial Sequence
  Description of Artificial Sequence: Synthetic oligonucleotide
gttcccatatacaggatc

SEQ ID NO: 5778 - DNA, 18 bp, Artificial Sequence
  Description of Artificial Sequence: Synthetic oligonucleotide
aatcagttcccatataca

SEQ ID NO: 5779 - DNA, 18 bp, Artificial Sequence
  Description of Artificial Sequence: Synthetic oligonucleotide
gccaaaatcagttcccat

SEQ ID NO: 5780 - DNA, 18 bp, Artificial Sequence
  Description of Artificial Sequence: Synthetic oligonucleotide
gctgggccaaaatcagtt

SEQ ID NO: 5781 - DNA, 18 bp, Artificial Sequence
  Description of Artificial Sequence: Synthetic oligonucleotide
agggagctgggccaaaat

SEQ ID NO: 5782 - DNA, 18 bp, Artificial Sequence
  Description of Artificial Sequence: Synthetic oligonucleotide
ggcagagggagctgggcc

SEQ ID NO: 5783 - DNA, 18 bp, Artificial Sequence
  Description of Artificial Sequence: Synthetic oligonucleotide
gagtgggcagagggagct

SEQ ID NO: 5784 - DNA, 18 bp, Artificial Sequence
  Description of Artificial Sequence: Synthetic oligonucleotide
cttacgagtgggcagagg

SEQ ID NO: 5785 - DNA, 18 bp, Artificial Sequence
  Description of Artificial Sequence: Synthetic oligonucleotide
gggaacttacgagtgggc

SEQ ID NO: 5786 - DNA, 18 bp, Artificial Sequence
  Description of Artificial Sequence: Synthetic oligonucleotide
agcaagggaacttacgag

SEQ ID NO: 5787 - DNA, 18 bp, Artificial Sequence
  Description of Artificial Sequence: Synthetic oligonucleotide
agggcagcaagggaactt

SEQ ID NO: 5788 - DNA, 18 bp, Artificial Sequence
  Description of Artificial Sequence: Synthetic oligonucleotide
gggacagggcagcaaggg

SEQ ID NO: 5789 - DNA, 18 bp, Artificial Sequence
  Description of Artificial Sequence: Synthetic oligonucleotide
gatctgggacagggcagc

SEQ ID NO: 5790 - DNA, 18 bp, Artificial Sequence
  Description of Artificial Sequence: Synthetic oligonucleotide
agtgggatctgggacagg

SEQ ID NO: 5791 - DNA, 18 bp, Artificial Sequence
  Description of Artificial Sequence: Synthetic oligonucleotide
ccttgagtgggatctggg

SEQ ID NO: 5792 - DNA, 18 bp, Artificial Sequence
  Description of Artificial Sequence: Synthetic oligonucleotide
ctctcccttgagtgggat

SEQ ID NO: 5793 - DNA, 18 bp, Artificial Sequence
  Description of Artificial Sequence: Synthetic oligonucleotide
cctgtctctcccttgagt

SEQ ID NO: 5794 - DNA, 18 bp, Artificial Sequence
  Description of Artificial Sequence: Synthetic oligonucleotide
tccttcctgtctctccct

SEQ ID NO: 5795 - DNA, 18 bp, Artificial Sequence
  Description of Artificial Sequence: Synthetic oligonucleotide
tctgctccttcctgtctc

SEQ ID NO: 5796 - DNA, 18 bp, Artificial Sequence
  Description of Artificial Sequence: Synthetic oligonucleotide
aactctctgctccttcct

SEQ ID NO: 5797 - DNA, 18 bp, Artificial Sequence
  Description of Artificial Sequence: Synthetic oligonucleotide
gaattaactctctgctcc

SEQ ID NO: 5798 - DNA, 18 bp, Artificial Sequence
  Description of Artificial Sequence: Synthetic oligonucleotide
tcctggaattaactctct

SEQ ID NO: 5799 - DNA, 18 bp, Artificial Sequence
  Description of Artificial Sequence: Synthetic oligonucleotide
atctatcctggaattaac

SEQ ID NO: 5800 - DNA, 18 bp, Artificial Sequence
  Description of Artificial Sequence: Synthetic oligonucleotide
aggccatctatcctggaa

SEQ ID NO: 5801 - DNA, 18 bp, Artificial Sequence
  Description of Artificial Sequence: Synthetic oligonucleotide
ggcccaggccatctatcc

SEQ ID NO: 5802 - DNA, 18 bp, Artificial Sequence
  Description of Artificial Sequence: Synthetic oligonucleotide
tacatggcccaggccatc

SEQ ID NO: 5803 - DNA, 18 bp, Artificial Sequence
  Description of Artificial Sequence: Synthetic oligonucleotide
gcagttacatggcccagg

SEQ ID NO: 5804 - DNA, 18 bp, Artificial Sequence
  Description of Artificial Sequence: Synthetic oligonucleotide
gagaagcagttacatggc

SEQ ID NO: 5805 - DNA, 18 bp, Artificial Sequence
  Description of Artificial Sequence: Synthetic oligonucleotide
gacaggagaagcagttac

SEQ ID NO: 5806 - DNA, 18 bp, Artificial Sequence
  Description of Artificial Sequence: Synthetic oligonucleotide
gctgcgacaggagaagca

SEQ ID NO: 5807 - DNA, 18 bp, Artificial Sequence
  Description of Artificial Sequence: Synthetic oligonucleotide
tcgcccctccgagggagc

SEQ ID NO: 5808 - DNA, 18 bp, Artificial Sequence
  Description of Artificial Sequence: Synthetic oligonucleotide
ccctgtcgcccctccgag

SEQ ID NO: 5809 - DNA, 18 bp, Artificial Sequence
  Description of Artificial Sequence: Synthetic oligonucleotide
ccggtccctgtcgcccct

SEQ ID NO: 5810 - DNA, 18 bp, Artificial Sequence
  Description of Artificial Sequence: Synthetic oligonucleotide
tgagcccggtccctgtcg

SEQ ID NO: 5811 - DNA, 18 bp, Artificial Sequence
  Description of Artificial Sequence: Synthetic oligonucleotide
agatctgagcccggtccc

SEQ ID NO: 5812 - DNA, 18 bp, Artificial Sequence
  Description of Artificial Sequence: Synthetic oligonucleotide
ttggcagatctgagcccg

SEQ ID NO: 5813 - DNA, 18 bp, Artificial Sequence
  Description of Artificial Sequence: Synthetic oligonucleotide
agcatttggcagatctga

SEQ ID NO: 5814 - DNA, 18 bp, Artificial Sequence
  Description of Artificial Sequence: Synthetic oligonucleotide
tccgcagcatttggcaga

SEQ ID NO: 5815 - DNA, 18 bp, Artificial Sequence
  Description of Artificial Sequence: Synthetic oligonucleotide
ctgcctccgcagcatttg

SEQ ID NO: 5816 - DNA, 18 bp, Artificial Sequence
  Description of Artificial Sequence: Synthetic oligonucleotide
aggttctgcctccgcagc

SEQ ID NO: 5817 - DNA, 18 bp, Artificial Sequence
  Description of Artificial Sequence: Synthetic oligonucleotide
ctgtcaggttctgcctcc

SEQ ID NO: 5818 - DNA, 18 bp, Artificial Sequence
  Description of Artificial Sequence: Synthetic oligonucleotide
ccgcactgtcaggttctg

SEQ ID NO: 5819 - DNA, 18 bp, Artificial Sequence
  Description of Artificial Sequence: Synthetic oligonucleotide
ccctcccgcactgtcagg

SEQ ID NO: 5820 - DNA, 18 bp, Artificial Sequence
  Description of Artificial Sequence: Synthetic oligonucleotide
gcctgccctcccgcactg

SEQ ID NO: 5821 - DNA, 18 bp, Artificial Sequence
  Description of Artificial Sequence: Synthetic oligonucleotide
caggcgcctgccctcccg

SEQ ID NO: 5822 - DNA, 18 bp, Artificial Sequence
  Description of Artificial Sequence: Synthetic oligonucleotide
cctcccaggcgcctgccc

SEQ ID NO: 5823 - DNA, 18 bp, Artificial Sequence
  Description of Artificial Sequence: Synthetic oligonucleotide
tcctacctcccaggcgcc

SEQ ID NO: 5824 - DNA, 18 bp, Artificial Sequence
  Description of Artificial Sequence: Synthetic oligonucleotide
ccagctcctacctcccag

SEQ ID NO: 5825 - DNA, 18 bp, Artificial Sequence
  Description of Artificial Sequence: Synthetic oligonucleotide
ctccaccagctcctacct

SEQ ID NO: 5826 - DNA, 18 bp, Artificial Sequence
  Description of Artificial Sequence: Synthetic oligonucleotide
gtcatctccaccagctcc

SEQ ID NO: 5827 - DNA, 18 bp, Artificial Sequence
  Description of Artificial Sequence: Synthetic oligonucleotide
acgctgtcatctccacca

SEQ ID NO: 5828 - DNA, 18 bp, Artificial Sequence
  Description of Artificial Sequence: Synthetic oligonucleotide
gttccacgctgtcatctc

SEQ ID NO: 5829 - DNA, 18 bp, Artificial Sequence
  Description of Artificial Sequence: Synthetic oligonucleotide
cacgagttccacgctgtc

SEQ ID NO: 5830 - DNA, 18 bp, Artificial Sequence
  Description of Artificial Sequence: Synthetic oligonucleotide
gggctcacgagttccacg

SEQ ID NO: 5831 - DNA, 18 bp, Artificial Sequence
  Description of Artificial Sequence: Synthetic oligonucleotide
gcgtggggctcacgagtt

SEQ ID NO: 5832 - DNA, 18 bp, Artificial Sequence
  Description of Artificial Sequence: Synthetic oligonucleotide
gcgttgcgtggggctcac

SEQ ID NO: 5833 - DNA, 18 bp, Artificial Sequence
  Description of Artificial Sequence: Synthetic oligonucleotide
gggaggcgttgcgtgggg

SEQ ID NO: 5834 - DNA, 18 bp, Artificial Sequence
  Description of Artificial Sequence: Synthetic oligonucleotide
cggcggggaggcgttgcg

SEQ ID NO: 5835 - DNA, 18 bp, Artificial Sequence
  Description of Artificial Sequence: Synthetic oligonucleotide
ttgggcggcggggaggcg

SEQ ID NO: 5836 - DNA, 18 bp, Artificial Sequence
  Description of Artificial Sequence: Synthetic oligonucleotide
ccaccttgggcggcgggg

SEQ ID NO: 5837 - DNA, 18 bp, Artificial Sequence
  Description of Artificial Sequence: Synthetic oligonucleotide
ggagcccaccttgggcgg

SEQ ID NO: 5838 - DNA, 18 bp, Artificial Sequence
  Description of Artificial Sequence: Synthetic oligonucleotide
ttctaggagcccaccttg

SEQ ID NO: 5839 - DNA, 18 bp, Artificial Sequence
  Description of Artificial Sequence: Synthetic oligonucleotide
tgtgcttctaggagccca

SEQ ID NO: 5840 - DNA, 18 bp, Artificial Sequence
  Description of Artificial Sequence: Synthetic oligonucleotide
ctttctgtgcttctagga

SEQ ID NO: 5841 - DNA, 18 bp, Artificial Sequence
  Description of Artificial Sequence: Synthetic oligonucleotide
cgaccctttctgtgcttc

SEQ ID NO: 5842 - DNA, 18 bp, Artificial Sequence
  Description of Artificial Sequence: Synthetic oligonucleotide
cagcccgaccctttctgt

SEQ ID NO: 5843 - DNA, 18 bp, Artificial Sequence
  Description of Artificial Sequence: Synthetic oligonucleotide
tcccccagcccgaccctt

SEQ ID NO: 5844 - DNA, 18 bp, Artificial Sequence
  Description of Artificial Sequence: Synthetic oligonucleotide
tggtgtcccccagcccga

SEQ ID NO: 5845 - DNA, 18 bp, Artificial Sequence
  Description of Artificial Sequence: Synthetic oligonucleotide
tgccgtggtgtcccccag

SEQ ID NO: 5846 - DNA, 18 bp, Artificial Sequence
  Description of Artificial Sequence: Synthetic oligonucleotide
ttccttgccgtggtgtcc

SEQ ID NO: 5847 - DNA, 18 bp, Artificial Sequence
  Description of Artificial Sequence: Synthetic oligonucleotide
gctggttccttgccgtgg

SEQ ID NO: 5848 - DNA, 18 bp, Artificial Sequence
  Description of Artificial Sequence: Synthetic oligonucleotide
actccgctggttccttgc

SEQ ID NO: 5849 - DNA, 18 bp, Artificial Sequence
  Description of Artificial Sequence: Synthetic oligonucleotide
cctgtactccgctggttc

SEQ ID NO: 5850 - DNA, 18 bp, Artificial Sequence
  Description of Artificial Sequence: Synthetic oligonucleotide
gggcccctgtactccgct

SEQ ID NO: 5851 - DNA, 18 bp, Artificial Sequence
  Description of Artificial Sequence: Synthetic oligonucleotide
tcctggggcccctgtact

SEQ ID NO: 5852 - DNA, 18 bp, Artificial Sequence
  Description of Artificial Sequence: Synthetic oligonucleotide
ggcgctcctggggcccct

SEQ ID NO: 5853 - DNA, 18 bp, Artificial Sequence
  Description of Artificial Sequence: Synthetic oligonucleotide
gtcccggcgctcctgggg

SEQ ID NO: 5854 - DNA, 18 bp, Artificial Sequence
  Description of Artificial Sequence: Synthetic oligonucleotide
ggcatgtcccggcgctcc

SEQ ID NO: 5855 - DNA, 18 bp, Artificial Sequence
  Description of Artificial Sequence: Synthetic oligonucleotide
ggcctggcatgtcccggc

SEQ ID NO: 5856 - DNA, 18 bp, Artificial Sequence
  Description of Artificial Sequence: Synthetic oligonucleotide
tacccggcctggcatgtc

SEQ ID NO: 5857 - DNA, 18 bp, Artificial Sequence
  Description of Artificial Sequence: Synthetic oligonucleotide
ctgcctacccggcctggc

SEQ ID NO: 5858 - DNA, 18 bp, Artificial Sequence
  Description of Artificial Sequence: Synthetic oligonucleotide
ccaggctgcctacccggc

SEQ ID NO: 5859 - DNA, 18 bp, Artificial Sequence
  Description of Artificial Sequence: Synthetic oligonucleotide
cgaccccaggctgcctac

SEQ ID NO: 5860 - DNA, 18 bp, Artificial Sequence
  Description of Artificial Sequence: Synthetic oligonucleotide
cactccgaccccaggctg

SEQ ID NO: 5861 - DNA, 18 bp, Artificial Sequence
  Description of Artificial Sequence: Synthetic oligonucleotide
tcacccactccgacccca

SEQ ID NO: 5862 - DNA, 18 bp, Artificial Sequence
  Description of Artificial Sequence: Synthetic oligonucleotide
atccctcacccactccga

SEQ ID NO: 5863 - DNA, 18 bp, Artificial Sequence
  Description of Artificial Sequence: Synthetic oligonucleotide
ccccaatccctcacccac

SEQ ID NO: 5864 - DNA, 18 bp, Artificial Sequence
  Description of Artificial Sequence: Synthetic oligonucleotide
ccacaccccaatccctca

SEQ ID NO: 5865 - DNA, 18 bp, Artificial Sequence
  Description of Artificial Sequence: Synthetic oligonucleotide
aatccccacaccccaatc

SEQ ID NO: 5866 - DNA, 18 bp, Artificial Sequence
  Description of Artificial Sequence: Synthetic oligonucleotide
gactgaatccccacaccc

SEQ ID NO: 5867 - DNA, 18 bp, Artificial Sequence
  Description of Artificial Sequence: Synthetic oligonucleotide
aaatggactgaatcccca

SEQ ID NO: 5868 - DNA, 18 bp, Artificial Sequence
  Description of Artificial Sequence: Synthetic oligonucleotide
gagggaaatggactgaat

SEQ ID NO: 5869 - DNA, 18 bp, Artificial Sequence
  Description of Artificial Sequence: Synthetic oligonucleotide
cataagagggaaatggac

SEQ ID NO: 5870 - DNA, 18 bp, Artificial Sequence
  Description of Artificial Sequence: Synthetic oligonucleotide
acaatcataagagggaaa

SEQ ID NO: 5871 - DNA, 18 bp, Artificial Sequence
  Description of Artificial Sequence: Synthetic oligonucleotide
cagccacaatcataagag

SEQ ID NO: 5872 - DNA, 18 bp, Artificial Sequence
  Description of Artificial Sequence: Synthetic oligonucleotide
cgctacagccacaatcat

SEQ ID NO: 5873 - DNA, 18 bp, Artificial Sequence
  Description of Artificial Sequence: Synthetic oligonucleotide
gcacccgctacagccaca

SEQ ID NO: 5874 - DNA, 18 bp, Artificial Sequence
  Description of Artificial Sequence: Synthetic oligonucleotide
cggcagcacccgctacag

SEQ ID NO: 5875 - DNA, 18 bp, Artificial Sequence
  Description of Artificial Sequence: Synthetic oligonucleotide
ccggccggcagcacccgc

SEQ ID NO: 5876 - DNA, 18 bp, Artificial Sequence
  Description of Artificial Sequence: Synthetic oligonucleotide
tattaccggccggcagca

SEQ ID NO: 5877 - DNA, 18 bp, Artificial Sequence
  Description of Artificial Sequence: Synthetic oligonucleotide
actgttattaccggccgg

SEQ ID NO: 5878 - DNA, 18 bp, Artificial Sequence
  Description of Artificial Sequence: Synthetic oligonucleotide
ctattactgttattaccg

SEQ ID NO: 5879 - DNA, 18 bp, Artificial Sequence
  Description of Artificial Sequence: Synthetic oligonucleotide
tgcagagagccagtgaca

SEQ ID NO: 5880 - DNA, 18 bp, Artificial Sequence
  Description of Artificial Sequence: Synthetic oligonucleotide
agggatgcagagagccag

SEQ ID NO: 5881 - DNA, 18 bp, Artificial Sequence
  Description of Artificial Sequence: Synthetic oligonucleotide
cagacagggatgcagaga

SEQ ID NO: 5882 - DNA, 18 bp, Artificial Sequence
  Description of Artificial Sequence: Synthetic oligonucleotide
aaagacagacagggatgc

SEQ ID NO: 5883 - DNA, 18 bp, Artificial Sequence
  Description of Artificial Sequence: Synthetic oligonucleotide
aacaaaaagacagacagg

SEQ ID NO: 5884 - DNA, 18 bp, Artificial Sequence
  Description of Artificial Sequence: Synthetic oligonucleotide
aaacaaacaaaaagacag

SEQ ID NO: 5885 - DNA, 18 bp, Artificial Sequence
  Description of Artificial Sequence: Synthetic oligonucleotide
tctcaaaacaaacaaaaa

SEQ ID NO: 5886 - DNA, 18 bp, Artificial Sequence
  Description of Artificial Sequence: Synthetic oligonucleotide
cctaatctcaaaacaaac

SEQ ID NO: 5887 - DNA, 18 bp, Artificial Sequence
  Description of Artificial Sequence: Synthetic oligonucleotide
gagaccctaatctcaaaa

SEQ ID NO: 5888 - DNA, 18 bp, Artificial Sequence
  Description of Artificial Sequence: Synthetic oligonucleotide
agagcgagaccctaatct

SEQ ID NO: 5889 - DNA, 18 bp, Artificial Sequence
  Description of Artificial Sequence: Synthetic oligonucleotide
gcgacagagcgagaccct

SEQ ID NO: 5890 - DNA, 18 bp, Artificial Sequence
  Description of Artificial Sequence: Synthetic oligonucleotide
cctgggcgacagagcgag

SEQ ID NO: 5891 - DNA, 18 bp, Artificial Sequence
  Description of Artificial Sequence: Synthetic oligonucleotide
tccagcctgggcgacaga

SEQ ID NO: 5892 - DNA, 18 bp, Artificial Sequence
  Description of Artificial Sequence: Synthetic oligonucleotide
cgcactccagcctgggcg

SEQ ID NO: 5893 - DNA, 18 bp, Artificial Sequence
  Description of Artificial Sequence: Synthetic oligonucleotide
gccaccgcactccagcct

SEQ ID NO: 5894 - DNA, 18 bp, Artificial Sequence
  Description of Artificial Sequence: Synthetic oligonucleotide
atctcgccaccgcactcc

SEQ ID NO: 5895 - DNA, 18 bp, Artificial Sequence
  Description of Artificial Sequence: Synthetic oligonucleotide
ctgagatctcgccaccgc

SEQ ID NO: 5896 - DNA, 18 bp, Artificial Sequence
  Description of Artificial Sequence: Synthetic oligonucleotide
gagagctgagatctcgcc

SEQ ID NO: 5897 - DNA, 18 bp, Artificial Sequence
  Description of Artificial Sequence: Synthetic oligonucleotide
ttgcagagagctgagatc

SEQ ID NO: 5898 - DNA, 18 bp, Artificial Sequence
  Description of Artificial Sequence: Synthetic oligonucleotide
ggaggttgcagagagctg

SEQ ID NO: 5899 - DNA, 18 bp, Artificial Sequence
  Description of Artificial Sequence: Synthetic oligonucleotide
gagccggaggttgcagag

SEQ ID NO: 5900 - DNA, 18 bp, Artificial Sequence
  Description of Artificial Sequence: Synthetic oligonucleotide
cccaggagccggaggttg

SEQ ID NO: 5901 - DNA, 18 bp, Artificial Sequence
  Description of Artificial Sequence: Synthetic oligonucleotide
ctgaacccaggagccgga

SEQ ID NO: 5902 - DNA, 18 bp, Artificial Sequence
  Description of Artificial Sequence: Synthetic oligonucleotide
atcacctgaacccaggag

SEQ ID NO: 5903 - DNA, 18 bp, Artificial Sequence
  Description of Artificial Sequence: Synthetic oligonucleotide
tgagaatcacctgaaccc

SEQ ID NO: 5904 - DNA, 18 bp, Artificial Sequence
  Description of Artificial Sequence: Synthetic oligonucleotide
aagcatgagaatcacctg

SEQ ID NO: 5905 - DNA, 18 bp, Artificial Sequence
  Description of Artificial Sequence: Synthetic oligonucleotide
ggctgaagcatgagaatc

SEQ ID NO: 5906 - DNA, 18 bp, Artificial Sequence
  Description of Artificial Sequence: Synthetic oligonucleotide
caggaggctgaagcatga

SEQ ID NO: 5907 - DNA, 18 bp, Artificial Sequence
  Description of Artificial Sequence: Synthetic oligonucleotide
ctactcaggaggctgaag

SEQ ID NO: 5908 - DNA, 18 bp, Artificial Sequence
  Description of Artificial Sequence: Synthetic oligonucleotide
cccagctactcaggaggc

SEQ ID NO: 5909 - DNA, 18 bp, Artificial Sequence
  Description of Artificial Sequence: Synthetic oligonucleotide
gtagtcccagctactcag

SEQ ID NO: 5910 - DNA, 18 bp, Artificial Sequence
  Description of Artificial Sequence: Synthetic oligonucleotide
tccctgtagtcccagcta

SEQ ID NO: 5911 - DNA, 18 bp, Artificial Sequence
  Description of Artificial Sequence: Synthetic oligonucleotide
gtgggtccctgtagtccc

SEQ ID NO: 5912 - DNA, 18 bp, Artificial Sequence
  Description of Artificial Sequence: Synthetic oligonucleotide
tgctggtgggtccctgta

SEQ ID NO: 5913 - DNA, 18 bp, Artificial Sequence
  Description of Artificial Sequence: Synthetic oligonucleotide
aggtgtgctggtgggtcc

SEQ ID NO: 5914 - DNA, 18 bp, Artificial Sequence
  Description of Artificial Sequence: Synthetic oligonucleotide
tagccaggtgtgctggtg

SEQ ID NO: 5915 - DNA, 18 bp, Artificial Sequence
  Description of Artificial Sequence: Synthetic oligonucleotide
aaaattagccaggtgtgc

SEQ ID NO: 5916 - DNA, 18 bp, Artificial Sequence
  Description of Artificial Sequence: Synthetic oligonucleotide
atacaaaaattagccagg

SEQ ID NO: 5917 - DNA, 18 bp, Artificial Sequence
  Description of Artificial Sequence: Synthetic oligonucleotide
taaaaatacaaaaattag

SEQ ID NO: 5918 - DNA, 18 bp, Artificial Sequence
  Description of Artificial Sequence: Synthetic oligonucleotide
tctactaaaaatacaaaa

SEQ ID NO: 5919 - DNA, 18 bp, Artificial Sequence
  Description of Artificial Sequence: Synthetic oligonucleotide
ctgtctctactaaaaata

SEQ ID NO: 5920 - DNA, 18 bp, Artificial Sequence
  Description of Artificial Sequence: Synthetic oligonucleotide
aaaccctgtctctactaa

SEQ ID NO: 5921 - DNA, 18 bp, Artificial Sequence
  Description of Artificial Sequence: Synthetic oligonucleotide
tggtgaaaccctgtctct

SEQ ID NO: 5922 - DNA, 18 bp, Artificial Sequence
  Description of Artificial Sequence: Synthetic oligonucleotide
taacatggtgaaaccctg

SEQ ID NO: 5923 - DNA, 18 bp, Artificial Sequence
  Description of Artificial Sequence: Synthetic oligonucleotide
ctaactaacatggtgaaa

SEQ ID NO: 5924 - DNA, 18 bp, Artificial Sequence
  Description of Artificial Sequence: Synthetic oligonucleotide
ccaacctaactaacatgg

SEQ ID NO: 5925 - DNA, 18 bp, Artificial Sequence
  Description of Artificial Sequence: Synthetic oligonucleotide
gcccaaccacccccccca

SEQ ID NO: 5926 - DNA, 18 bp, Artificial Sequence
  Description of Artificial Sequence: Synthetic oligonucleotide
ccagggcccaaccacccc

SEQ ID NO: 5927 - DNA, 18 bp, Artificial Sequence
  Description of Artificial Sequence: Synthetic oligonucleotide
gatgcccagggcccaacc

SEQ ID NO: 5928 - DNA, 18 bp, Artificial Sequence
  Description of Artificial Sequence: Synthetic oligonucleotide
aggcagatgcccagggcc

SEQ ID NO: 5929 - DNA, 18 bp, Artificial Sequence
  Description of Artificial Sequence: Synthetic oligonucleotide
ccagcaggcagatgccca

SEQ ID NO: 5930 - DNA, 18 bp, Artificial Sequence
  Description of Artificial Sequence: Synthetic oligonucleotide
tccttccagcaggcagat

SEQ ID NO: 5931 - DNA, 18 bp, Artificial Sequence
  Description of Artificial Sequence: Synthetic oligonucleotide
ctacctccttccagcagg

SEQ ID NO: 5932 - DNA, 18 bp, Artificial Sequence
  Description of Artificial Sequence: Synthetic oligonucleotide
cccacctacctccttcca

SEQ ID NO: 5933 - DNA, 18 bp, Artificial Sequence
  Description of Artificial Sequence: Synthetic oligonucleotide
ccccacccacctacctcc

SEQ ID NO: 5934 - DNA, 18 bp, Artificial Sequence
  Description of Artificial Sequence: Synthetic oligonucleotide
accgtccccacccaccta

SEQ ID NO: 5935 - DNA, 18 bp, Artificial Sequence
  Description of Artificial Sequence: Synthetic oligonucleotide
cccccaccgtccccaccc

SEQ ID NO: 5936 - DNA, 18 bp, Artificial Sequence
  Description of Artificial Sequence: Synthetic oligonucleotide
cctcccccccaccgtccc

SEQ ID NO: 5937 - DNA, 18 bp, Artificial Sequence
  Description of Artificial Sequence: Synthetic oligonucleotide
aaccacctcccccccacc

SEQ ID NO: 5938 - DNA, 18 bp, Artificial Sequence
  Description of Artificial Sequence: Synthetic oligonucleotide
ggcccaaccacctccccc

SEQ ID NO: 5939 - DNA, 18 bp, Artificial Sequence
  Description of Artificial Sequence: Synthetic oligonucleotide
cccagggcccaaccacct

SEQ ID NO: 5940 - DNA, 18 bp, Artificial Sequence
  Description of Artificial Sequence: Synthetic oligonucleotide
ggatgcccagggcccaac

SEQ ID NO: 5941 - DNA, 18 bp, Artificial Sequence
  Description of Artificial Sequence: Synthetic oligonucleotide
caggcggatgcccagggc

SEQ ID NO: 5942 - DNA, 18 bp, Artificial Sequence
  Description of Artificial Sequence: Synthetic oligonucleotide
tccagcaggcggatgccc

SEQ ID NO: 5943 - DNA, 18 bp, Artificial Sequence
  Description of Artificial Sequence: Synthetic oligonucleotide
ctccttccagcaggcgga

SEQ ID NO: 5944 - DNA, 18 bp, Artificial Sequence
  Description of Artificial Sequence: Synthetic oligonucleotide
cctacctccttccagcag

SEQ ID NO: 5945 - DNA, 18 bp, Artificial Sequence
  Description of Artificial Sequence: Synthetic oligonucleotide
acccacctacctccttcc

SEQ ID NO: 5946 - DNA, 18 bp, Artificial Sequence
  Description of Artificial Sequence: Synthetic oligonucleotide
tccccacccacctacctc

SEQ ID NO: 5947 - DNA, 18 bp, Artificial Sequence
  Description of Artificial Sequence: Synthetic oligonucleotide
caccgtccccacccacct

SEQ ID NO: 5948 - DNA, 18 bp, Artificial Sequence
  Description of Artificial Sequence: Synthetic oligonucleotide
cccaccaccgtccccacc

SEQ ID NO: 5949 - DNA, 18 bp, Artificial Sequence
  Description of Artificial Sequence: Synthetic oligonucleotide
gcctccccaccaccgtcc

SEQ ID NO: 5950 - DNA, 18 bp, Artificial Sequence
  Description of Artificial Sequence: Synthetic oligonucleotide
catgcgcctccccaccac

SEQ ID NO: 5951 - DNA, 18 bp, Artificial Sequence
  Description of Artificial Sequence: Synthetic oligonucleotide
gtcagcatgcgcctcccc

SEQ ID NO: 5952 - DNA, 18 bp, Artificial Sequence
  Description of Artificial Sequence: Synthetic oligonucleotide
gggcagtcagcatgcgcc

SEQ ID NO: 5953 - DNA, 18 bp, Artificial Sequence
  Description of Artificial Sequence: Synthetic oligonucleotide
gcatggggcagtcagcat

SEQ ID NO: 5954 - DNA, 18 bp, Artificial Sequence
  Description of Artificial Sequence: Synthetic oligonucleotide
tgtaggcatggggcagtc

SEQ ID NO: 5955 - DNA, 18 bp, Artificial Sequence
  Description of Artificial Sequence: Synthetic oligonucleotide
atccgcggctggctgact

SEQ ID NO: 5956 - DNA, 18 bp, Artificial Sequence
  Description of Artificial Sequence: Synthetic oligonucleotide
tccccatccgcggctggc

SEQ ID NO: 5957 - DNA, 18 bp, Artificial Sequence
  Description of Artificial Sequence: Synthetic oligonucleotide
cacgctccccatccgcgg

SEQ ID NO: 5958 - DNA, 18 bp, Artificial Sequence
  Description of Artificial Sequence: Synthetic oligonucleotide
ccactcacgctccccatc

SEQ ID NO: 5959 - DNA, 18 bp, Artificial Sequence
  Description of Artificial Sequence: Synthetic oligonucleotide
cctcgccactcacgctcc

SEQ ID NO: 5960 - DNA, 18 bp, Artificial Sequence
  Description of Artificial Sequence: Synthetic oligonucleotide
ccacacctcgccactcac

SEQ ID NO: 5961 - DNA, 18 bp, Artificial Sequence
  Description of Artificial Sequence: Synthetic oligonucleotide
ccaggccacacctcgcca

SEQ ID NO: 5962 - DNA, 18 bp, Artificial Sequence
  Description of Artificial Sequence: Synthetic oligonucleotide
ccaccccaggccacacct

SEQ ID NO: 5963 - DNA, 18 bp, Artificial Sequence
  Description of Artificial Sequence: Synthetic oligonucleotide
ctacaccaccccaggcca

SEQ ID NO: 5964 - DNA, 18 bp, Artificial Sequence
  Description of Artificial Sequence: Synthetic oligonucleotide
tcaacctacaccacccca

SEQ ID NO: 5965 - DNA, 18 bp, Artificial Sequence
  Description of Artificial Sequence: Synthetic oligonucleotide
caccctcaacctacacca

SEQ ID NO: 5966 - DNA, 18 bp, Artificial Sequence
  Description of Artificial Sequence: Synthetic oligonucleotide
ccctccaccctcaaccta

SEQ ID NO: 5967 - DNA, 18 bp, Artificial Sequence
  Description of Artificial Sequence: Synthetic oligonucleotide
caggaccctccaccctca

SEQ ID NO: 5968 - DNA, 18 bp, Artificial Sequence
  Description of Artificial Sequence: Synthetic oligonucleotide
agccccaggaccctccac

SEQ ID NO: 5969 - DNA, 18 bp, Artificial Sequence
  Description of Artificial Sequence: Synthetic oligonucleotide
aatgcagccccaggaccc

SEQ ID NO: 5970 - DNA, 18 bp, Artificial Sequence
  Description of Artificial Sequence: Synthetic oligonucleotide
cagcgaatgcagccccag

SEQ ID NO: 5971 - DNA, 18 bp, Artificial Sequence
  Description of Artificial Sequence: Synthetic oligonucleotide
cggggcagcgaatgcagc

SEQ ID NO: 5972 - DNA, 18 bp, Artificial Sequence
  Description of Artificial Sequence: Synthetic oligonucleotide
cgctccggggcagcgaat

SEQ ID NO: 5973 - DNA, 18 bp, Artificial Sequence
  Description of Artificial Sequence: Synthetic oligonucleotide
gcccccgctccggggcag

SEQ ID NO: 5974 - DNA, 18 bp, Artificial Sequence
  Description of Artificial Sequence: Synthetic oligonucleotide
cccctgcccccgctccgg

SEQ ID NO: 5975 - DNA, 18 bp, Artificial Sequence
  Description of Artificial Sequence: Synthetic oligonucleotide
cactgcccctgcccccgc

SEQ ID NO: 5976 - DNA, 18 bp, Artificial Sequence
  Description of Artificial Sequence: Synthetic oligonucleotide
ggagccactgcccctgcc

SEQ ID NO: 5977 - DNA, 18 bp, Artificial Sequence
  Description of Artificial Sequence: Synthetic oligonucleotide
ccgagggagccactgccc

SEQ ID NO: 5978 - DNA, 18 bp, Artificial Sequence
  Description of Artificial Sequence: Synthetic oligonucleotide
acgccccgagggagccac

SEQ ID NO: 5979 - DNA, 18 bp, Artificial Sequence
  Description of Artificial Sequence: Synthetic oligonucleotide
gacctacgccccgaggga

SEQ ID NO: 5980 - DNA, 18 bp, Artificial Sequence
  Description of Artificial Sequence: Synthetic oligonucleotide
ctcgagacctacgccccg

SEQ ID NO: 5981 - DNA, 18 bp, Artificial Sequence
  Description of Artificial Sequence: Synthetic oligonucleotide
gttgcctcgagacctacg

SEQ ID NO: 5982 - DNA, 18 bp, Artificial Sequence
  Description of Artificial Sequence: Synthetic oligonucleotide
gcctagttgcctcgagac

SEQ ID NO: 5983 - DNA, 18 bp, Artificial Sequence
  Description of Artificial Sequence: Synthetic oligonucleotide
agccccagacagacccag

SEQ ID NO: 5984 - DNA, 18 bp, Artificial Sequence
  Description of Artificial Sequence: Synthetic oligonucleotide
tggacagccccagacaga

SEQ ID NO: 5985 - DNA, 18 bp, Artificial Sequence
  Description of Artificial Sequence: Synthetic oligonucleotide
aactgtggacagccccag

SEQ ID NO: 5986 - DNA, 18 bp, Artificial Sequence
  Description of Artificial Sequence: Synthetic oligonucleotide
cgcccaactgtggacagc

SEQ ID NO: 5987 - DNA, 18 bp, Artificial Sequence
  Description of Artificial Sequence: Synthetic oligonucleotide
tttaccgcccaactgtgg

SEQ ID NO: 5988 - DNA, 18 bp, Artificial Sequence
  Description of Artificial Sequence: Synthetic oligonucleotide
tctcttttaccgcccaac

SEQ ID NO: 5989 - DNA, 18 bp, Artificial Sequence
  Description of Artificial Sequence: Synthetic oligonucleotide
ccgtatctcttttaccgc

SEQ ID NO: 5990 - DNA, 18 bp, Artificial Sequence
  Description of Artificial Sequence: Synthetic oligonucleotide
ataagccgtatctctttt

SEQ ID NO: 5991 - DNA, 18 bp, Artificial Sequence
  Description of Artificial Sequence: Synthetic oligonucleotide
aattcataagccgtatct

SEQ ID NO: 5992 - DNA, 18 bp, Artificial Sequence
  Description of Artificial Sequence: Synthetic oligonucleotide
tttcaaattcataagccg

SEQ ID NO: 5993 - DNA, 18 bp, Artificial Sequence
  Description of Artificial Sequence: Synthetic oligonucleotide
atgcctttcaaattcata

SEQ ID NO: 5994 - DNA, 18 bp, Artificial Sequence
  Description of Artificial Sequence: Synthetic oligonucleotide
cttacatgcctttcaaat

SEQ ID NO: 5995 - DNA, 18 bp, Artificial Sequence
  Description of Artificial Sequence: Synthetic oligonucleotide
aattacttacatgccttt

SEQ ID NO: 5996 - DNA, 18 bp, Artificial Sequence
  Description of Artificial Sequence: Synthetic oligonucleotide
ttataaattacttacatg

SEQ ID NO: 5997 - DNA, 18 bp, Artificial Sequence
  Description of Artificial Sequence: Synthetic oligonucleotide
tcatattataaattactt

SEQ ID NO: 5998 - DNA, 18 bp, Artificial Sequence
  Description of Artificial Sequence: Synthetic oligonucleotide
ataagtcatattataaat

SEQ ID NO: 5999 - DNA, 18 bp, Artificial Sequence
  Description of Artificial Sequence: Synthetic oligonucleotide
aatttataagtcatatta

SEQ ID NO: 6000 - DNA, 18 bp, Artificial Sequence
  Description of Artificial Sequence: Synthetic oligonucleotide
ttcctaatttataagtca

SEQ ID NO: 6001 - DNA, 18 bp, Artificial Sequence
  Description of Artificial Sequence: Synthetic oligonucleotide
ttgccttcctaatttata

SEQ ID NO: 6002 - DNA, 18 bp, Artificial Sequence
  Description of Artificial Sequence: Synthetic oligonucleotide
ttcggttgccttcctaat

SEQ ID NO: 6003 - DNA, 18 bp, Artificial Sequence
  Description of Artificial Sequence: Synthetic oligonucleotide
catctttcggttgccttc

SEQ ID NO: 6004 - DNA, 18 bp, Artificial Sequence
  Description of Artificial Sequence: Synthetic oligonucleotide
agaaacatctttcggttg

SEQ ID NO: 6005 - DNA, 18 bp, Artificial Sequence
  Description of Artificial Sequence: Synthetic oligonucleotide
agtgtagaaacatctttc

SEQ ID NO: 6006 - DNA, 18 bp, Artificial Sequence
  Description of Artificial Sequence: Synthetic oligonucleotide
attacagtgtagaaacat

SEQ ID NO: 6007 - DNA, 18 bp, Artificial Sequence
  Description of Artificial Sequence: Synthetic oligonucleotide
caagaattacagtgtaga

SEQ ID NO: 6008 - DNA, 18 bp, Artificial Sequence
  Description of Artificial Sequence: Synthetic oligonucleotide
tgctgcaagaattacagt

SEQ ID NO: 6009 - DNA, 18 bp, Artificial Sequence
  Description of Artificial Sequence: Synthetic oligonucleotide
agctgtgctgcaagaatt

SEQ ID NO: 6010 - DNA, 18 bp, Artificial Sequence
  Description of Artificial Sequence: Synthetic oligonucleotide
tacaaagctgtgctgcaa

SEQ ID NO: 6011 - DNA, 18 bp, Artificial Sequence
  Description of Artificial Sequence: Synthetic oligonucleotide
tccgatacaaagctgtgc

SEQ ID NO: 6012 - DNA, 18 bp, Artificial Sequence
  Description of Artificial Sequence: Synthetic oligonucleotide
gaccatccgatacaaagc

SEQ ID NO: 6013 - DNA, 18 bp, Artificial Sequence
  Description of Artificial Sequence: Synthetic oligonucleotide
cactggaccatccgatac

SEQ ID NO: 6014 - DNA, 18 bp, Artificial Sequence
  Description of Artificial Sequence: Synthetic oligonucleotide
acgatcactggaccatcc

SEQ ID NO: 6015 - DNA, 18 bp, Artificial Sequence
  Description of Artificial Sequence: Synthetic oligonucleotide
gaaatacgatcactggac

SEQ ID NO: 6016 - DNA, 18 bp, Artificial Sequence
  Description of Artificial Sequence: Synthetic oligonucleotide
caaaagaaatacgatcac

SEQ ID NO: 6017 - DNA, 18 bp, Artificial Sequence
  Description of Artificial Sequence: Synthetic oligonucleotide
gttggtgacgcagagata

SEQ ID NO: 6018 - DNA, 18 bp, Artificial Sequence
  Description of Artificial Sequence: Synthetic oligonucleotide
gcggtgttggtgacgcag

SEQ ID NO: 6019 - DNA, 18 bp, Artificial Sequence
  Description of Artificial Sequence: Synthetic oligonucleotide
cagtggcggtgttggtga

SEQ ID NO: 6020 - DNA, 18 bp, Artificial Sequence
  Description of Artificial Sequence: Synthetic oligonucleotide
ggtggcagtggcggtgtt

SEQ ID NO: 6021 - DNA, 18 bp, Artificial Sequence
  Description of Artificial Sequence: Synthetic oligonucleotide
atggtggtggcagtggcg

SEQ ID NO: 6022 - DNA, 18 bp, Artificial Sequence
  Description of Artificial Sequence: Synthetic oligonucleotide
tggtgatggtggtggcag

SEQ ID NO: 6023 - DNA, 18 bp, Artificial Sequence
  Description of Artificial Sequence: Synthetic oligonucleotide
cgaggtggtgatggtggt

SEQ ID NO: 6024 - DNA, 18 bp, Artificial Sequence
  Description of Artificial Sequence: Synthetic oligonucleotide
ccgggcgaggtggtgatg

SEQ ID NO: 6025 - DNA, 18 bp, Artificial Sequence
  Description of Artificial Sequence: Synthetic oligonucleotide
gcaccccgggcgaggtgg

SEQ ID NO: 6026 - DNA, 18 bp, Artificial Sequence
  Description of Artificial Sequence: Synthetic oligonucleotide
gagcagcaccccgggcga

SEQ ID NO: 6027 - DNA, 18 bp, Artificial Sequence
  Description of Artificial Sequence: Synthetic oligonucleotide
tcacagagcagcaccccg

SEQ ID NO: 6028 - DNA, 18 bp, Artificial Sequence
  Description of Artificial Sequence: Synthetic oligonucleotide
tggggtcacagagcagca

SEQ ID NO: 6029 - DNA, 18 bp, Artificial Sequence
  Description of Artificial Sequence: Synthetic oligonucleotide
ggccgtggggtcacagag

SEQ ID NO: 6030 - DNA, 18 bp, Artificial Sequence
  Description of Artificial Sequence: Synthetic oligonucleotide
aggggggccgtggggtca

SEQ ID NO: 6031 - DNA, 18 bp, Artificial Sequence
  Description of Artificial Sequence: Synthetic oligonucleotide
caggaaggggggccgtgg

SEQ ID NO: 6032 - DNA, 18 bp, Artificial Sequence
  Description of Artificial Sequence: Synthetic oligonucleotide
ggctccaggaaggggggc

SEQ ID NO: 6033 - DNA, 18 bp, Artificial Sequence
  Description of Artificial Sequence: Synthetic oligonucleotide
catgaggctccaggaagg

SEQ ID NO: 6034 - DNA, 18 bp, Artificial Sequence
  Description of Artificial Sequence: Synthetic oligonucleotide
gggtccatgaggctccag

SEQ ID NO: 6035 - DNA, 18 bp, Artificial Sequence
  Description of Artificial Sequence: Synthetic oligonucleotide
tctccgggtccatgaggc

SEQ ID NO: 6036 - DNA, 18 bp, Artificial Sequence
  Description of Artificial Sequence: Synthetic oligonucleotide
gatgctctccgggtccat

SEQ ID NO: 6037 - DNA, 18 bp, Artificial Sequence
  Description of Artificial Sequence: Synthetic oligonucleotide
ggccggatgctctccggg

SEQ ID NO: 6038 - DNA, 18 bp, Artificial Sequence
  Description of Artificial Sequence: Synthetic oligonucleotide
agggaggccggatgctct

SEQ ID NO: 6039 - DNA, 18 bp, Artificial Sequence
  Description of Artificial Sequence: Synthetic oligonucleotide
gagcaagggaggccggat

SEQ ID NO: 6040 - DNA, 18 bp, Artificial Sequence
  Description of Artificial Sequence: Synthetic oligonucleotide
acctagagcaagggaggc

SEQ ID NO: 6041 - DNA, 18 bp, Artificial Sequence
  Description of Artificial Sequence: Synthetic oligonucleotide
cggatacctagagcaagg

SEQ ID NO: 6042 - DNA, 18 bp, Artificial Sequence
  Description of Artificial Sequence: Synthetic oligonucleotide
gggatcggatacctagag

SEQ ID NO: 6043 - DNA, 18 bp, Artificial Sequence
  Description of Artificial Sequence: Synthetic oligonucleotide
gctgagggatcggatacc

SEQ ID NO: 6044 - DNA, 18 bp, Artificial Sequence
  Description of Artificial Sequence: Synthetic oligonucleotide
gagcagctgagggatcgg

SEQ ID NO: 6045 - DNA, 18 bp, Artificial Sequence
  Description of Artificial Sequence: Synthetic oligonucleotide
gatgggagcagctgaggg

SEQ ID NO: 6046 - DNA, 18 bp, Artificial Sequence
  Description of Artificial Sequence: Synthetic oligonucleotide
acggagatgggagcagct

SEQ ID NO: 6047 - DNA, 18 bp, Artificial Sequence
  Description of Artificial Sequence: Synthetic oligonucleotide
gagccacggagatgggag

SEQ ID NO: 6048 - DNA, 18 bp, Artificial Sequence
  Description of Artificial Sequence: Synthetic oligonucleotide
gggctgagccacggagat

SEQ ID NO: 6049 - DNA, 18 bp, Artificial Sequence
  Description of Artificial Sequence: Synthetic oligonucleotide
gaccagggctgagccacg

SEQ ID NO: 6050 - DNA, 18 bp, Artificial Sequence
  Description of Artificial Sequence: Synthetic oligonucleotide
cccgggaccagggctgag

SEQ ID NO: 6051 - DNA, 18 bp, Artificial Sequence
  Description of Artificial Sequence: Synthetic oligonucleotide
tggcccccgggaccaggg

SEQ ID NO: 6052 - DNA, 18 bp, Artificial Sequence
  Description of Artificial Sequence: Synthetic oligonucleotide
ccatgtggcccccgggac

SEQ ID NO: 6053 - DNA, 18 bp, Artificial Sequence
  Description of Artificial Sequence: Synthetic oligonucleotide
accccccatgtggccccc

SEQ ID NO: 6054 - DNA, 18 bp, Artificial Sequence
  Description of Artificial Sequence: Synthetic oligonucleotide
atgggaccccccatgtgg

SEQ ID NO: 6055 - DNA, 18 bp, Artificial Sequence
  Description of Artificial Sequence: Synthetic oligonucleotide
tcaggatgggacccccca

SEQ ID NO: 6056 - DNA, 18 bp, Artificial Sequence
  Description of Artificial Sequence: Synthetic oligonucleotide
ccctctcaggatgggacc

SEQ ID NO: 6057 - DNA, 18 bp, Artificial Sequence
  Description of Artificial Sequence: Synthetic oligonucleotide
cccctccctctcaggatg

SEQ ID NO: 6058 - DNA, 18 bp, Artificial Sequence
  Description of Artificial Sequence: Synthetic oligonucleotide
cctgccccctccctctca

SEQ ID NO: 6059 - DNA, 18 bp, Artificial Sequence
  Description of Artificial Sequence: Synthetic oligonucleotide
ctccacctgccccctccc

SEQ ID NO: 6060 - DNA, 18 bp, Artificial Sequence
  Description of Artificial Sequence: Synthetic oligonucleotide
ctgtcctccacctgcccc

SEQ ID NO: 6061 - DNA, 18 bp, Artificial Sequence
  Description of Artificial Sequence: Synthetic oligonucleotide
gctgtctgtcctccacct

SEQ ID NO: 6062 - DNA, 18 bp, Artificial Sequence
  Description of Artificial Sequence: Synthetic oligonucleotide
tcggtgctgtctgtcctc

SEQ ID NO: 6063 - DNA, 18 bp, Artificial Sequence
  Description of Artificial Sequence: Synthetic oligonucleotide
agccttcggtgctgtctg

SEQ ID NO: 6064 - DNA, 18 bp, Artificial Sequence
  Description of Artificial Sequence: Synthetic oligonucleotide
cttccccagccccggccg

SEQ ID NO: 6065 - DNA, 18 bp, Artificial Sequence
  Description of Artificial Sequence: Synthetic oligonucleotide
gcccccttccccagcccc

SEQ ID NO: 6066 - DNA, 18 bp, Artificial Sequence
  Description of Artificial Sequence: Synthetic oligonucleotide
cctcagcccccttcccca

SEQ ID NO: 6067 - DNA, 18 bp, Artificial Sequence
  Description of Artificial Sequence: Synthetic oligonucleotide
tgggccctcagccccctt

SEQ ID NO: 6068 - DNA, 18 bp, Artificial Sequence
  Description of Artificial Sequence: Synthetic oligonucleotide
agctctgggccctcagcc

SEQ ID NO: 6069 - DNA, 18 bp, Artificial Sequence
  Description of Artificial Sequence: Synthetic oligonucleotide
tgagcagctctgggccct

SEQ ID NO: 6070 - DNA, 18 bp, Artificial Sequence
  Description of Artificial Sequence: Synthetic oligonucleotide
gttgatgagcagctctgg

SEQ ID NO: 6071 - DNA, 18 bp, Artificial Sequence
  Description of Artificial Sequence: Synthetic oligonucleotide
acccagttgatgagcagc

SEQ ID NO: 6072 - DNA, 18 bp, Artificial Sequence
  Description of Artificial Sequence: Synthetic oligonucleotide
cgcatacccagttgatga

SEQ ID NO: 6073 - DNA, 18 bp, Artificial Sequence
  Description of Artificial Sequence: Synthetic oligonucleotide
ccggccgcatacccagtt

SEQ ID NO: 6074 - DNA, 18 bp, Artificial Sequence
  Description of Artificial Sequence: Synthetic oligonucleotide
cagccccggccgcatacc

SEQ ID NO: 6075 - DNA, 18 bp, Artificial Sequence
  Description of Artificial Sequence: Synthetic oligonucleotide
ttccccagccccggccgc

SEQ ID NO: 6076 - DNA, 18 bp, Artificial Sequence
  Description of Artificial Sequence: Synthetic oligonucleotide
cccccttccccagccccg

SEQ ID NO: 6077 - DNA, 18 bp, Artificial Sequence
  Description of Artificial Sequence: Synthetic oligonucleotide
ctcagcccccttccccag

SEQ ID NO: 6078 - DNA, 18 bp, Artificial Sequence
  Description of Artificial Sequence: Synthetic oligonucleotide
gggccctcagcccccttc

SEQ ID NO: 6079 - DNA, 18 bp, Artificial Sequence
  Description of Artificial Sequence: Synthetic oligonucleotide
gctctgggccctcagccc

SEQ ID NO: 6080 - DNA, 18 bp, Artificial Sequence
  Description of Artificial Sequence: Synthetic oligonucleotide
gagcagctctgggccctc

SEQ ID NO: 6081 - DNA, 18 bp, Artificial Sequence
  Description of Artificial Sequence: Synthetic oligonucleotide
ttgatgagcagctctggg

SEQ ID NO: 6082 - DNA, 18 bp, Artificial Sequence
  Description of Artificial Sequence: Synthetic oligonucleotide
cccagttgatgagcagct

SEQ ID NO: 6083 - DNA, 18 bp, Artificial Sequence
  Description of Artificial Sequence: Synthetic oligonucleotide
gcatacccagttgatgag

SEQ ID NO: 6084 - DNA, 18 bp, Artificial Sequence
  Description of Artificial Sequence: Synthetic oligonucleotide
cggccgcatacccagttg

SEQ ID NO: 6085 - DNA, 18 bp, Artificial Sequence
  Description of Artificial Sequence: Synthetic oligonucleotide
agccccggccgcataccc

SEQ ID NO: 6086 - DNA, 18 bp, Artificial Sequence
  Description of Artificial Sequence: Synthetic oligonucleotide
tccccagccccggccgca

SEQ ID NO: 6087 - DNA, 18 bp, Artificial Sequence
  Description of Artificial Sequence: Synthetic oligonucleotide
tcccttccccagccccgg

SEQ ID NO: 6088 - DNA, 18 bp, Artificial Sequence
  Description of Artificial Sequence: Synthetic oligonucleotide
tcagttcccttccccagc

SEQ ID NO: 6089 - DNA, 18 bp, Artificial Sequence
  Description of Artificial Sequence: Synthetic oligonucleotide
ggccttcagttcccttcc

SEQ ID NO: 6090 - DNA, 18 bp, Artificial Sequence
  Description of Artificial Sequence: Synthetic oligonucleotide
ctctgggccttcagttcc

SEQ ID NO: 6091 - DNA, 18 bp, Artificial Sequence
  Description of Artificial Sequence: Synthetic oligonucleotide
gactgctctgggccttca

SEQ ID NO: 6092 - DNA, 18 bp, Artificial Sequence
  Description of Artificial Sequence: Synthetic oligonucleotide
agggcgactgctctgggc

SEQ ID NO: 6093 - DNA, 18 bp, Artificial Sequence
  Description of Artificial Sequence: Synthetic oligonucleotide
cggggagggcgactgctc

SEQ ID NO: 6094 - DNA, 18 bp, Artificial Sequence
  Description of Artificial Sequence: Synthetic oligonucleotide
gccgacggggagggcgac

SEQ ID NO: 6095 - DNA, 18 bp, Artificial Sequence
  Description of Artificial Sequence: Synthetic oligonucleotide
agagggccgacggggagg

SEQ ID NO: 6096 - DNA, 18 bp, Artificial Sequence
  Description of Artificial Sequence: Synthetic oligonucleotide
gtgtcagagggccgacgg

SEQ ID NO: 6097 - DNA, 18 bp, Artificial Sequence
  Description of Artificial Sequence: Synthetic oligonucleotide
cacgggtgtcagagggcc

SEQ ID NO: 6098 - DNA, 18 bp, Artificial Sequence
  Description of Artificial Sequence: Synthetic oligonucleotide
ctctccacgggtgtcaga

SEQ ID NO: 6099 - DNA, 18 bp, Artificial Sequence
  Description of Artificial Sequence: Synthetic oligonucleotide
cttccctctccacgggtg

SEQ ID NO: 6100 - DNA, 18 bp, Artificial Sequence
  Description of Artificial Sequence: Synthetic oligonucleotide
gtgggcttccctctccac

SEQ ID NO: 6101 - DNA, 18 bp, Artificial Sequence
  Description of Artificial Sequence: Synthetic oligonucleotide
agagggtgggcttccctc

SEQ ID NO: 6102 - DNA, 18 bp, Artificial Sequence
  Description of Artificial Sequence: Synthetic oligonucleotide
tgggaagagggtgggctt

SEQ ID NO: 6103 - DNA, 18 bp, Artificial Sequence
  Description of Artificial Sequence: Synthetic oligonucleotide
cggggtgggaagagggtg

SEQ ID NO: 6104 - DNA, 18 bp, Artificial Sequence
  Description of Artificial Sequence: Synthetic oligonucleotide
ttccccggggtgggaaga

SEQ ID NO: 6105 - DNA, 18 bp, Artificial Sequence
  Description of Artificial Sequence: Synthetic oligonucleotide
gcatcttccccggggtgg

SEQ ID NO: 6106 - DNA, 18 bp, Artificial Sequence
  Description of Artificial Sequence: Synthetic oligonucleotide
cacctgggcgtgctgctg

SEQ ID NO: 6107 - DNA, 18 bp, Artificial Sequence
  Description of Artificial Sequence: Synthetic oligonucleotide
gccagcacctgggcgtgc

SEQ ID NO: 6108 - DNA, 18 bp, Artificial Sequence
  Description of Artificial Sequence: Synthetic oligonucleotide
gggaggccagcacctggg

SEQ ID NO: 6109 - DNA, 18 bp, Artificial Sequence
  Description of Artificial Sequence: Synthetic oligonucleotide
ctcaggggaggccagcac

SEQ ID NO: 6110 - DNA, 18 bp, Artificial Sequence
  Description of Artificial Sequence: Synthetic oligonucleotide
ctctgctcaggggaggcc

SEQ ID NO: 6111 - DNA, 18 bp, Artificial Sequence
  Description of Artificial Sequence: Synthetic oligonucleotide
gaggactctgctcagggg

SEQ ID NO: 6112 - DNA, 18 bp, Artificial Sequence
  Description of Artificial Sequence: Synthetic oligonucleotide
gtgcagaggactctgctc

SEQ ID NO: 6113 - DNA, 18 bp, Artificial Sequence
  Description of Artificial Sequence: Synthetic oligonucleotide
gctgtgtgcagaggactc

SEQ ID NO: 6114 - DNA, 18 bp, Artificial Sequence
  Description of Artificial Sequence: Synthetic oligonucleotide
ggagagctgtgtgcagag

SEQ ID NO: 6115 - DNA, 18 bp, Artificial Sequence
  Description of Artificial Sequence: Synthetic oligonucleotide
aggaaggagagctgtgtg

SEQ ID NO: 6116 - DNA, 18 bp, Artificial Sequence
  Description of Artificial Sequence: Synthetic oligonucleotide
cattaaggaaggagagct

SEQ ID NO: 6117 - DNA, 18 bp, Artificial Sequence
  Description of Artificial Sequence: Synthetic oligonucleotide
ctgggcattaaggaagga

SEQ ID NO: 6118 - DNA, 18 bp, Artificial Sequence
  Description of Artificial Sequence: Synthetic oligonucleotide
tatctctgggcattaagg

SEQ ID NO: 6119 - DNA, 18 bp, Artificial Sequence
  Description of Artificial Sequence: Synthetic oligonucleotide
acccttatctctgggcat

SEQ ID NO: 6120 - DNA, 18 bp, Artificial Sequence
  Description of Artificial Sequence: Synthetic oligonucleotide
aagccacccttatctctg

SEQ ID NO: 6121 - DNA, 18 bp, Artificial Sequence
  Description of Artificial Sequence: Synthetic oligonucleotide
agctcaagccacccttat

SEQ ID NO: 6122 - DNA, 18 bp, Artificial Sequence
  Description of Artificial Sequence: Synthetic oligonucleotide
accagagctcaagccacc

SEQ ID NO: 6123 - DNA, 18 bp, Artificial Sequence
  Description of Artificial Sequence: Synthetic oligonucleotide
tgtgcaccagagctcaag

SEQ ID NO: 6124 - DNA, 18 bp, Artificial Sequence
  Description of Artificial Sequence: Synthetic oligonucleotide
ggttctgtgcaccagagc

SEQ ID NO: 6125 - DNA, 18 bp, Artificial Sequence
  Description of Artificial Sequence: Synthetic oligonucleotide
gatgcggttctgtgcacc

SEQ ID NO: 6126 - DNA, 18 bp, Artificial Sequence
  Description of Artificial Sequence: Synthetic oligonucleotide
agtacgatgcggttctgt

SEQ ID NO: 6127 - DNA, 18 bp, Artificial Sequence
  Description of Artificial Sequence: Synthetic oligonucleotide
gtgacagtacgatgcggt

SEQ ID NO: 6128 - DNA, 18 bp, Artificial Sequence
  Description of Artificial Sequence: Synthetic oligonucleotide
ctcacgtgacagtacgat

SEQ ID NO: 6129 - DNA, 18 bp, Artificial Sequence
  Description of Artificial Sequence: Synthetic oligonucleotide
tccagctcacgtgacagt

SEQ ID NO: 6130 - DNA, 18 bp, Artificial Sequence
  Description of Artificial Sequence: Synthetic oligonucleotide
gtgggtccagctcacgtg

SEQ ID NO: 6131 - DNA, 18 bp, Artificial Sequence
  Description of Artificial Sequence: Synthetic oligonucleotide
gcaaggtgggtccagctc

SEQ ID NO: 6132 - DNA, 18 bp, Artificial Sequence
  Description of Artificial Sequence: Synthetic oligonucleotide
caggagcaaggtgggtcc

SEQ ID NO: 6133 - DNA, 18 bp, Artificial Sequence
  Description of Artificial Sequence: Synthetic oligonucleotide
cagaccaggagcaaggtg

SEQ ID NO: 6134 - DNA, 18 bp, Artificial Sequence
  Description of Artificial Sequence: Synthetic oligonucleotide
tgccgcagaccaggagca

SEQ ID NO: 6135 - DNA, 18 bp, Artificial Sequence
  Description of Artificial Sequence: Synthetic oligonucleotide
gagactgccgcagaccag

SEQ ID NO: 6136 - DNA, 18 bp, Artificial Sequence
  Description of Artificial Sequence: Synthetic oligonucleotide
ctgtagagactgccgcag

SEQ ID NO: 6137 - DNA, 18 bp, Artificial Sequence
  Description of Artificial Sequence: Synthetic oligonucleotide
acgcactgtagagactgc

SEQ ID NO: 6138 - DNA, 18 bp, Artificial Sequence
  Description of Artificial Sequence: Synthetic oligonucleotide
atgctacgcactgtagag

SEQ ID NO: 6139 - DNA, 18 bp, Artificial Sequence
  Description of Artificial Sequence: Synthetic oligonucleotide
tcctcatgctacgcactg

SEQ ID NO: 6140 - DNA, 18 bp, Artificial Sequence
  Description of Artificial Sequence: Synthetic oligonucleotide
aggattcctcatgctacg

SEQ ID NO: 6141 - DNA, 18 bp, Artificial Sequence
  Description of Artificial Sequence: Synthetic oligonucleotide
ggaacaggattcctcatg

SEQ ID NO: 6142 - DNA, 18 bp, Artificial Sequence
  Description of Artificial Sequence: Synthetic oligonucleotide
tccagggaacaggattcc

SEQ ID NO: 6143 - DNA, 18 bp, Artificial Sequence
  Description of Artificial Sequence: Synthetic oligonucleotide
gaacctccagggaacagg

SEQ ID NO: 6144 - DNA, 18 bp, Artificial Sequence
  Description of Artificial Sequence: Synthetic oligonucleotide
gccccgaacctccaggga

SEQ ID NO: 6145 - DNA, 18 bp, Artificial Sequence
  Description of Artificial Sequence: Synthetic oligonucleotide
tggctgccccgaacctcc

SEQ ID NO: 6146 - DNA, 18 bp, Artificial Sequence
  Description of Artificial Sequence: Synthetic oligonucleotide
accagtggctgccccgaa

SEQ ID NO: 6147 - DNA, 18 bp, Artificial Sequence
  Description of Artificial Sequence: Synthetic oligonucleotide
accctaccagtggctgcc

SEQ ID NO: 6148 - DNA, 18 bp, Artificial Sequence
  Description of Artificial Sequence: Synthetic oligonucleotide
ctggcaccctaccagtgg

SEQ ID NO: 6149 - DNA, 18 bp, Artificial Sequence
  Description of Artificial Sequence: Synthetic oligonucleotide
tgttgctggcaccctacc

SEQ ID NO: 6150 - DNA, 18 bp, Artificial Sequence
  Description of Artificial Sequence: Synthetic oligonucleotide
gggggtgttgctggcacc

SEQ ID NO: 6151 - DNA, 18 bp, Artificial Sequence
  Description of Artificial Sequence: Synthetic oligonucleotide
gagaagggggtgttgctg

SEQ ID NO: 6152 - DNA, 18 bp, Artificial Sequence
  Description of Artificial Sequence: Synthetic oligonucleotide
tggaagagaagggggtgt

SEQ ID NO: 6153 - DNA, 18 bp, Artificial Sequence
  Description of Artificial Sequence: Synthetic oligonucleotide
gagaggccggcgggcgca

SEQ ID NO: 6154 - DNA, 18 bp, Artificial Sequence
  Description of Artificial Sequence: Synthetic oligonucleotide
gaggcgagaggccggcgg

SEQ ID NO: 6155 - DNA, 18 bp, Artificial Sequence
  Description of Artificial Sequence: Synthetic oligonucleotide
cggacgaggcgagaggcc

SEQ ID NO: 6156 - DNA, 18 bp, Artificial Sequence
  Description of Artificial Sequence: Synthetic oligonucleotide
ggaaccggacgaggcgag

SEQ ID NO: 6157 - DNA, 18 bp, Artificial Sequence
  Description of Artificial Sequence: Synthetic oligonucleotide
gcgcgggaaccggacgag

SEQ ID NO: 6158 - DNA, 18 bp, Artificial Sequence
  Description of Artificial Sequence: Synthetic oligonucleotide
taggcgcgcgggaaccgg

SEQ ID NO: 6159 - DNA, 18 bp, Artificial Sequence
  Description of Artificial Sequence: Synthetic oligonucleotide
cggggtaggcgcgcggga

SEQ ID NO: 6160 - DNA, 18 bp, Artificial Sequence
  Description of Artificial Sequence: Synthetic oligonucleotide
gcgcgcggggtaggcgcg

SEQ ID NO: 6161 - DNA, 18 bp, Artificial Sequence
  Description of Artificial Sequence: Synthetic oligonucleotide
ggcaggcgcgcggggtag

SEQ ID NO: 6162 - DNA, 18 bp, Artificial Sequence
  Description of Artificial Sequence: Synthetic oligonucleotide
tgcggggcaggcgcgcgg

SEQ ID NO: 6163 - DNA, 18 bp, Artificial Sequence
  Description of Artificial Sequence: Synthetic oligonucleotide
agttgtgcggggcaggcg

SEQ ID NO: 6164 - DNA, 18 bp, Artificial Sequence
  Description of Artificial Sequence: Synthetic oligonucleotide
gggacagttgtgcggggc

SEQ ID NO: 6165 - DNA, 18 bp, Artificial Sequence
  Description of Artificial Sequence: Synthetic oligonucleotide
cacctgggacagttgtgc

SEQ ID NO: 6166 - DNA, 18 bp, Artificial Sequence
  Description of Artificial Sequence: Synthetic oligonucleotide
ctggtcacctgggacagt

SEQ ID NO: 6167 - DNA, 18 bp, Artificial Sequence
  Description of Artificial Sequence: Synthetic oligonucleotide
gcgggctggtcacctggg

SEQ ID NO: 6168 - DNA, 18 bp, Artificial Sequence
  Description of Artificial Sequence: Synthetic oligonucleotide
gtgtggcgggctggtcac

SEQ ID NO: 6169 - DNA, 18 bp, Artificial Sequence
  Description of Artificial Sequence: Synthetic oligonucleotide
gacaggtgtggcgggctg

SEQ ID NO: 6170 - DNA, 18 bp, Artificial Sequence
  Description of Artificial Sequence: Synthetic oligonucleotide
tgagggacaggtgtggcg

SEQ ID NO: 6171 - DNA, 18 bp, Artificial Sequence
  Description of Artificial Sequence: Synthetic oligonucleotide
aggtgtgagggacaggtg

SEQ ID NO: 6172 - DNA, 18 bp, Artificial Sequence
  Description of Artificial Sequence: Synthetic oligonucleotide
ggagcaggtgtgagggac

SEQ ID NO: 6173 - DNA, 18 bp, Artificial Sequence
  Description of Artificial Sequence: Synthetic oligonucleotide
cacgtggagcaggtgtga

SEQ ID NO: 6174 - DNA, 18 bp, Artificial Sequence
  Description of Artificial Sequence: Synthetic oligonucleotide
ctggtcacgtggagcagg

SEQ ID NO: 6175 - DNA, 18 bp, Artificial Sequence
  Description of Artificial Sequence: Synthetic oligonucleotide
gcgggctggtcacgtgga

SEQ ID NO: 6176 - DNA, 18 bp, Artificial Sequence
  Description of Artificial Sequence: Synthetic oligonucleotide
gtggagcgggctggtcac

SEQ ID NO: 6177 - DNA, 18 bp, Artificial Sequence
  Description of Artificial Sequence: Synthetic oligonucleotide
ggcgggtggagcgggctg

SEQ ID NO: 6178 - DNA, 18 bp, Artificial Sequence
  Description of Artificial Sequence: Synthetic oligonucleotide
tgcagggcgggtggagcg

SEQ ID NO: 6179 - DNA, 18 bp, Artificial Sequence
  Description of Artificial Sequence: Synthetic oligonucleotide
aggtgtgcagggcgggtg

SEQ ID NO: 6180 - DNA, 18 bp, Artificial Sequence
  Description of Artificial Sequence: Synthetic oligonucleotide
ggggcaggtgtgcagggc

SEQ ID NO: 6181 - DNA, 18 bp, Artificial Sequence
  Description of Artificial Sequence: Synthetic oligonucleotide
tgtgaggggcaggtgtgc

SEQ ID NO: 6182 - DNA, 18 bp, Artificial Sequence
  Description of Artificial Sequence: Synthetic oligonucleotide
gcaggtgtgaggggcagg

SEQ ID NO: 6183 - DNA, 18 bp, Artificial Sequence
  Description of Artificial Sequence: Synthetic oligonucleotide
gtggagcaggtgtgaggg

SEQ ID NO: 6184 - DNA, 18 bp, Artificial Sequence
  Description of Artificial Sequence: Synthetic oligonucleotide
gtcacgtggagcaggtgt

SEQ ID NO: 6185 - DNA, 18 bp, Artificial Sequence
  Description of Artificial Sequence: Synthetic oligonucleotide
ggcgggtcacgtggagca

SEQ ID NO: 6186 - DNA, 18 bp, Artificial Sequence
  Description of Artificial Sequence: Synthetic oligonucleotide
gggcgggcgggtcacgtg

SEQ ID NO: 6187 - DNA, 18 bp, Artificial Sequence
  Description of Artificial Sequence: Synthetic oligonucleotide
gggtggggcgggcgggtc

SEQ ID NO: 6188 - DNA, 18 bp, Artificial Sequence
  Description of Artificial Sequence: Synthetic oligonucleotide
aaatgttattttatccaa

SEQ ID NO: 6189 - DNA, 18 bp, Artificial Sequence
  Description of Artificial Sequence: Synthetic oligonucleotide
gcaggaaatgttatttta

SEQ ID NO: 6190 - DNA, 18 bp, Artificial Sequence
  Description of Artificial Sequence: Synthetic oligonucleotide
gataagcaggaaatgtta

SEQ ID NO: 6191 - DNA, 18 bp, Artificial Sequence
  Description of Artificial Sequence: Synthetic oligonucleotide
tcggtgataagcaggaaa

SEQ ID NO: 6192 - DNA, 18 bp, Artificial Sequence
  Description of Artificial Sequence: Synthetic oligonucleotide
taccttcggtgataagca

SEQ ID NO: 6193 - DNA, 18 bp, Artificial Sequence
  Description of Artificial Sequence: Synthetic oligonucleotide
tactgtaccttcggtgat

SEQ ID NO: 6194 - DNA, 18 bp, Artificial Sequence
  Description of Artificial Sequence: Synthetic oligonucleotide
atttttactgtaccttcg

SEQ ID NO: 6195 - DNA, 18 bp, Artificial Sequence
  Description of Artificial Sequence: Synthetic oligonucleotide
tattgatttttactgtac

SEQ ID NO: 6196 - DNA, 18 bp, Artificial Sequence
  Description of Artificial Sequence: Synthetic oligonucleotide
tgaactattgatttttac

SEQ ID NO: 6197 - DNA, 18 bp, Artificial Sequence
  Description of Artificial Sequence: Synthetic oligonucleotide
ataattgaactattgatt

SEQ ID NO: 6198 - DNA, 18 bp, Artificial Sequence
  Description of Artificial Sequence: Synthetic oligonucleotide
taaatataattgaactat

SEQ ID NO: 6199 - DNA, 18 bp, Artificial Sequence
  Description of Artificial Sequence: Synthetic oligonucleotide
agtgctaaatataattga

SEQ ID NO: 6200 - DNA, 18 bp, Artificial Sequence
  Description of Artificial Sequence: Synthetic oligonucleotide
ctaggagtgctaaatata

SEQ ID NO: 6201 - DNA, 18 bp, Artificial Sequence
  Description of Artificial Sequence: Synthetic oligonucleotide
tgaatctaggagtgctaa

SEQ ID NO: 6202 - DNA, 18 bp, Artificial Sequence
  Description of Artificial Sequence: Synthetic oligonucleotide
aaatctgaatctaggagt

SEQ ID NO: 6203 - DNA, 18 bp, Artificial Sequence
  Description of Artificial Sequence: Synthetic oligonucleotide
tagttaaatctgaatcta

SEQ ID NO: 6204 - DNA, 18 bp, Artificial Sequence
  Description of Artificial Sequence: Synthetic oligonucleotide
taagttagttaaatctga

SEQ ID NO: 6205 - DNA, 18 bp, Artificial Sequence
  Description of Artificial Sequence: Synthetic oligonucleotide
ttctgtaagttagttaaa

SEQ ID NO: 6206 - DNA, 18 bp, Artificial Sequence
  Description of Artificial Sequence: Synthetic oligonucleotide
aatatttctgtaagttag

SEQ ID NO: 6207 - DNA, 18 bp, Artificial Sequence
  Description of Artificial Sequence: Synthetic oligonucleotide
aggtaaatatttctgtaa

SEQ ID NO: 6208 - DNA, 18 bp, Artificial Sequence
  Description of Artificial Sequence: Synthetic oligonucleotide
agagcaggtaaatatttc

SEQ ID NO: 6209 - DNA, 18 bp, Artificial Sequence
  Description of Artificial Sequence: Synthetic oligonucleotide
aaaacagagcaggtaaat

SEQ ID NO: 6210 - DNA, 18 bp, Artificial Sequence
  Description of Artificial Sequence: Synthetic oligonucleotide
tacacaaaacagagcagg

SEQ ID NO: 6211 - DNA, 18 bp, Artificial Sequence
  Description of Artificial Sequence: Synthetic oligonucleotide
aaccctacacaaaacaga

SEQ ID NO: 6212 - DNA, 18 bp, Artificial Sequence
  Description of Artificial Sequence: Synthetic oligonucleotide
ttgacaaccctacacaaa

SEQ ID NO: 6213 - DNA, 18 bp, Artificial Sequence
  Description of Artificial Sequence: Synthetic oligonucleotide
ctaatttgacaaccctac

SEQ ID NO: 6214 - DNA, 18 bp, Artificial Sequence
  Description of Artificial Sequence: Synthetic oligonucleotide
aagatctaatttgacaac

SEQ ID NO: 6215 - DNA, 18 bp, Artificial Sequence
  Description of Artificial Sequence: Synthetic oligonucleotide
ggtcggctcactctgaca

SEQ ID NO: 6216 - DNA, 18 bp, Artificial Sequence
  Description of Artificial Sequence: Synthetic oligonucleotide
gcctgggtcggctcactc

SEQ ID NO: 6217 - DNA, 18 bp, Artificial Sequence
  Description of Artificial Sequence: Synthetic oligonucleotide
atgtggcctgggtcggct

SEQ ID NO: 6218 - DNA, 18 bp, Artificial Sequence
  Description of Artificial Sequence: Synthetic oligonucleotide
ccaggatgtggcctgggt

SEQ ID NO: 6219 - DNA, 18 bp, Artificial Sequence
  Description of Artificial Sequence: Synthetic oligonucleotide
cactgccaggatgtggcc

SEQ ID NO: 6220 - DNA, 18 bp, Artificial Sequence
  Description of Artificial Sequence: Synthetic oligonucleotide
gcctccactgccaggatg

SEQ ID NO: 6221 - DNA, 18 bp, Artificial Sequence
  Description of Artificial Sequence: Synthetic oligonucleotide
actgtgcctccactgcca

SEQ ID NO: 6222 - DNA, 18 bp, Artificial Sequence
  Description of Artificial Sequence: Synthetic oligonucleotide
gggtgactgtgcctccac

SEQ ID NO: 6223 - DNA, 18 bp, Artificial Sequence
  Description of Artificial Sequence: Synthetic oligonucleotide
gccccgggtgactgtgcc

SEQ ID NO: 6224 - DNA, 18 bp, Artificial Sequence
  Description of Artificial Sequence: Synthetic oligonucleotide
gccctgccccgggtgact

SEQ ID NO: 6225 - DNA, 18 bp, Artificial Sequence
  Description of Artificial Sequence: Synthetic oligonucleotide
tcctggccctgccccggg

SEQ ID NO: 6226 - DNA, 18 bp, Artificial Sequence
  Description of Artificial Sequence: Synthetic oligonucleotide
caagatcctggccctgcc

SEQ ID NO: 6227 - DNA, 18 bp, Artificial Sequence
  Description of Artificial Sequence: Synthetic oligonucleotide
tataccaagatcctggcc

SEQ ID NO: 6228 - DNA, 18 bp, Artificial Sequence
  Description of Artificial Sequence: Synthetic oligonucleotide
gaggatataccaagatcc

SEQ ID NO: 6229 - DNA, 18 bp, Artificial Sequence
  Description of Artificial Sequence: Synthetic oligonucleotide
gatctgaggatataccaa

SEQ ID NO: 6230 - DNA, 18 bp, Artificial Sequence
  Description of Artificial Sequence: Synthetic oligonucleotide
actgagatctgaggatat

SEQ ID NO: 6231 - DNA, 18 bp, Artificial Sequence
  Description of Artificial Sequence: Synthetic oligonucleotide
tgcccactgagatctgag

SEQ ID NO: 6232 - DNA, 18 bp, Artificial Sequence
  Description of Artificial Sequence: Synthetic oligonucleotide
gtcgctgcccactgagat

SEQ ID NO: 6233 - DNA, 18 bp, Artificial Sequence
  Description of Artificial Sequence: Synthetic oligonucleotide
ttcatgtcgctgcccact

SEQ ID NO: 6234 - DNA, 18 bp, Artificial Sequence
  Description of Artificial Sequence: Synthetic oligonucleotide
ctgacttcatgtcgctgc

SEQ ID NO: 6235 - DNA, 18 bp, Artificial Sequence
  Description of Artificial Sequence: Synthetic oligonucleotide
catacctgacttcatgtc

SEQ ID NO: 6236 - DNA, 18 bp, Artificial Sequence
  Description of Artificial Sequence: Synthetic oligonucleotide
cagagcatacctgacttc

SEQ ID NO: 6237 - DNA, 18 bp, Artificial Sequence
  Description of Artificial Sequence: Synthetic oligonucleotide
gcacccagagcatacctg

SEQ ID NO: 6238 - DNA, 18 bp, Artificial Sequence
  Description of Artificial Sequence: Synthetic oligonucleotide
agcacgcacccagagcat

SEQ ID NO: 6239 - DNA, 18 bp, Artificial Sequence
  Description of Artificial Sequence: Synthetic oligonucleotide
tttagagcacgcacccag

SEQ ID NO: 6240 - DNA, 18 bp, Artificial Sequence
  Description of Artificial Sequence: Synthetic oligonucleotide
tcacctttagagcacgca

SEQ ID NO: 6241 - DNA, 18 bp, Artificial Sequence
  Description of Artificial Sequence: Synthetic oligonucleotide
ccttatcacctttagagc

SEQ ID NO: 6242 - DNA, 18 bp, Artificial Sequence
  Description of Artificial Sequence: Synthetic oligonucleotide
ctcttccttatcaccttt

SEQ ID NO: 6243 - DNA, 18 bp, Artificial Sequence
  Description of Artificial Sequence: Synthetic oligonucleotide
gtcccctcttccttatca

SEQ ID NO: 6244 - DNA, 18 bp, Artificial Sequence
  Description of Artificial Sequence: Synthetic oligonucleotide
atgaggtcccctcttcct

SEQ ID NO: 6245 - DNA, 18 bp, Artificial Sequence
  Description of Artificial Sequence: Synthetic oligonucleotide
ccaccatgaggtcccctc

SEQ ID NO: 6246 - DNA, 18 bp, Artificial Sequence
  Description of Artificial Sequence: Synthetic oligonucleotide
acaccccaccatgaggtc

SEQ ID NO: 6247 - DNA, 18 bp, Artificial Sequence
  Description of Artificial Sequence: Synthetic oligonucleotide
tctccacaccccaccatg

SEQ ID NO: 6248 - DNA, 18 bp, Artificial Sequence
  Description of Artificial Sequence: Synthetic oligonucleotide
gtctttctccacacccca

SEQ ID NO: 6249 - DNA, 18 bp, Artificial Sequence
  Description of Artificial Sequence: Synthetic oligonucleotide
tatgggtctttctccaca

SEQ ID NO: 6250 - DNA, 18 bp, Artificial Sequence
  Description of Artificial Sequence: Synthetic oligonucleotide
tttattatgggtctttct

SEQ ID NO: 6251 - DNA, 18 bp, Artificial Sequence
  Description of Artificial Sequence: Synthetic oligonucleotide
atcactttattatgggtc

SEQ ID NO: 6252 - DNA, 18 bp, Artificial Sequence
  Description of Artificial Sequence: Synthetic oligonucleotide
cctagatcactttattat

SEQ ID NO: 6253 - DNA, 18 bp, Artificial Sequence
  Description of Artificial Sequence: Synthetic oligonucleotide
ccagccctagatcacttt

SEQ ID NO: 6254 - DNA, 18 bp, Artificial Sequence
  Description of Artificial Sequence: Synthetic oligonucleotide
tgcacccagccctagatc

SEQ ID NO: 6255 - DNA, 18 bp, Artificial Sequence
  Description of Artificial Sequence: Synthetic oligonucleotide
gccactgcacccagccct

SEQ ID NO: 6256 - DNA, 18 bp, Artificial Sequence
  Description of Artificial Sequence: Synthetic oligonucleotide
catgagccactgcaccca

SEQ ID NO: 6257 - DNA, 18 bp, Artificial Sequence
  Description of Artificial Sequence: Synthetic oligonucleotide
acaggcatgagccactgc

SEQ ID NO: 6258 - DNA, 18 bp, Artificial Sequence
  Description of Artificial Sequence: Synthetic oligonucleotide
gcgcgccgcggggggcgt

SEQ ID NO: 6259 - DNA, 18 bp, Artificial Sequence
  Description of Artificial Sequence: Synthetic oligonucleotide
aacctgcgcgccgcgggg

SEQ ID NO: 6260 - DNA, 18 bp, Artificial Sequence
  Description of Artificial Sequence: Synthetic oligonucleotide
gccgcaacctgcgcgccg

SEQ ID NO: 6261 - DNA, 18 bp, Artificial Sequence
  Description of Artificial Sequence: Synthetic oligonucleotide
gtccggccgcaacctgcg

SEQ ID NO: 6262 - DNA, 18 bp, Artificial Sequence
  Description of Artificial Sequence: Synthetic oligonucleotide
gggctgtccggccgcaac

SEQ ID NO: 6263 - DNA, 18 bp, Artificial Sequence
  Description of Artificial Sequence: Synthetic oligonucleotide
gcgctgggctgtccggcc

SEQ ID NO: 6264 - DNA, 18 bp, Artificial Sequence
  Description of Artificial Sequence: Synthetic oligonucleotide
caccagcgctgggctgtc

SEQ ID NO: 6265 - DNA, 18 bp, Artificial Sequence
  Description of Artificial Sequence: Synthetic oligonucleotide
cttcacaccagcgctggg

SEQ ID NO: 6266 - DNA, 18 bp, Artificial Sequence
  Description of Artificial Sequence: Synthetic oligonucleotide
ctccgcttcacaccagcg

SEQ ID NO: 6267 - DNA, 18 bp, Artificial Sequence
  Description of Artificial Sequence: Synthetic oligonucleotide
cgaagctccgcttcacac

SEQ ID NO: 6268 - DNA, 18 bp, Artificial Sequence
  Description of Artificial Sequence: Synthetic oligonucleotide
tgcagcgaagctccgctt

SEQ ID NO: 6269 - DNA, 18 bp, Artificial Sequence
  Description of Artificial Sequence: Synthetic oligonucleotide
gcccctgcagcgaagctc

SEQ ID NO: 6270 - DNA, 18 bp, Artificial Sequence
  Description of Artificial Sequence: Synthetic oligonucleotide
cctcggcccctgcagcga

SEQ ID NO: 6271 - DNA, 18 bp, Artificial Sequence
  Description of Artificial Sequence: Synthetic oligonucleotide
tccggcctcggcccctgc

SEQ ID NO: 6272 - DNA, 18 bp, Artificial Sequence
  Description of Artificial Sequence: Synthetic oligonucleotide
actcgtccggcctcggcc

SEQ ID NO: 6273 - DNA, 18 bp, Artificial Sequence
  Description of Artificial Sequence: Synthetic oligonucleotide
aatggactcgtccggcct

SEQ ID NO: 6274 - DNA, 18 bp, Artificial Sequence
  Description of Artificial Sequence: Synthetic oligonucleotide
acgcgaatggactcgtcc

SEQ ID NO: 6275 - DNA, 18 bp, Artificial Sequence
  Description of Artificial Sequence: Synthetic oligonucleotide
cgcggacgcgaatggact

SEQ ID NO: 6276 - DNA, 18 bp, Artificial Sequence
  Description of Artificial Sequence: Synthetic oligonucleotide
cccgccgcggacgcgaat

SEQ ID NO: 6277 - DNA, 18 bp, Artificial Sequence
  Description of Artificial Sequence: Synthetic oligonucleotide
cgcgccccgccgcggacg

SEQ ID NO: 6278 - DNA, 18 bp, Artificial Sequence
  Description of Artificial Sequence: Synthetic oligonucleotide
tcaggcgcgccccgccgc

SEQ ID NO: 6279 - DNA, 18 bp, Artificial Sequence
  Description of Artificial Sequence: Synthetic oligonucleotide
aggtctcaggcgcgcccc

SEQ ID NO: 6280 - DNA, 18 bp, Artificial Sequence
  Description of Artificial Sequence: Synthetic oligonucleotide
gccccaggtctcaggcgc

SEQ ID NO: 6281 - DNA, 18 bp, Artificial Sequence
  Description of Artificial Sequence: Synthetic oligonucleotide
cgggcgccccaggtctca

SEQ ID NO: 6282 - DNA, 18 bp, Artificial Sequence
  Description of Artificial Sequence: Synthetic oligonucleotide
ggaaccgggcgccccagg

SEQ ID NO: 6283 - DNA, 18 bp, Artificial Sequence
  Description of Artificial Sequence: Synthetic oligonucleotide
cctcgggaaccgggcgcc

SEQ ID NO: 6284 - DNA, 18 bp, Artificial Sequence
  Description of Artificial Sequence: Synthetic oligonucleotide
cgcagcctcgggaaccgg

SEQ ID NO: 6285 - DNA, 18 bp, Artificial Sequence
  Description of Artificial Sequence: Synthetic oligonucleotide
accgccgcagcctcggga

SEQ ID NO: 6286 - DNA, 18 bp, Artificial Sequence
  Description of Artificial Sequence: Synthetic oligonucleotide
gctccaccgccgcagcct

SEQ ID NO: 6287 - DNA, 18 bp, Artificial Sequence
  Description of Artificial Sequence: Synthetic oligonucleotide
cagcggctccaccgccgc

SEQ ID NO: 6288 - DNA, 18 bp, Artificial Sequence
  Description of Artificial Sequence: Synthetic oligonucleotide
gcgtccagcggctccacc

SEQ ID NO: 6289 - DNA, 18 bp, Artificial Sequence
  Description of Artificial Sequence: Synthetic oligonucleotide
gccgcgcgtccagcggct

SEQ ID NO: 6290 - DNA, 18 bp, Artificial Sequence
  Description of Artificial Sequence: Synthetic oligonucleotide
gagccgccgcgcgtccag

SEQ ID NO: 6291 - DNA, 18 bp, Artificial Sequence
  Description of Artificial Sequence: Synthetic oligonucleotide
cgcaggagccgccgcgcg

SEQ ID NO: 6292 - DNA, 18 bp, Artificial Sequence
  Description of Artificial Sequence: Synthetic oligonucleotide
cccagcgcaggagccgcc

SEQ ID NO: 6293 - DNA, 18 bp, Artificial Sequence
  Description of Artificial Sequence: Synthetic oligonucleotide
ccgggcccagcgcaggag

SEQ ID NO: 6294 - DNA, 18 bp, Artificial Sequence
  Description of Artificial Sequence: Synthetic oligonucleotide
cctcgccgggcccagcgc

SEQ ID NO: 6295 - DNA, 18 bp, Artificial Sequence
  Description of Artificial Sequence: Synthetic oligonucleotide
gaggacctcgccgggccc

SEQ ID NO: 6296 - DNA, 18 bp, Artificial Sequence
  Description of Artificial Sequence: Synthetic oligonucleotide
ttggggaggacctcgccg

SEQ ID NO: 6297 - DNA, 18 bp, Artificial Sequence
  Description of Artificial Sequence: Synthetic oligonucleotide
gattcttggggaggacct

SEQ ID NO: 6298 - DNA, 18 bp, Artificial Sequence
  Description of Artificial Sequence: Synthetic oligonucleotide
accgagattcttggggag

SEQ ID NO: 6299 - DNA, 18 bp, Artificial Sequence
  Description of Artificial Sequence: Synthetic oligonucleotide
ggagcaccgagattcttg

SEQ ID NO: 6300 - DNA, 18 bp, Artificial Sequence
  Description of Artificial Sequence: Synthetic oligonucleotide
atccaggagcaccgagat

SEQ ID NO: 6301 - DNA, 18 bp, Artificial Sequence
  Description of Artificial Sequence: Synthetic oligonucleotide
aggacatccaggagcacc

SEQ ID NO: 6302 - DNA, 18 bp, Artificial Sequence
  Description of Artificial Sequence: Synthetic oligonucleotide
ggctgaggacatccagga

SEQ ID NO: 6303 - DNA, 18 bp, Artificial Sequence
  Description of Artificial Sequence: Synthetic oligonucleotide
ccggcggctgaggacatc

SEQ ID NO: 6304 - DNA, 18 bp, Artificial Sequence
  Description of Artificial Sequence: Synthetic oligonucleotide
gatccccggcggctgagg

SEQ ID NO: 6305 - DNA, 18 bp, Artificial Sequence
  Description of Artificial Sequence: Synthetic oligonucleotide
gaagggatccccggcggc

SEQ ID NO: 6306 - DNA, 18 bp, Artificial Sequence
  Description of Artificial Sequence: Synthetic oligonucleotide
tcggggaagggatccccg

SEQ ID NO: 6307 - DNA, 18 bp, Artificial Sequence
  Description of Artificial Sequence: Synthetic oligonucleotide
gttgttcggggaagggat

SEQ ID NO: 6308 - DNA, 18 bp, Artificial Sequence
  Description of Artificial Sequence: Synthetic oligonucleotide
gcgaggttgttcggggaa

SEQ ID NO: 6309 - DNA, 18 bp, Artificial Sequence
  Description of Artificial Sequence: Synthetic oligonucleotide
agcgggcgaggttgttcg

SEQ ID NO: 6310 - DNA, 18 bp, Artificial Sequence
  Description of Artificial Sequence: Synthetic oligonucleotide
ggcggagcgggcgaggtt

SEQ ID NO: 6311 - DNA, 18 bp, Artificial Sequence
  Description of Artificial Sequence: Synthetic oligonucleotide
tggagggcggagcgggcg

SEQ ID NO: 6312 - DNA, 18 bp, Artificial Sequence
  Description of Artificial Sequence: Synthetic oligonucleotide
gaacctggagggcggagc

SEQ ID NO: 6313 - DNA, 18 bp, Artificial Sequence
  Description of Artificial Sequence: Synthetic oligonucleotide
tgtaagaacctggagggc

SEQ ID NO: 6314 - DNA, 18 bp, Artificial Sequence
  Description of Artificial Sequence: Synthetic oligonucleotide
ccacctgtaagaacctgg

SEQ ID NO: 6315 - DNA, 18 bp, Artificial Sequence
  Description of Artificial Sequence: Synthetic oligonucleotide
cccggccacctgtaagaa

SEQ ID NO: 6316 - DNA, 18 bp, Artificial Sequence
  Description of Artificial Sequence: Synthetic oligonucleotide
tgggacccggccacctgt

SEQ ID NO: 6317 - DNA, 18 bp, Artificial Sequence
  Description of Artificial Sequence: Synthetic oligonucleotide
ccttctgggacccggcca

SEQ ID NO: 6318 - DNA, 18 bp, Artificial Sequence
  Description of Artificial Sequence: Synthetic oligonucleotide
atcacccttctgggaccc

SEQ ID NO: 6319 - DNA, 18 bp, Artificial Sequence
  Description of Artificial Sequence: Synthetic oligonucleotide
cgcctatcacccttctgg

SEQ ID NO: 6320 - DNA, 18 bp, Artificial Sequence
  Description of Artificial Sequence: Synthetic oligonucleotide
ccaggcgcctatcaccct

SEQ ID NO: 6321 - DNA, 18 bp, Artificial Sequence
  Description of Artificial Sequence: Synthetic oligonucleotide
gttacccaggcgcctatc

SEQ ID NO: 6322 - DNA, 18 bp, Artificial Sequence
  Description of Artificial Sequence: Synthetic oligonucleotide
acacggttacccaggcgc

SEQ ID NO: 6323 - DNA, 18 bp, Artificial Sequence
  Description of Artificial Sequence: Synthetic oligonucleotide
gcccaacacggttaccca

SEQ ID NO: 6324 - DNA, 18 bp, Artificial Sequence
  Description of Artificial Sequence: Synthetic oligonucleotide
ggcgcgcccaacacggtt

SEQ ID NO: 6325 - DNA, 18 bp, Artificial Sequence
  Description of Artificial Sequence: Synthetic oligonucleotide
tccgtggcgcgcccaaca

SEQ ID NO: 6326 - DNA, 18 bp, Artificial Sequence
  Description of Artificial Sequence: Synthetic oligonucleotide
gacactccgtggcgcgcc

SEQ ID NO: 6327 - DNA, 18 bp, Artificial Sequence
  Description of Artificial Sequence: Synthetic oligonucleotide
tatgagacactccgtggc

SEQ ID NO: 6328 - DNA, 18 bp, Artificial Sequence
  Description of Artificial Sequence: Synthetic oligonucleotide
ccgtttatgagacactcc

SEQ ID NO: 6329 - DNA, 18 bp, Artificial Sequence
  Description of Artificial Sequence: Synthetic oligonucleotide
aggagccgtttatgagac

SEQ ID NO: 6330 - DNA, 18 bp, Artificial Sequence
  Description of Artificial Sequence: Synthetic oligonucleotide
aaggaaggagccgtttat

SEQ ID NO: 6331 - DNA, 18 bp, Artificial Sequence
  Description of Artificial Sequence: Synthetic oligonucleotide
cctcaaaggaaggagccg

SEQ ID NO: 6332 - DNA, 18 bp, Artificial Sequence
  Description of Artificial Sequence: Synthetic oligonucleotide
acttgcctcaaaggaagg

SEQ ID NO: 6333 - DNA, 18 bp, Artificial Sequence
  Description of Artificial Sequence: Synthetic oligonucleotide
ctcagacttgcctcaaag

SEQ ID NO: 6334 - DNA, 18 bp, Artificial Sequence
  Description of Artificial Sequence: Synthetic oligonucleotide
ccgcgctcagacttgcct

SEQ ID NO: 6335 - DNA, 18 bp, Artificial Sequence
  Description of Artificial Sequence: Synthetic oligonucleotide
tccccccgcgctcagact

SEQ ID NO: 6336 - DNA, 18 bp, Artificial Sequence
  Description of Artificial Sequence: Synthetic oligonucleotide
cttcttccccccgcgctc

SEQ ID NO: 6337 - DNA, 18 bp, Artificial Sequence
  Description of Artificial Sequence: Synthetic oligonucleotide
cttcacttcttccccccg

SEQ ID NO: 6338 - DNA, 18 bp, Artificial Sequence
  Description of Artificial Sequence: Synthetic oligonucleotide
agccacttcacttcttcc

SEQ ID NO: 6339 - DNA, 18 bp, Artificial Sequence
  Description of Artificial Sequence: Synthetic oligonucleotide
atttcagccacttcactt

SEQ ID NO: 6340 - DNA, 18 bp, Artificial Sequence
  Description of Artificial Sequence: Synthetic oligonucleotide
ctctaatttcagccactt

SEQ ID NO: 6341 - DNA, 18 bp, Artificial Sequence
  Description of Artificial Sequence: Synthetic oligonucleotide
cgcaactctaatttcagc

SEQ ID NO: 6342 - DNA, 18 bp, Artificial Sequence
  Description of Artificial Sequence: Synthetic oligonucleotide
tcaaacgcaactctaatt

SEQ ID NO: 6343 - DNA, 18 bp, Artificial Sequence
  Description of Artificial Sequence: Synthetic oligonucleotide
ctgcctcaaacgcaactc

SEQ ID NO: 6344 - DNA, 18 bp, Artificial Sequence
  Description of Artificial Sequence: Synthetic oligonucleotide
gcagcctgcctcaaacgc

SEQ ID NO: 6345 - DNA, 18 bp, Artificial Sequence
  Description of Artificial Sequence: Synthetic oligonucleotide
ggcttgcagcctgcctca

SEQ ID NO: 6346 - DNA, 18 bp, Artificial Sequence
  Description of Artificial Sequence: Synthetic oligonucleotide
cagaaggcttgcagcctg

SEQ ID NO: 6347 - DNA, 18 bp, Artificial Sequence
  Description of Artificial Sequence: Synthetic oligonucleotide
gacgacagaaggcttgca

SEQ ID NO: 6348 - DNA, 18 bp, Artificial Sequence
  Description of Artificial Sequence: Synthetic oligonucleotide
ctcaggacgacagaaggc

SEQ ID NO: 6349 - DNA, 18 bp, Artificial Sequence
  Description of Artificial Sequence: Synthetic oligonucleotide
ccttgctcaggacgacag

SEQ ID NO: 6350 - DNA, 18 bp, Artificial Sequence
  Description of Artificial Sequence: Synthetic oligonucleotide
cggagccttgctcaggac

SEQ ID NO: 6351 - DNA, 18 bp, Artificial Sequence
  Description of Artificial Sequence: Synthetic oligonucleotide
gaggacggagccttgctc

SEQ ID NO: 6352 - DNA, 18 bp, Artificial Sequence
  Description of Artificial Sequence: Synthetic oligonucleotide
caggcgaggacggagcct

SEQ ID NO: 6353 - DNA, 18 bp, Artificial Sequence
  Description of Artificial Sequence: Synthetic oligonucleotide
tgaagcaggcgaggacgg

SEQ ID NO: 6354 - DNA, 18 bp, Artificial Sequence
  Description of Artificial Sequence: Synthetic oligonucleotide
aataatgaagcaggcgag

SEQ ID NO: 6355 - DNA, 18 bp, Artificial Sequence
  Description of Artificial Sequence: Synthetic oligonucleotide
acacggagaggatcgata

SEQ ID NO: 6356 - DNA, 18 bp, Artificial Sequence
  Description of Artificial Sequence: Synthetic oligonucleotide
cagcaacacggagaggat

SEQ ID NO: 6357 - DNA, 18 bp, Artificial Sequence
  Description of Artificial Sequence: Synthetic oligonucleotide
gcgaacagcaacacggag

SEQ ID NO: 6358 - DNA, 18 bp, Artificial Sequence
  Description of Artificial Sequence: Synthetic oligonucleotide
aaccggcgaacagcaaca

SEQ ID NO: 6359 - DNA, 18 bp, Artificial Sequence
  Description of Artificial Sequence: Synthetic oligonucleotide
aatcgaaccggcgaacag

SEQ ID NO: 6360 - DNA, 18 bp, Artificial Sequence
  Description of Artificial Sequence: Synthetic oligonucleotide
gagacaatcgaaccggcg

SEQ ID NO: 6361 - DNA, 18 bp, Artificial Sequence
  Description of Artificial Sequence: Synthetic oligonucleotide
agagagagacaatcgaac

SEQ ID NO: 6362 - DNA, 18 bp, Artificial Sequence
  Description of Artificial Sequence: Synthetic oligonucleotide
gctcaagagagagacaat

SEQ ID NO: 6363 - DNA, 18 bp, Artificial Sequence
  Description of Artificial Sequence: Synthetic oligonucleotide
tgctggctcaagagagag

SEQ ID NO: 6364 - DNA, 18 bp, Artificial Sequence
  Description of Artificial Sequence: Synthetic oligonucleotide
agggatgctggctcaaga

SEQ ID NO: 6365 - DNA, 18 bp, Artificial Sequence
  Description of Artificial Sequence: Synthetic oligonucleotide
cctccagggatgctggct

SEQ ID NO: 6366 - DNA, 18 bp, Artificial Sequence
  Description of Artificial Sequence: Synthetic oligonucleotide
tccaccctccagggatgc

SEQ ID NO: 6367 - DNA, 18 bp, Artificial Sequence
  Description of Artificial Sequence: Synthetic oligonucleotide
ctccgtccaccctccagg

SEQ ID NO: 6368 - DNA, 18 bp, Artificial Sequence
  Description of Artificial Sequence: Synthetic oligonucleotide
ggactctccgtccaccct

SEQ ID NO: 6369 - DNA, 18 bp, Artificial Sequence
  Description of Artificial Sequence: Synthetic oligonucleotide
gccggggactctccgtcc

SEQ ID NO: 6370 - DNA, 18 bp, Artificial Sequence
  Description of Artificial Sequence: Synthetic oligonucleotide
gcgcggccggggactctc

SEQ ID NO: 6371 - DNA, 18 bp, Artificial Sequence
  Description of Artificial Sequence: Synthetic oligonucleotide
ccggcgcgcggccgggga

SEQ ID NO: 6372 - DNA, 18 bp, Artificial Sequence
  Description of Artificial Sequence: Synthetic oligonucleotide
attctccggcgcgcggcc

SEQ ID NO: 6373 - DNA, 18 bp, Artificial Sequence
  Description of Artificial Sequence: Synthetic oligonucleotide
gcgcaattctccggcgcg

SEQ ID NO: 6374 - DNA, 18 bp, Artificial Sequence
  Description of Artificial Sequence: Synthetic oligonucleotide
ccaccgcgcaattctccg

SEQ ID NO: 6375 - DNA, 18 bp, Artificial Sequence
  Description of Artificial Sequence: Synthetic oligonucleotide
gaaagccaccgcgcaatt

SEQ ID NO: 6376 - DNA, 18 bp, Artificial Sequence
  Description of Artificial Sequence: Synthetic oligonucleotide
gctgagaaagccaccgcg

SEQ ID NO: 6377 - DNA, 18 bp, Artificial Sequence
  Description of Artificial Sequence: Synthetic oligonucleotide
tttcggctgagaaagcca

SEQ ID NO: 6378 - DNA, 18 bp, Artificial Sequence
  Description of Artificial Sequence: Synthetic oligonucleotide
gcgggtttcggctgagaa

SEQ ID NO: 6379 - DNA, 18 bp, Artificial Sequence
  Description of Artificial Sequence: Synthetic oligonucleotide
gagacgcgggtttcggct

SEQ ID NO: 6380 - DNA, 18 bp, Artificial Sequence
  Description of Artificial Sequence: Synthetic oligonucleotide
ccccggagacgcgggttt

SEQ ID NO: 6381 - DNA, 18 bp, Artificial Sequence
  Description of Artificial Sequence: Synthetic oligonucleotide
gacagccccggagacgcg

SEQ ID NO: 6382 - DNA, 18 bp, Artificial Sequence
  Description of Artificial Sequence: Synthetic oligonucleotide
acagtgacagccccggag

SEQ ID NO: 6383 - DNA, 18 bp, Artificial Sequence
  Description of Artificial Sequence: Synthetic oligonucleotide
gccttacagtgacagccc

SEQ ID NO: 6384 - DNA, 18 bp, Artificial Sequence
  Description of Artificial Sequence: Synthetic oligonucleotide
cgctggccttacagtgac

SEQ ID NO: 6385 - DNA, 18 bp, Artificial Sequence
  Description of Artificial Sequence: Synthetic oligonucleotide
ctagacgctggccttaca

SEQ ID NO: 6386 - DNA, 18 bp, Artificial Sequence
  Description of Artificial Sequence: Synthetic oligonucleotide
catacctagacgctggcc

SEQ ID NO: 6387 - DNA, 18 bp, Artificial Sequence
  Description of Artificial Sequence: Synthetic oligonucleotide
cattacatacctagacgc

SEQ ID NO: 6388 - DNA, 18 bp, Artificial Sequence
  Description of Artificial Sequence: Synthetic oligonucleotide
agatccattacataccta

SEQ ID NO: 6389 - DNA, 18 bp, Artificial Sequence
  Description of Artificial Sequence: Synthetic oligonucleotide
aagatagatccattacat

SEQ ID NO: 6390 - DNA, 18 bp, Artificial Sequence
  Description of Artificial Sequence: Synthetic oligonucleotide
agataaagatagatccat

SEQ ID NO: 6391 - DNA, 18 bp, Artificial Sequence
  Description of Artificial Sequence: Synthetic oligonucleotide
ccaagagataaagataga

SEQ ID NO: 6392 - DNA, 18 bp, Artificial Sequence
  Description of Artificial Sequence: Synthetic oligonucleotide
gtcatccaagagataaag

SEQ ID NO: 6393 - DNA, 18 bp, Artificial Sequence
  Description of Artificial Sequence: Synthetic oligonucleotide
gccaagtcatccaagaga

SEQ ID NO: 6394 - DNA, 18 bp, Artificial Sequence
  Description of Artificial Sequence: Synthetic oligonucleotide
agaaagccaagtcatcca

SEQ ID NO: 6395 - DNA, 18 bp, Artificial Sequence
  Description of Artificial Sequence: Synthetic oligonucleotide
ccatcagaaagccaagtc

SEQ ID NO: 6396 - DNA, 18 bp, Artificial Sequence
  Description of Artificial Sequence: Synthetic oligonucleotide
ggccaccatcagaaagcc

SEQ ID NO: 6397 - DNA, 18 bp, Artificial Sequence
  Description of Artificial Sequence: Synthetic oligonucleotide
cacgcggccaccatcaga

SEQ ID NO: 6398 - DNA, 18 bp, Artificial Sequence
  Description of Artificial Sequence: Synthetic oligonucleotide
cccaacacgcggccacca

SEQ ID NO: 6399 - DNA, 18 bp, Artificial Sequence
  Description of Artificial Sequence: Synthetic oligonucleotide
tgaagcccaacacgcggc

SEQ ID NO: 6400 - DNA, 18 bp, Artificial Sequence
  Description of Artificial Sequence: Synthetic oligonucleotide
gctactgaagcccaacac

SEQ ID NO: 6401 - DNA, 18 bp, Artificial Sequence
  Description of Artificial Sequence: Synthetic oligonucleotide
caggggctactgaagccc

SEQ ID NO: 6402 - DNA, 18 bp, Artificial Sequence
  Description of Artificial Sequence: Synthetic oligonucleotide
ggctccaggggctactga

SEQ ID NO: 6403 - DNA, 18 bp, Artificial Sequence
  Description of Artificial Sequence: Synthetic oligonucleotide
agatgggctccaggggct

SEQ ID NO: 6404 - DNA, 18 bp, Artificial Sequence
  Description of Artificial Sequence: Synthetic oligonucleotide
cgagtagatgggctccag

SEQ ID NO: 6405 - DNA, 18 bp, Artificial Sequence
  Description of Artificial Sequence: Synthetic oligonucleotide
tatttcgagtagatgggc

SEQ ID NO: 6406 - DNA, 18 bp, Artificial Sequence
  Description of Artificial Sequence: Synthetic oligonucleotide
atatttatttcgagtaga

SEQ ID NO: 6407 - DNA, 18 bp, Artificial Sequence
  Description of Artificial Sequence: Synthetic oligonucleotide
gagaaatatttatttcga

SEQ ID NO: 6408 - DNA, 18 bp, Artificial Sequence
  Description of Artificial Sequence: Synthetic oligonucleotide
ctaccgagaaatatttat

SEQ ID NO: 6409 - DNA, 18 bp, Artificial Sequence
  Description of Artificial Sequence: Synthetic oligonucleotide
aggcattggaagactttt

SEQ ID NO: 6410 - DNA, 18 bp, Artificial Sequence
  Description of Artificial Sequence: Synthetic oligonucleotide
taaagaggcattggaaga

SEQ ID NO: 6411 - DNA, 18 bp, Artificial Sequence
  Description of Artificial Sequence: Synthetic oligonucleotide
tctcctaaagaggcattg

SEQ ID NO: 6412 - DNA, 18 bp, Artificial Sequence
  Description of Artificial Sequence: Synthetic oligonucleotide
tcctctctcctaaagagg

SEQ ID NO: 6413 - DNA, 18 bp, Artificial Sequence
  Description of Artificial Sequence: Synthetic oligonucleotide
ccttctcctctctcctaa

SEQ ID NO: 6414 - DNA, 18 bp, Artificial Sequence
  Description of Artificial Sequence: Synthetic oligonucleotide
catagccttctcctctct

SEQ ID NO: 6415 - DNA, 18 bp, Artificial Sequence
  Description of Artificial Sequence: Synthetic oligonucleotide
acaatcatagccttctcc

SEQ ID NO: 6416 - DNA, 18 bp, Artificial Sequence
  Description of Artificial Sequence: Synthetic oligonucleotide
gagatacaatcatagcct

SEQ ID NO: 6417 - DNA, 18 bp, Artificial Sequence
  Description of Artificial Sequence: Synthetic oligonucleotide
agcatgagatacaatcat

SEQ ID NO: 6418 - DNA, 18 bp, Artificial Sequence
  Description of Artificial Sequence: Synthetic oligonucleotide
ttaccagcatgagataca

SEQ ID NO: 6419 - DNA, 18 bp, Artificial Sequence
  Description of Artificial Sequence: Synthetic oligonucleotide
aaaagttaccagcatgag

SEQ ID NO: 6420 - DNA, 18 bp, Artificial Sequence
  Description of Artificial Sequence: Synthetic oligonucleotide
agatcaaaagttaccagc

SEQ ID NO: 6421 - DNA, 18 bp, Artificial Sequence
  Description of Artificial Sequence: Synthetic oligonucleotide
aaaaaagatcaaaagtta

SEQ ID NO: 6422 - DNA, 18 bp, Artificial Sequence
  Description of Artificial Sequence: Synthetic oligonucleotide
aatacaaaaaagatcaaa

SEQ ID NO: 6423 - DNA, 18 bp, Artificial Sequence
  Description of Artificial Sequence: Synthetic oligonucleotide
aataaaatacaaaaaaga

SEQ ID NO: 6424 - DNA, 18 bp, Artificial Sequence
  Description of Artificial Sequence: Synthetic oligonucleotide
gcctcaataaaatacaaa

SEQ ID NO: 6425 - DNA, 18 bp, Artificial Sequence
  Description of Artificial Sequence: Synthetic oligonucleotide
cctaagcctcaataaaat

SEQ ID NO: 6426 - DNA, 18 bp, Artificial Sequence
  Description of Artificial Sequence: Synthetic oligonucleotide
tccctcctaagcctcaat

SEQ ID NO: 6427 - DNA, 18 bp, Artificial Sequence
  Description of Artificial Sequence: Synthetic oligonucleotide
tttcctccctcctaagcc

SEQ ID NO: 6428 - DNA, 18 bp, Artificial Sequence
  Description of Artificial Sequence: Synthetic oligonucleotide
ctgcttttcctccctcct

SEQ ID NO: 6429 - DNA, 18 bp, Artificial Sequence
  Description of Artificial Sequence: Synthetic oligonucleotide
gtcccctgcttttcctcc

SEQ ID NO: 6430 - DNA, 18 bp, Artificial Sequence
  Description of Artificial Sequence: Synthetic oligonucleotide
ctcctgtcccctgctttt

SEQ ID NO: 6431 - DNA, 18 bp, Artificial Sequence
  Description of Artificial Sequence: Synthetic oligonucleotide
tgttcctcctgtcccctg

SEQ ID NO: 6432 - DNA, 18 bp, Artificial Sequence
  Description of Artificial Sequence: Synthetic oligonucleotide
tgtactgttcctcctgtc

SEQ ID NO: 6433 - DNA, 18 bp, Artificial Sequence
  Description of Artificial Sequence: Synthetic oligonucleotide
ctttgtgtactgttcctc

SEQ ID NO: 6434 - DNA, 18 bp, Artificial Sequence
  Description of Artificial Sequence: Synthetic oligonucleotide
ttcttctttgtgtactgt

SEQ ID NO: 6435 - DNA, 18 bp, Artificial Sequence
  Description of Artificial Sequence: Synthetic oligonucleotide
aaagattcttctttgtgt

SEQ ID NO: 6436 - DNA, 18 bp, Artificial Sequence
  Description of Artificial Sequence: Synthetic oligonucleotide
gccacaaagattcttctt

SEQ ID NO: 6437 - DNA, 18 bp, Artificial Sequence
  Description of Artificial Sequence: Synthetic oligonucleotide
tcactgccacaaagattc

SEQ ID NO: 6438 - DNA, 18 bp, Artificial Sequence
  Description of Artificial Sequence: Synthetic oligonucleotide
gcctctcactgccacaaa

SEQ ID NO: 6439 - DNA, 18 bp, Artificial Sequence
  Description of Artificial Sequence: Synthetic oligonucleotide
cctctgcctctcactgcc

SEQ ID NO: 6440 - DNA, 18 bp, Artificial Sequence
  Description of Artificial Sequence: Synthetic oligonucleotide
gttcccctctgcctctca

SEQ ID NO: 6441 - DNA, 18 bp, Artificial Sequence
  Description of Artificial Sequence: Synthetic oligonucleotide
cggggcgtggctcgttga

SEQ ID NO: 6442 - DNA, 18 bp, Artificial Sequence
  Description of Artificial Sequence: Synthetic oligonucleotide
cgggacggggcgtggctc

SEQ ID NO: 6443 - DNA, 18 bp, Artificial Sequence
  Description of Artificial Sequence: Synthetic oligonucleotide
cccagcgggacggggcgt

SEQ ID NO: 6444 - DNA, 18 bp, Artificial Sequence
  Description of Artificial Sequence: Synthetic oligonucleotide
gagggcccagcgggacgg

SEQ ID NO: 6445 - DNA, 18 bp, Artificial Sequence
  Description of Artificial Sequence: Synthetic oligonucleotide
gcactgagggcccagcgg

SEQ ID NO: 6446 - DNA, 18 bp, Artificial Sequence
  Description of Artificial Sequence: Synthetic oligonucleotide
gcgccgcactgagggccc

SEQ ID NO: 6447 - DNA, 18 bp, Artificial Sequence
  Description of Artificial Sequence: Synthetic oligonucleotide
aggctgcgccgcactgag

SEQ ID NO: 6448 - DNA, 18 bp, Artificial Sequence
  Description of Artificial Sequence: Synthetic oligonucleotide
ctcagaggctgcgccgca

SEQ ID NO: 6449 - DNA, 18 bp, Artificial Sequence
  Description of Artificial Sequence: Synthetic oligonucleotide
cgatgctcagaggctgcg

SEQ ID NO: 6450 - DNA, 18 bp, Artificial Sequence
  Description of Artificial Sequence: Synthetic oligonucleotide
tgccccgatgctcagagg

SEQ ID NO: 6451 - DNA, 18 bp, Artificial Sequence
  Description of Artificial Sequence: Synthetic oligonucleotide
ggaggtgccccgatgctc

SEQ ID NO: 6452 - DNA, 18 bp, Artificial Sequence
  Description of Artificial Sequence: Synthetic oligonucleotide
ccctgggaggtgccccga

SEQ ID NO: 6453 - DNA, 18 bp, Artificial Sequence
  Description of Artificial Sequence: Synthetic oligonucleotide
cgaagccctgggaggtgc

SEQ ID NO: 6454 - DNA, 18 bp, Artificial Sequence
  Description of Artificial Sequence: Synthetic oligonucleotide
gaagccgaagccctggga

SEQ ID NO: 6455 - DNA, 18 bp, Artificial Sequence
  Description of Artificial Sequence: Synthetic oligonucleotide
gcagggaagccgaagccc

SEQ ID NO: 6456 - DNA, 18 bp, Artificial Sequence
  Description of Artificial Sequence: Synthetic oligonucleotide
gtgaagcagggaagccga

SEQ ID NO: 6457 - DNA, 18 bp, Artificial Sequence
  Description of Artificial Sequence: Synthetic oligonucleotide
catgtgtgaagcagggaa

SEQ ID NO: 6458 - DNA, 18 bp, Artificial Sequence
  Description of Artificial Sequence: Synthetic oligonucleotide
aaccacatgtgtgaagca

SEQ ID NO: 6459 - DNA, 18 bp, Artificial Sequence
  Description of Artificial Sequence: Synthetic oligonucleotide
cagtgaaccacatgtgtg

SEQ ID NO: 6460 - DNA, 18 bp, Artificial Sequence
  Description of Artificial Sequence: Synthetic oligonucleotide
cgcaacagtgaaccacat

SEQ ID NO: 6461 - DNA, 18 bp, Artificial Sequence
  Description of Artificial Sequence: Synthetic oligonucleotide
acccccgcaacagtgaac

SEQ ID NO: 6462 - DNA, 18 bp, Artificial Sequence
  Description of Artificial Sequence: Synthetic oligonucleotide
cacgaacccccgcaacag

SEQ ID NO: 6463 - DNA, 18 bp, Artificial Sequence
  Description of Artificial Sequence: Synthetic oligonucleotide
aactccacgaacccccgc

SEQ ID NO: 6464 - DNA, 18 bp, Artificial Sequence
  Description of Artificial Sequence: Synthetic oligonucleotide
accataactccacgaacc

SEQ ID NO: 6465 - DNA, 18 bp, Artificial Sequence
  Description of Artificial Sequence: Synthetic oligonucleotide
cacccaccataactccac

SEQ ID NO: 6466 - DNA, 18 bp, Artificial Sequence
  Description of Artificial Sequence: Synthetic oligonucleotide
tttcccacccaccataac

SEQ ID NO: 6467 - DNA, 18 bp, Artificial Sequence
  Description of Artificial Sequence: Synthetic oligonucleotide
tcggatttcccacccacc

SEQ ID NO: 6468 - DNA, 18 bp, Artificial Sequence
  Description of Artificial Sequence: Synthetic oligonucleotide
gaatctcggatttcccac

SEQ ID NO: 6469 - DNA, 18 bp, Artificial Sequence
  Description of Artificial Sequence: Synthetic oligonucleotide
gcaaagaatctcggattt

SEQ ID NO: 6470 - DNA, 18 bp, Artificial Sequence
  Description of Artificial Sequence: Synthetic oligonucleotide
tggatgcaaagaatctcg

SEQ ID NO: 6471 - DNA, 18 bp, Artificial Sequence
  Description of Artificial Sequence: Synthetic oligonucleotide
tcacatggatgcaaagaa

SEQ ID NO: 6472 - DNA, 18 bp, Artificial Sequence
  Description of Artificial Sequence: Synthetic oligonucleotide
agaaatcacatggatgca

SEQ ID NO: 6473 - DNA, 18 bp, Artificial Sequence
  Description of Artificial Sequence: Synthetic oligonucleotide
tccgcagaaatcacatgg

SEQ ID NO: 6474 - DNA, 18 bp, Artificial Sequence
  Description of Artificial Sequence: Synthetic oligonucleotide
acagatccgcagaaatca

SEQ ID NO: 6475 - DNA, 18 bp, Artificial Sequence
  Description of Artificial Sequence: Synthetic oligonucleotide
tcttcacagatccgcaga

SEQ ID NO: 6476 - DNA, 18 bp, Artificial Sequence
  Description of Artificial Sequence: Synthetic oligonucleotide
gaagttcttcacagatcc

SEQ ID NO: 6477 - DNA, 18 bp, Artificial Sequence
  Description of Artificial Sequence: Synthetic oligonucleotide
ggcctgaagttcttcaca

SEQ ID NO: 6478 - DNA, 18 bp, Artificial Sequence
  Description of Artificial Sequence: Synthetic oligonucleotide
acccaggcctgaagttct

SEQ ID NO: 6479 - DNA, 18 bp, Artificial Sequence
  Description of Artificial Sequence: Synthetic oligonucleotide
ctcagacccaggcctgaa

SEQ ID NO: 6480 - DNA, 18 bp, Artificial Sequence
  Description of Artificial Sequence: Synthetic oligonucleotide
ggacgctcagacccaggc

SEQ ID NO: 6481 - DNA, 18 bp, Artificial Sequence
  Description of Artificial Sequence: Synthetic oligonucleotide
gaaaaggacgctcagacc

SEQ ID NO: 6482 - DNA, 18 bp, Artificial Sequence
  Description of Artificial Sequence: Synthetic oligonucleotide
gttgggaaaaggacgctc

SEQ ID NO: 6483 - DNA, 18 bp, Artificial Sequence
  Description of Artificial Sequence: Synthetic oligonucleotide
caagggttgggaaaagga

SEQ ID NO: 6484 - DNA, 18 bp, Artificial Sequence
  Description of Artificial Sequence: Synthetic oligonucleotide
gggcccaagggttgggaa

SEQ ID NO: 6485 - DNA, 18 bp, Artificial Sequence
  Description of Artificial Sequence: Synthetic oligonucleotide
ggccggggcccaagggtt

SEQ ID NO: 6486 - DNA, 18 bp, Artificial Sequence
  Description of Artificial Sequence: Synthetic oligonucleotide
agccaggccggggcccaa

SEQ ID NO: 6487 - DNA, 18 bp, Artificial Sequence
  Description of Artificial Sequence: Synthetic oligonucleotide
ctgacagccaggccgggg

SEQ ID NO: 6488 - DNA, 18 bp, Artificial Sequence
  Description of Artificial Sequence: Synthetic oligonucleotide
tttctctgtgagcggatc

SEQ ID NO: 6489 - DNA, 18 bp, Artificial Sequence
  Description of Artificial Sequence: Synthetic oligonucleotide
agcactttctctgtgagc

SEQ ID NO: 6490 - DNA, 18 bp, Artificial Sequence
  Description of Artificial Sequence: Synthetic oligonucleotide
ccttaagcactttctctg

SEQ ID NO: 6491 - DNA, 18 bp, Artificial Sequence
  Description of Artificial Sequence: Synthetic oligonucleotide
ggccaccttaagcacttt

SEQ ID NO: 6492 - DNA, 18 bp, Artificial Sequence
  Description of Artificial Sequence: Synthetic oligonucleotide
gtcacggccaccttaagc

SEQ ID NO: 6493 - DNA, 18 bp, Artificial Sequence
  Description of Artificial Sequence: Synthetic oligonucleotide
tagcagtcacggccacct

SEQ ID NO: 6494 - DNA, 18 bp, Artificial Sequence
  Description of Artificial Sequence: Synthetic oligonucleotide
actagtagcagtcacggc

SEQ ID NO: 6495 - DNA, 18 bp, Artificial Sequence
  Description of Artificial Sequence: Synthetic oligonucleotide
agaagactagtagcagtc

SEQ ID NO: 6496 - DNA, 18 bp, Artificial Sequence
  Description of Artificial Sequence: Synthetic oligonucleotide
cctgcagaagactagtag

SEQ ID NO: 6497 - DNA, 18 bp, Artificial Sequence
  Description of Artificial Sequence: Synthetic oligonucleotide
tgtcacctgcagaagact

SEQ ID NO: 6498 - DNA, 18 bp, Artificial Sequence
  Description of Artificial Sequence: Synthetic oligonucleotide
gtgattgtcacctgcaga

SEQ ID NO: 6499 - DNA, 18 bp, Artificial Sequence
  Description of Artificial Sequence: Synthetic oligonucleotide
acatggtgattgtcacct

SEQ ID NO: 6500 - DNA, 18 bp, Artificial Sequence
  Description of Artificial Sequence: Synthetic oligonucleotide
caatgacatggtgattgt

SEQ ID NO: 6501 - DNA, 18 bp, Artificial Sequence
  Description of Artificial Sequence: Synthetic oligonucleotide
tgtggcaatgacatggtg

SEQ ID NO: 6502 - DNA, 18 bp, Artificial Sequence
  Description of Artificial Sequence: Synthetic oligonucleotide
tgtggtgtggcaatgaca

SEQ ID NO: 6503 - DNA, 18 bp, Artificial Sequence
  Description of Artificial Sequence: Synthetic oligonucleotide
aaatctgtggtgtggcaa

SEQ ID NO: 6504 - DNA, 18 bp, Artificial Sequence
  Description of Artificial Sequence: Synthetic oligonucleotide
atgttaaatctgtggtgt

SEQ ID NO: 6505 - DNA, 18 bp, Artificial Sequence
  Description of Artificial Sequence: Synthetic oligonucleotide
gtcacatgttaaatctgt

SEQ ID NO: 6506 - DNA, 18 bp, Artificial Sequence
  Description of Artificial Sequence: Synthetic oligonucleotide
aaaaagtcacatgttaaa

SEQ ID NO: 6507 - DNA, 18 bp, Artificial Sequence
  Description of Artificial Sequence: Synthetic oligonucleotide
caactaaaaagtcacatg

SEQ ID NO: 6508 - DNA, 18 bp, Artificial Sequence
  Description of Artificial Sequence: Synthetic oligonucleotide
aatggcaactaaaaagtc

SEQ ID NO: 6509 - DNA, 18 bp, Artificial Sequence
  Description of Artificial Sequence: Synthetic oligonucleotide
cttaaaatggcaactaaa

SEQ ID NO: 6510 - DNA, 18 bp, Artificial Sequence
  Description of Artificial Sequence: Synthetic oligonucleotide
agggtcttaaaatggcaa

SEQ ID NO: 6511 - DNA, 18 bp, Artificial Sequence
  Description of Artificial Sequence: Synthetic oligonucleotide
tgacaagggtcttaaaat

SEQ ID NO: 6512 - DNA, 18 bp, Artificial Sequence
  Description of Artificial Sequence: Synthetic oligonucleotide
aaaactgacaagggtctt

SEQ ID NO: 6513 - DNA, 18 bp, Artificial Sequence
  Description of Artificial Sequence: Synthetic oligonucleotide
tgaaaaaaactgacaagg

SEQ ID NO: 6514 - DNA, 18 bp, Artificial Sequence
  Description of Artificial Sequence: Synthetic oligonucleotide
agcactgaaaaaaactga

SEQ ID NO: 6515 - DNA, 18 bp, Artificial Sequence
  Description of Artificial Sequence: Synthetic oligonucleotide
agggcagcactgaaaaaa

SEQ ID NO: 6516 - DNA, 18 bp, Artificial Sequence
  Description of Artificial Sequence: Synthetic oligonucleotide
tttagagggcagcactga

SEQ ID NO: 6517 - DNA, 18 bp, Artificial Sequence
  Description of Artificial Sequence: Synthetic oligonucleotide
tatgctttagagggcagc

SEQ ID NO: 6518 - DNA, 18 bp, Artificial Sequence
  Description of Artificial Sequence: Synthetic oligonucleotide
ttatatatgctttagagg

SEQ ID NO: 6519 - DNA, 18 bp, Artificial Sequence
  Description of Artificial Sequence: Synthetic oligonucleotide
tacttttatatatgcttt

SEQ ID NO: 6520 - DNA, 18 bp, Artificial Sequence
  Description of Artificial Sequence: Synthetic oligonucleotide
ctcctaggtccagccacc

SEQ ID NO: 6521 - DNA, 18 bp, Artificial Sequence
  Description of Artificial Sequence: Synthetic oligonucleotide
gtcccctcctaggtccag

SEQ ID NO: 6522 - DNA, 18 bp, Artificial Sequence
  Description of Artificial Sequence: Synthetic oligonucleotide
cagcagtcccctcctagg

SEQ ID NO: 6523 - DNA, 18 bp, Artificial Sequence
  Description of Artificial Sequence: Synthetic oligonucleotide
gtgcccagcagtcccctc

SEQ ID NO: 6524 - DNA, 18 bp, Artificial Sequence
  Description of Artificial Sequence: Synthetic oligonucleotide
gcctagtgcccagcagtc

SEQ ID NO: 6525 - DNA, 18 bp, Artificial Sequence
  Description of Artificial Sequence: Synthetic oligonucleotide
ctgccgcctagtgcccag

SEQ ID NO: 6526 - DNA, 18 bp, Artificial Sequence
  Description of Artificial Sequence: Synthetic oligonucleotide
ccttgctgccgcctagtg

SEQ ID NO: 6527 - DNA, 18 bp, Artificial Sequence
  Description of Artificial Sequence: Synthetic oligonucleotide
tccgtccttgctgccgcc

SEQ ID NO: 6528 - DNA, 18 bp, Artificial Sequence
  Description of Artificial Sequence: Synthetic oligonucleotide
ggagttccgtccttgctg

SEQ ID NO: 6529 - DNA, 18 bp, Artificial Sequence
  Description of Artificial Sequence: Synthetic oligonucleotide
accccggagttccgtcct

SEQ ID NO: 6530 - DNA, 18 bp, Artificial Sequence
  Description of Artificial Sequence: Synthetic oligonucleotide
aagagaccccggagttcc

SEQ ID NO: 6531 - DNA, 18 bp, Artificial Sequence
  Description of Artificial Sequence: Synthetic oligonucleotide
ctattaagagaccccgga

SEQ ID NO: 6532 - DNA, 18 bp, Artificial Sequence
  Description of Artificial Sequence: Synthetic oligonucleotide
tctccctattaagagacc

SEQ ID NO: 6533 - DNA, 18 bp, Artificial Sequence
  Description of Artificial Sequence: Synthetic oligonucleotide
ggatctctccctattaag

SEQ ID NO: 6534 - DNA, 18 bp, Artificial Sequence
  Description of Artificial Sequence: Synthetic oligonucleotide
cccccggatctctcccta

SEQ ID NO: 6535 - DNA, 18 bp, Artificial Sequence
  Description of Artificial Sequence: Synthetic oligonucleotide
gggtccccccggatctct

SEQ ID NO: 6536 - DNA, 18 bp, Artificial Sequence
  Description of Artificial Sequence: Synthetic oligonucleotide
ggcgtgggtccccccgga

SEQ ID NO: 6537 - DNA, 18 bp, Artificial Sequence
  Description of Artificial Sequence: Synthetic oligonucleotide
atgcaggcgtgggtcccc

SEQ ID NO: 6538 - DNA, 18 bp, Artificial Sequence
  Description of Artificial Sequence: Synthetic oligonucleotide
gcaagatgcaggcgtggg

SEQ ID NO: 6539 - DNA, 18 bp, Artificial Sequence
  Description of Artificial Sequence: Synthetic oligonucleotide
tttccgcaagatgcaggc

SEQ ID NO: 6540 - DNA, 18 bp, Artificial Sequence
  Description of Artificial Sequence: Synthetic oligonucleotide
cccgctttccgcaagatg

SEQ ID NO: 6541 - DNA, 18 bp, Artificial Sequence
  Description of Artificial Sequence: Synthetic oligonucleotide
tccaccccgctttccgca

SEQ ID NO: 6542 - DNA, 18 bp, Artificial Sequence
  Description of Artificial Sequence: Synthetic oligonucleotide
aaacctccaccccgcttt

SEQ ID NO: 6543 - DNA, 18 bp, Artificial Sequence
  Description of Artificial Sequence: Synthetic oligonucleotide
gccctaaacctccacccc

SEQ ID NO: 6544 - DNA, 18 bp, Artificial Sequence
  Description of Artificial Sequence: Synthetic oligonucleotide
gtccagccctaaacctcc

SEQ ID NO: 6545 - DNA, 18 bp, Artificial Sequence
  Description of Artificial Sequence: Synthetic oligonucleotide
caagagtccagccctaaa

SEQ ID NO: 6546 - DNA, 18 bp, Artificial Sequence
  Description of Artificial Sequence: Synthetic oligonucleotide
ggacccaagagtccagcc

SEQ ID NO: 6547 - DNA, 18 bp, Artificial Sequence
  Description of Artificial Sequence: Synthetic oligonucleotide
ttaaaggacccaagagtc

SEQ ID NO: 6548 - DNA, 18 bp, Artificial Sequence
  Description of Artificial Sequence: Synthetic oligonucleotide
cacctttaaaggacccaa

SEQ ID NO: 6549 - DNA, 18 bp, Artificial Sequence
  Description of Artificial Sequence: Synthetic oligonucleotide
ccactcacctttaaagga

SEQ ID NO: 6550 - DNA, 18 bp, Artificial Sequence
  Description of Artificial Sequence: Synthetic oligonucleotide
ccagaccactcaccttta

SEQ ID NO: 6551 - DNA, 18 bp, Artificial Sequence
  Description of Artificial Sequence: Synthetic oligonucleotide
ggcccccagaccactcac

SEQ ID NO: 6552 - DNA, 18 bp, Artificial Sequence
  Description of Artificial Sequence: Synthetic oligonucleotide
ccagaggcccccagacca

SEQ ID NO: 6553 - DNA, 18 bp, Artificial Sequence
  Description of Artificial Sequence: Synthetic oligonucleotide
caagcccagaggccccca

SEQ ID NO: 6554 - DNA, 18 bp, Artificial Sequence
  Description of Artificial Sequence: Synthetic oligonucleotide
ggccccaagcccagaggc

SEQ ID NO: 6555 - DNA, 18 bp, Artificial Sequence
  Description of Artificial Sequence: Synthetic oligonucleotide
ggtctggccccaagccca

SEQ ID NO: 6556 - DNA, 18 bp, Artificial Sequence
  Description of Artificial Sequence: Synthetic oligonucleotide
ccaggggtctggccccaa

SEQ ID NO: 6557 - DNA, 18 bp, Artificial Sequence
  Description of Artificial Sequence: Synthetic oligonucleotide
aggacccaggggtctggc

SEQ ID NO: 6558 - DNA, 18 bp, Artificial Sequence
  Description of Artificial Sequence: Synthetic oligonucleotide
catagaggacccaggggt

SEQ ID NO: 6559 - DNA, 18 bp, Artificial Sequence
  Description of Artificial Sequence: Synthetic oligonucleotide
tctttcatagaggaccca

SEQ ID NO: 6560 - DNA, 18 bp, Artificial Sequence
  Description of Artificial Sequence: Synthetic oligonucleotide
cacgttctttcatagagg

SEQ ID NO: 6561 - DNA, 18 bp, Artificial Sequence
  Description of Artificial Sequence: Synthetic oligonucleotide
cccagcacgttctttcat

SEQ ID NO: 6562 - DNA, 18 bp, Artificial Sequence
  Description of Artificial Sequence: Synthetic oligonucleotide
gggtccccagcacgttct

SEQ ID NO: 6563 - DNA, 18 bp, Artificial Sequence
  Description of Artificial Sequence: Synthetic oligonucleotide
aatcagggtccccagcac

SEQ ID NO: 6564 - DNA, 18 bp, Artificial Sequence
  Description of Artificial Sequence: Synthetic oligonucleotide
cccaaaatcagggtcccc

SEQ ID NO: 6565 - DNA, 18 bp, Artificial Sequence
  Description of Artificial Sequence: Synthetic oligonucleotide
aacatcccaaaatcaggg

SEQ ID NO: 6566 - DNA, 18 bp, Artificial Sequence
  Description of Artificial Sequence: Synthetic oligonucleotide
ttcctaacatcccaaaat

SEQ ID NO: 6567 - DNA, 18 bp, Artificial Sequence
  Description of Artificial Sequence: Synthetic oligonucleotide
ccaacttcctaacatccc

SEQ ID NO: 6568 - DNA, 18 bp, Artificial Sequence
  Description of Artificial Sequence: Synthetic oligonucleotide
gagttccaacttcctaac

SEQ ID NO: 6569 - DNA, 18 bp, Artificial Sequence
  Description of Artificial Sequence: Synthetic oligonucleotide
caaaagagttccaacttc

SEQ ID NO: 6570 - DNA, 18 bp, Artificial Sequence
  Description of Artificial Sequence: Synthetic oligonucleotide
cagaacaaaagagttcca

SEQ ID NO: 6571 - DNA, 18 bp, Artificial Sequence
  Description of Artificial Sequence: Synthetic oligonucleotide
tgcctcagcagcgtgttt

SEQ ID NO: 6572 - DNA, 18 bp, Artificial Sequence
  Description of Artificial Sequence: Synthetic oligonucleotide
atttgtgcctcagcagcg

SEQ ID NO: 6573 - DNA, 18 bp, Artificial Sequence
  Description of Artificial Sequence: Synthetic oligonucleotide
tccgcatttgtgcctcag

SEQ ID NO: 6574 - DNA, 18 bp, Artificial Sequence
  Description of Artificial Sequence: Synthetic oligonucleotide
ggccctccgcatttgtgc

SEQ ID NO: 6575 - DNA, 18 bp, Artificial Sequence
  Description of Artificial Sequence: Synthetic oligonucleotide
agagcggccctccgcatt

SEQ ID NO: 6576 - DNA, 18 bp, Artificial Sequence
  Description of Artificial Sequence: Synthetic oligonucleotide
tgaaaagagcggccctcc

SEQ ID NO: 6577 - DNA, 18 bp, Artificial Sequence
  Description of Artificial Sequence: Synthetic oligonucleotide
gcctctgaaaagagcggc

SEQ ID NO: 6578 - DNA, 18 bp, Artificial Sequence
  Description of Artificial Sequence: Synthetic oligonucleotide
aagatgcctctgaaaaga

SEQ ID NO: 6579 - DNA, 18 bp, Artificial Sequence
  Description of Artificial Sequence: Synthetic oligonucleotide
tttgcaagatgcctctga

SEQ ID NO: 6580 - DNA, 18 bp, Artificial Sequence
  Description of Artificial Sequence: Synthetic oligonucleotide
aaccatttgcaagatgcc

SEQ ID NO: 6581 - DNA, 18 bp, Artificial Sequence
  Description of Artificial Sequence: Synthetic oligonucleotide
ttcttaaccatttgcaag

SEQ ID NO: 6582 - DNA, 18 bp, Artificial Sequence
  Description of Artificial Sequence: Synthetic oligonucleotide
gctcgttcttaaccattt

SEQ ID NO: 6583 - DNA, 18 bp, Artificial Sequence
  Description of Artificial Sequence: Synthetic oligonucleotide
ggagggctcgttcttaac

SEQ ID NO: 6584 - DNA, 18 bp, Artificial Sequence
  Description of Artificial Sequence: Synthetic oligonucleotide
ctcaaggagggctcgttc

SEQ ID NO: 6585 - DNA, 18 bp, Artificial Sequence
  Description of Artificial Sequence: Synthetic oligonucleotide
ggaacctcaaggagggct

SEQ ID NO: 6586 - DNA, 18 bp, Artificial Sequence
  Description of Artificial Sequence: Synthetic oligonucleotide
agcaaggaacctcaagga

SEQ ID NO: 6587 - DNA, 18 bp, Artificial Sequence
  Description of Artificial Sequence: Synthetic oligonucleotide
tacttagcaaggaacctc

SEQ ID NO: 6588 - DNA, 18 bp, Artificial Sequence
  Description of Artificial Sequence: Synthetic oligonucleotide
aaacttacttagcaagga

SEQ ID NO: 6589 - DNA, 18 bp, Artificial Sequence
  Description of Artificial Sequence: Synthetic oligonucleotide
cttataaacttacttagc

SEQ ID NO: 6590 - DNA, 18 bp, Artificial Sequence
  Description of Artificial Sequence: Synthetic oligonucleotide
tggagcttataaacttac

SEQ ID NO: 6591 - DNA, 18 bp, Artificial Sequence
  Description of Artificial Sequence: Synthetic oligonucleotide
taaaatggagcttataaa

SEQ ID NO: 6592 - DNA, 18 bp, Artificial Sequence
  Description of Artificial Sequence: Synthetic oligonucleotide
ccaactaaaatggagctt

SEQ ID NO: 6593 - DNA, 18 bp, Artificial Sequence
  Description of Artificial Sequence: Synthetic oligonucleotide
ctgtcccaactaaaatgg

SEQ ID NO: 6594 - DNA, 18 bp, Artificial Sequence
  Description of Artificial Sequence: Synthetic oligonucleotide
ttaatctgtcccaactaa

SEQ ID NO: 6595 - DNA, 18 bp, Artificial Sequence
  Description of Artificial Sequence: Synthetic oligonucleotide
tgtgcttaatctgtccca

SEQ ID NO: 6596 - DNA, 18 bp, Artificial Sequence
  Description of Artificial Sequence: Synthetic oligonucleotide
aagtttgtgcttaatctg

SEQ ID NO: 6597 - DNA, 18 bp, Artificial Sequence
  Description of Artificial Sequence: Synthetic oligonucleotide
taaacaagtttgtgctta

SEQ ID NO: 6598 - DNA, 18 bp, Artificial Sequence
  Description of Artificial Sequence: Synthetic oligonucleotide
tgctttaaacaagtttgt

SEQ ID NO: 6599 - DNA, 18 bp, Artificial Sequence
  Description of Artificial Sequence: Synthetic oligonucleotide
cttattgctttaaacaag

SEQ ID NO: 6600 - DNA, 18 bp, Artificial Sequence
  Description of Artificial Sequence: Synthetic oligonucleotide
attatcttattgctttaa

SEQ ID NO: 6601 - DNA, 18 bp, Artificial Sequence
  Description of Artificial Sequence: Synthetic oligonucleotide
agtaaattatcttattgc

SEQ ID NO: 6602 - DNA, 18 bp, Artificial Sequence
  Description of Artificial Sequence: Synthetic oligonucleotide
gagccagtaaattatctt

SEQ ID NO: 6603 - DNA, 18 bp, Artificial Sequence
  Description of Artificial Sequence: Synthetic oligonucleotide
ccagtgagccagtaaatt

SEQ ID NO: 6604 - DNA, 18 bp, Artificial Sequence
  Description of Artificial Sequence: Synthetic oligonucleotide
gttgaccagtgagccagt

SEQ ID NO: 6605 - DNA, 18 bp, Artificial Sequence
  Description of Artificial Sequence: Synthetic oligonucleotide
ctggggttgaccagtgag

SEQ ID NO: 6606 - DNA, 18 bp, Artificial Sequence
  Description of Artificial Sequence: Synthetic oligonucleotide
tggtcctggggttgacca

SEQ ID NO: 6607 - DNA, 18 bp, Artificial Sequence
  Description of Artificial Sequence: Synthetic oligonucleotide
cccattggtcctggggtt

SEQ ID NO: 6608 - DNA, 18 bp, Artificial Sequence
  Description of Artificial Sequence: Synthetic oligonucleotide
ataggcccattggtcctg

SEQ ID NO: 6609 - DNA, 18 bp, Artificial Sequence
  Description of Artificial Sequence: Synthetic oligonucleotide
ccatgataggcccattgg

SEQ ID NO: 6610 - DNA, 18 bp, Artificial Sequence
  Description of Artificial Sequence: Synthetic oligonucleotide
agtccccatgataggccc

SEQ ID NO: 6611 - DNA, 18 bp, Artificial Sequence
  Description of Artificial Sequence: Synthetic oligonucleotide
gaggcagtccccatgata

SEQ ID NO: 6612 - DNA, 18 bp, Artificial Sequence
  Description of Artificial Sequence: Synthetic oligonucleotide
agagagaggcagtcccca

SEQ ID NO: 6613 - DNA, 18 bp, Artificial Sequence
  Description of Artificial Sequence: Synthetic oligonucleotide
ggtgcagagagaggcagt

SEQ ID NO: 6614 - DNA, 18 bp, Artificial Sequence
  Description of Artificial Sequence: Synthetic oligonucleotide
ggtgtggtgcagagagag

SEQ ID NO: 6615 - DNA, 18 bp, Artificial Sequence
  Description of Artificial Sequence: Synthetic oligonucleotide
gggtgggtgtggtgcaga

SEQ ID NO: 6616 - DNA, 18 bp, Artificial Sequence
  Description of Artificial Sequence: Synthetic oligonucleotide
caggagggtgggtgtggt

SEQ ID NO: 6617 - DNA, 18 bp, Artificial Sequence
  Description of Artificial Sequence: Synthetic oligonucleotide
tcttgcaggagggtgggt

SEQ ID NO: 6618 - DNA, 18 bp, Artificial Sequence
  Description of Artificial Sequence: Synthetic oligonucleotide
cgacctcttgcaggaggg

SEQ ID NO: 6619 - DNA, 18 bp, Artificial Sequence
  Description of Artificial Sequence: Synthetic oligonucleotide
ggggtcgacctcttgcag

SEQ ID NO: 6620 - DNA, 18 bp, Artificial Sequence
  Description of Artificial Sequence: Synthetic oligonucleotide
atgggggggtcgacctct

SEQ ID NO: 6621 - DNA, 18 bp, Artificial Sequence
  Description of Artificial Sequence: Synthetic oligonucleotide
agaggatgggggggtcga

SEQ ID NO: 6622 - DNA, 18 bp, Artificial Sequence
  Description of Artificial Sequence: Synthetic oligonucleotide
ctgggagaggatgggggg

SEQ ID NO: 6623 - DNA, 18 bp, Artificial Sequence
  Description of Artificial Sequence: Synthetic oligonucleotide
agcagctgggagaggatg

SEQ ID NO: 6624 - DNA, 18 bp, Artificial Sequence
  Description of Artificial Sequence: Synthetic oligonucleotide
ctgtcagcagctgggaga

SEQ ID NO: 6625 - DNA, 18 bp, Artificial Sequence
  Description of Artificial Sequence: Synthetic oligonucleotide
ggtacctgtcagcagctg

SEQ ID NO: 6626 - DNA, 18 bp, Artificial Sequence
  Description of Artificial Sequence: Synthetic oligonucleotide
acccaggtacctgtcagc

SEQ ID NO: 6627 - DNA, 18 bp, Artificial Sequence
  Description of Artificial Sequence: Synthetic oligonucleotide
aggatacccaggtacctg

SEQ ID NO: 6628 - DNA, 18 bp, Artificial Sequence
  Description of Artificial Sequence: Synthetic oligonucleotide
agctgaggatacccaggt

SEQ ID NO: 6629 - DNA, 18 bp, Artificial Sequence
  Description of Artificial Sequence: Synthetic oligonucleotide
gcctgagctgaggatacc

SEQ ID NO: 6630 - DNA, 18 bp, Artificial Sequence
  Description of Artificial Sequence: Synthetic oligonucleotide
gaacagcctgagctgagg

SEQ ID NO: 6631 - DNA, 18 bp, Artificial Sequence
  Description of Artificial Sequence: Synthetic oligonucleotide
ggggcgaacagcctgagc

SEQ ID NO: 6632 - DNA, 18 bp, Artificial Sequence
  Description of Artificial Sequence: Synthetic oligonucleotide
agtgtggggcgaacagcc

SEQ ID NO: 6633 - DNA, 18 bp, Artificial Sequence
  Description of Artificial Sequence: Synthetic oligonucleotide
gggatagtgtggggcgaa

SEQ ID NO: 6634 - DNA, 18 bp, Artificial Sequence
  Description of Artificial Sequence: Synthetic oligonucleotide
ctgtggggatagtgtggg

SEQ ID NO: 6635 - DNA, 18 bp, Artificial Sequence
  Description of Artificial Sequence: Synthetic oligonucleotide
cctggctgtggggatagt

SEQ ID NO: 6636 - DNA, 18 bp, Artificial Sequence
  Description of Artificial Sequence: Synthetic oligonucleotide
ggaggcctggctgtgggg

SEQ ID NO: 6637 - DNA, 18 bp, Artificial Sequence
  Description of Artificial Sequence: Synthetic oligonucleotide
ccctgggaggcctggctg

SEQ ID NO: 6638 - DNA, 18 bp, Artificial Sequence
  Description of Artificial Sequence: Synthetic oligonucleotide
gtgtaccctgggaggcct

SEQ ID NO: 6639 - DNA, 18 bp, Artificial Sequence
  Description of Artificial Sequence: Synthetic oligonucleotide
gggacgtgtaccctggga

SEQ ID NO: 6640 - DNA, 18 bp, Artificial Sequence
  Description of Artificial Sequence: Synthetic oligonucleotide
gggtcgggacgtgtaccc

SEQ ID NO: 6641 - DNA, 18 bp, Artificial Sequence
  Description of Artificial Sequence: Synthetic oligonucleotide
cctgggggtcgggacgtg

SEQ ID NO: 6642 - DNA, 18 bp, Artificial Sequence
  Description of Artificial Sequence: Synthetic oligonucleotide
acacccctgggggtcggg

SEQ ID NO: 6643 - DNA, 18 bp, Artificial Sequence
  Description of Artificial Sequence: Synthetic oligonucleotide
tggggacacccctggggg

SEQ ID NO: 6644 - DNA, 18 bp, Artificial Sequence
  Description of Artificial Sequence: Synthetic oligonucleotide
agtgctggggacacccct

SEQ ID NO: 6645 - DNA, 18 bp, Artificial Sequence
  Description of Artificial Sequence: Synthetic oligonucleotide
ttatcagtgctggggaca

SEQ ID NO: 6646 - DNA, 18 bp, Artificial Sequence
  Description of Artificial Sequence: Synthetic oligonucleotide
gcctattatcagtgctgg

SEQ ID NO: 6647 - DNA, 18 bp, Artificial Sequence
  Description of Artificial Sequence: Synthetic oligonucleotide
tctctgcctattatcagt

SEQ ID NO: 6648 - DNA, 18 bp, Artificial Sequence
  Description of Artificial Sequence: Synthetic oligonucleotide
ctccccgcaggcgccacc

SEQ ID NO: 6649 - DNA, 18 bp, Artificial Sequence
  Description of Artificial Sequence: Synthetic oligonucleotide
cagccctccccgcaggcg

SEQ ID NO: 6650 - DNA, 18 bp, Artificial Sequence
  Description of Artificial Sequence: Synthetic oligonucleotide
tcccgcagccctccccgc

SEQ ID NO: 6651 - DNA, 18 bp, Artificial Sequence
  Description of Artificial Sequence: Synthetic oligonucleotide
tgccctcccgcagccctc

SEQ ID NO: 6652 - DNA, 18 bp, Artificial Sequence
  Description of Artificial Sequence: Synthetic oligonucleotide
cccgctgccctcccgcag

SEQ ID NO: 6653 - DNA, 18 bp, Artificial Sequence
  Description of Artificial Sequence: Synthetic oligonucleotide
cagctcccgctgccctcc

SEQ ID NO: 6654 - DNA, 18 bp, Artificial Sequence
  Description of Artificial Sequence: Synthetic oligonucleotide
aacaccagctcccgctgc

SEQ ID NO: 6655 - DNA, 18 bp, Artificial Sequence
  Description of Artificial Sequence: Synthetic oligonucleotide
ccgctaacaccagctccc

SEQ ID NO: 6656 - DNA, 18 bp, Artificial Sequence
  Description of Artificial Sequence: Synthetic oligonucleotide
cgctgccgctaacaccag

SEQ ID NO: 6657 - DNA, 18 bp, Artificial Sequence
  Description of Artificial Sequence: Synthetic oligonucleotide
gtggccgctgccgctaac

SEQ ID NO: 6658 - DNA, 18 bp, Artificial Sequence
  Description of Artificial Sequence: Synthetic oligonucleotide
agaccgtggccgctgccg

SEQ ID NO: 6659 - DNA, 18 bp, Artificial Sequence
  Description of Artificial Sequence: Synthetic oligonucleotide
ccaggagaccgtggccgc

SEQ ID NO: 6660 - DNA, 18 bp, Artificial Sequence
  Description of Artificial Sequence: Synthetic oligonucleotide
ggacgccaggagaccgtg

SEQ ID NO: 6661 - DNA, 18 bp, Artificial Sequence
  Description of Artificial Sequence: Synthetic oligonucleotide
cccagggacgccaggaga

SEQ ID NO: 6662 - DNA, 18 bp, Artificial Sequence
  Description of Artificial Sequence: Synthetic oligonucleotide
cccggcccagggacgcca

SEQ ID NO: 6663 - DNA, 18 bp, Artificial Sequence
  Description of Artificial Sequence: Synthetic oligonucleotide
cccaccccggcccaggga

SEQ ID NO: 6664 - DNA, 18 bp, Artificial Sequence
  Description of Artificial Sequence: Synthetic oligonucleotide
caacacccaccccggccc

SEQ ID NO: 6665 - DNA, 18 bp, Artificial Sequence
  Description of Artificial Sequence: Synthetic oligonucleotide
ggccccaacacccacccc

SEQ ID NO: 6666 - DNA, 18 bp, Artificial Sequence
  Description of Artificial Sequence: Synthetic oligonucleotide
tcgggggccccaacaccc

SEQ ID NO: 6667 - DNA, 18 bp, Artificial Sequence
  Description of Artificial Sequence: Synthetic oligonucleotide
cgaagtcgggggccccaa

SEQ ID NO: 6668 - DNA, 18 bp, Artificial Sequence
  Description of Artificial Sequence: Synthetic oligonucleotide
gtcggcgaagtcgggggc

SEQ ID NO: 6669 - DNA, 18 bp, Artificial Sequence
  Description of Artificial Sequence: Synthetic oligonucleotide
gcggagtcggcgaagtcg

SEQ ID NO: 6670 - DNA, 18 bp, Artificial Sequence
  Description of Artificial Sequence: Synthetic oligonucleotide
atggcgcggagtcggcga

SEQ ID NO: 6671 - DNA, 18 bp, Artificial Sequence
  Description of Artificial Sequence: Synthetic oligonucleotide
ttgcgatggcgcggagtc

SEQ ID NO: 6672 - DNA, 18 bp, Artificial Sequence
  Description of Artificial Sequence: Synthetic oligonucleotide
ccgctttgcgatggcgcg

SEQ ID NO: 6673 - DNA, 18 bp, Artificial Sequence
  Description of Artificial Sequence: Synthetic oligonucleotide
gtgcaccgctttgcgatg

SEQ ID NO: 6674 - DNA, 18 bp, Artificial Sequence
  Description of Artificial Sequence: Synthetic oligonucleotide
cccgagtgcaccgctttg

SEQ ID NO: 6675 - DNA, 18 bp, Artificial Sequence
  Description of Artificial Sequence: Synthetic oligonucleotide
tggagcccgagtgcaccg

SEQ ID NO: 6676 - DNA, 18 bp, Artificial Sequence
  Description of Artificial Sequence: Synthetic oligonucleotide
gcgcgtggagcccgagtg

SEQ ID NO: 6677 - DNA, 18 bp, Artificial Sequence
  Description of Artificial Sequence: Synthetic oligonucleotide
agggcgcgcgtggagccc

SEQ ID NO: 6678 - DNA, 18 bp, Artificial Sequence
  Description of Artificial Sequence: Synthetic oligonucleotide
ctcgcagggcgcgcgtgg

SEQ ID NO: 6679 - DNA, 18 bp, Artificial Sequence
  Description of Artificial Sequence: Synthetic oligonucleotide
cccacctcgcagggcgcg

SEQ ID NO: 6680 - DNA, 18 bp, Artificial Sequence
  Description of Artificial Sequence: Synthetic oligonucleotide
cagcgcccacctcgcagg

SEQ ID NO: 6681 - DNA, 18 bp, Artificial Sequence
  Description of Artificial Sequence: Synthetic oligonucleotide
aaacgcagcgcccacctc

SEQ ID NO: 6682 - DNA, 18 bp, Artificial Sequence
  Description of Artificial Sequence: Synthetic oligonucleotide
aatgaaaacgcagcgccc

SEQ ID NO: 6683 - DNA, 18 bp, Artificial Sequence
  Description of Artificial Sequence: Synthetic oligonucleotide
cgtgaaatgaaaacgcag

SEQ ID NO: 6684 - DNA, 18 bp, Artificial Sequence
  Description of Artificial Sequence: Synthetic oligonucleotide
tcacccgtgaaatgaaaa

SEQ ID NO: 6685 - DNA, 18 bp, Artificial Sequence
  Description of Artificial Sequence: Synthetic oligonucleotide
tctcctcacccgtgaaat

SEQ ID NO: 6686 - DNA, 18 bp, Artificial Sequence
  Description of Artificial Sequence: Synthetic oligonucleotide
ctaagtctcctcacccgt

SEQ ID NO: 6687 - DNA, 18 bp, Artificial Sequence
  Description of Artificial Sequence: Synthetic oligonucleotide
tctctctaagtctcctca

SEQ ID NO: 6688 - DNA, 18 bp, Artificial Sequence
  Description of Artificial Sequence: Synthetic oligonucleotide
cttcgtctctctaagtct

SEQ ID NO: 6689 - DNA, 18 bp, Artificial Sequence
  Description of Artificial Sequence: Synthetic oligonucleotide
agtggcttcgtctctcta

SEQ ID NO: 6690 - DNA, 18 bp, Artificial Sequence
  Description of Artificial Sequence: Synthetic oligonucleotide
ggacaagtggcttcgtct

SEQ ID NO: 6691 - DNA, 18 bp, Artificial Sequence
  Description of Artificial Sequence: Synthetic oligonucleotide
accttggacaagtggctt

SEQ ID NO: 6692 - DNA, 18 bp, Artificial Sequence
  Description of Artificial Sequence: Synthetic oligonucleotide
gcgtgaccttggacaagt

SEQ ID NO: 6693 - DNA, 18 bp, Artificial Sequence
  Description of Artificial Sequence: Synthetic oligonucleotide
cagcggcgtgaccttgga

SEQ ID NO: 6694 - DNA, 18 bp, Artificial Sequence
  Description of Artificial Sequence: Synthetic oligonucleotide
ctcaccagcggcgtgacc

SEQ ID NO: 6695 - DNA, 18 bp, Artificial Sequence
  Description of Artificial Sequence: Synthetic oligonucleotide
tcccactcaccagcggcg

SEQ ID NO: 6696 - DNA, 18 bp, Artificial Sequence
  Description of Artificial Sequence: Synthetic oligonucleotide
ggcgctcccactcaccag

SEQ ID NO: 6697 - DNA, 18 bp, Artificial Sequence
  Description of Artificial Sequence: Synthetic oligonucleotide
tgctgggcgctcccactc

SEQ ID NO: 6698 - DNA, 18 bp, Artificial Sequence
  Description of Artificial Sequence: Synthetic oligonucleotide
ttccatgctgggcgctcc

SEQ ID NO: 6699 - DNA, 18 bp, Artificial Sequence
  Description of Artificial Sequence: Synthetic oligonucleotide
ctgggttccatgctgggc

SEQ ID NO: 6700 - DNA, 18 bp, Artificial Sequence
  Description of Artificial Sequence: Synthetic oligonucleotide
cggtgctgggttccatgc

SEQ ID NO: 6701 - DNA, 18 bp, Artificial Sequence
  Description of Artificial Sequence: Synthetic oligonucleotide
ctggacggtgctgggttc

SEQ ID NO: 6702 - DNA, 18 bp, Artificial Sequence
  Description of Artificial Sequence: Synthetic oligonucleotide
cgcggctggacggtgctg

SEQ ID NO: 6703 - DNA, 18 bp, Artificial Sequence
  Description of Artificial Sequence: Synthetic oligonucleotide
ggctccgcggctggacgg

SEQ ID NO: 6704 - DNA, 18 bp, Artificial Sequence
  Description of Artificial Sequence: Synthetic oligonucleotide
acgcgggctccgcggctg

SEQ ID NO: 6705 - DNA, 18 bp, Artificial Sequence
  Description of Artificial Sequence: Synthetic oligonucleotide
gtggaacgcgggctccgc

SEQ ID NO: 6706 - DNA, 18 bp, Artificial Sequence
  Description of Artificial Sequence: Synthetic oligonucleotide
agagggtggaacgcgggc

SEQ ID NO: 6707 - DNA, 18 bp, Artificial Sequence
  Description of Artificial Sequence: Synthetic oligonucleotide
ggcacagagggtggaacg

SEQ ID NO: 6708 - DNA, 18 bp, Artificial Sequence
  Description of Artificial Sequence: Synthetic oligonucleotide
gcggcggcacagagggtg

SEQ ID NO: 6709 - DNA, 18 bp, Artificial Sequence
  Description of Artificial Sequence: Synthetic oligonucleotide
aggcggcggcggcacaga

SEQ ID NO: 6710 - DNA, 18 bp, Artificial Sequence
  Description of Artificial Sequence: Synthetic oligonucleotide
acaggaggcggcggcggc

SEQ ID NO: 6711 - DNA, 18 bp, Artificial Sequence
  Description of Artificial Sequence: Synthetic oligonucleotide
ctcccacaggaggcggcg

SEQ ID NO: 6712 - DNA, 18 bp, Artificial Sequence
  Description of Artificial Sequence: Synthetic oligonucleotide
tccctctcccacaggagg

SEQ ID NO: 6713 - DNA, 18 bp, Artificial Sequence
  Description of Artificial Sequence: Synthetic oligonucleotide
ccacctccctctcccaca

SEQ ID NO: 6714 - DNA, 18 bp, Artificial Sequence
  Description of Artificial Sequence: Synthetic oligonucleotide
cccgaccacctccctctc

SEQ ID NO: 6715 - DNA, 18 bp, Artificial Sequence
  Description of Artificial Sequence: Synthetic oligonucleotide
actctcccgaccacctcc

SEQ ID NO: 6716 - DNA, 18 bp, Artificial Sequence
  Description of Artificial Sequence: Synthetic oligonucleotide
cgtgcactctcccgacca

SEQ ID NO: 6717 - DNA, 18 bp, Artificial Sequence
  Description of Artificial Sequence: Synthetic oligonucleotide
accggcgtgcactctccc

SEQ ID NO: 6718 - DNA, 18 bp, Artificial Sequence
  Description of Artificial Sequence: Synthetic oligonucleotide
gcggcaccggcgtgcact

SEQ ID NO: 6719 - DNA, 18 bp, Artificial Sequence
  Description of Artificial Sequence: Synthetic oligonucleotide
cccaggcggcaccggcgt

SEQ ID NO: 6720 - DNA, 18 bp, Artificial Sequence
  Description of Artificial Sequence: Synthetic oligonucleotide
tggagcccaggcggcacc

SEQ ID NO: 6721 - DNA, 18 bp, Artificial Sequence
  Description of Artificial Sequence: Synthetic oligonucleotide
cagtctggagcccaggcg

SEQ ID NO: 6722 - DNA, 18 bp, Artificial Sequence
  Description of Artificial Sequence: Synthetic oligonucleotide
gcgcccagtctggagccc

SEQ ID NO: 6723 - DNA, 18 bp, Artificial Sequence
  Description of Artificial Sequence: Synthetic oligonucleotide
tggtcgcgcccagtctgg

SEQ ID NO: 6724 - DNA, 18 bp, Artificial Sequence
  Description of Artificial Sequence: Synthetic oligonucleotide
gttagtggtcgcgcccag

SEQ ID NO: 6725 - DNA, 18 bp, Artificial Sequence
  Description of Artificial Sequence: Synthetic oligonucleotide
accgggttagtggtcgcg

SEQ ID NO: 6726 - DNA, 18 bp, Artificial Sequence
  Description of Artificial Sequence: Synthetic oligonucleotide
cattaaccgggttagtgg

SEQ ID NO: 6727 - DNA, 18 bp, Artificial Sequence
  Description of Artificial Sequence: Synthetic oligonucleotide
gaggtcattaaccgggtt

SEQ ID NO: 6728 - DNA, 18 bp, Artificial Sequence
  Description of Artificial Sequence: Synthetic oligonucleotide
agcccgaggtcattaacc

SEQ ID NO: 6729 - DNA, 18 bp, Artificial Sequence
  Description of Artificial Sequence: Synthetic oligonucleotide
agttaagcccgaggtcat

SEQ ID NO: 6730 - DNA, 18 bp, Artificial Sequence
  Description of Artificial Sequence: Synthetic oligonucleotide
ggttaagttaagcccgag

SEQ ID NO: 6731 - DNA, 18 bp, Artificial Sequence
  Description of Artificial Sequence: Synthetic oligonucleotide
gaaggggttaagttaagc

SEQ ID NO: 6732 - DNA, 18 bp, Artificial Sequence
  Description of Artificial Sequence: Synthetic oligonucleotide
gcagcgaaggggttaagt

SEQ ID NO: 6733 - DNA, 18 bp, Artificial Sequence
  Description of Artificial Sequence: Synthetic oligonucleotide
ccagagcagcgaaggggt

SEQ ID NO: 6734 - DNA, 18 bp, Artificial Sequence
  Description of Artificial Sequence: Synthetic oligonucleotide
caggcccagagcagcgaa

SEQ ID NO: 6735 - DNA, 18 bp, Artificial Sequence
  Description of Artificial Sequence: Synthetic oligonucleotide
aaacgcaggcccagagca

SEQ ID NO: 6736 - DNA, 18 bp, Artificial Sequence
  Description of Artificial Sequence: Synthetic oligonucleotide
tggagaaacgcaggccca

SEQ ID NO: 6737 - DNA, 18 bp, Artificial Sequence
  Description of Artificial Sequence: Synthetic oligonucleotide
accggtggagaaacgcag

SEQ ID NO: 6738 - DNA, 18 bp, Artificial Sequence
  Description of Artificial Sequence: Synthetic oligonucleotide
atttcaccggtggagaaa

SEQ ID NO: 6739 - DNA, 18 bp, Artificial Sequence
  Description of Artificial Sequence: Synthetic oligonucleotide
acctcatttcaccggtgg

SEQ ID NO: 6740 - DNA, 18 bp, Artificial Sequence
  Description of Artificial Sequence: Synthetic oligonucleotide
gcattacctcatttcacc

SEQ ID NO: 6741 - DNA, 18 bp, Artificial Sequence
  Description of Artificial Sequence: Synthetic oligonucleotide
ggctggcattacctcatt

SEQ ID NO: 6742 - DNA, 18 bp, Artificial Sequence
  Description of Artificial Sequence: Synthetic oligonucleotide
ggcagggctggcattacc

SEQ ID NO: 6743 - DNA, 18 bp, Artificial Sequence
  Description of Artificial Sequence: Synthetic oligonucleotide
gagtaggcagggctggca

SEQ ID NO: 6744 - DNA, 18 bp, Artificial Sequence
  Description of Artificial Sequence: Synthetic oligonucleotide
atgaagagtaggcagggc

SEQ ID NO: 6745 - DNA, 18 bp, Artificial Sequence
  Description of Artificial Sequence: Synthetic oligonucleotide
cgcccatgaagagtaggc

SEQ ID NO: 6746 - DNA, 18 bp, Artificial Sequence
  Description of Artificial Sequence: Synthetic oligonucleotide
ttacacgcccatgaagag

SEQ ID NO: 6747 - DNA, 18 bp, Artificial Sequence
  Description of Artificial Sequence: Synthetic oligonucleotide
gctccttacacgcccatg

SEQ ID NO: 6748 - DNA, 18 bp, Artificial Sequence
  Description of Artificial Sequence: Synthetic oligonucleotide
ctgatgctccttacacgc

SEQ ID NO: 6749 - DNA, 18 bp, Artificial Sequence
  Description of Artificial Sequence: Synthetic oligonucleotide
catctctgatgctcctta

SEQ ID NO: 6750 - DNA, 18 bp, Artificial Sequence
  Description of Artificial Sequence: Synthetic oligonucleotide
tgcaccatctctgatgct

SEQ ID NO: 6751 - DNA, 18 bp, Artificial Sequence
  Description of Artificial Sequence: Synthetic oligonucleotide
ccacatgcaccatctctg

SEQ ID NO: 6752 - DNA, 18 bp, Artificial Sequence
  Description of Artificial Sequence: Synthetic oligonucleotide
caattccacatgcaccat

SEQ ID NO: 6753 - DNA, 18 bp, Artificial Sequence
  Description of Artificial Sequence: Synthetic oligonucleotide
caaagcaattccacatgc

SEQ ID NO: 6754 - DNA, 18 bp, Artificial Sequence
  Description of Artificial Sequence: Synthetic oligonucleotide
acttgcaaagcaattcca

SEQ ID NO: 6755 - DNA, 18 bp, Artificial Sequence
  Description of Artificial Sequence: Synthetic oligonucleotide
gcactacttgcaaagcaa

SEQ ID NO: 6756 - DNA, 18 bp, Artificial Sequence
  Description of Artificial Sequence: Synthetic oligonucleotide
gcgcagcactacttgcaa

SEQ ID NO: 6757 - DNA, 18 bp, Artificial Sequence
  Description of Artificial Sequence: Synthetic oligonucleotide
gctcagcgcagcactact

SEQ ID NO: 6758 - DNA, 18 bp, Artificial Sequence
  Description of Artificial Sequence: Synthetic oligonucleotide
agtgcgctcagcgcagca

SEQ ID NO: 6759 - DNA, 18 bp, Artificial Sequence
  Description of Artificial Sequence: Synthetic oligonucleotide
tcctcagtgcgctcagcg

SEQ ID NO: 6760 - DNA, 18 bp, Artificial Sequence
  Description of Artificial Sequence: Synthetic oligonucleotide
cataatcctcagtgcgct

SEQ ID NO: 6761 - DNA, 18 bp, Artificial Sequence
  Description of Artificial Sequence: Synthetic oligonucleotide
gcaatcataatcctcagt

SEQ ID NO: 6762 - DNA, 18 bp, Artificial Sequence
  Description of Artificial Sequence: Synthetic oligonucleotide
aaacagcaatcataatcc

SEQ ID NO: 6763 - DNA, 18 bp, Artificial Sequence
  Description of Artificial Sequence: Synthetic oligonucleotide
cttcccccagtctgcctg

SEQ ID NO: 6764 - DNA, 18 bp, Artificial Sequence
  Description of Artificial Sequence: Synthetic oligonucleotide
tctcccttcccccagtct

SEQ ID NO: 6765 - DNA, 18 bp, Artificial Sequence
  Description of Artificial Sequence: Synthetic oligonucleotide
atgtctctcccttccccc

SEQ ID NO: 6766 - DNA, 18 bp, Artificial Sequence
  Description of Artificial Sequence: Synthetic oligonucleotide
cttccatgtctctccctt

SEQ ID NO: 6767 - DNA, 18 bp, Artificial Sequence
  Description of Artificial Sequence: Synthetic oligonucleotide
caggccttccatgtctct

SEQ ID NO: 6768 - DNA, 18 bp, Artificial Sequence
  Description of Artificial Sequence: Synthetic oligonucleotide
actcccaggccttccatg

SEQ ID NO: 6769 - DNA, 18 bp, Artificial Sequence
  Description of Artificial Sequence: Synthetic oligonucleotide
cgtagactcccaggcctt

SEQ ID NO: 6770 - DNA, 18 bp, Artificial Sequence
  Description of Artificial Sequence: Synthetic oligonucleotide
gaaaacgtagactcccag

SEQ ID NO: 6771 - DNA, 18 bp, Artificial Sequence
  Description of Artificial Sequence: Synthetic oligonucleotide
aggatgaaaacgtagact

SEQ ID NO: 6772 - DNA, 18 bp, Artificial Sequence
  Description of Artificial Sequence: Synthetic oligonucleotide
aagccaggatgaaaacgt

SEQ ID NO: 6773 - DNA, 18 bp, Artificial Sequence
  Description of Artificial Sequence: Synthetic oligonucleotide
cagtgaagccaggatgaa

SEQ ID NO: 6774 - DNA, 18 bp, Artificial Sequence
  Description of Artificial Sequence: Synthetic oligonucleotide
tcacacagtgaagccagg

SEQ ID NO: 6775 - DNA, 18 bp, Artificial Sequence
  Description of Artificial Sequence: Synthetic oligonucleotide
tccagtcacacagtgaag

SEQ ID NO: 6776 - DNA, 18 bp, Artificial Sequence
  Description of Artificial Sequence: Synthetic oligonucleotide
cttgttccagtcacacag

SEQ ID NO: 6777 - DNA, 18 bp, Artificial Sequence
  Description of Artificial Sequence: Synthetic oligonucleotide
ctcaacttgttccagtca

SEQ ID NO: 6778 - DNA, 18 bp, Artificial Sequence
  Description of Artificial Sequence: Synthetic oligonucleotide
ggagactcaacttgttcc

SEQ ID NO: 6779 - DNA, 18 bp, Artificial Sequence
  Description of Artificial Sequence: Synthetic oligonucleotide
ggagaggagactcaactt

SEQ ID NO: 6780 - DNA, 18 bp, Artificial Sequence
  Description of Artificial Sequence: Synthetic oligonucleotide
agtctggagaggagactc

SEQ ID NO: 6781 - DNA, 18 bp, Artificial Sequence
  Description of Artificial Sequence: Synthetic oligonucleotide
gaaatagtctggagagga

SEQ ID NO: 6782 - DNA, 18 bp, Artificial Sequence
  Description of Artificial Sequence: Synthetic oligonucleotide
atggggaaatagtctgga

SEQ ID NO: 6783 - DNA, 18 bp, Artificial Sequence
  Description of Artificial Sequence: Synthetic oligonucleotide
tttcaatggggaaatagt

SEQ ID NO: 6784 - DNA, 18 bp, Artificial Sequence
  Description of Artificial Sequence: Synthetic oligonucleotide
tcacgtttcaatggggaa

SEQ ID NO: 6785 - DNA, 18 bp, Artificial Sequence
  Description of Artificial Sequence: Synthetic oligonucleotide
atccctcacgtttcaatg

SEQ ID NO: 6786 - DNA, 18 bp, Artificial Sequence
  Description of Artificial Sequence: Synthetic oligonucleotide
cagccatccctcacgttt

SEQ ID NO: 6787 - DNA, 18 bp, Artificial Sequence
  Description of Artificial Sequence: Synthetic oligonucleotide
atgcccagccatccctca

SEQ ID NO: 6788 - DNA, 18 bp, Artificial Sequence
  Description of Artificial Sequence: Synthetic oligonucleotide
ccaccatgcccagccatc

SEQ ID NO: 6789 - DNA, 18 bp, Artificial Sequence
  Description of Artificial Sequence: Synthetic oligonucleotide
ataagccaccatgcccag

SEQ ID NO: 6790 - DNA, 18 bp, Artificial Sequence
  Description of Artificial Sequence: Synthetic oligonucleotide
agcatataagccaccatg

SEQ ID NO: 6791 - DNA, 18 bp, Artificial Sequence
  Description of Artificial Sequence: Synthetic oligonucleotide
ttgcaagcatataagcca

SEQ ID NO: 6792 - DNA, 18 bp, Artificial Sequence
  Description of Artificial Sequence: Synthetic oligonucleotide
tgggattgcaagcatata

SEQ ID NO: 6793 - DNA, 18 bp, Artificial Sequence
  Description of Artificial Sequence: Synthetic oligonucleotide
aatgctgggattgcaagc

SEQ ID NO: 6794 - DNA, 18 bp, Artificial Sequence
  Description of Artificial Sequence: Synthetic oligonucleotide
cctgaaatgctgggattg

SEQ ID NO: 6795 - DNA, 18 bp, Artificial Sequence
  Description of Artificial Sequence: Synthetic oligonucleotide
gacctcctgaaatgctgg

SEQ ID NO: 6796 - DNA, 18 bp, Artificial Sequence
  Description of Artificial Sequence: Synthetic oligonucleotide
acctcgacctcctgaaat

SEQ ID NO: 6797 - DNA, 18 bp, Artificial Sequence
  Description of Artificial Sequence: Synthetic oligonucleotide
ctctcacctcgacctcct

SEQ ID NO: 6798 - DNA, 18 bp, Artificial Sequence
  Description of Artificial Sequence: Synthetic oligonucleotide
tgatcctctcacctcgac

SEQ ID NO: 6799 - DNA, 18 bp, Artificial Sequence
  Description of Artificial Sequence: Synthetic oligonucleotide
tcaggtgatcctctcacc

SEQ ID NO: 6800 - DNA, 18 bp, Artificial Sequence
  Description of Artificial Sequence: Synthetic oligonucleotide
caatgagcacacgggaaa

SEQ ID NO: 6801 - DNA, 18 bp, Artificial Sequence
  Description of Artificial Sequence: Synthetic oligonucleotide
ctacacaatgagcacacg

SEQ ID NO: 6802 - DNA, 18 bp, Artificial Sequence
  Description of Artificial Sequence: Synthetic oligonucleotide
ggcacctacacaatgagc

SEQ ID NO: 6803 - DNA, 18 bp, Artificial Sequence
  Description of Artificial Sequence: Synthetic oligonucleotide
tctctggcacctacacaa

SEQ ID NO: 6804 - DNA, 18 bp, Artificial Sequence
  Description of Artificial Sequence: Synthetic oligonucleotide
gggtgtctctggcaccta

SEQ ID NO: 6805 - DNA, 18 bp, Artificial Sequence
  Description of Artificial Sequence: Synthetic oligonucleotide
ggcgggggtgtctctggc

SEQ ID NO: 6806 - DNA, 18 bp, Artificial Sequence
  Description of Artificial Sequence: Synthetic oligonucleotide
gatggggcgggggtgtct

SEQ ID NO: 6807 - DNA, 18 bp, Artificial Sequence
  Description of Artificial Sequence: Synthetic oligonucleotide
tctctgatggggcggggg

SEQ ID NO: 6808 - DNA, 18 bp, Artificial Sequence
  Description of Artificial Sequence: Synthetic oligonucleotide
attcctctctgatggggc

SEQ ID NO: 6809 - DNA, 18 bp, Artificial Sequence
  Description of Artificial Sequence: Synthetic oligonucleotide
ggtaaattcctctctgat

SEQ ID NO: 6810 - DNA, 18 bp, Artificial Sequence
  Description of Artificial Sequence: Synthetic oligonucleotide
ctggaggtaaattcctct

SEQ ID NO: 6811 - DNA, 18 bp, Artificial Sequence
  Description of Artificial Sequence: Synthetic oligonucleotide
aagctctggaggtaaatt

SEQ ID NO: 6812 - DNA, 18 bp, Artificial Sequence
  Description of Artificial Sequence: Synthetic oligonucleotide
ttaacaagctctggaggt

SEQ ID NO: 6813 - DNA, 18 bp, Artificial Sequence
  Description of Artificial Sequence: Synthetic oligonucleotide
ctgagttaacaagctctg

SEQ ID NO: 6814 - DNA, 18 bp, Artificial Sequence
  Description of Artificial Sequence: Synthetic oligonucleotide
gctccctgagttaacaag

SEQ ID NO: 6815 - DNA, 18 bp, Artificial Sequence
  Description of Artificial Sequence: Synthetic oligonucleotide
tttttgctccctgagtta

SEQ ID NO: 6816 - DNA, 18 bp, Artificial Sequence
  Description of Artificial Sequence: Synthetic oligonucleotide
tccagtttttgctccctg

SEQ ID NO: 6817 - DNA, 18 bp, Artificial Sequence
  Description of Artificial Sequence: Synthetic oligonucleotide
tttaatccagtttttgct

SEQ ID NO: 6818 - DNA, 18 bp, Artificial Sequence
  Description of Artificial Sequence: Synthetic oligonucleotide
gctgttttaatccagttt

SEQ ID NO: 6819 - DNA, 18 bp, Artificial Sequence
  Description of Artificial Sequence: Synthetic oligonucleotide
ccttggctgttttaatcc

SEQ ID NO: 6820 - DNA, 18 bp, Artificial Sequence
  Description of Artificial Sequence: Synthetic oligonucleotide
gcatgccttggctgtttt

SEQ ID NO: 6821 - DNA, 18 bp, Artificial Sequence
  Description of Artificial Sequence: Synthetic oligonucleotide
ctcttgcatgccttggct

SEQ ID NO: 6822 - DNA, 18 bp, Artificial Sequence
  Description of Artificial Sequence: Synthetic oligonucleotide
tctttctcttgcatgcct

SEQ ID NO: 6823 - DNA, 18 bp, Artificial Sequence
  Description of Artificial Sequence: Synthetic oligonucleotide
catgttctttctcttgca

SEQ ID NO: 6824 - DNA, 18 bp, Artificial Sequence
  Description of Artificial Sequence: Synthetic oligonucleotide
acttccatgttctttctc

SEQ ID NO: 6825 - DNA, 18 bp, Artificial Sequence
  Description of Artificial Sequence: Synthetic oligonucleotide
tggaaacttccatgttct

SEQ ID NO: 6826 - DNA, 18 bp, Artificial Sequence
  Description of Artificial Sequence: Synthetic oligonucleotide
ggccttggaaacttccat

SEQ ID NO: 6827 - DNA, 18 bp, Artificial Sequence
  Description of Artificial Sequence: Synthetic oligonucleotide
ccactggccttggaaact

SEQ ID NO: 6828 - DNA, 18 bp, Artificial Sequence
  Description of Artificial Sequence: Synthetic oligonucleotide
tgggtccactggccttgg

SEQ ID NO: 6829 - DNA, 18 bp, Artificial Sequence
  Description of Artificial Sequence: Synthetic oligonucleotide
ctgagtgggtccactggc

SEQ ID NO: 6830 - DNA, 18 bp, Artificial Sequence
  Description of Artificial Sequence: Synthetic oligonucleotide
ggattctgagtgggtcca

SEQ ID NO: 6831 - DNA, 18 bp, Artificial Sequence
  Description of Artificial Sequence: Synthetic oligonucleotide
ttctgggattctgagtgg

SEQ ID NO: 6832 - DNA, 18 bp, Artificial Sequence
  Description of Artificial Sequence: Synthetic oligonucleotide
ggttgttctgggattctg

SEQ ID NO: 6833 - DNA, 18 bp, Artificial Sequence
  Description of Artificial Sequence: Synthetic oligonucleotide
aaataggttgttctggga

SEQ ID NO: 6834 - DNA, 18 bp, Artificial Sequence
  Description of Artificial Sequence: Synthetic oligonucleotide
catggaaataggttgttc

SEQ ID NO: 6835 - DNA, 18 bp, Artificial Sequence
  Description of Artificial Sequence: Synthetic oligonucleotide
actcacatggaaataggt

SEQ ID NO: 6836 - DNA, 18 bp, Artificial Sequence
  Description of Artificial Sequence: Synthetic oligonucleotide
cccaaactcacatggaaa

SEQ ID NO: 6837 - DNA, 18 bp, Artificial Sequence
  Description of Artificial Sequence: Synthetic oligonucleotide
agcctcccaaactcacat

SEQ ID NO: 6838 - DNA, 18 bp, Artificial Sequence
  Description of Artificial Sequence: Synthetic oligonucleotide
atcacagcctcccaaact

SEQ ID NO: 6839 - DNA, 18 bp, Artificial Sequence
  Description of Artificial Sequence: Synthetic oligonucleotide
tggtaatcacagcctccc

SEQ ID NO: 6840 - DNA, 18 bp, Artificial Sequence
  Description of Artificial Sequence: Synthetic oligonucleotide
gtgtgtggtaatcacagc

SEQ ID NO: 6841 - DNA, 18 bp, Artificial Sequence
  Description of Artificial Sequence: Synthetic oligonucleotide
ggaatgtgtgtggtaatc

SEQ ID NO: 6842 - DNA, 18 bp, Artificial Sequence
  Description of Artificial Sequence: Synthetic oligonucleotide
gagtgggaatgtgtgtgg

SEQ ID NO: 6843 - DNA, 18 bp, Artificial Sequence
  Description of Artificial Sequence: Synthetic oligonucleotide
gctaggagtgggaatgtg

SEQ ID NO: 6844 - DNA, 18 bp, Artificial Sequence
  Description of Artificial Sequence: Synthetic oligonucleotide
ttttagctaggagtggga

SEQ ID NO: 6845 - DNA, 18 bp, Artificial Sequence
  Description of Artificial Sequence: Synthetic oligonucleotide
actgattttagctaggag

SEQ ID NO: 6846 - DNA, 18 bp, Artificial Sequence
  Description of Artificial Sequence: Synthetic oligonucleotide
taactactgattttagct

SEQ ID NO: 6847 - DNA, 18 bp, Artificial Sequence
  Description of Artificial Sequence: Synthetic oligonucleotide
gctgataactactgattt

SEQ ID NO: 6848 - DNA, 18 bp, Artificial Sequence
  Description of Artificial Sequence: Synthetic oligonucleotide
cacctgctgataactact

SEQ ID NO: 6849 - DNA, 18 bp, Artificial Sequence
  Description of Artificial Sequence: Synthetic oligonucleotide
gctaccacctgctgataa

SEQ ID NO: 6850 - DNA, 18 bp, Artificial Sequence
  Description of Artificial Sequence: Synthetic oligonucleotide
gaatagctaccacctgct

SEQ ID NO: 6851 - DNA, 18 bp, Artificial Sequence
  Description of Artificial Sequence: Synthetic oligonucleotide
gcactgaatagctaccac

SEQ ID NO: 6852 - DNA, 18 bp, Artificial Sequence
  Description of Artificial Sequence: Synthetic oligonucleotide
ccacggcactgaatagct

SEQ ID NO: 6853 - DNA, 18 bp, Artificial Sequence
  Description of Artificial Sequence: Synthetic oligonucleotide
gctgcccacggcactgaa

SEQ ID NO: 6854 - DNA, 18 bp, Artificial Sequence
  Description of Artificial Sequence: Synthetic oligonucleotide
agaaggctgcccacggca

SEQ ID NO: 6855 - DNA, 18 bp, Artificial Sequence
  Description of Artificial Sequence: Synthetic oligonucleotide
ttttaagaaggctgccca

SEQ ID NO: 6856 - DNA, 18 bp, Artificial Sequence
  Description of Artificial Sequence: Synthetic oligonucleotide
gactattttaagaaggct

SEQ ID NO: 6857 - DNA, 18 bp, Artificial Sequence
  Description of Artificial Sequence: Synthetic oligonucleotide
gagaagactattttaaga

SEQ ID NO: 6858 - DNA, 18 bp, Artificial Sequence
  Description of Artificial Sequence: Synthetic oligonucleotide
acccaccctcctcctccg

SEQ ID NO: 6859 - DNA, 18 bp, Artificial Sequence
  Description of Artificial Sequence: Synthetic oligonucleotide
tttgcacccaccctcctc

SEQ ID NO: 6860 - DNA, 18 bp, Artificial Sequence
  Description of Artificial Sequence: Synthetic oligonucleotide
tgccctttgcacccaccc

SEQ ID NO: 6861 - DNA, 18 bp, Artificial Sequence
  Description of Artificial Sequence: Synthetic oligonucleotide
gcccctgccctttgcacc

SEQ ID NO: 6862 - DNA, 18 bp, Artificial Sequence
  Description of Artificial Sequence: Synthetic oligonucleotide
ccccagcccctgcccttt

SEQ ID NO: 6863 - DNA, 18 bp, Artificial Sequence
  Description of Artificial Sequence: Synthetic oligonucleotide
ggcgtccccagcccctgc

SEQ ID NO: 6864 - DNA, 18 bp, Artificial Sequence
  Description of Artificial Sequence: Synthetic oligonucleotide
gcccgggcgtccccagcc

SEQ ID NO: 6865 - DNA, 18 bp, Artificial Sequence
  Description of Artificial Sequence: Synthetic oligonucleotide
gcagtgcccgggcgtccc

SEQ ID NO: 6866 - DNA, 18 bp, Artificial Sequence
  Description of Artificial Sequence: Synthetic oligonucleotide
agtctgcagtgcccgggc

SEQ ID NO: 6867 - DNA, 18 bp, Artificial Sequence
  Description of Artificial Sequence: Synthetic oligonucleotide
gaccaagtctgcagtgcc

SEQ ID NO: 6868 - DNA, 18 bp, Artificial Sequence
  Description of Artificial Sequence: Synthetic oligonucleotide
cctgagaccaagtctgca

SEQ ID NO: 6869 - DNA, 18 bp, Artificial Sequence
  Description of Artificial Sequence: Synthetic oligonucleotide
gtcgccctgagaccaagt

SEQ ID NO: 6870 - DNA, 18 bp, Artificial Sequence
  Description of Artificial Sequence: Synthetic oligonucleotide
tcagcgtcgccctgagac

SEQ ID NO: 6871 - DNA, 18 bp, Artificial Sequence
  Description of Artificial Sequence: Synthetic oligonucleotide
gggactcagcgtcgccct

SEQ ID NO: 6872 - DNA, 18 bp, Artificial Sequence
  Description of Artificial Sequence: Synthetic oligonucleotide
ggcctgggactcagcgtc

SEQ ID NO: 6873 - DNA, 18 bp, Artificial Sequence
  Description of Artificial Sequence: Synthetic oligonucleotide
ccccgggcctgggactca

SEQ ID NO: 6874 - DNA, 18 bp, Artificial Sequence
  Description of Artificial Sequence: Synthetic oligonucleotide
ctgcgccccgggcctggg

SEQ ID NO: 6875 - DNA, 18 bp, Artificial Sequence
  Description of Artificial Sequence: Synthetic oligonucleotide
catccctgcgccccgggc

SEQ ID NO: 6876 - DNA, 18 bp, Artificial Sequence
  Description of Artificial Sequence: Synthetic oligonucleotide
tttcccatccctgcgccc

SEQ ID NO: 6877 - DNA, 18 bp, Artificial Sequence
  Description of Artificial Sequence: Synthetic oligonucleotide
cctagtttcccatccctg

SEQ ID NO: 6878 - DNA, 18 bp, Artificial Sequence
  Description of Artificial Sequence: Synthetic oligonucleotide
caggccctagtttcccat

SEQ ID NO: 6879 - DNA, 18 bp, Artificial Sequence
  Description of Artificial Sequence: Synthetic oligonucleotide
cgccccaggccctagttt

SEQ ID NO: 6880 - DNA, 18 bp, Artificial Sequence
  Description of Artificial Sequence: Synthetic oligonucleotide
aatcccgccccaggccct

SEQ ID NO: 6881 - DNA, 18 bp, Artificial Sequence
  Description of Artificial Sequence: Synthetic oligonucleotide
cccggaatcccgccccag

SEQ ID NO: 6882 - DNA, 18 bp, Artificial Sequence
  Description of Artificial Sequence: Synthetic oligonucleotide
ccacgcccggaatcccgc

SEQ ID NO: 6883 - DNA, 18 bp, Artificial Sequence
  Description of Artificial Sequence: Synthetic oligonucleotide
cccgcccacgcccggaat

SEQ ID NO: 6884 - DNA, 18 bp, Artificial Sequence
  Description of Artificial Sequence: Synthetic oligonucleotide
cgggccccgcccacgccc

SEQ ID NO: 6885 - DNA, 18 bp, Artificial Sequence
  Description of Artificial Sequence: Synthetic oligonucleotide
cgccccgggccccgccca

SEQ ID NO: 6886 - DNA, 18 bp, Artificial Sequence
  Description of Artificial Sequence: Synthetic oligonucleotide
tgccccgccccgggcccc

SEQ ID NO: 6887 - DNA, 18 bp, Artificial Sequence
  Description of Artificial Sequence: Synthetic oligonucleotide
ccctgtgccccgccccgg

SEQ ID NO: 6888 - DNA, 18 bp, Artificial Sequence
  Description of Artificial Sequence: Synthetic oligonucleotide
ccgccccctgtgccccgc

SEQ ID NO: 6889 - DNA, 18 bp, Artificial Sequence
  Description of Artificial Sequence: Synthetic oligonucleotide
ctcccccgccccctgtgc

SEQ ID NO: 6890 - DNA, 18 bp, Artificial Sequence
  Description of Artificial Sequence: Synthetic oligonucleotide
gcccactcccccgccccc

SEQ ID NO: 6891 - DNA, 18 bp, Artificial Sequence
  Description of Artificial Sequence: Synthetic oligonucleotide
gccccgcccactcccccg

SEQ ID NO: 6892 - DNA, 18 bp, Artificial Sequence
  Description of Artificial Sequence: Synthetic oligonucleotide
ctcgggccccgcccactc

SEQ ID NO: 6893 - DNA, 18 bp, Artificial Sequence
  Description of Artificial Sequence: Synthetic oligonucleotide
ccggcctcgggccccgcc

SEQ ID NO: 6894 - DNA, 18 bp, Artificial Sequence
  Description of Artificial Sequence: Synthetic oligonucleotide
agcgcccggcctcgggcc

SEQ ID NO: 6895 - DNA, 18 bp, Artificial Sequence
  Description of Artificial Sequence: Synthetic oligonucleotide
cctccagcgcccggcctc

SEQ ID NO: 6896 - DNA, 18 bp, Artificial Sequence
  Description of Artificial Sequence: Synthetic oligonucleotide
cctcgcctccagcgcccg

SEQ ID NO: 6897 - DNA, 18 bp, Artificial Sequence
  Description of Artificial Sequence: Synthetic oligonucleotide
cccgccctcgcctccagc

SEQ ID NO: 6898 - DNA, 18 bp, Artificial Sequence
  Description of Artificial Sequence: Synthetic oligonucleotide
cctgccccgccctcgcct

SEQ ID NO: 6899 - DNA, 18 bp, Artificial Sequence
  Description of Artificial Sequence: Synthetic oligonucleotide
ccgtccctgccccgccct

SEQ ID NO: 6900 - DNA, 18 bp, Artificial Sequence
  Description of Artificial Sequence: Synthetic oligonucleotide
tggacccgtccctgcccc

SEQ ID NO: 6901 - DNA, 18 bp, Artificial Sequence
  Description of Artificial Sequence: Synthetic oligonucleotide
gcccttggacccgtccct

SEQ ID NO: 6902 - DNA, 18 bp, Artificial Sequence
  Description of Artificial Sequence: Synthetic oligonucleotide
ctcctgcccttggacccg

SEQ ID NO: 6903 - DNA, 18 bp, Artificial Sequence
  Description of Artificial Sequence: Synthetic oligonucleotide
ccagcctcctgcccttgg

SEQ ID NO: 6904 - DNA, 18 bp, Artificial Sequence
  Description of Artificial Sequence: Synthetic oligonucleotide
ctgtcccagcctcctgcc

SEQ ID NO: 6905 - DNA, 18 bp, Artificial Sequence
  Description of Artificial Sequence: Synthetic oligonucleotide
ccgtcctgtcccagcctc

SEQ ID NO: 6906 - DNA, 18 bp, Artificial Sequence
  Description of Artificial Sequence: Synthetic oligonucleotide
catccccgtcctgtccca

SEQ ID NO: 6907 - DNA, 18 bp, Artificial Sequence
  Description of Artificial Sequence: Synthetic oligonucleotide
ctttgcatccccgtcctg

SEQ ID NO: 6908 - DNA, 18 bp, Artificial Sequence
  Description of Artificial Sequence: Synthetic oligonucleotide
cctccctttgcatccccg

SEQ ID NO: 6909 - DNA, 18 bp, Artificial Sequence
  Description of Artificial Sequence: Synthetic oligonucleotide
ccgcccctccctttgcat

SEQ ID NO: 6910 - DNA, 18 bp, Artificial Sequence
  Description of Artificial Sequence: Synthetic oligonucleotide
gggccccgcccctccctt

SEQ ID NO: 6911 - DNA, 18 bp, Artificial Sequence
  Description of Artificial Sequence: Synthetic oligonucleotide
gtctcgggccccgcccct

SEQ ID NO: 6912 - DNA, 18 bp, Artificial Sequence
  Description of Artificial Sequence: Synthetic oligonucleotide
tccccgtctcgggccccg

SEQ ID NO: 6913 - DNA, 18 bp, Artificial Sequence
  Description of Artificial Sequence: Synthetic oligonucleotide
cctcctccccgtctcggg

SEQ ID NO: 6914 - DNA, 18 bp, Artificial Sequence
  Description of Artificial Sequence: Synthetic oligonucleotide
ctccccctcctccccgtc

SEQ ID NO: 6915 - DNA, 18 bp, Artificial Sequence
  Description of Artificial Sequence: Synthetic oligonucleotide
gggccctccccctcctcc

SEQ ID NO: 6916 - DNA, 18 bp, Artificial Sequence
  Description of Artificial Sequence: Synthetic oligonucleotide
cccttgggccctccccct

SEQ ID NO: 6917 - DNA, 18 bp, Artificial Sequence
  Description of Artificial Sequence: Synthetic oligonucleotide
tcctccccttgggccctc

SEQ ID NO: 6918 - DNA, 18 bp, Artificial Sequence
  Description of Artificial Sequence: Synthetic oligonucleotide
ccgcctcctccccttggg

SEQ ID NO: 6919 - DNA, 18 bp, Artificial Sequence
  Description of Artificial Sequence: Synthetic oligonucleotide
ggaccccgcctcctcccc

SEQ ID NO: 6920 - DNA, 18 bp, Artificial Sequence
  Description of Artificial Sequence: Synthetic oligonucleotide
cgtccggaccccgcctcc

SEQ ID NO: 6921 - DNA, 18 bp, Artificial Sequence
  Description of Artificial Sequence: Synthetic oligonucleotide
atccccgtccggaccccg

SEQ ID NO: 6922 - DNA, 18 bp, Artificial Sequence
  Description of Artificial Sequence: Synthetic oligonucleotide
ttggcatccccgtccgga

SEQ ID NO: 6923 - DNA, 18 bp, Artificial Sequence
  Description of Artificial Sequence: Synthetic oligonucleotide
tgctcttggcatccccgt

SEQ ID NO: 6924 - DNA, 18 bp, Artificial Sequence
  Description of Artificial Sequence: Synthetic oligonucleotide
atccctgctcttggcatc

SEQ ID NO: 6925 - DNA, 18 bp, Artificial Sequence
  Description of Artificial Sequence: Synthetic oligonucleotide
ctcccatccctgctcttg

SEQ ID NO: 6926 - DNA, 18 bp, Artificial Sequence
  Description of Artificial Sequence: Synthetic oligonucleotide
gctcgctcccatccctgc

SEQ ID NO: 6927 - DNA, 18 bp, Artificial Sequence
  Description of Artificial Sequence: Synthetic oligonucleotide
cgcaggctcgctcccatc

SEQ ID NO: 6928 - DNA, 18 bp, Artificial Sequence
  Description of Artificial Sequence: Synthetic oligonucleotide
ccggacgcaggctcgctc

SEQ ID NO: 6929 - DNA, 18 bp, Artificial Sequence
  Description of Artificial Sequence: Synthetic oligonucleotide
agtgcccggacgcaggct

SEQ ID NO: 6930 - DNA, 18 bp, Artificial Sequence
  Description of Artificial Sequence: Synthetic oligonucleotide
ggaccagtgcccggacgc

SEQ ID NO: 6931 - DNA, 18 bp, Artificial Sequence
  Description of Artificial Sequence: Synthetic oligonucleotide
gatggggaccagtgcccg

SEQ ID NO: 6932 - DNA, 18 bp, Artificial Sequence
  Description of Artificial Sequence: Synthetic oligonucleotide
tcacggatggggaccagt

SEQ ID NO: 6933 - DNA, 18 bp, Artificial Sequence
  Description of Artificial Sequence: Synthetic oligonucleotide
gggactcacggatgggga

SEQ ID NO: 6934 - DNA, 18 bp, Artificial Sequence
  Description of Artificial Sequence: Synthetic oligonucleotide
ccgaggggactcacggat

SEQ ID NO: 6935 - DNA, 18 bp, Artificial Sequence
  Description of Artificial Sequence: Synthetic oligonucleotide
gagcaccgaggggactca

SEQ ID NO: 6936 - DNA, 18 bp, Artificial Sequence
  Description of Artificial Sequence: Synthetic oligonucleotide
gcagggagcaccgagggg

SEQ ID NO: 6937 - DNA, 18 bp, Artificial Sequence
  Description of Artificial Sequence: Synthetic oligonucleotide
ggcgggcagggagcaccg

SEQ ID NO: 6938 - DNA, 18 bp, Artificial Sequence
  Description of Artificial Sequence: Synthetic oligonucleotide
gccacggcgggcagggag

SEQ ID NO: 6939 - DNA, 18 bp, Artificial Sequence
  Description of Artificial Sequence: Synthetic oligonucleotide
ggatggccacggcgggca

SEQ ID NO: 6940 - DNA, 18 bp, Artificial Sequence
  Description of Artificial Sequence: Synthetic oligonucleotide
tgagaggatggccacggc

SEQ ID NO: 6941 - DNA, 18 bp, Artificial Sequence
  Description of Artificial Sequence: Synthetic oligonucleotide
tgatgtgagaggatggcc

SEQ ID NO: 6942 - DNA, 18 bp, Artificial Sequence
  Description of Artificial Sequence: Synthetic oligonucleotide
gtgagtgatgtgagagga

SEQ ID NO: 6943 - DNA, 18 bp, Artificial Sequence
  Description of Artificial Sequence: Synthetic oligonucleotide
gggttgtgagtgatgtga

SEQ ID NO: 6944 - DNA, 18 bp, Artificial Sequence
  Description of Artificial Sequence: Synthetic oligonucleotide
ccttggggttgtgagtga

SEQ ID NO: 6945 - DNA, 18 bp, Artificial Sequence
  Description of Artificial Sequence: Synthetic oligonucleotide
ccgcgccttggggttgtg

SEQ ID NO: 6946 - DNA, 18 bp, Artificial Sequence
  Description of Artificial Sequence: Synthetic oligonucleotide
ccatgccgcgccttgggg

SEQ ID NO: 6947 - DNA, 18 bp, Artificial Sequence
  Description of Artificial Sequence: Synthetic oligonucleotide
gtcaaccatgccgcgcct

SEQ ID NO: 6948 - DNA, 18 bp, Artificial Sequence
  Description of Artificial Sequence: Synthetic oligonucleotide
ggggtgtcaaccatgccg

SEQ ID NO: 6949 - DNA, 18 bp, Artificial Sequence
  Description of Artificial Sequence: Synthetic oligonucleotide
acgtgggggtgtcaacca

SEQ ID NO: 6950 - DNA, 18 bp, Artificial Sequence
  Description of Artificial Sequence: Synthetic oligonucleotide
tcctaacgtgggggtgtc

SEQ ID NO: 6951 - DNA, 18 bp, Artificial Sequence
  Description of Artificial Sequence: Synthetic oligonucleotide
ctccgtcctaacgtgggg

SEQ ID NO: 6952 - DNA, 18 bp, Artificial Sequence
  Description of Artificial Sequence: Synthetic oligonucleotide
agggtctccgtcctaacg

SEQ ID NO: 6953 - DNA, 18 bp, Artificial Sequence
  Description of Artificial Sequence: Synthetic oligonucleotide
agcccagggtctccgtcc

SEQ ID NO: 6954 - DNA, 18 bp, Artificial Sequence
  Description of Artificial Sequence: Synthetic oligonucleotide
aactaagcccagggtctc

SEQ ID NO: 6955 - DNA, 18 bp, Artificial Sequence
  Description of Artificial Sequence: Synthetic oligonucleotide
ccgcgcccctcccggaca

SEQ ID NO: 6956 - DNA, 18 bp, Artificial Sequence
  Description of Artificial Sequence: Synthetic oligonucleotide
ccggcccgcgcccctccc

SEQ ID NO: 6957 - DNA, 18 bp, Artificial Sequence
  Description of Artificial Sequence: Synthetic oligonucleotide
ccggtccggcccgcgccc

SEQ ID NO: 6958 - DNA, 18 bp, Artificial Sequence
  Description of Artificial Sequence: Synthetic oligonucleotide
cggttccggtccggcccg

SEQ ID NO: 6959 - DNA, 18 bp, Artificial Sequence
  Description of Artificial Sequence: Synthetic oligonucleotide
ggttccggttccggtccg

SEQ ID NO: 6960 - DNA, 18 bp, Artificial Sequence
  Description of Artificial Sequence: Synthetic oligonucleotide
cccccggttccggttccg

SEQ ID NO: 6961 - DNA, 18 bp, Artificial Sequence
  Description of Artificial Sequence: Synthetic oligonucleotide
tcgtgcccccggttccgg

SEQ ID NO: 6962 - DNA, 18 bp, Artificial Sequence
  Description of Artificial Sequence: Synthetic oligonucleotide
ccgcctcgtgcccccggt

SEQ ID NO: 6963 - DNA, 18 bp, Artificial Sequence
  Description of Artificial Sequence: Synthetic oligonucleotide
ggggcccgcctcgtgccc

SEQ ID NO: 6964 - DNA, 18 bp, Artificial Sequence
  Description of Artificial Sequence: Synthetic oligonucleotide
gggaaggggcccgcctcg

SEQ ID NO: 6965 - DNA, 18 bp, Artificial Sequence
  Description of Artificial Sequence: Synthetic oligonucleotide
ccgccgggaaggggcccg

SEQ ID NO: 6966 - DNA, 18 bp, Artificial Sequence
  Description of Artificial Sequence: Synthetic oligonucleotide
cgcccccgccgggaaggg

SEQ ID NO: 6967 - DNA, 18 bp, Artificial Sequence
  Description of Artificial Sequence: Synthetic oligonucleotide
taccccgcccccgccggg

SEQ ID NO: 6968 - DNA, 18 bp, Artificial Sequence
  Description of Artificial Sequence: Synthetic oligonucleotide
acccgtaccccgcccccg

SEQ ID NO: 6969 - DNA, 18 bp, Artificial Sequence
  Description of Artificial Sequence: Synthetic oligonucleotide
gggcgacccgtaccccgc

SEQ ID NO: 6970 - DNA, 18 bp, Artificial Sequence
  Description of Artificial Sequence: Synthetic oligonucleotide
ggagggggcgacccgtac

SEQ ID NO: 6971 - DNA, 18 bp, Artificial Sequence
  Description of Artificial Sequence: Synthetic oligonucleotide
cgtgaggagggggcgacc

SEQ ID NO: 6972 - DNA, 18 bp, Artificial Sequence
  Description of Artificial Sequence: Synthetic oligonucleotide
cggggcgtgaggaggggg

SEQ ID NO: 6973 - DNA, 18 bp, Artificial Sequence
  Description of Artificial Sequence: Synthetic oligonucleotide
gggggcggggcgtgagga

SEQ ID NO: 6974 - DNA, 18 bp, Artificial Sequence
  Description of Artificial Sequence: Synthetic oligonucleotide
gggccgggggcggggcgt

SEQ ID NO: 6975 - DNA, 18 bp, Artificial Sequence
  Description of Artificial Sequence: Synthetic oligonucleotide
ctcccgggccgggggcgg

SEQ ID NO: 6976 - DNA, 18 bp, Artificial Sequence
  Description of Artificial Sequence: Synthetic oligonucleotide
cgcccctcccgggccggg

SEQ ID NO: 6977 - DNA, 18 bp, Artificial Sequence
  Description of Artificial Sequence: Synthetic oligonucleotide
gacaccgcccctcccggg

SEQ ID NO: 6978 - DNA, 18 bp, Artificial Sequence
  Description of Artificial Sequence: Synthetic oligonucleotide
ctgaggacaccgcccctc

SEQ ID NO: 6979 - DNA, 18 bp, Artificial Sequence
  Description of Artificial Sequence: Synthetic oligonucleotide
gccgactgaggacaccgc

SEQ ID NO: 6980 - DNA, 18 bp, Artificial Sequence
  Description of Artificial Sequence: Synthetic oligonucleotide
gaggggccgactgaggac

SEQ ID NO: 6981 - DNA, 18 bp, Artificial Sequence
  Description of Artificial Sequence: Synthetic oligonucleotide
ggtctgaggggccgactg

SEQ ID NO: 6982 - DNA, 18 bp, Artificial Sequence
  Description of Artificial Sequence: Synthetic oligonucleotide
tccagggtctgaggggcc

SEQ ID NO: 6983 - DNA, 18 bp, Artificial Sequence
  Description of Artificial Sequence: Synthetic oligonucleotide
atcgctccagggtctgag

SEQ ID NO: 6984 - DNA, 18 bp, Artificial Sequence
  Description of Artificial Sequence: Synthetic oligonucleotide
cctccatcgctccagggt

SEQ ID NO: 6985 - DNA, 18 bp, Artificial Sequence
  Description of Artificial Sequence: Synthetic oligonucleotide
ggggtcctccatcgctcc

SEQ ID NO: 6986 - DNA, 18 bp, Artificial Sequence
  Description of Artificial Sequence: Synthetic oligonucleotide
gggccggggtcctccatc

SEQ ID NO: 6987 - DNA, 18 bp, Artificial Sequence
  Description of Artificial Sequence: Synthetic oligonucleotide
cgccggggccggggtcct

SEQ ID NO: 6988 - DNA, 18 bp, Artificial Sequence
  Description of Artificial Sequence: Synthetic oligonucleotide
gaccgcgccggggccggg

SEQ ID NO: 6989 - DNA, 18 bp, Artificial Sequence
  Description of Artificial Sequence: Synthetic oligonucleotide
cgctggaccgcgccgggg

SEQ ID NO: 6990 - DNA, 18 bp, Artificial Sequence
  Description of Artificial Sequence: Synthetic oligonucleotide
cccaccgctggaccgcgc

SEQ ID NO: 6991 - DNA, 18 bp, Artificial Sequence
  Description of Artificial Sequence: Synthetic oligonucleotide
ccgctcccaccgctggac

SEQ ID NO: 6992 - DNA, 18 bp, Artificial Sequence
  Description of Artificial Sequence: Synthetic oligonucleotide
ggcgcccgctcccaccgc

SEQ ID NO: 6993 - DNA, 18 bp, Artificial Sequence
  Description of Artificial Sequence: Synthetic oligonucleotide
tgggcggcgcccgctccc

SEQ ID NO: 6994 - DNA, 18 bp, Artificial Sequence
  Description of Artificial Sequence: Synthetic oligonucleotide
acaggtgggcggcgcccg

SEQ ID NO: 6995 - DNA, 18 bp, Artificial Sequence
  Description of Artificial Sequence: Synthetic oligonucleotide
atccgacaggtgggcggc

SEQ ID NO: 6996 - DNA, 18 bp, Artificial Sequence
  Description of Artificial Sequence: Synthetic oligonucleotide
cagggatccgacaggtgg

SEQ ID NO: 6997 - DNA, 18 bp, Artificial Sequence
  Description of Artificial Sequence: Synthetic oligonucleotide
tggcccagggatccgaca

SEQ ID NO: 6998 - DNA, 18 bp, Artificial Sequence
  Description of Artificial Sequence: Synthetic oligonucleotide
ggtcatggcccagggatc

SEQ ID NO: 6999 - DNA, 18 bp, Artificial Sequence
  Description of Artificial Sequence: Synthetic oligonucleotide
ccaggggtcatggcccag

SEQ ID NO: 7000 - DNA, 18 bp, Artificial Sequence
  Description of Artificial Sequence: Synthetic oligonucleotide
ccgtcccaggggtcatgg

SEQ ID NO: 7001 - DNA, 18 bp, Artificial Sequence
  Description of Artificial Sequence: Synthetic oligonucleotide
actcgccgtcccaggggt

SEQ ID NO: 7002 - DNA, 18 bp, Artificial Sequence
  Description of Artificial Sequence: Synthetic oligonucleotide
agctcactcgccgtccca

SEQ ID NO: 7003 - DNA, 18 bp, Artificial Sequence
  Description of Artificial Sequence: Synthetic oligonucleotide
ggcgcagctcactcgccg

SEQ ID NO: 7004 - DNA, 18 bp, Artificial Sequence
  Description of Artificial Sequence: Synthetic oligonucleotide
ttcccggcgcagctcact

SEQ ID NO: 7005 - DNA, 18 bp, Artificial Sequence
  Description of Artificial Sequence: Synthetic oligonucleotide
gggggttcccggcgcagc

SEQ ID NO: 7006 - DNA, 18 bp, Artificial Sequence
  Description of Artificial Sequence: Synthetic oligonucleotide
gtcccgggggttcccggc

SEQ ID NO: 7007 - DNA, 18 bp, Artificial Sequence
  Description of Artificial Sequence: Synthetic oligonucleotide
tctccgtcccgggggttc

SEQ ID NO: 7008 - DNA, 18 bp, Artificial Sequence
  Description of Artificial Sequence: Synthetic oligonucleotide
tgctctctccgtcccggg

SEQ ID NO: 7009 - DNA, 18 bp, Artificial Sequence
  Description of Artificial Sequence: Synthetic oligonucleotide
gaggctgctctctccgtc

SEQ ID NO: 7010 - DNA, 18 bp, Artificial Sequence
  Description of Artificial Sequence: Synthetic oligonucleotide
ggttggaggctgctctct

SEQ ID NO: 7011 - DNA, 18 bp, Artificial Sequence
  Description of Artificial Sequence: Synthetic oligonucleotide
ttgggggttggaggctgc

SEQ ID NO: 7012 - DNA, 18 bp, Artificial Sequence
  Description of Artificial Sequence: Synthetic oligonucleotide
gagccttgggggttggag

SEQ ID NO: 7013 - DNA, 18 bp, Artificial Sequence
  Description of Artificial Sequence: Synthetic oligonucleotide
aatgtgagccttgggggt

SEQ ID NO: 7014 - DNA, 18 bp, Artificial Sequence
  Description of Artificial Sequence: Synthetic oligonucleotide
gaagcaatgtgagccttg

SEQ ID NO: 7015 - DNA, 18 bp, Artificial Sequence
  Description of Artificial Sequence: Synthetic oligonucleotide
tccgtgaagcaatgtgag

SEQ ID NO: 7016 - DNA, 18 bp, Artificial Sequence
  Description of Artificial Sequence: Synthetic oligonucleotide
gctactccgtgaagcaat

SEQ ID NO: 7017 - DNA, 18 bp, Artificial Sequence
  Description of Artificial Sequence: Synthetic oligonucleotide
gggccgctactccgtgaa

SEQ ID NO: 7018 - DNA, 18 bp, Artificial Sequence
  Description of Artificial Sequence: Synthetic oligonucleotide
tccccgggccgctactcc

SEQ ID NO: 7019 - DNA, 18 bp, Artificial Sequence
  Description of Artificial Sequence: Synthetic oligonucleotide
ctccttccccgggccgct

SEQ ID NO: 7020 - DNA, 18 bp, Artificial Sequence
  Description of Artificial Sequence: Synthetic oligonucleotide
gcgtgctccttccccggg

SEQ ID NO: 7021 - DNA, 18 bp, Artificial Sequence
  Description of Artificial Sequence: Synthetic oligonucleotide
cgctcgcgtgctccttcc

SEQ ID NO: 7022 - DNA, 18 bp, Artificial Sequence
  Description of Artificial Sequence: Synthetic oligonucleotide
ggaaccgctcgcgtgctc

SEQ ID NO: 7023 - DNA, 18 bp, Artificial Sequence
  Description of Artificial Sequence: Synthetic oligonucleotide
cccggggaaccgctcgcg

SEQ ID NO: 7024 - DNA, 18 bp, Artificial Sequence
  Description of Artificial Sequence: Synthetic oligonucleotide
gcaaccccggggaaccgc

SEQ ID NO: 7025 - DNA, 18 bp, Artificial Sequence
  Description of Artificial Sequence: Synthetic oligonucleotide
aagctgacacatctgtct

SEQ ID NO: 7026 - DNA, 18 bp, Artificial Sequence
  Description of Artificial Sequence: Synthetic oligonucleotide
acttaaagctgacacatc

SEQ ID NO: 7027 - DNA, 18 bp, Artificial Sequence
  Description of Artificial Sequence: Synthetic oligonucleotide
taaaaacttaaagctgac

SEQ ID NO: 7028 - DNA, 18 bp, Artificial Sequence
  Description of Artificial Sequence: Synthetic oligonucleotide
gcaagtaaaaacttaaag

SEQ ID NO: 7029 - DNA, 18 bp, Artificial Sequence
  Description of Artificial Sequence: Synthetic oligonucleotide
tcaccgcaagtaaaaact

SEQ ID NO: 7030 - DNA, 18 bp, Artificial Sequence
  Description of Artificial Sequence: Synthetic oligonucleotide
acctctcaccgcaagtaa

SEQ ID NO: 7031 - DNA, 18 bp, Artificial Sequence
  Description of Artificial Sequence: Synthetic oligonucleotide
ccaccacctctcaccgca

SEQ ID NO: 7032 - DNA, 18 bp, Artificial Sequence
  Description of Artificial Sequence: Synthetic oligonucleotide
gattcccaccacctctca

SEQ ID NO: 7033 - DNA, 18 bp, Artificial Sequence
  Description of Artificial Sequence: Synthetic oligonucleotide
gataagattcccaccacc

SEQ ID NO: 7034 - DNA, 18 bp, Artificial Sequence
  Description of Artificial Sequence: Synthetic oligonucleotide
tatgggataagattccca

SEQ ID NO: 7035 - DNA, 18 bp, Artificial Sequence
  Description of Artificial Sequence: Synthetic oligonucleotide
ttatctatgggataagat

SEQ ID NO: 7036 - DNA, 18 bp, Artificial Sequence
  Description of Artificial Sequence: Synthetic oligonucleotide
cttagttatctatgggat

SEQ ID NO: 7037 - DNA, 18 bp, Artificial Sequence
  Description of Artificial Sequence: Synthetic oligonucleotide
gtatccttagttatctat

SEQ ID NO: 7038 - DNA, 18 bp, Artificial Sequence
  Description of Artificial Sequence: Synthetic oligonucleotide
ggcaagtatccttagtta

SEQ ID NO: 7039 - DNA, 18 bp, Artificial Sequence
  Description of Artificial Sequence: Synthetic oligonucleotide
tcctaggcaagtatcctt

SEQ ID NO: 7040 - DNA, 18 bp, Artificial Sequence
  Description of Artificial Sequence: Synthetic oligonucleotide
tccattcctaggcaagta

SEQ ID NO: 7041 - DNA, 18 bp, Artificial Sequence
  Description of Artificial Sequence: Synthetic oligonucleotide
tgtcctccattcctaggc

SEQ ID NO: 7042 - DNA, 18 bp, Artificial Sequence
  Description of Artificial Sequence: Synthetic oligonucleotide
tcctgtgtcctccattcc

SEQ ID NO: 7043 - DNA, 18 bp, Artificial Sequence
  Description of Artificial Sequence: Synthetic oligonucleotide
aaatgtcctgtgtcctcc

SEQ ID NO: 7044 - DNA, 18 bp, Artificial Sequence
  Description of Artificial Sequence: Synthetic oligonucleotide
attacaaatgtcctgtgt

SEQ ID NO: 7045 - DNA, 18 bp, Artificial Sequence
  Description of Artificial Sequence: Synthetic oligonucleotide
aagaaattacaaatgtcc

SEQ ID NO: 7046 - DNA, 18 bp, Artificial Sequence
  Description of Artificial Sequence: Synthetic oligonucleotide
gaaggaagaaattacaaa

SEQ ID NO: 7047 - DNA, 18 bp, Artificial Sequence
  Description of Artificial Sequence: Synthetic oligonucleotide
agagagaaggaagaaatt

SEQ ID NO: 7048 - DNA, 18 bp, Artificial Sequence
  Description of Artificial Sequence: Synthetic oligonucleotide
ataaaagagagaaggaag

SEQ ID NO: 7049 - DNA, 18 bp, Artificial Sequence
  Description of Artificial Sequence: Synthetic oligonucleotide
ggaggataaaagagagaa

SEQ ID NO: 7050 - DNA, 18 bp, Artificial Sequence
  Description of Artificial Sequence: Synthetic oligonucleotide
caaagggaggataaaaga

SEQ ID NO: 7051 - DNA, 18 bp, Artificial Sequence
  Description of Artificial Sequence: Synthetic oligonucleotide
gagtacaaagggaggata

SEQ ID NO: 7052 - DNA, 18 bp, Artificial Sequence
  Description of Artificial Sequence: Synthetic oligonucleotide
ttcaagttccaagtcctc

SEQ ID NO: 7053 - DNA, 18 bp, Artificial Sequence
  Description of Artificial Sequence: Synthetic oligonucleotide
gcagtttcaagttccaag

SEQ ID NO: 7054 - DNA, 18 bp, Artificial Sequence
  Description of Artificial Sequence: Synthetic oligonucleotide
agtttgcagtttcaagtt

SEQ ID NO: 7055 - DNA, 18 bp, Artificial Sequence
  Description of Artificial Sequence: Synthetic oligonucleotide
ccaaaagtttgcagtttc

SEQ ID NO: 7056 - DNA, 18 bp, Artificial Sequence
  Description of Artificial Sequence: Synthetic oligonucleotide
ggatgccaaaagtttgca

SEQ ID NO: 7057 - DNA, 18 bp, Artificial Sequence
  Description of Artificial Sequence: Synthetic oligonucleotide
gggaaggatgccaaaagt

SEQ ID NO: 7058 - DNA, 18 bp, Artificial Sequence
  Description of Artificial Sequence: Synthetic oligonucleotide
catctgggaaggatgcca

SEQ ID NO: 7059 - DNA, 18 bp, Artificial Sequence
  Description of Artificial Sequence: Synthetic oligonucleotide
ctttgcatctgggaagga

SEQ ID NO: 7060 - DNA, 18 bp, Artificial Sequence
  Description of Artificial Sequence: Synthetic oligonucleotide
caactctttgcatctggg

SEQ ID NO: 7061 - DNA, 18 bp, Artificial Sequence
  Description of Artificial Sequence: Synthetic oligonucleotide
ctggtcaactctttgcat

SEQ ID NO: 7062 - DNA, 18 bp, Artificial Sequence
  Description of Artificial Sequence: Synthetic oligonucleotide
taaaactggtcaactctt

SEQ ID NO: 7063 - DNA, 18 bp, Artificial Sequence
  Description of Artificial Sequence: Synthetic oligonucleotide
ggcgataaaactggtcaa

SEQ ID NO: 7064 - DNA, 18 bp, Artificial Sequence
  Description of Artificial Sequence: Synthetic oligonucleotide
acgaaggcgataaaactg

SEQ ID NO: 7065 - DNA, 18 bp, Artificial Sequence
  Description of Artificial Sequence: Synthetic oligonucleotide
agtaaacgaaggcgataa

SEQ ID NO: 7066 - DNA, 18 bp, Artificial Sequence
  Description of Artificial Sequence: Synthetic oligonucleotide
agagaagtaaacgaaggc

SEQ ID NO: 7067 - DNA, 18 bp, Artificial Sequence
  Description of Artificial Sequence: Synthetic oligonucleotide
agacgagagaagtaaacg

SEQ ID NO: 7068 - DNA, 18 bp, Artificial Sequence
  Description of Artificial Sequence: Synthetic oligonucleotide
aacgaagacgagagaagt

SEQ ID NO: 7069 - DNA, 18 bp, Artificial Sequence
  Description of Artificial Sequence: Synthetic oligonucleotide
gtggtaacgaagacgaga

SEQ ID NO: 7070 - DNA, 18 bp, Artificial Sequence
  Description of Artificial Sequence: Synthetic oligonucleotide
taacagtggtaacgaaga

SEQ ID NO: 7071 - DNA, 18 bp, Artificial Sequence
  Description of Artificial Sequence: Synthetic oligonucleotide
ccgattaacagtggtaac

SEQ ID NO: 7072 - DNA, 18 bp, Artificial Sequence
  Description of Artificial Sequence: Synthetic oligonucleotide
aagtgccgattaacagtg

SEQ ID NO: 7073 - DNA, 18 bp, Artificial Sequence
  Description of Artificial Sequence: Synthetic oligonucleotide
ctcctaagtgccgattaa

SEQ ID NO: 7074 - DNA, 18 bp, Artificial Sequence
  Description of Artificial Sequence: Synthetic oligonucleotide
aatacctcctaagtgccg

SEQ ID NO: 7075 - DNA, 18 bp, Artificial Sequence
  Description of Artificial Sequence: Synthetic oligonucleotide
caatcaatacctcctaag

SEQ ID NO: 7076 - DNA, 18 bp, Artificial Sequence
  Description of Artificial Sequence: Synthetic oligonucleotide
caaggcaatcaatacctc

SEQ ID NO: 7077 - DNA, 18 bp, Artificial Sequence
  Description of Artificial Sequence: Synthetic oligonucleotide
aataacaaggcaatcaat

SEQ ID NO: 7078 - DNA, 18 bp, Artificial Sequence
  Description of Artificial Sequence: Synthetic oligonucleotide
atgtaaataacaaggcaa

SEQ ID NO: 7079 - DNA, 18 bp, Artificial Sequence
  Description of Artificial Sequence: Synthetic oligonucleotide
tagaaatgtaaataacaa

SEQ ID NO: 7080 - DNA, 18 bp, Artificial Sequence
  Description of Artificial Sequence: Synthetic oligonucleotide
ttatatagaaatgtaaat

SEQ ID NO: 7081 - DNA, 18 bp, Artificial Sequence
  Description of Artificial Sequence: Synthetic oligonucleotide
catatttatatagaaatg

SEQ ID NO: 7082 - DNA, 18 bp, Artificial Sequence
  Description of Artificial Sequence: Synthetic oligonucleotide
catttcatatttatatag

SEQ ID NO: 7083 - DNA, 18 bp, Artificial Sequence
  Description of Artificial Sequence: Synthetic oligonucleotide
gtttacatttcatattta

SEQ ID NO: 7084 - DNA, 18 bp, Artificial Sequence
  Description of Artificial Sequence: Synthetic oligonucleotide
tcggggtttacatttcat

SEQ ID NO: 7085 - DNA, 18 bp, Artificial Sequence
  Description of Artificial Sequence: Synthetic oligonucleotide
atgtctcggggtttacat

SEQ ID NO: 7086 - DNA, 18 bp, Artificial Sequence
  Description of Artificial Sequence: Synthetic oligonucleotide
cttttatgtctcggggtt

SEQ ID NO: 7087 - DNA, 18 bp, Artificial Sequence
  Description of Artificial Sequence: Synthetic oligonucleotide
cacaacttttatgtctcg

SEQ ID NO: 7088 - DNA, 18 bp, Artificial Sequence
  Description of Artificial Sequence: Synthetic oligonucleotide
gcgtgcacaacttttatg

SEQ ID NO: 7089 - DNA, 18 bp, Artificial Sequence
  Description of Artificial Sequence: Synthetic oligonucleotide
ctgctgcgtgcacaactt

SEQ ID NO: 7090 - DNA, 18 bp, Artificial Sequence
  Description of Artificial Sequence: Synthetic oligonucleotide
cttaactgctgcgtgcac

SEQ ID NO: 7091 - DNA, 18 bp, Artificial Sequence
  Description of Artificial Sequence: Synthetic oligonucleotide
tgccacttaactgctgcg

SEQ ID NO: 7092 - DNA, 18 bp, Artificial Sequence
  Description of Artificial Sequence: Synthetic oligonucleotide
agtcatgccacttaactg

SEQ ID NO: 7093 - DNA, 18 bp, Artificial Sequence
  Description of Artificial Sequence: Synthetic oligonucleotide
gtctcagtcatgccactt

SEQ ID NO: 7094 - DNA, 18 bp, Artificial Sequence
  Description of Artificial Sequence: Synthetic oligonucleotide
tttgtgtctcagtcatgc

SEQ ID NO: 7095 - DNA, 18 bp, Artificial Sequence
  Description of Artificial Sequence: Synthetic oligonucleotide
ctagatttgtgtctcagt

SEQ ID NO: 7096 - DNA, 18 bp, Artificial Sequence
  Description of Artificial Sequence: Synthetic oligonucleotide
gaagcctagatttgtgtc

SEQ ID NO: 7097 - DNA, 18 bp, Artificial Sequence
  Description of Artificial Sequence: Synthetic oligonucleotide
ggactcccgcgcccagta

SEQ ID NO: 7098 - DNA, 18 bp, Artificial Sequence
  Description of Artificial Sequence: Synthetic oligonucleotide
cctgaggactcccgcgcc

SEQ ID NO: 7099 - DNA, 18 bp, Artificial Sequence
  Description of Artificial Sequence: Synthetic oligonucleotide
caagtcctgaggactccc

SEQ ID NO: 7100 - DNA, 18 bp, Artificial Sequence
  Description of Artificial Sequence: Synthetic oligonucleotide
agcttcaagtcctgagga

SEQ ID NO: 7101 - DNA, 18 bp, Artificial Sequence
  Description of Artificial Sequence: Synthetic oligonucleotide
ctgacagcttcaagtcct

SEQ ID NO: 7102 - DNA, 18 bp, Artificial Sequence
  Description of Artificial Sequence: Synthetic oligonucleotide
ctgacctgacagcttcaa

SEQ ID NO: 7103 - DNA, 18 bp, Artificial Sequence
  Description of Artificial Sequence: Synthetic oligonucleotide
cccctctgacctgacagc

SEQ ID NO: 7104 - DNA, 18 bp, Artificial Sequence
  Description of Artificial Sequence: Synthetic oligonucleotide
gacgccccctctgacctg

SEQ ID NO: 7105 - DNA, 18 bp, Artificial Sequence
  Description of Artificial Sequence: Synthetic oligonucleotide
aggtggacgccccctctg

SEQ ID NO: 7106 - DNA, 18 bp, Artificial Sequence
  Description of Artificial Sequence: Synthetic oligonucleotide
cttaaaggtggacgcccc

SEQ ID NO: 7107 - DNA, 18 bp, Artificial Sequence
  Description of Artificial Sequence: Synthetic oligonucleotide
atggtcttaaaggtggac

SEQ ID NO: 7108 - DNA, 18 bp, Artificial Sequence
  Description of Artificial Sequence: Synthetic oligonucleotide
aaaacatggtcttaaagg

SEQ ID NO: 7109 - DNA, 18 bp, Artificial Sequence
  Description of Artificial Sequence: Synthetic oligonucleotide
gggttaaaacatggtctt

SEQ ID NO: 7110 - DNA, 18 bp, Artificial Sequence
  Description of Artificial Sequence: Synthetic oligonucleotide
cattagggttaaaacatg

SEQ ID NO: 7111 - DNA, 18 bp, Artificial Sequence
  Description of Artificial Sequence: Synthetic oligonucleotide
tcattcattagggttaaa

SEQ ID NO: 7112 - DNA, 18 bp, Artificial Sequence
  Description of Artificial Sequence: Synthetic oligonucleotide
tgccttcattcattaggg

SEQ ID NO: 7113 - DNA, 18 bp, Artificial Sequence
  Description of Artificial Sequence: Synthetic oligonucleotide
gcttgtgccttcattcat

SEQ ID NO: 7114 - DNA, 18 bp, Artificial Sequence
  Description of Artificial Sequence: Synthetic oligonucleotide
gggctgcttgtgccttca

SEQ ID NO: 7115 - DNA, 18 bp, Artificial Sequence
  Description of Artificial Sequence: Synthetic oligonucleotide
ttcaggggctgcttgtgc

SEQ ID NO: 7116 - DNA, 18 bp, Artificial Sequence
  Description of Artificial Sequence: Synthetic oligonucleotide
cgagtttcaggggctgct

SEQ ID NO: 7117 - DNA, 18 bp, Artificial Sequence
  Description of Artificial Sequence: Synthetic oligonucleotide
atacacgagtttcagggg

SEQ ID NO: 7118 - DNA, 18 bp, Artificial Sequence
  Description of Artificial Sequence: Synthetic oligonucleotide
tctgaatacacgagtttc

SEQ ID NO: 7119 - DNA, 18 bp, Artificial Sequence
  Description of Artificial Sequence: Synthetic oligonucleotide
ctctctctgaatacacga

SEQ ID NO: 7120 - DNA, 18 bp, Artificial Sequence
  Description of Artificial Sequence: Synthetic oligonucleotide
aacaactctctctgaata

SEQ ID NO: 7121 - DNA, 18 bp, Artificial Sequence
  Description of Artificial Sequence: Synthetic oligonucleotide
gaaagaacaactctctct

SEQ ID NO: 7122 - DNA, 18 bp, Artificial Sequence
  Description of Artificial Sequence: Synthetic oligonucleotide
ggccagaaagaacaactc

SEQ ID NO: 7123 - DNA, 18 bp, Artificial Sequence
  Description of Artificial Sequence: Synthetic oligonucleotide
catatggccagaaagaac

SEQ ID NO: 7124 - DNA, 18 bp, Artificial Sequence
  Description of Artificial Sequence: Synthetic oligonucleotide
ccctccatatggccagaa

SEQ ID NO: 7125 - DNA, 18 bp, Artificial Sequence
  Description of Artificial Sequence: Synthetic oligonucleotide
acttgggaagggggaggc

SEQ ID NO: 7126 - DNA, 18 bp, Artificial Sequence
  Description of Artificial Sequence: Synthetic oligonucleotide
aatggacttgggaagggg

SEQ ID NO: 7127 - DNA, 18 bp, Artificial Sequence
  Description of Artificial Sequence: Synthetic oligonucleotide
gtgggaatggacttggga

SEQ ID NO: 7128 - DNA, 18 bp, Artificial Sequence
  Description of Artificial Sequence: Synthetic oligonucleotide
ctacagtgggaatggact

SEQ ID NO: 7129 - DNA, 18 bp, Artificial Sequence
  Description of Artificial Sequence: Synthetic oligonucleotide
tcggcctacagtgggaat

SEQ ID NO: 7130 - DNA, 18 bp, Artificial Sequence
  Description of Artificial Sequence: Synthetic oligonucleotide
aggcatcggcctacagtg

SEQ ID NO: 7131 - DNA, 18 bp, Artificial Sequence
  Description of Artificial Sequence: Synthetic oligonucleotide
tgcacaggcatcggccta

SEQ ID NO: 7132 - DNA, 18 bp, Artificial Sequence
  Description of Artificial Sequence: Synthetic oligonucleotide
tcctttgcacaggcatcg

SEQ ID NO: 7133 - DNA, 18 bp, Artificial Sequence
  Description of Artificial Sequence: Synthetic oligonucleotide
ctgcgtcctttgcacagg

SEQ ID NO: 7134 - DNA, 18 bp, Artificial Sequence
  Description of Artificial Sequence: Synthetic oligonucleotide
tggcactgcgtcctttgc

SEQ ID NO: 7135 - DNA, 18 bp, Artificial Sequence
  Description of Artificial Sequence: Synthetic oligonucleotide
tgatatggcactgcgtcc

SEQ ID NO: 7136 - DNA, 18 bp, Artificial Sequence
  Description of Artificial Sequence: Synthetic oligonucleotide
ctctctgatatggcactg

SEQ ID NO: 7137 - DNA, 18 bp, Artificial Sequence
  Description of Artificial Sequence: Synthetic oligonucleotide
ggatcctctctgatatgg

SEQ ID NO: 7138 - DNA, 18 bp, Artificial Sequence
  Description of Artificial Sequence: Synthetic oligonucleotide
ttcaaggatcctctctga

SEQ ID NO: 7139 - DNA, 18 bp, Artificial Sequence
  Description of Artificial Sequence: Synthetic oligonucleotide
tcctcttcaaggatcctc

SEQ ID NO: 7140 - DNA, 18 bp, Artificial Sequence
  Description of Artificial Sequence: Synthetic oligonucleotide
gtgagtcctcttcaagga

SEQ ID NO: 7141 - DNA, 18 bp, Artificial Sequence
  Description of Artificial Sequence: Synthetic oligonucleotide
ttggggtgagtcctcttc

SEQ ID NO: 7142 - DNA, 18 bp, Artificial Sequence
  Description of Artificial Sequence: Synthetic oligonucleotide
cttgcttggggtgagtcc

SEQ ID NO: 7143 - DNA, 18 bp, Artificial Sequence
  Description of Artificial Sequence: Synthetic oligonucleotide
tttcccttgcttggggtg

SEQ ID NO: 7144 - DNA, 18 bp, Artificial Sequence
  Description of Artificial Sequence: Synthetic oligonucleotide
ccaattttcccttgcttg

SEQ ID NO: 7145 - DNA, 18 bp, Artificial Sequence
  Description of Artificial Sequence: Synthetic oligonucleotide
ccccaccaattttccctt

SEQ ID NO: 7146 - DNA, 18 bp, Artificial Sequence
  Description of Artificial Sequence: Synthetic oligonucleotide
agttcccccaccaatttt

SEQ ID NO: 7147 - DNA, 18 bp, Artificial Sequence
  Description of Artificial Sequence: Synthetic oligonucleotide
gcagaagttcccccacca

SEQ ID NO: 7148 - DNA, 18 bp, Artificial Sequence
  Description of Artificial Sequence: Synthetic oligonucleotide
ggaaggcagaagttcccc

SEQ ID NO: 7149 - DNA, 18 bp, Artificial Sequence
  Description of Artificial Sequence: Synthetic oligonucleotide
aaccaggaaggcagaagt

SEQ ID NO: 7150 - DNA, 18 bp, Artificial Sequence
  Description of Artificial Sequence: Synthetic oligonucleotide
aaggaaaccaggaaggca

SEQ ID NO: 7151 - DNA, 18 bp, Artificial Sequence
  Description of Artificial Sequence: Synthetic oligonucleotide
aagtcaaggaaaccagga

SEQ ID NO: 7152 - DNA, 18 bp, Artificial Sequence
  Description of Artificial Sequence: Synthetic oligonucleotide
ggccaaagtcaaggaaac

SEQ ID NO: 7153 - DNA, 18 bp, Artificial Sequence
  Description of Artificial Sequence: Synthetic oligonucleotide
gaggaggccaaagtcaag

SEQ ID NO: 7154 - DNA, 18 bp, Artificial Sequence
  Description of Artificial Sequence: Synthetic oligonucleotide
aagaggaggaggccaaag

SEQ ID NO: 7155 - DNA, 18 bp, Artificial Sequence
  Description of Artificial Sequence: Synthetic oligonucleotide
ggaggaagaggaggaggc

SEQ ID NO: 7156 - DNA, 18 bp, Artificial Sequence
  Description of Artificial Sequence: Synthetic oligonucleotide
gataaggaggaagaggag

SEQ ID NO: 7157 - DNA, 18 bp, Artificial Sequence
  Description of Artificial Sequence: Synthetic oligonucleotide
gagaagataaggaggaag

SEQ ID NO: 7158 - DNA, 18 bp, Artificial Sequence
  Description of Artificial Sequence: Synthetic oligonucleotide
ggttggagaagataagga

SEQ ID NO: 7159 - DNA, 18 bp, Artificial Sequence
  Description of Artificial Sequence: Synthetic oligonucleotide
aaggaggttggagaagat

SEQ ID NO: 7160 - DNA, 18 bp, Artificial Sequence
  Description of Artificial Sequence: Synthetic oligonucleotide
aaaggaaggaggttggag

SEQ ID NO: 7161 - DNA, 18 bp, Artificial Sequence
  Description of Artificial Sequence: Synthetic oligonucleotide
caaataaaggaaggaggt

SEQ ID NO: 7162 - DNA, 18 bp, Artificial Sequence
  Description of Artificial Sequence: Synthetic oligonucleotide
tggaacaaataaaggaag

SEQ ID NO: 7163 - DNA, 18 bp, Artificial Sequence
  Description of Artificial Sequence: Synthetic oligonucleotide
ccgctcatcgccagctgt

SEQ ID NO: 7164 - DNA, 18 bp, Artificial Sequence
  Description of Artificial Sequence: Synthetic oligonucleotide
gcacaccgctcatcgcca

SEQ ID NO: 7165 - DNA, 18 bp, Artificial Sequence
  Description of Artificial Sequence: Synthetic oligonucleotide
cctttgcacaccgctcat

SEQ ID NO: 7166 - DNA, 18 bp, Artificial Sequence
  Description of Artificial Sequence: Synthetic oligonucleotide
tttcccctttgcacaccg

SEQ ID NO: 7167 - DNA, 18 bp, Artificial Sequence
  Description of Artificial Sequence: Synthetic oligonucleotide
aagcctttcccctttgca

SEQ ID NO: 7168 - DNA, 18 bp, Artificial Sequence
  Description of Artificial Sequence: Synthetic oligonucleotide
tcacgaagcctttcccct

SEQ ID NO: 7169 - DNA, 18 bp, Artificial Sequence
  Description of Artificial Sequence: Synthetic oligonucleotide
ctgcttcacgaagccttt

SEQ ID NO: 7170 - DNA, 18 bp, Artificial Sequence
  Description of Artificial Sequence: Synthetic oligonucleotide
gagggctgcttcacgaag

SEQ ID NO: 7171 - DNA, 18 bp, Artificial Sequence
  Description of Artificial Sequence: Synthetic oligonucleotide
tacaggagggctgcttca

SEQ ID NO: 7172 - DNA, 18 bp, Artificial Sequence
  Description of Artificial Sequence: Synthetic oligonucleotide
cctgatacaggagggctg

SEQ ID NO: 7173 - DNA, 18 bp, Artificial Sequence
  Description of Artificial Sequence: Synthetic oligonucleotide
gccaccctgatacaggag

SEQ ID NO: 7174 - DNA, 18 bp, Artificial Sequence
  Description of Artificial Sequence: Synthetic oligonucleotide
gcccagccaccctgatac

SEQ ID NO: 7175 - DNA, 18 bp, Artificial Sequence
  Description of Artificial Sequence: Synthetic oligonucleotide
atcaggcccagccaccct

SEQ ID NO: 7176 - DNA, 18 bp, Artificial Sequence
  Description of Artificial Sequence: Synthetic oligonucleotide
ttctcatcaggcccagcc

SEQ ID NO: 7177 - DNA, 18 bp, Artificial Sequence
  Description of Artificial Sequence: Synthetic oligonucleotide
ctcctttctcatcaggcc

SEQ ID NO: 7178 - DNA, 18 bp, Artificial Sequence
  Description of Artificial Sequence: Synthetic oligonucleotide
gtcctctcctttctcatc

SEQ ID NO: 7179 - DNA, 18 bp, Artificial Sequence
  Description of Artificial Sequence: Synthetic oligonucleotide
ctggagtcctctcctttc

SEQ ID NO: 7180 - DNA, 18 bp, Artificial Sequence
  Description of Artificial Sequence: Synthetic oligonucleotide
cccgcctggagtcctctc

SEQ ID NO: 7181 - DNA, 18 bp, Artificial Sequence
  Description of Artificial Sequence: Synthetic oligonucleotide
agctgcccgcctggagtc

SEQ ID NO: 7182 - DNA, 18 bp, Artificial Sequence
  Description of Artificial Sequence: Synthetic oligonucleotide
cttgcagctgcccgcctg

SEQ ID NO: 7183 - DNA, 18 bp, Artificial Sequence
  Description of Artificial Sequence: Synthetic oligonucleotide
gaaggcttgcagctgccc

SEQ ID NO: 7184 - DNA, 18 bp, Artificial Sequence
  Description of Artificial Sequence: Synthetic oligonucleotide
cggtggaaggcttgcagc

SEQ ID NO: 7185 - DNA, 18 bp, Artificial Sequence
  Description of Artificial Sequence: Synthetic oligonucleotide
tcgtgcggtggaaggctt

SEQ ID NO: 7186 - DNA, 18 bp, Artificial Sequence
  Description of Artificial Sequence: Synthetic oligonucleotide
ggctatcgtgcggtggaa

SEQ ID NO: 7187 - DNA, 18 bp, Artificial Sequence
  Description of Artificial Sequence: Synthetic oligonucleotide
ccagtggctatcgtgcgg

SEQ ID NO: 7188 - DNA, 18 bp, Artificial Sequence
  Description of Artificial Sequence: Synthetic oligonucleotide
ggcttccagtggctatcg

SEQ ID NO: 7189 - DNA, 18 bp, Artificial Sequence
  Description of Artificial Sequence: Synthetic oligonucleotide
tgctgggcttccagtggc

SEQ ID NO: 7190 - DNA, 18 bp, Artificial Sequence
  Description of Artificial Sequence: Synthetic oligonucleotide
ccgcctgctgggcttcca

SEQ ID NO: 7191 - DNA, 18 bp, Artificial Sequence
  Description of Artificial Sequence: Synthetic oligonucleotide
tcatgccgcctgctgggc

SEQ ID NO: 7192 - DNA, 18 bp, Artificial Sequence
  Description of Artificial Sequence: Synthetic oligonucleotide
ctgtgtcatgccgcctgc

SEQ ID NO: 7193 - DNA, 18 bp, Artificial Sequence
  Description of Artificial Sequence: Synthetic oligonucleotide
gggttctgtgtcatgccg

SEQ ID NO: 7194 - DNA, 18 bp, Artificial Sequence
  Description of Artificial Sequence: Synthetic oligonucleotide
gccttgggttctgtgtca

SEQ ID NO: 7195 - DNA, 18 bp, Artificial Sequence
  Description of Artificial Sequence: Synthetic oligonucleotide
atttggccttgggttctg

SEQ ID NO: 7196 - DNA, 18 bp, Artificial Sequence
  Description of Artificial Sequence: Synthetic oligonucleotide
ggcacatttggccttggg

SEQ ID NO: 7197 - DNA, 18 bp, Artificial Sequence
  Description of Artificial Sequence: Synthetic oligonucleotide
tggggggcacatttggcc

SEQ ID NO: 7198 - DNA, 18 bp, Artificial Sequence
  Description of Artificial Sequence: Synthetic oligonucleotide
ttttctggggggcacatt

SEQ ID NO: 7199 - DNA, 18 bp, Artificial Sequence
  Description of Artificial Sequence: Synthetic oligonucleotide
gcgccttttctggggggc

SEQ ID NO: 7200 - DNA, 18 bp, Artificial Sequence
  Description of Artificial Sequence: Synthetic oligonucleotide
tgagtgcgccttttctgg

SEQ ID NO: 7201 - DNA, 18 bp, Artificial Sequence
  Description of Artificial Sequence: Synthetic oligonucleotide
gctcttgagtgcgccttt

SEQ ID NO: 7202 - DNA, 18 bp, Artificial Sequence
  Description of Artificial Sequence: Synthetic oligonucleotide
tctgagctcttgagtgcg

SEQ ID NO: 7203 - DNA, 18 bp, Artificial Sequence
  Description of Artificial Sequence: Synthetic oligonucleotide
cctcctctgagctcttga

SEQ ID NO: 7204 - DNA, 18 bp, Artificial Sequence
  Description of Artificial Sequence: Synthetic oligonucleotide
accttcctcctctgagct

SEQ ID NO: 7205 - DNA, 18 bp, Artificial Sequence
  Description of Artificial Sequence: Synthetic oligonucleotide
agagcaccttcctcctct

SEQ ID NO: 7206 - DNA, 18 bp, Artificial Sequence
  Description of Artificial Sequence: Synthetic oligonucleotide
gccggagagcaccttcct

SEQ ID NO: 7207 - DNA, 18 bp, Artificial Sequence
  Description of Artificial Sequence: Synthetic oligonucleotide
aaccagccggagagcacc

SEQ ID NO: 7208 - DNA, 18 bp, Artificial Sequence
  Description of Artificial Sequence: Synthetic oligonucleotide
gctagaaccagccggaga

SEQ ID NO: 7209 - DNA, 18 bp, Artificial Sequence
  Description of Artificial Sequence: Synthetic oligonucleotide
gggcggctagaaccagcc

SEQ ID NO: 7210 - DNA, 18 bp, Artificial Sequence
  Description of Artificial Sequence: Synthetic oligonucleotide
tgccagggcggctagaac

SEQ ID NO: 7211 - DNA, 18 bp, Artificial Sequence
  Description of Artificial Sequence: Synthetic oligonucleotide
ggcactgccagggcggct

SEQ ID NO: 7212 - DNA, 18 bp, Artificial Sequence
  Description of Artificial Sequence: Synthetic oligonucleotide
ccccgggcactgccaggg

SEQ ID NO: 7213 - DNA, 18 bp, Artificial Sequence
  Description of Artificial Sequence: Synthetic oligonucleotide
cctccccccgggcactgc

SEQ ID NO: 7214 - DNA, 18 bp, Artificial Sequence
  Description of Artificial Sequence: Synthetic oligonucleotide
gaccgcctccccccgggc

SEQ ID NO: 7215 - DNA, 18 bp, Artificial Sequence
  Description of Artificial Sequence: Synthetic oligonucleotide
gcatggaccgcctccccc

SEQ ID NO: 7216 - DNA, 18 bp, Artificial Sequence
  Description of Artificial Sequence: Synthetic oligonucleotide
gcccagcatggaccgcct

SEQ ID NO: 7217 - DNA, 18 bp, Artificial Sequence
  Description of Artificial Sequence: Synthetic oligonucleotide
attctgcccagcatggac

SEQ ID NO: 7218 - DNA, 18 bp, Artificial Sequence
  Description of Artificial Sequence: Synthetic oligonucleotide
ggaggattctgcccagca

SEQ ID NO: 7219 - DNA, 18 bp, Artificial Sequence
  Description of Artificial Sequence: Synthetic oligonucleotide
ggtggggaggattctgcc

SEQ ID NO: 7220 - DNA, 18 bp, Artificial Sequence
  Description of Artificial Sequence: Synthetic oligonucleotide
acgatggtggggaggatt

SEQ ID NO: 7221 - DNA, 18 bp, Artificial Sequence
  Description of Artificial Sequence: Synthetic oligonucleotide
ggtgtacgatggtgggga

SEQ ID NO: 7222 - DNA, 18 bp, Artificial Sequence
  Description of Artificial Sequence: Synthetic oligonucleotide
ttcttggtgtacgatggt

SEQ ID NO: 7223 - DNA, 18 bp, Artificial Sequence
  Description of Artificial Sequence: Synthetic oligonucleotide
tttgtttcttggtgtacg

SEQ ID NO: 7224 - DNA, 18 bp, Artificial Sequence
  Description of Artificial Sequence: Synthetic oligonucleotide
gtcactttgtttcttggt

SEQ ID NO: 7225 - DNA, 18 bp, Artificial Sequence
  Description of Artificial Sequence: Synthetic oligonucleotide
cttgtgtcactttgtttc

SEQ ID NO: 7226 - DNA, 18 bp, Artificial Sequence
  Description of Artificial Sequence: Synthetic oligonucleotide
cttggcttgtgtcacttt

SEQ ID NO: 7227 - DNA, 18 bp, Artificial Sequence
  Description of Artificial Sequence: Synthetic oligonucleotide
gtgagcttggcttgtgtc

SEQ ID NO: 7228 - DNA, 18 bp, Artificial Sequence
  Description of Artificial Sequence: Synthetic oligonucleotide
ctcctgtgagcttggctt

SEQ ID NO: 7229 - DNA, 18 bp, Artificial Sequence
  Description of Artificial Sequence: Synthetic oligonucleotide
gagccctcctgtgagctt

SEQ ID NO: 7230 - DNA, 18 bp, Artificial Sequence
  Description of Artificial Sequence: Synthetic oligonucleotide
gaatagagccctcctgtg

SEQ ID NO: 7231 - DNA, 18 bp, Artificial Sequence
  Description of Artificial Sequence: Synthetic oligonucleotide
aatgtgaatagagccctc

SEQ ID NO: 7232 - DNA, 18 bp, Artificial Sequence
  Description of Artificial Sequence: Synthetic oligonucleotide
tggcaaatgtgaatagag

SEQ ID NO: 7233 - DNA, 18 bp, Artificial Sequence
  Description of Artificial Sequence: Synthetic oligonucleotide
ctctgtggcaaatgtgaa

SEQ ID NO: 7234 - DNA, 18 bp, Artificial Sequence
  Description of Artificial Sequence: Synthetic oligonucleotide
ctgtgctctgtggcaaat

SEQ ID NO: 7235 - DNA, 18 bp, Artificial Sequence
  Description of Artificial Sequence: Synthetic oligonucleotide
ctcctctgtgctctgtgg

SEQ ID NO: 7236 - DNA, 18 bp, Artificial Sequence
  Description of Artificial Sequence: Synthetic oligonucleotide
ctcaactcctctgtgctc

SEQ ID NO: 7237 - DNA, 18 bp, Artificial Sequence
  Description of Artificial Sequence: Synthetic oligonucleotide
ctgacctcaactcctctg

SEQ ID NO: 7238 - DNA, 18 bp, Artificial Sequence
  Description of Artificial Sequence: Synthetic oligonucleotide
agctcctgacctcaactc

SEQ ID NO: 7239 - DNA, 18 bp, Artificial Sequence
  Description of Artificial Sequence: Synthetic oligonucleotide
ctcctagctcctgacctc

SEQ ID NO: 7240 - DNA, 18 bp, Artificial Sequence
  Description of Artificial Sequence: Synthetic oligonucleotide
ccagcctcctagctcctg

SEQ ID NO: 7241 - DNA, 18 bp, Artificial Sequence
  Description of Artificial Sequence: Synthetic oligonucleotide
tgtctccagcctcctagc

SEQ ID NO: 7242 - DNA, 18 bp, Artificial Sequence
  Description of Artificial Sequence: Synthetic oligonucleotide
gtagatgtctccagcctc

SEQ ID NO: 7243 - DNA, 18 bp, Artificial Sequence
  Description of Artificial Sequence: Synthetic oligonucleotide
acagggtagatgtctcca

SEQ ID NO: 7244 - DNA, 18 bp, Artificial Sequence
  Description of Artificial Sequence: Synthetic oligonucleotide
ctcggacagggtagatgt

SEQ ID NO: 7245 - DNA, 18 bp, Artificial Sequence
  Description of Artificial Sequence: Synthetic oligonucleotide
aagtcctcggacagggta

SEQ ID NO: 7246 - DNA, 18 bp, Artificial Sequence
  Description of Artificial Sequence: Synthetic oligonucleotide
cctgaaagtcctcggaca

SEQ ID NO: 7247 - DNA, 18 bp, Artificial Sequence
  Description of Artificial Sequence: Synthetic oligonucleotide
agatacctgaaagtcctc

SEQ ID NO: 7248 - DNA, 18 bp, Artificial Sequence
  Description of Artificial Sequence: Synthetic oligonucleotide
tccttagatacctgaaag

SEQ ID NO: 7249 - DNA, 18 bp, Artificial Sequence
  Description of Artificial Sequence: Synthetic oligonucleotide
cagtctccttagatacct

SEQ ID NO: 7250 - DNA, 18 bp, Artificial Sequence
  Description of Artificial Sequence: Synthetic oligonucleotide
tggatcagtctccttaga

SEQ ID NO: 7251 - DNA, 18 bp, Artificial Sequence
  Description of Artificial Sequence: Synthetic oligonucleotide
ggtgctggatcagtctcc

SEQ ID NO: 7252 - DNA, 18 bp, Artificial Sequence
  Description of Artificial Sequence: Synthetic oligonucleotide
gaccaggtgctggatcag

SEQ ID NO: 7253 - DNA, 18 bp, Artificial Sequence
  Description of Artificial Sequence: Synthetic oligonucleotide
gaggggaccaggtgctgg

SEQ ID NO: 7254 - DNA, 18 bp, Artificial Sequence
  Description of Artificial Sequence: Synthetic oligonucleotide
ccagagaggggaccaggt

SEQ ID NO: 7255 - DNA, 18 bp, Artificial Sequence
  Description of Artificial Sequence: Synthetic oligonucleotide
tctgcccagagaggggac

SEQ ID NO: 7256 - DNA, 18 bp, Artificial Sequence
  Description of Artificial Sequence: Synthetic oligonucleotide
cacactctgcccagagag

SEQ ID NO: 7257 - DNA, 18 bp, Artificial Sequence
  Description of Artificial Sequence: Synthetic oligonucleotide
atattcacactctgccca

SEQ ID NO: 7258 - DNA, 18 bp, Artificial Sequence
  Description of Artificial Sequence: Synthetic oligonucleotide
ggtcaatattcacactct

SEQ ID NO: 7259 - DNA, 18 bp, Artificial Sequence
  Description of Artificial Sequence: Synthetic oligonucleotide
gagaaggtcaatattcac

SEQ ID NO: 7260 - DNA, 18 bp, Artificial Sequence
  Description of Artificial Sequence: Synthetic oligonucleotide
acggggagaaggtcaata

SEQ ID NO: 7261 - DNA, 18 bp, Artificial Sequence
  Description of Artificial Sequence: Synthetic oligonucleotide
gtcgaagcccctgtctca

SEQ ID NO: 7262 - DNA, 18 bp, Artificial Sequence
  Description of Artificial Sequence: Synthetic oligonucleotide
gccaggtcgaagcccctg

SEQ ID NO: 7263 - DNA, 18 bp, Artificial Sequence
  Description of Artificial Sequence: Synthetic oligonucleotide
tactggccaggtcgaagc

SEQ ID NO: 7264 - DNA, 18 bp, Artificial Sequence
  Description of Artificial Sequence: Synthetic oligonucleotide
ctttgtactggccaggtc

SEQ ID NO: 7265 - DNA, 18 bp, Artificial Sequence
  Description of Artificial Sequence: Synthetic oligonucleotide
ggctgctttgtactggcc

SEQ ID NO: 7266 - DNA, 18 bp, Artificial Sequence
  Description of Artificial Sequence: Synthetic oligonucleotide
gtgcaggctgctttgtac

SEQ ID NO: 7267 - DNA, 18 bp, Artificial Sequence
  Description of Artificial Sequence: Synthetic oligonucleotide
ccactgtgcaggctgctt

SEQ ID NO: 7268 - DNA, 18 bp, Artificial Sequence
  Description of Artificial Sequence: Synthetic oligonucleotide
gttaaccactgtgcaggc

SEQ ID NO: 7269 - DNA, 18 bp, Artificial Sequence
  Description of Artificial Sequence: Synthetic oligonucleotide
gagttgttaaccactgtg

SEQ ID NO: 7270 - DNA, 18 bp, Artificial Sequence
  Description of Artificial Sequence: Synthetic oligonucleotide
atcctgagttgttaacca

SEQ ID NO: 7271 - DNA, 18 bp, Artificial Sequence
  Description of Artificial Sequence: Synthetic oligonucleotide
ggccaatcctgagttgtt

SEQ ID NO: 7272 - DNA, 18 bp, Artificial Sequence
  Description of Artificial Sequence: Synthetic oligonucleotide
tgcccggccaatcctgag

SEQ ID NO: 7273 - DNA, 18 bp, Artificial Sequence
  Description of Artificial Sequence: Synthetic oligonucleotide
caccgtgcccggccaatc

SEQ ID NO: 7274 - DNA, 18 bp, Artificial Sequence
  Description of Artificial Sequence: Synthetic oligonucleotide
tgagccaccgtgcccggc

SEQ ID NO: 7275 - DNA, 18 bp, Artificial Sequence
  Description of Artificial Sequence: Synthetic oligonucleotide
aggcgtgagccaccgtgc

SEQ ID NO: 7276 - DNA, 18 bp, Artificial Sequence
  Description of Artificial Sequence: Synthetic oligonucleotide
actacaggcgtgagccac

SEQ ID NO: 7277 - DNA, 18 bp, Artificial Sequence
  Description of Artificial Sequence: Synthetic oligonucleotide
ctgggactacaggcgtga

SEQ ID NO: 7278 - DNA, 18 bp, Artificial Sequence
  Description of Artificial Sequence: Synthetic oligonucleotide
aagtgctgggactacagg

SEQ ID NO: 7279 - DNA, 18 bp, Artificial Sequence
  Description of Artificial Sequence: Synthetic oligonucleotide
tcccaaagtgctgggact

SEQ ID NO: 7280 - DNA, 18 bp, Artificial Sequence
  Description of Artificial Sequence: Synthetic oligonucleotide
cagcctcccaaagtgctg

SEQ ID NO: 7281 - DNA, 18 bp, Artificial Sequence
  Description of Artificial Sequence: Synthetic oligonucleotide
cacctcagcctcccaaag

SEQ ID NO: 7282 - DNA, 18 bp, Artificial Sequence
  Description of Artificial Sequence: Synthetic oligonucleotide
ctgcccacctcagcctcc

SEQ ID NO: 7283 - DNA, 18 bp, Artificial Sequence
  Description of Artificial Sequence: Synthetic oligonucleotide
gtcatctgcccacctcag

SEQ ID NO: 7284 - DNA, 18 bp, Artificial Sequence
  Description of Artificial Sequence: Synthetic oligonucleotide
aacttgtcatctgcccac

SEQ ID NO: 7285 - DNA, 18 bp, Artificial Sequence
  Description of Artificial Sequence: Synthetic oligonucleotide
tcctgaacttgtcatctg

SEQ ID NO: 7286 - DNA, 18 bp, Artificial Sequence
  Description of Artificial Sequence: Synthetic oligonucleotide
cgaactcctgaacttgtc

SEQ ID NO: 7287 - DNA, 18 bp, Artificial Sequence
  Description of Artificial Sequence: Synthetic oligonucleotide
ggtctcgaactcctgaac

SEQ ID NO: 7288 - DNA, 18 bp, Artificial Sequence
  Description of Artificial Sequence: Synthetic oligonucleotide
aggctggtctcgaactcc

SEQ ID NO: 7289 - DNA, 18 bp, Artificial Sequence
  Description of Artificial Sequence: Synthetic oligonucleotide
tgaccaggctggtctcga

SEQ ID NO: 7290 - DNA, 18 bp, Artificial Sequence
  Description of Artificial Sequence: Synthetic oligonucleotide
tatgttgaccaggctggt

SEQ ID NO: 7291 - DNA, 18 bp, Artificial Sequence
  Description of Artificial Sequence: Synthetic oligonucleotide
ttcactatgttgaccagg

SEQ ID NO: 7292 - DNA, 18 bp, Artificial Sequence
  Description of Artificial Sequence: Synthetic oligonucleotide
ggggtttcactatgttga

SEQ ID NO: 7293 - DNA, 18 bp, Artificial Sequence
  Description of Artificial Sequence: Synthetic oligonucleotide
gagatggggtttcactat

SEQ ID NO: 7294 - DNA, 18 bp, Artificial Sequence
  Description of Artificial Sequence: Synthetic oligonucleotide
tagtagagatggggtttc

SEQ ID NO: 7295 - DNA, 18 bp, Artificial Sequence
  Description of Artificial Sequence: Synthetic oligonucleotide
atctttagtagagatggg

SEQ ID NO: 7296 - DNA, 18 bp, Artificial Sequence
  Description of Artificial Sequence: Synthetic oligonucleotide
tttgtatctttagtagag

SEQ ID NO: 7297 - DNA, 18 bp, Artificial Sequence
  Description of Artificial Sequence: Synthetic oligonucleotide
atttttttgtatctttag

SEQ ID NO: 7298 - DNA, 18 bp, Artificial Sequence
  Description of Artificial Sequence: Synthetic oligonucleotide
cgactatttttttgtatc

SEQ ID NO: 7299 - DNA, 18 bp, Artificial Sequence
  Description of Artificial Sequence: Synthetic oligonucleotide
acgcccgactattttttt

SEQ ID NO: 7300 - DNA, 18 bp, Artificial Sequence
  Description of Artificial Sequence: Synthetic oligonucleotide
ccaccacgcccgactatt

SEQ ID NO: 7301 - DNA, 18 bp, Artificial Sequence
  Description of Artificial Sequence: Synthetic oligonucleotide
acgtgccaccacgcccga

SEQ ID NO: 7302 - DNA, 18 bp, Artificial Sequence
  Description of Artificial Sequence: Synthetic oligonucleotide
caggcacgtgccaccacg

SEQ ID NO: 7303 - DNA, 18 bp, Artificial Sequence
  Description of Artificial Sequence: Synthetic oligonucleotide
gattacaggcacgtgcca

SEQ ID NO: 7304 - DNA, 18 bp, Artificial Sequence
  Description of Artificial Sequence: Synthetic oligonucleotide
gctgggattacaggcacg

SEQ ID NO: 7305 - DNA, 18 bp, Artificial Sequence
  Description of Artificial Sequence: Synthetic oligonucleotide
gagtagctgggattacag

SEQ ID NO: 7306 - DNA, 18 bp, Artificial Sequence
  Description of Artificial Sequence: Synthetic oligonucleotide
ctcccgagtagctgggat

SEQ ID NO: 7307 - DNA, 18 bp, Artificial Sequence
  Description of Artificial Sequence: Synthetic oligonucleotide
tcagcctcccgagtagct

SEQ ID NO: 7308 - DNA, 18 bp, Artificial Sequence
  Description of Artificial Sequence: Synthetic oligonucleotide
ctgcctcagcctcccgag

SEQ ID NO: 7309 - DNA, 18 bp, Artificial Sequence
  Description of Artificial Sequence: Synthetic oligonucleotide
ttctcctgcctcagcctc

SEQ ID NO: 7310 - DNA, 18 bp, Artificial Sequence
  Description of Artificial Sequence: Synthetic oligonucleotide
agcaattctcctgcctca

SEQ ID NO: 7311 - DNA, 18 bp, Artificial Sequence
  Description of Artificial Sequence: Synthetic oligonucleotide
gttcaagcaattctcctg

SEQ ID NO: 7312 - DNA, 18 bp, Artificial Sequence
  Description of Artificial Sequence: Synthetic oligonucleotide
cctgggttcaagcaattc

SEQ ID NO: 7313 - DNA, 18 bp, Artificial Sequence
  Description of Artificial Sequence: Synthetic oligonucleotide
cgcctcctgggttcaagc

SEQ ID NO: 7314 - DNA, 18 bp, Artificial Sequence
  Description of Artificial Sequence: Synthetic oligonucleotide
atctccgcctcctgggtt

SEQ ID NO: 7315 - DNA, 18 bp, Artificial Sequence
  Description of Artificial Sequence: Synthetic oligonucleotide
ctgcaatctccgcctcct

SEQ ID NO: 7316 - DNA, 18 bp, Artificial Sequence
  Description of Artificial Sequence: Synthetic oligonucleotide
gctcactgcaatctccgc

SEQ ID NO: 7317 - DNA, 18 bp, Artificial Sequence
  Description of Artificial Sequence: Synthetic oligonucleotide
tctcagctcactgcaatc

SEQ ID NO: 7318 - DNA, 18 bp, Artificial Sequence
  Description of Artificial Sequence: Synthetic oligonucleotide
tgcgatctcagctcactg

SEQ ID NO: 7319 - DNA, 18 bp, Artificial Sequence
  Description of Artificial Sequence: Synthetic oligonucleotide
agtggtgcgatctcagct

SEQ ID NO: 7320 - DNA, 18 bp, Artificial Sequence
  Description of Artificial Sequence: Synthetic oligonucleotide
agtgcagtggtgcgatct

SEQ ID NO: 7321 - DNA, 18 bp, Artificial Sequence
  Description of Artificial Sequence: Synthetic oligonucleotide
gctagagtgcagtggtgc

SEQ ID NO: 7322 - DNA, 18 bp, Artificial Sequence
  Description of Artificial Sequence: Synthetic oligonucleotide
accaggctagagtgcagt

SEQ ID NO: 7323 - DNA, 18 bp, Artificial Sequence
  Description of Artificial Sequence: Synthetic oligonucleotide
ctgtcaccaggctagagt

SEQ ID NO: 7324 - DNA, 18 bp, Artificial Sequence
  Description of Artificial Sequence: Synthetic oligonucleotide
ttactctgtcaccaggct

SEQ ID NO: 7325 - DNA, 18 bp, Artificial Sequence
  Description of Artificial Sequence: Synthetic oligonucleotide
gagtcttactctgtcacc

SEQ ID NO: 7326 - DNA, 18 bp, Artificial Sequence
  Description of Artificial Sequence: Synthetic oligonucleotide
agatggagtcttactctg

SEQ ID NO: 7327 - DNA, 18 bp, Artificial Sequence
  Description of Artificial Sequence: Synthetic oligonucleotide
gttcgagatggagtctta

SEQ ID NO: 7328 - DNA, 18 bp, Artificial Sequence
  Description of Artificial Sequence: Synthetic oligonucleotide
ttgttgttcgagatggag

SEQ ID NO: 7329 - DNA, 18 bp, Artificial Sequence
  Description of Artificial Sequence: Synthetic oligonucleotide
tttttttgttgttcgaga

SEQ ID NO: 7330 - DNA, 18 bp, Artificial Sequence
  Description of Artificial Sequence: Synthetic oligonucleotide
tcttttttttttgttgtt

SEQ ID NO: 7331 - DNA, 18 bp, Artificial Sequence
  Description of Artificial Sequence: Synthetic oligonucleotide
tgagttcttttttttttg

SEQ ID NO: 7332 - DNA, 18 bp, Artificial Sequence
  Description of Artificial Sequence: Synthetic oligonucleotide
aatcatgagttctttttt

SEQ ID NO: 7333 - DNA, 18 bp, Artificial Sequence
  Description of Artificial Sequence: Synthetic oligonucleotide
gtcctaatcatgagttct

SEQ ID NO: 7334 - DNA, 18 bp, Artificial Sequence
  Description of Artificial Sequence: Synthetic oligonucleotide
attcagtcctaatcatga

SEQ ID NO: 7335 - DNA, 18 bp, Artificial Sequence
  Description of Artificial Sequence: Synthetic oligonucleotide
tctgaattcagtcctaat

SEQ ID NO: 7336 - DNA, 18 bp, Artificial Sequence
  Description of Artificial Sequence: Synthetic oligonucleotide
cagcgtctgaattcagtc

SEQ ID NO: 7337 - DNA, 18 bp, Artificial Sequence
  Description of Artificial Sequence: Synthetic oligonucleotide
gcagccagcgtctgaatt

SEQ ID NO: 7338 - DNA, 18 bp, Artificial Sequence
  Description of Artificial Sequence: Synthetic oligonucleotide
caagggcagccagcgtct

SEQ ID NO: 7339 - DNA, 18 bp, Artificial Sequence
  Description of Artificial Sequence: Synthetic oligonucleotide
cgggccaagggcagccag

SEQ ID NO: 7340 - DNA, 18 bp, Artificial Sequence
  Description of Artificial Sequence: Synthetic oligonucleotide
tacagcgggccaagggca

SEQ ID NO: 7341 - DNA, 18 bp, Artificial Sequence
  Description of Artificial Sequence: Synthetic oligonucleotide
ggttatacagcgggccaa

SEQ ID NO: 7342 - DNA, 18 bp, Artificial Sequence
  Description of Artificial Sequence: Synthetic oligonucleotide
gcctcggttatacagcgg

SEQ ID NO: 7343 - DNA, 18 bp, Artificial Sequence
  Description of Artificial Sequence: Synthetic oligonucleotide
cctttgcctcggttatac

SEQ ID NO: 7344 - DNA, 18 bp, Artificial Sequence
  Description of Artificial Sequence: Synthetic oligonucleotide
aaagtcctttgcctcggt

SEQ ID NO: 7345 - DNA, 18 bp, Artificial Sequence
  Description of Artificial Sequence: Synthetic oligonucleotide
agggcaaagtcctttgcc

SEQ ID NO: 7346 - DNA, 18 bp, Artificial Sequence
  Description of Artificial Sequence: Synthetic oligonucleotide
ggctcagggcaaagtcct

SEQ ID NO: 7347 - DNA, 18 bp, Artificial Sequence
  Description of Artificial Sequence: Synthetic oligonucleotide
ccacgggctcagggcaaa

SEQ ID NO: 7348 - DNA, 18 bp, Artificial Sequence
  Description of Artificial Sequence: Synthetic oligonucleotide
ggattccacgggctcagg

SEQ ID NO: 7349 - DNA, 18 bp, Artificial Sequence
  Description of Artificial Sequence: Synthetic oligonucleotide
tccttggattccacgggc

SEQ ID NO: 7350 - DNA, 18 bp, Artificial Sequence
  Description of Artificial Sequence: Synthetic oligonucleotide
gaccatccttggattcca

SEQ ID NO: 7351 - DNA, 18 bp, Artificial Sequence
  Description of Artificial Sequence: Synthetic oligonucleotide
gaggagaccatccttgga

SEQ ID NO: 7352 - DNA, 18 bp, Artificial Sequence
  Description of Artificial Sequence: Synthetic oligonucleotide
agagagaggagaccatcc

SEQ ID NO: 7353 - DNA, 18 bp, Artificial Sequence
  Description of Artificial Sequence: Synthetic oligonucleotide
caggtagagagaggagac

SEQ ID NO: 7354 - DNA, 18 bp, Artificial Sequence
  Description of Artificial Sequence: Synthetic oligonucleotide
gcaggcaggtagagagag

SEQ ID NO: 7355 - DNA, 18 bp, Artificial Sequence
  Description of Artificial Sequence: Synthetic oligonucleotide
cgctggcaggcaggtaga

SEQ ID NO: 7356 - DNA, 18 bp, Artificial Sequence
  Description of Artificial Sequence: Synthetic oligonucleotide
cccagcgctggcaggcag

SEQ ID NO: 7357 - DNA, 18 bp, Artificial Sequence
  Description of Artificial Sequence: Synthetic oligonucleotide
ctcaccccagcgctggca

SEQ ID NO: 7358 - DNA, 18 bp, Artificial Sequence
  Description of Artificial Sequence: Synthetic oligonucleotide
tgtgtctcaccccagcgc

SEQ ID NO: 7359 - DNA, 18 bp, Artificial Sequence
  Description of Artificial Sequence: Synthetic oligonucleotide
gggcctgtgtctcacccc

SEQ ID NO: 7360 - DNA, 18 bp, Artificial Sequence
  Description of Artificial Sequence: Synthetic oligonucleotide
gtactgggcctgtgtctc

SEQ ID NO: 7361 - DNA, 18 bp, Artificial Sequence
  Description of Artificial Sequence: Synthetic oligonucleotide
tctgtgtactgggcctgt

SEQ ID NO: 7362 - DNA, 18 bp, Artificial Sequence
  Description of Artificial Sequence: Synthetic oligonucleotide
caggctctgtgtactggg

SEQ ID NO: 7363 - DNA, 18 bp, Artificial Sequence
  Description of Artificial Sequence: Synthetic oligonucleotide
ctgagcaggctctgtgta

SEQ ID NO: 7364 - DNA, 18 bp, Artificial Sequence
  Description of Artificial Sequence: Synthetic oligonucleotide
attccctgagcaggctct

SEQ ID NO: 7365 - DNA, 18 bp, Artificial Sequence
  Description of Artificial Sequence: Synthetic oligonucleotide
agctaattccctgagcag

SEQ ID NO: 7366 - DNA, 18 bp, Artificial Sequence
  Description of Artificial Sequence: Synthetic oligonucleotide
gtggcagctaattccctg

SEQ ID NO: 7367 - DNA, 18 bp, Artificial Sequence
  Description of Artificial Sequence: Synthetic oligonucleotide
tgacagtggcagctaatt

SEQ ID NO: 7368 - DNA, 18 bp, Artificial Sequence
  Description of Artificial Sequence: Synthetic oligonucleotide
gatgatgacagtggcagc

SEQ ID NO: 7369 - DNA, 18 bp, Artificial Sequence
  Description of Artificial Sequence: Synthetic oligonucleotide
acgatgatgatgacagtg

SEQ ID NO: 7370 - DNA, 18 bp, Artificial Sequence
  Description of Artificial Sequence: Synthetic oligonucleotide
tagttacgatgatgatga

SEQ ID NO: 7371 - DNA, 18 bp, Artificial Sequence
  Description of Artificial Sequence: Synthetic oligonucleotide
atcattagttacgatgat

SEQ ID NO: 7372 - DNA, 18 bp, Artificial Sequence
  Description of Artificial Sequence: Synthetic oligonucleotide
tcaccatcattagttacg

SEQ ID NO: 7373 - DNA, 18 bp, Artificial Sequence
  Description of Artificial Sequence: Synthetic oligonucleotide
tctgttcaccatcattag

SEQ ID NO: 7374 - DNA, 18 bp, Artificial Sequence
  Description of Artificial Sequence: Synthetic oligonucleotide
attggtctgttcaccatc

SEQ ID NO: 7375 - DNA, 18 bp, Artificial Sequence
  Description of Artificial Sequence: Synthetic oligonucleotide
ctgctattggtctgttca

SEQ ID NO: 7376 - DNA, 18 bp, Artificial Sequence
  Description of Artificial Sequence: Synthetic oligonucleotide
ctttcctgctattggtct

SEQ ID NO: 7377 - DNA, 18 bp, Artificial Sequence
  Description of Artificial Sequence: Synthetic oligonucleotide
tgtagctttcctgctatt

SEQ ID NO: 7378 - DNA, 18 bp, Artificial Sequence
  Description of Artificial Sequence: Synthetic oligonucleotide
agggatgtagctttcctg

SEQ ID NO: 7379 - DNA, 18 bp, Artificial Sequence
  Description of Artificial Sequence: Synthetic oligonucleotide
ccctaagggatgtagctt

SEQ ID NO: 7380 - DNA, 18 bp, Artificial Sequence
  Description of Artificial Sequence: Synthetic oligonucleotide
tgcgattttccatgcata

SEQ ID NO: 7381 - DNA, 18 bp, Artificial Sequence
  Description of Artificial Sequence: Synthetic oligonucleotide
tgtgatgcgattttccat

SEQ ID NO: 7382 - DNA, 18 bp, Artificial Sequence
  Description of Artificial Sequence: Synthetic oligonucleotide
gcctttgtgatgcgattt

SEQ ID NO: 7383 - DNA, 18 bp, Artificial Sequence
  Description of Artificial Sequence: Synthetic oligonucleotide
tactcgcctttgtgatgc

SEQ ID NO: 7384 - DNA, 18 bp, Artificial Sequence
  Description of Artificial Sequence: Synthetic oligonucleotide
atgcatactcgcctttgt

SEQ ID NO: 7385 - DNA, 18 bp, Artificial Sequence
  Description of Artificial Sequence: Synthetic oligonucleotide
tccccatgcatactcgcc

SEQ ID NO: 7386 - DNA, 18 bp, Artificial Sequence
  Description of Artificial Sequence: Synthetic oligonucleotide
agtgctccccatgcatac

SEQ ID NO: 7387 - DNA, 18 bp, Artificial Sequence
  Description of Artificial Sequence: Synthetic oligonucleotide
cagcaagtgctccccatg

SEQ ID NO: 7388 - DNA, 18 bp, Artificial Sequence
  Description of Artificial Sequence: Synthetic oligonucleotide
tacagcagcaagtgctcc

SEQ ID NO: 7389 - DNA, 18 bp, Artificial Sequence
  Description of Artificial Sequence: Synthetic oligonucleotide
gaaagtacagcagcaagt

SEQ ID NO: 7390 - DNA, 18 bp, Artificial Sequence
  Description of Artificial Sequence: Synthetic oligonucleotide
gtgatgaaagtacagcag

SEQ ID NO: 7391 - DNA, 18 bp, Artificial Sequence
  Description of Artificial Sequence: Synthetic oligonucleotide
taaaagtgatgaaagtac

SEQ ID NO: 7392 - DNA, 18 bp, Artificial Sequence
  Description of Artificial Sequence: Synthetic oligonucleotide
gactataaaagtgatgaa

SEQ ID NO: 7393 - DNA, 18 bp, Artificial Sequence
  Description of Artificial Sequence: Synthetic oligonucleotide
actcagactataaaagtg

SEQ ID NO: 7394 - DNA, 18 bp, Artificial Sequence
  Description of Artificial Sequence: Synthetic oligonucleotide
taagaactcagactataa

SEQ ID NO: 7395 - DNA, 18 bp, Artificial Sequence
  Description of Artificial Sequence: Synthetic oligonucleotide
acttttaagaactcagac

SEQ ID NO: 7396 - DNA, 18 bp, Artificial Sequence
  Description of Artificial Sequence: Synthetic oligonucleotide
acgaaacttttaagaact

SEQ ID NO: 7397 - DNA, 18 bp, Artificial Sequence
  Description of Artificial Sequence: Synthetic oligonucleotide
aatgaacgaaacttttaa

SEQ ID NO: 7398 - DNA, 18 bp, Artificial Sequence
  Description of Artificial Sequence: Synthetic oligonucleotide
agggaaatgaacgaaact

SEQ ID NO: 7399 - DNA, 18 bp, Artificial Sequence
  Description of Artificial Sequence: Synthetic oligonucleotide
ttttgagggaaatgaacg

SEQ ID NO: 7400 - DNA, 18 bp, Artificial Sequence
  Description of Artificial Sequence: Synthetic oligonucleotide
aagtgttttgagggaaat

SEQ ID NO: 7401 - DNA, 18 bp, Artificial Sequence
  Description of Artificial Sequence: Synthetic oligonucleotide
ggttcaagtgttttgagg

SEQ ID NO: 7402 - DNA, 18 bp, Artificial Sequence
  Description of Artificial Sequence: Synthetic oligonucleotide
ctgcaggttcaagtgttt

SEQ ID NO: 7403 - DNA, 18 bp, Artificial Sequence
  Description of Artificial Sequence: Synthetic oligonucleotide
tgaaactgcaggttcaag

SEQ ID NO: 7404 - DNA, 18 bp, Artificial Sequence
  Description of Artificial Sequence: Synthetic oligonucleotide
cctactgaaactgcaggt

SEQ ID NO: 7405 - DNA, 18 bp, Artificial Sequence
  Description of Artificial Sequence: Synthetic oligonucleotide
cagtacctactgaaactg

SEQ ID NO: 7406 - DNA, 18 bp, Artificial Sequence
  Description of Artificial Sequence: Synthetic oligonucleotide
gttgtcacagccaccacc

SEQ ID NO: 7407 - DNA, 18 bp, Artificial Sequence
  Description of Artificial Sequence: Synthetic oligonucleotide
ccactgttgtcacagcca

SEQ ID NO: 7408 - DNA, 18 bp, Artificial Sequence
  Description of Artificial Sequence: Synthetic oligonucleotide
ggaggccactgttgtcac

SEQ ID NO: 7409 - DNA, 18 bp, Artificial Sequence
  Description of Artificial Sequence: Synthetic oligonucleotide
gggaaggaggccactgtt

SEQ ID NO: 7410 - DNA, 18 bp, Artificial Sequence
  Description of Artificial Sequence: Synthetic oligonucleotide
cgggagggaaggaggcca

SEQ ID NO: 7411 - DNA, 18 bp, Artificial Sequence
  Description of Artificial Sequence: Synthetic oligonucleotide
ccccccgggagggaagga

SEQ ID NO: 7412 - DNA, 18 bp, Artificial Sequence
  Description of Artificial Sequence: Synthetic oligonucleotide
gcggtccccccgggaggg

SEQ ID NO: 7413 - DNA, 18 bp, Artificial Sequence
  Description of Artificial Sequence: Synthetic oligonucleotide
gaagggcggtccccccgg

SEQ ID NO: 7414 - DNA, 18 bp, Artificial Sequence
  Description of Artificial Sequence: Synthetic oligonucleotide
ccgcggaagggcggtccc

SEQ ID NO: 7415 - DNA, 18 bp, Artificial Sequence
  Description of Artificial Sequence: Synthetic oligonucleotide
ggggcccgcggaagggcg

SEQ ID NO: 7416 - DNA, 18 bp, Artificial Sequence
  Description of Artificial Sequence: Synthetic oligonucleotide
gggaaggggcccgcggaa

SEQ ID NO: 7417 - DNA, 18 bp, Artificial Sequence
  Description of Artificial Sequence: Synthetic oligonucleotide
atgtcgggaaggggcccg

SEQ ID NO: 7418 - DNA, 18 bp, Artificial Sequence
  Description of Artificial Sequence: Synthetic oligonucleotide
cacggatgtcgggaaggg

SEQ ID NO: 7419 - DNA, 18 bp, Artificial Sequence
  Description of Artificial Sequence: Synthetic oligonucleotide
gtcagcacggatgtcggg

SEQ ID NO: 7420 - DNA, 18 bp, Artificial Sequence
  Description of Artificial Sequence: Synthetic oligonucleotide
gagtagtcagcacggatg

SEQ ID NO: 7421 - DNA, 18 bp, Artificial Sequence
  Description of Artificial Sequence: Synthetic oligonucleotide
gtgcggagtagtcagcac

SEQ ID NO: 7422 - DNA, 18 bp, Artificial Sequence
  Description of Artificial Sequence: Synthetic oligonucleotide
agtgagtgcggagtagtc

SEQ ID NO: 7423 - DNA, 18 bp, Artificial Sequence
  Description of Artificial Sequence: Synthetic oligonucleotide
cagtgagtgagtgcggag

SEQ ID NO: 7424 - DNA, 18 bp, Artificial Sequence
  Description of Artificial Sequence: Synthetic oligonucleotide
ctgagcagtgagtgagtg

SEQ ID NO: 7425 - DNA, 18 bp, Artificial Sequence
  Description of Artificial Sequence: Synthetic oligonucleotide
gcccactgagcagtgagt

SEQ ID NO: 7426 - DNA, 18 bp, Artificial Sequence
  Description of Artificial Sequence: Synthetic oligonucleotide
cctgggcccactgagcag

SEQ ID NO: 7427 - DNA, 18 bp, Artificial Sequence
  Description of Artificial Sequence: Synthetic oligonucleotide
aattgcctgggcccactg

SEQ ID NO: 7428 - DNA, 18 bp, Artificial Sequence
  Description of Artificial Sequence: Synthetic oligonucleotide
gagctaattgcctgggcc

SEQ ID NO: 7429 - DNA, 18 bp, Artificial Sequence
  Description of Artificial Sequence: Synthetic oligonucleotide
tctctgagctaattgcct

SEQ ID NO: 7430 - DNA, 18 bp, Artificial Sequence
  Description of Artificial Sequence: Synthetic oligonucleotide
tgaagtctctgagctaat

SEQ ID NO: 7431 - DNA, 18 bp, Artificial Sequence
  Description of Artificial Sequence: Synthetic oligonucleotide
ccccgtgaagtctctgag

SEQ ID NO: 7432 - DNA, 18 bp, Artificial Sequence
  Description of Artificial Sequence: Synthetic oligonucleotide
ctcacccccgtgaagtct

SEQ ID NO: 7433 - DNA, 18 bp, Artificial Sequence
  Description of Artificial Sequence: Synthetic oligonucleotide
acagactcacccccgtga

SEQ ID NO: 7434 - DNA, 18 bp, Artificial Sequence
  Description of Artificial Sequence: Synthetic oligonucleotide
aacccacagactcacccc

SEQ ID NO: 7435 - DNA, 18 bp, Artificial Sequence
  Description of Artificial Sequence: Synthetic oligonucleotide
tgaggaacccacagactc

SEQ ID NO: 7436 - DNA, 18 bp, Artificial Sequence
  Description of Artificial Sequence: Synthetic oligonucleotide
tttcgtgaggaacccaca

SEQ ID NO: 7437 - DNA, 18 bp, Artificial Sequence
  Description of Artificial Sequence: Synthetic oligonucleotide
acctatttcgtgaggaac

SEQ ID NO: 7438 - DNA, 18 bp, Artificial Sequence
  Description of Artificial Sequence: Synthetic oligonucleotide
atgacacctatttcgtga

SEQ ID NO: 7439 - DNA, 18 bp, Artificial Sequence
  Description of Artificial Sequence: Synthetic oligonucleotide
cagcaatgacacctattt

SEQ ID NO: 7440 - DNA, 18 bp, Artificial Sequence
  Description of Artificial Sequence: Synthetic oligonucleotide
ggggacagcaatgacacc

SEQ ID NO: 7441 - DNA, 18 bp, Artificial Sequence
  Description of Artificial Sequence: Synthetic oligonucleotide
acaatggggacagcaatg

SEQ ID NO: 7442 - DNA, 18 bp, Artificial Sequence
  Description of Artificial Sequence: Synthetic oligonucleotide
cctgtacaatggggacag

SEQ ID NO: 7443 - DNA, 18 bp, Artificial Sequence
  Description of Artificial Sequence: Synthetic oligonucleotide
tctcacctgtacaatggg

SEQ ID NO: 7444 - DNA, 18 bp, Artificial Sequence
  Description of Artificial Sequence: Synthetic oligonucleotide
agcattctcacctgtaca

SEQ ID NO: 7445 - DNA, 18 bp, Artificial Sequence
  Description of Artificial Sequence: Synthetic oligonucleotide
acctcagcattctcacct

SEQ ID NO: 7446 - DNA, 18 bp, Artificial Sequence
  Description of Artificial Sequence: Synthetic oligonucleotide
gctgcacctcagcattct

SEQ ID NO: 7447 - DNA, 18 bp, Artificial Sequence
  Description of Artificial Sequence: Synthetic oligonucleotide
agctggctgcacctcagc

SEQ ID NO: 7448 - DNA, 18 bp, Artificial Sequence
  Description of Artificial Sequence: Synthetic oligonucleotide
catgaagctggctgcacc

SEQ ID NO: 7449 - DNA, 18 bp, Artificial Sequence
  Description of Artificial Sequence: Synthetic oligonucleotide
aagttcatgaagctggct

SEQ ID NO: 7450 - DNA, 18 bp, Artificial Sequence
  Description of Artificial Sequence: Synthetic oligonucleotide
tggttaagttcatgaagc

SEQ ID NO: 7451 - DNA, 18 bp, Artificial Sequence
  Description of Artificial Sequence: Synthetic oligonucleotide
agtcctggttaagttcat

SEQ ID NO: 7452 - DNA, 18 bp, Artificial Sequence
  Description of Artificial Sequence: Synthetic oligonucleotide
gtgtaagtcctggttaag

SEQ ID NO: 7453 - DNA, 18 bp, Artificial Sequence
  Description of Artificial Sequence: Synthetic oligonucleotide
cccaggtgtaagtcctgg

SEQ ID NO: 7454 - DNA, 18 bp, Artificial Sequence
  Description of Artificial Sequence: Synthetic oligonucleotide
gcagacccaggtgtaagt

SEQ ID NO: 7455 - DNA, 18 bp, Artificial Sequence
  Description of Artificial Sequence: Synthetic oligonucleotide
gcttgttcctcaggccaa

SEQ ID NO: 7456 - DNA, 18 bp, Artificial Sequence
  Description of Artificial Sequence: Synthetic oligonucleotide
tgggggcttgttcctcag

SEQ ID NO: 7457 - DNA, 18 bp, Artificial Sequence
  Description of Artificial Sequence: Synthetic oligonucleotide
ggcagtgggggcttgttc

SEQ ID NO: 7458 - DNA, 18 bp, Artificial Sequence
  Description of Artificial Sequence: Synthetic oligonucleotide
gtactggcagtgggggct

SEQ ID NO: 7459 - DNA, 18 bp, Artificial Sequence
  Description of Artificial Sequence: Synthetic oligonucleotide
tccatgtactggcagtgg

SEQ ID NO: 7460 - DNA, 18 bp, Artificial Sequence
  Description of Artificial Sequence: Synthetic oligonucleotide
ctgcctccatgtactggc

SEQ ID NO: 7461 - DNA, 18 bp, Artificial Sequence
  Description of Artificial Sequence: Synthetic oligonucleotide
actgactgcctccatgta

SEQ ID NO: 7462 - DNA, 18 bp, Artificial Sequence
  Description of Artificial Sequence: Synthetic oligonucleotide
agtacactgactgcctcc

SEQ ID NO: 7463 - DNA, 18 bp, Artificial Sequence
  Description of Artificial Sequence: Synthetic oligonucleotide
agtctagtacactgactg

SEQ ID NO: 7464 - DNA, 18 bp, Artificial Sequence
  Description of Artificial Sequence: Synthetic oligonucleotide
tactaagtctagtacact

SEQ ID NO: 7465 - DNA, 18 bp, Artificial Sequence
  Description of Artificial Sequence: Synthetic oligonucleotide
ttacctactaagtctagt

SEQ ID NO: 7466 - DNA, 18 bp, Artificial Sequence
  Description of Artificial Sequence: Synthetic oligonucleotide
aacatttacctactaagt

SEQ ID NO: 7467 - DNA, 18 bp, Artificial Sequence
  Description of Artificial Sequence: Synthetic oligonucleotide
aattaaacatttacctac

SEQ ID NO: 7468 - DNA, 18 bp, Artificial Sequence
  Description of Artificial Sequence: Synthetic oligonucleotide
ttcaaaattaaacattta

SEQ ID NO: 7469 - DNA, 18 bp, Artificial Sequence
  Description of Artificial Sequence: Synthetic oligonucleotide
cagtcttcaaaattaaac

SEQ ID NO: 7470 - DNA, 18 bp, Artificial Sequence
  Description of Artificial Sequence: Synthetic oligonucleotide
aatatcagtcttcaaaat

SEQ ID NO: 7471 - DNA, 18 bp, Artificial Sequence
  Description of Artificial Sequence: Synthetic oligonucleotide
tttctaatatcagtcttc

SEQ ID NO: 7472 - DNA, 18 bp, Artificial Sequence
  Description of Artificial Sequence: Synthetic oligonucleotide
cttcatttctaatatcag

SEQ ID NO: 7473 - DNA, 18 bp, Artificial Sequence
  Description of Artificial Sequence: Synthetic oligonucleotide
actttcttcatttctaat

SEQ ID NO: 7474 - DNA, 18 bp, Artificial Sequence
  Description of Artificial Sequence: Synthetic oligonucleotide
ttctcactttcttcattt

SEQ ID NO: 7475 - DNA, 18 bp, Artificial Sequence
  Description of Artificial Sequence: Synthetic oligonucleotide
aaaggttctcactttctt

SEQ ID NO: 7476 - DNA, 18 bp, Artificial Sequence
  Description of Artificial Sequence: Synthetic oligonucleotide
aagacaaaggttctcact

SEQ ID NO: 7477 - DNA, 18 bp, Artificial Sequence
  Description of Artificial Sequence: Synthetic oligonucleotide
tttgtaagacaaaggttc

SEQ ID NO: 7478 - DNA, 18 bp, Artificial Sequence
  Description of Artificial Sequence: Synthetic oligonucleotide
gttggtttgtaagacaaa

SEQ ID NO: 7479 - DNA, 18 bp, Artificial Sequence
  Description of Artificial Sequence: Synthetic oligonucleotide
ggagagttggtttgtaag

SEQ ID NO: 7480 - DNA, 18 bp, Artificial Sequence
  Description of Artificial Sequence: Synthetic oligonucleotide
cgagcggagagttggttt

SEQ ID NO: 7481 - DNA, 18 bp, Artificial Sequence
  Description of Artificial Sequence: Synthetic oligonucleotide
catggcgagcggagagtt

SEQ ID NO: 7482 - DNA, 18 bp, Artificial Sequence
  Description of Artificial Sequence: Synthetic oligonucleotide
tataacatggcgagcgga

SEQ ID NO: 7483 - DNA, 18 bp, Artificial Sequence
  Description of Artificial Sequence: Synthetic oligonucleotide
cagcctataacatggcga

SEQ ID NO: 7484 - DNA, 18 bp, Artificial Sequence
  Description of Artificial Sequence: Synthetic oligonucleotide
tacttcagcctataacat

SEQ ID NO: 7485 - DNA, 18 bp, Artificial Sequence
  Description of Artificial Sequence: Synthetic oligonucleotide
gtgtttacttcagcctat

SEQ ID NO: 7486 - DNA, 18 bp, Artificial Sequence
  Description of Artificial Sequence: Synthetic oligonucleotide
caactgtgtttacttcag

SEQ ID NO: 7487 - DNA, 18 bp, Artificial Sequence
  Description of Artificial Sequence: Synthetic oligonucleotide
ttcatcaactgtgtttac

SEQ ID NO: 7488 - DNA, 18 bp, Artificial Sequence
  Description of Artificial Sequence: Synthetic oligonucleotide
ggggcgtgggtgggggcc

SEQ ID NO: 7489 - DNA, 18 bp, Artificial Sequence
  Description of Artificial Sequence: Synthetic oligonucleotide
gcccgggggcgtgggtgg

SEQ ID NO: 7490 - DNA, 18 bp, Artificial Sequence
  Description of Artificial Sequence: Synthetic oligonucleotide
ccccggcccgggggcgtg

SEQ ID NO: 7491 - DNA, 18 bp, Artificial Sequence
  Description of Artificial Sequence: Synthetic oligonucleotide
cgcctccccggcccgggg

SEQ ID NO: 7492 - DNA, 18 bp, Artificial Sequence
  Description of Artificial Sequence: Synthetic oligonucleotide
agtcccgcctccccggcc

SEQ ID NO: 7493 - DNA, 18 bp, Artificial Sequence
  Description of Artificial Sequence: Synthetic oligonucleotide
cccgcagtcccgcctccc

SEQ ID NO: 7494 - DNA, 18 bp, Artificial Sequence
  Description of Artificial Sequence: Synthetic oligonucleotide
ggggtcccgcagtcccgc

SEQ ID NO: 7495 - DNA, 18 bp, Artificial Sequence
  Description of Artificial Sequence: Synthetic oligonucleotide
ggccaggggtcccgcagt

SEQ ID NO: 7496 - DNA, 18 bp, Artificial Sequence
  Description of Artificial Sequence: Synthetic oligonucleotide
gcctcggccaggggtccc

SEQ ID NO: 7497 - DNA, 18 bp, Artificial Sequence
  Description of Artificial Sequence: Synthetic oligonucleotide
gctgcgcctcggccaggg

SEQ ID NO: 7498 - DNA, 18 bp, Artificial Sequence
  Description of Artificial Sequence: Synthetic oligonucleotide
ggcgagctgcgcctcggc

SEQ ID NO: 7499 - DNA, 18 bp, Artificial Sequence
  Description of Artificial Sequence: Synthetic oligonucleotide
acgagggcgagctgcgcc

SEQ ID NO: 7500 - DNA, 18 bp, Artificial Sequence
  Description of Artificial Sequence: Synthetic oligonucleotide
gctgtacgagggcgagct

SEQ ID NO: 7501 - DNA, 18 bp, Artificial Sequence
  Description of Artificial Sequence: Synthetic oligonucleotide
gcggggctgtacgagggc

SEQ ID NO: 7502 - DNA, 18 bp, Artificial Sequence
  Description of Artificial Sequence: Synthetic oligonucleotide
gcgccgcggggctgtacg

SEQ ID NO: 7503 - DNA, 18 bp, Artificial Sequence
  Description of Artificial Sequence: Synthetic oligonucleotide
tcgtggcgccgcggggct

SEQ ID NO: 7504 - DNA, 18 bp, Artificial Sequence
  Description of Artificial Sequence: Synthetic oligonucleotide
ggggatcgtggcgccgcg

SEQ ID NO: 7505 - DNA, 18 bp, Artificial Sequence
  Description of Artificial Sequence: Synthetic oligonucleotide
ggagcggggatcgtggcg

SEQ ID NO: 7506 - DNA, 18 bp, Artificial Sequence
  Description of Artificial Sequence: Synthetic oligonucleotide
agggcggagcggggatcg

SEQ ID NO: 7507 - DNA, 18 bp, Artificial Sequence
  Description of Artificial Sequence: Synthetic oligonucleotide
gcgccagggcggagcggg

SEQ ID NO: 7508 - DNA, 18 bp, Artificial Sequence
  Description of Artificial Sequence: Synthetic oligonucleotide
ccgacgcgccagggcgga

SEQ ID NO: 7509 - DNA, 18 bp, Artificial Sequence
  Description of Artificial Sequence: Synthetic oligonucleotide
agaatccgacgcgccagg

SEQ ID NO: 7510 - DNA, 18 bp, Artificial Sequence
  Description of Artificial Sequence: Synthetic oligonucleotide
ctgcgagaatccgacgcg

SEQ ID NO: 7511 - DNA, 18 bp, Artificial Sequence
  Description of Artificial Sequence: Synthetic oligonucleotide
ggcagctgcgagaatccg

SEQ ID NO: 7512 - DNA, 18 bp, Artificial Sequence
  Description of Artificial Sequence: Synthetic oligonucleotide
gccccggcagctgcgaga

SEQ ID NO: 7513 - DNA, 18 bp, Artificial Sequence
  Description of Artificial Sequence: Synthetic oligonucleotide
ctgccgccccggcagctg

SEQ ID NO: 7514 - DNA, 18 bp, Artificial Sequence
  Description of Artificial Sequence: Synthetic oligonucleotide
gggcgctgccgccccggc

SEQ ID NO: 7515 - DNA, 18 bp, Artificial Sequence
  Description of Artificial Sequence: Synthetic oligonucleotide
ccgacgggcgctgccgcc

SEQ ID NO: 7516 - DNA, 18 bp, Artificial Sequence
  Description of Artificial Sequence: Synthetic oligonucleotide
ctgccccgacgggcgctg

SEQ ID NO: 7517 - DNA, 18 bp, Artificial Sequence
  Description of Artificial Sequence: Synthetic oligonucleotide
gacccctgccccgacggg

SEQ ID NO: 7518 - DNA, 18 bp, Artificial Sequence
  Description of Artificial Sequence: Synthetic oligonucleotide
tgggggacccctgccccg

SEQ ID NO: 7519 - DNA, 18 bp, Artificial Sequence
  Description of Artificial Sequence: Synthetic oligonucleotide
ggggctgggggacccctg

SEQ ID NO: 7520 - DNA, 18 bp, Artificial Sequence
  Description of Artificial Sequence: Synthetic oligonucleotide
gcgcgggggctgggggac

SEQ ID NO: 7521 - DNA, 18 bp, Artificial Sequence
  Description of Artificial Sequence: Synthetic oligonucleotide
aagaggcgcgggggctgg

SEQ ID NO: 7522 - DNA, 18 bp, Artificial Sequence
  Description of Artificial Sequence: Synthetic oligonucleotide
agaggaagaggcgcgggg

SEQ ID NO: 7523 - DNA, 18 bp, Artificial Sequence
  Description of Artificial Sequence: Synthetic oligonucleotide
cgcccagaggaagaggcg

SEQ ID NO: 7524 - DNA, 18 bp, Artificial Sequence
  Description of Artificial Sequence: Synthetic oligonucleotide
gcgctcgcccagaggaag

SEQ ID NO: 7525 - DNA, 18 bp, Artificial Sequence
  Description of Artificial Sequence: Synthetic oligonucleotide
tgcaggcgctcgcccaga

SEQ ID NO: 7526 - DNA, 18 bp, Artificial Sequence
  Description of Artificial Sequence: Synthetic oligonucleotide
tccgctgcaggcgctcgc

SEQ ID NO: 7527 - DNA, 18 bp, Artificial Sequence
  Description of Artificial Sequence: Synthetic oligonucleotide
caccttccgctgcaggcg

SEQ ID NO: 7528 - DNA, 18 bp, Artificial Sequence
  Description of Artificial Sequence: Synthetic oligonucleotide
agctccaccttccgctgc

SEQ ID NO: 7529 - DNA, 18 bp, Artificial Sequence
  Description of Artificial Sequence: Synthetic oligonucleotide
gcaggagctccaccttcc

SEQ ID NO: 7530 - DNA, 18 bp, Artificial Sequence
  Description of Artificial Sequence: Synthetic oligonucleotide
ggtgggcaggagctccac

SEQ ID NO: 7531 - DNA, 18 bp, Artificial Sequence
  Description of Artificial Sequence: Synthetic oligonucleotide
gggcgggtgggcaggagc

SEQ ID NO: 7532 - DNA, 18 bp, Artificial Sequence
  Description of Artificial Sequence: Synthetic oligonucleotide
gcagcgggcgggtgggca

SEQ ID NO: 7533 - DNA, 18 bp, Artificial Sequence
  Description of Artificial Sequence: Synthetic oligonucleotide
atcttgcagcgggcgggt

SEQ ID NO: 7534 - DNA, 18 bp, Artificial Sequence
  Description of Artificial Sequence: Synthetic oligonucleotide
gtcccatcttgcagcggg

SEQ ID NO: 7535 - DNA, 18 bp, Artificial Sequence
  Description of Artificial Sequence: Synthetic oligonucleotide
cggctgtcccatcttgca

SEQ ID NO: 7536 - DNA, 18 bp, Artificial Sequence
  Description of Artificial Sequence: Synthetic oligonucleotide
gcagacggctgtcccatc

SEQ ID NO: 7537 - DNA, 18 bp, Artificial Sequence
  Description of Artificial Sequence: Synthetic oligonucleotide
tgtgagcagacggctgtc

SEQ ID NO: 7538 - DNA, 18 bp, Artificial Sequence
  Description of Artificial Sequence: Synthetic oligonucleotide
tcggttgtgagcagacgg

SEQ ID NO: 7539 - DNA, 18 bp, Artificial Sequence
  Description of Artificial Sequence: Synthetic oligonucleotide
gggcgtcggttgtgagca

SEQ ID NO: 7540 - DNA, 18 bp, Artificial Sequence
  Description of Artificial Sequence: Synthetic oligonucleotide
gccctgggcgtcggttgt

SEQ ID NO: 7541 - DNA, 18 bp, Artificial Sequence
  Description of Artificial Sequence: Synthetic oligonucleotide
ccgcagccctgggcgtcg

SEQ ID NO: 7542 - DNA, 18 bp, Artificial Sequence
  Description of Artificial Sequence: Synthetic oligonucleotide
ccctcccgcagccctggg

SEQ ID NO: 7543 - DNA, 18 bp, Artificial Sequence
  Description of Artificial Sequence: Synthetic oligonucleotide
agaccccctcccgcagcc

SEQ ID NO: 7544 - DNA, 18 bp, Artificial Sequence
  Description of Artificial Sequence: Synthetic oligonucleotide
ggacaagaccccctcccg

SEQ ID NO: 7545 - DNA, 18 bp, Artificial Sequence
  Description of Artificial Sequence: Synthetic oligonucleotide
accttggacaagaccccc

SEQ ID NO: 7546 - DNA, 18 bp, Artificial Sequence
  Description of Artificial Sequence: Synthetic oligonucleotide
gtctgaccttggacaaga

SEQ ID NO: 7547 - DNA, 18 bp, Artificial Sequence
  Description of Artificial Sequence: Synthetic oligonucleotide
ttggtgtctgaccttgga

SEQ ID NO: 7548 - DNA, 18 bp, Artificial Sequence
  Description of Artificial Sequence: Synthetic oligonucleotide
cgtggttggtgtctgacc

SEQ ID NO: 7549 - DNA, 18 bp, Artificial Sequence
  Description of Artificial Sequence: Synthetic oligonucleotide
ttgcccgtggttggtgtc

SEQ ID NO: 7550 - DNA, 18 bp, Artificial Sequence
  Description of Artificial Sequence: Synthetic oligonucleotide
accttttgcccgtggttg

SEQ ID NO: 7551 - DNA, 18 bp, Artificial Sequence
  Description of Artificial Sequence: Synthetic oligonucleotide
tttgaaccttttgcccgt

SEQ ID NO: 7552 - DNA, 18 bp, Artificial Sequence
  Description of Artificial Sequence: Synthetic oligonucleotide
caacctttgaaccttttg

SEQ ID NO: 7553 - DNA, 18 bp, Artificial Sequence
  Description of Artificial Sequence: Synthetic oligonucleotide
gcacgcaacctttgaacc

SEQ ID NO: 7554 - DNA, 18 bp, Artificial Sequence
  Description of Artificial Sequence: Synthetic oligonucleotide
gggaggcacgcaaccttt

SEQ ID NO: 7555 - DNA, 18 bp, Artificial Sequence
  Description of Artificial Sequence: Synthetic oligonucleotide
gttgggggaggcacgcaa

SEQ ID NO: 7556 - DNA, 18 bp, Artificial Sequence
  Description of Artificial Sequence: Synthetic oligonucleotide
gggaagttgggggaggca

SEQ ID NO: 7557 - DNA, 18 bp, Artificial Sequence
  Description of Artificial Sequence: Synthetic oligonucleotide
gctcggggaagttggggg

SEQ ID NO: 7558 - DNA, 18 bp, Artificial Sequence
  Description of Artificial Sequence: Synthetic oligonucleotide
cgcgggctcggggaagtt

SEQ ID NO: 7559 - DNA, 18 bp, Artificial Sequence
  Description of Artificial Sequence: Synthetic oligonucleotide
cacagcgcgggctcgggg

SEQ ID NO: 7560 - DNA, 18 bp, Artificial Sequence
  Description of Artificial Sequence: Synthetic oligonucleotide
gatcgcacagcgcgggct

SEQ ID NO: 7561 - DNA, 18 bp, Artificial Sequence
  Description of Artificial Sequence: Synthetic oligonucleotide
tcggggatcgcacagcgc

SEQ ID NO: 7562 - DNA, 18 bp, Artificial Sequence
  Description of Artificial Sequence: Synthetic oligonucleotide
cgggatcggggatcgcac

SEQ ID NO: 7563 - DNA, 18 bp, Artificial Sequence
  Description of Artificial Sequence: Synthetic oligonucleotide
ctcaccgggatcggggat

SEQ ID NO: 7564 - DNA, 18 bp, Artificial Sequence
  Description of Artificial Sequence: Synthetic oligonucleotide
tgacactcaccgggatcg

SEQ ID NO: 7565 - DNA, 18 bp, Artificial Sequence
  Description of Artificial Sequence: Synthetic oligonucleotide
agagatgacactcaccgg

SEQ ID NO: 7566 - DNA, 18 bp, Artificial Sequence
  Description of Artificial Sequence: Synthetic oligonucleotide
gctccagagatgacactc

SEQ ID NO: 7567 - DNA, 18 bp, Artificial Sequence
  Description of Artificial Sequence: Synthetic oligonucleotide
ggaaggctccagagatga

SEQ ID NO: 7568 - DNA, 18 bp, Artificial Sequence
  Description of Artificial Sequence: Synthetic oligonucleotide
gaaacggaaggctccaga

SEQ ID NO: 7569 - DNA, 18 bp, Artificial Sequence
  Description of Artificial Sequence: Synthetic oligonucleotide
aggaggaaacggaaggct

SEQ ID NO: 7570 - DNA, 18 bp, Artificial Sequence
  Description of Artificial Sequence: Synthetic oligonucleotide
tacagaggaggaaacgga

SEQ ID NO: 7571 - DNA, 18 bp, Artificial Sequence
  Description of Artificial Sequence: Synthetic oligonucleotide
aggtttacagaggaggaa

SEQ ID NO: 7572 - DNA, 18 bp, Artificial Sequence
  Description of Artificial Sequence: Synthetic oligonucleotide
accccaggtttacagagg

SEQ ID NO: 7573 - DNA, 18 bp, Artificial Sequence
  Description of Artificial Sequence: Synthetic oligonucleotide
ttaccaccccaggtttac

SEQ ID NO: 7574 - DNA, 18 bp, Artificial Sequence
  Description of Artificial Sequence: Synthetic oligonucleotide
catttttaccaccccagg

SEQ ID NO: 7575 - DNA, 18 bp, Artificial Sequence
  Description of Artificial Sequence: Synthetic oligonucleotide
tttaacatttttaccacc

SEQ ID NO: 7576 - DNA, 18 bp, Artificial Sequence
  Description of Artificial Sequence: Synthetic oligonucleotide
acatttttaacattttta

SEQ ID NO: 7577 - DNA, 18 bp, Artificial Sequence
  Description of Artificial Sequence: Synthetic oligonucleotide
cttcaacatttttaacat

SEQ ID NO: 7578 - DNA, 18 bp, Artificial Sequence
  Description of Artificial Sequence: Synthetic oligonucleotide
atacccttcaacattttt

SEQ ID NO: 7579 - DNA, 18 bp, Artificial Sequence
  Description of Artificial Sequence: Synthetic oligonucleotide
ccaacatacccttcaaca

SEQ ID NO: 7580 - DNA, 18 bp, Artificial Sequence
  Description of Artificial Sequence: Synthetic oligonucleotide
aagttccaacataccctt

SEQ ID NO: 7581 - DNA, 18 bp, Artificial Sequence
  Description of Artificial Sequence: Synthetic oligonucleotide
tggccaagttccaacata

SEQ ID NO: 7582 - DNA, 18 bp, Artificial Sequence
  Description of Artificial Sequence: Synthetic oligonucleotide
agctctggccaagttcca

SEQ ID NO: 7583 - DNA, 18 bp, Artificial Sequence
  Description of Artificial Sequence: Synthetic oligonucleotide
ggcgcagctctggccaag

SEQ ID NO: 7584 - DNA, 18 bp, Artificial Sequence
  Description of Artificial Sequence: Synthetic oligonucleotide
gcttgggcgcagctctgg

SEQ ID NO: 7585 - DNA, 18 bp, Artificial Sequence
  Description of Artificial Sequence: Synthetic oligonucleotide
ctggtgcttgggcgcagc

SEQ ID NO: 7586 - DNA, 18 bp, Artificial Sequence
  Description of Artificial Sequence: Synthetic oligonucleotide
acgtaaacatcaaatgtt

SEQ ID NO: 7587 - DNA, 18 bp, Artificial Sequence
  Description of Artificial Sequence: Synthetic oligonucleotide
cttcaacgtaaacatcaa

SEQ ID NO: 7588 - DNA, 18 bp, Artificial Sequence
  Description of Artificial Sequence: Synthetic oligonucleotide
ggaaacttcaacgtaaac

SEQ ID NO: 7589 - DNA, 18 bp, Artificial Sequence
  Description of Artificial Sequence: Synthetic oligonucleotide
ataaaggaaacttcaacg

SEQ ID NO: 7590 - DNA, 18 bp, Artificial Sequence
  Description of Artificial Sequence: Synthetic oligonucleotide
aaacaataaaggaaactt

SEQ ID NO: 7591 - DNA, 18 bp, Artificial Sequence
  Description of Artificial Sequence: Synthetic oligonucleotide
acatcaaacaataaagga

SEQ ID NO: 7592 - DNA, 18 bp, Artificial Sequence
  Description of Artificial Sequence: Synthetic oligonucleotide
aaaagacatcaaacaata

SEQ ID NO: 7593 - DNA, 18 bp, Artificial Sequence
  Description of Artificial Sequence: Synthetic oligonucleotide
aaacaaaaagacatcaaa

SEQ ID NO: 7594 - DNA, 18 bp, Artificial Sequence
  Description of Artificial Sequence: Synthetic oligonucleotide
agcaaaaacaaaaagaca

SEQ ID NO: 7595 - DNA, 18 bp, Artificial Sequence
  Description of Artificial Sequence: Synthetic oligonucleotide
taaaaagcaaaaacaaaa

SEQ ID NO: 7596 - DNA, 18 bp, Artificial Sequence
  Description of Artificial Sequence: Synthetic oligonucleotide
gctcctaaaaagcaaaaa

SEQ ID NO: 7597 - DNA, 18 bp, Artificial Sequence
  Description of Artificial Sequence: Synthetic oligonucleotide
cccctgctcctaaaaagc

SEQ ID NO: 7598 - DNA, 18 bp, Artificial Sequence
  Description of Artificial Sequence: Synthetic oligonucleotide
taagacccctgctcctaa

SEQ ID NO: 7599 - DNA, 18 bp, Artificial Sequence
  Description of Artificial Sequence: Synthetic oligonucleotide
agagttaagacccctgct

SEQ ID NO: 7600 - DNA, 18 bp, Artificial Sequence
  Description of Artificial Sequence: Synthetic oligonucleotide
gtgacagagttaagaccc

SEQ ID NO: 7601 - DNA, 18 bp, Artificial Sequence
  Description of Artificial Sequence: Synthetic oligonucleotide
cctgggtgacagagttaa

SEQ ID NO: 7602 - DNA, 18 bp, Artificial Sequence
  Description of Artificial Sequence: Synthetic oligonucleotide
tccagcctgggtgacaga

SEQ ID NO: 7603 - DNA, 18 bp, Artificial Sequence
  Description of Artificial Sequence: Synthetic oligonucleotide
tgcactccagcctgggtg

SEQ ID NO: 7604 - DNA, 18 bp, Artificial Sequence
  Description of Artificial Sequence: Synthetic oligonucleotide
gcctctgcactccagcct

SEQ ID NO: 7605 - DNA, 18 bp, Artificial Sequence
  Description of Artificial Sequence: Synthetic oligonucleotide
atggcgcctctgcactcc

SEQ ID NO: 7606 - DNA, 18 bp, Artificial Sequence
  Description of Artificial Sequence: Synthetic oligonucleotide
ctatgatggcgcctctgc

SEQ ID NO: 7607 - DNA, 18 bp, Artificial Sequence
  Description of Artificial Sequence: Synthetic oligonucleotide
gtgagctatgatggcgcc

SEQ ID NO: 7608 - DNA, 18 bp, Artificial Sequence
  Description of Artificial Sequence: Synthetic oligonucleotide
gagcagtgagctatgatg

SEQ ID NO: 7609 - DNA, 18 bp, Artificial Sequence
  Description of Artificial Sequence: Synthetic oligonucleotide
cccaggagcagtgagcta

SEQ ID NO: 7610 - DNA, 18 bp, Artificial Sequence
  Description of Artificial Sequence: Synthetic oligonucleotide
ttgagcccaggagcagtg

SEQ ID NO: 7611 - DNA, 18 bp, Artificial Sequence
  Description of Artificial Sequence: Synthetic oligonucleotide
atcgcttgagcccaggag

SEQ ID NO: 7612 - DNA, 18 bp, Artificial Sequence
  Description of Artificial Sequence: Synthetic oligonucleotide
ggaggatcgcttgagccc

SEQ ID NO: 7613 - DNA, 18 bp, Artificial Sequence
  Description of Artificial Sequence: Synthetic oligonucleotide
aggcaggaggatcgcttg

SEQ ID NO: 7614 - DNA, 18 bp, Artificial Sequence
  Description of Artificial Sequence: Synthetic oligonucleotide
ggctgaggcaggaggatc

SEQ ID NO: 7615 - DNA, 18 bp, Artificial Sequence
  Description of Artificial Sequence: Synthetic oligonucleotide
cagaaggctgaggcagga

SEQ ID NO: 7616 - DNA, 18 bp, Artificial Sequence
  Description of Artificial Sequence: Synthetic oligonucleotide
cgactcagaaggctgagg

SEQ ID NO: 7617 - DNA, 18 bp, Artificial Sequence
  Description of Artificial Sequence: Synthetic oligonucleotide
cccagcgactcagaaggc

SEQ ID NO: 7618 - DNA, 18 bp, Artificial Sequence
  Description of Artificial Sequence: Synthetic oligonucleotide
gtaatcccagcgactcag

SEQ ID NO: 7619 - DNA, 18 bp, Artificial Sequence
  Description of Artificial Sequence: Synthetic oligonucleotide
tgcctgtaatcccagcga

SEQ ID NO: 7620 - DNA, 18 bp, Artificial Sequence
  Description of Artificial Sequence: Synthetic oligonucleotide
gcacatgcctgtaatccc

SEQ ID NO: 7621 - DNA, 18 bp, Artificial Sequence
  Description of Artificial Sequence: Synthetic oligonucleotide
cagtggcacatgcctgta

SEQ ID NO: 7622 - DNA, 18 bp, Artificial Sequence
  Description of Artificial Sequence: Synthetic oligonucleotide
aggcacagtggcacatgc

SEQ ID NO: 7623 - DNA, 18 bp, Artificial Sequence
  Description of Artificial Sequence: Synthetic oligonucleotide
gggccaggcacagtggca

SEQ ID NO: 7624 - DNA, 18 bp, Artificial Sequence
  Description of Artificial Sequence: Synthetic oligonucleotide
ctcaggggccaggcacag

SEQ ID NO: 7625 - DNA, 18 bp, Artificial Sequence
  Description of Artificial Sequence: Synthetic oligonucleotide
aaaccctcaggggccagg

SEQ ID NO: 7626 - DNA, 18 bp, Artificial Sequence
  Description of Artificial Sequence: Synthetic oligonucleotide
tcaaaaaaccctcagggg

SEQ ID NO: 7627 - DNA, 18 bp, Artificial Sequence
  Description of Artificial Sequence: Synthetic oligonucleotide
tataatcaaaaaaccctc

SEQ ID NO: 7628 - DNA, 18 bp, Artificial Sequence
  Description of Artificial Sequence: Synthetic oligonucleotide
taatctataatcaaaaaa

SEQ ID NO: 7629 - DNA, 18 bp, Artificial Sequence
  Description of Artificial Sequence: Synthetic oligonucleotide
gcctctaatctataatca

SEQ ID NO: 7630 - DNA, 18 bp, Artificial Sequence
  Description of Artificial Sequence: Synthetic oligonucleotide
tctaggcctctaatctat

SEQ ID NO: 7631 - DNA, 18 bp, Artificial Sequence
  Description of Artificial Sequence: Synthetic oligonucleotide
tattttctaggcctctaa

SEQ ID NO: 7632 - DNA, 18 bp, Artificial Sequence
  Description of Artificial Sequence: Synthetic oligonucleotide
ataggtattttctaggcc

SEQ ID NO: 7633 - DNA, 18 bp, Artificial Sequence
  Description of Artificial Sequence: Synthetic oligonucleotide
tgtctataggtattttct

SEQ ID NO: 7634 - DNA, 18 bp, Artificial Sequence
  Description of Artificial Sequence: Synthetic oligonucleotide
ctacatgtctataggtat

SEQ ID NO: 7635 - DNA, 18 bp, Artificial Sequence
  Description of Artificial Sequence: Synthetic oligonucleotide
tatgcctacatgtctata

SEQ ID NO: 7636 - DNA, 18 bp, Artificial Sequence
  Description of Artificial Sequence: Synthetic oligonucleotide
aaatttatgcctacatgt

SEQ ID NO: 7637 - DNA, 18 bp, Artificial Sequence
  Description of Artificial Sequence: Synthetic oligonucleotide
gaggtaaatttatgccta

SEQ ID NO: 7638 - DNA, 18 bp, Artificial Sequence
  Description of Artificial Sequence: Synthetic oligonucleotide
tcaaggaggtaaatttat

SEQ ID NO: 7639 - DNA, 18 bp, Artificial Sequence
  Description of Artificial Sequence: Synthetic oligonucleotide
gaatatcaaggaggtaaa

SEQ ID NO: 7640 - DNA, 18 bp, Artificial Sequence
  Description of Artificial Sequence: Synthetic oligonucleotide
acgcagaatatcaaggag

SEQ ID NO: 7641 - DNA, 18 bp, Artificial Sequence
  Description of Artificial Sequence: Synthetic oligonucleotide
tttctacgcagaatatca

SEQ ID NO: 7642 - DNA, 18 bp, Artificial Sequence
  Description of Artificial Sequence: Synthetic oligonucleotide
ccccagcggcccaggggt

SEQ ID NO: 7643 - DNA, 18 bp, Artificial Sequence
  Description of Artificial Sequence: Synthetic oligonucleotide
ccgccccccagcggccca

SEQ ID NO: 7644 - DNA, 18 bp, Artificial Sequence
  Description of Artificial Sequence: Synthetic oligonucleotide
gccccccgccccccagcg

SEQ ID NO: 7645 - DNA, 18 bp, Artificial Sequence
  Description of Artificial Sequence: Synthetic oligonucleotide
cgcccgccccccgccccc

SEQ ID NO: 7646 - DNA, 18 bp, Artificial Sequence
  Description of Artificial Sequence: Synthetic oligonucleotide
cctggcgcccgccccccg

SEQ ID NO: 7647 - DNA, 18 bp, Artificial Sequence
  Description of Artificial Sequence: Synthetic oligonucleotide
gagagcctggcgcccgcc

SEQ ID NO: 7648 - DNA, 18 bp, Artificial Sequence
  Description of Artificial Sequence: Synthetic oligonucleotide
aaggggagagcctggcgc

SEQ ID NO: 7649 - DNA, 18 bp, Artificial Sequence
  Description of Artificial Sequence: Synthetic oligonucleotide
gcggaaaggggagagcct

SEQ ID NO: 7650 - DNA, 18 bp, Artificial Sequence
  Description of Artificial Sequence: Synthetic oligonucleotide
gctgggcggaaaggggag

SEQ ID NO: 7651 - DNA, 18 bp, Artificial Sequence
  Description of Artificial Sequence: Synthetic oligonucleotide
ggcgggctgggcggaaag

SEQ ID NO: 7652 - DNA, 18 bp, Artificial Sequence
  Description of Artificial Sequence: Synthetic oligonucleotide
cccagggcgggctgggcg

SEQ ID NO: 7653 - DNA, 18 bp, Artificial Sequence
  Description of Artificial Sequence: Synthetic oligonucleotide
gccagcccagggcgggct

SEQ ID NO: 7654 - DNA, 18 bp, Artificial Sequence
  Description of Artificial Sequence: Synthetic oligonucleotide
gaggggccagcccagggc

SEQ ID NO: 7655 - DNA, 18 bp, Artificial Sequence
  Description of Artificial Sequence: Synthetic oligonucleotide
ctggcgaggggccagccc

SEQ ID NO: 7656 - DNA, 18 bp, Artificial Sequence
  Description of Artificial Sequence: Synthetic oligonucleotide
tggcgctggcgaggggcc

SEQ ID NO: 7657 - DNA, 18 bp, Artificial Sequence
  Description of Artificial Sequence: Synthetic oligonucleotide
caaggtggcgctggcgag

SEQ ID NO: 7658 - DNA, 18 bp, Artificial Sequence
  Description of Artificial Sequence: Synthetic oligonucleotide
gcggtcaaggtggcgctg

SEQ ID NO: 7659 - DNA, 18 bp, Artificial Sequence
  Description of Artificial Sequence: Synthetic oligonucleotide
ggtccgcggtcaaggtgg

SEQ ID NO: 7660 - DNA, 18 bp, Artificial Sequence
  Description of Artificial Sequence: Synthetic oligonucleotide
cttgaggtccgcggtcaa

SEQ ID NO: 7661 - DNA, 18 bp, Artificial Sequence
  Description of Artificial Sequence: Synthetic oligonucleotide
tgggccttgaggtccgcg

SEQ ID NO: 7662 - DNA, 18 bp, Artificial Sequence
  Description of Artificial Sequence: Synthetic oligonucleotide
ggcgctgggccttgaggt

SEQ ID NO: 7663 - DNA, 18 bp, Artificial Sequence
  Description of Artificial Sequence: Synthetic oligonucleotide
gggagggcgctgggcctt

SEQ ID NO: 7664 - DNA, 18 bp, Artificial Sequence
  Description of Artificial Sequence: Synthetic oligonucleotide
ccccggggagggcgctgg

SEQ ID NO: 7665 - DNA, 18 bp, Artificial Sequence
  Description of Artificial Sequence: Synthetic oligonucleotide
ggtggccccggggagggc

SEQ ID NO: 7666 - DNA, 18 bp, Artificial Sequence
  Description of Artificial Sequence: Synthetic oligonucleotide
cgctgggtggccccgggg

SEQ ID NO: 7667 - DNA, 18 bp, Artificial Sequence
  Description of Artificial Sequence: Synthetic oligonucleotide
atggccgctgggtggccc

SEQ ID NO: 7668 - DNA, 18 bp, Artificial Sequence
  Description of Artificial Sequence: Synthetic oligonucleotide
gggagatggccgctgggt

SEQ ID NO: 7669 - DNA, 18 bp, Artificial Sequence
  Description of Artificial Sequence: Synthetic oligonucleotide
gaaaagggagatggccgc

SEQ ID NO: 7670 - DNA, 18 bp, Artificial Sequence
  Description of Artificial Sequence: Synthetic oligonucleotide
ggtgagaaaagggagatg

SEQ ID NO: 7671 - DNA, 18 bp, Artificial Sequence
  Description of Artificial Sequence: Synthetic oligonucleotide
cactcggtgagaaaaggg

SEQ ID NO: 7672 - DNA, 18 bp, Artificial Sequence
  Description of Artificial Sequence: Synthetic oligonucleotide
tcagccactcggtgagaa

SEQ ID NO: 7673 - DNA, 18 bp, Artificial Sequence
  Description of Artificial Sequence: Synthetic oligonucleotide
ctcactcagccactcggt

SEQ ID NO: 7674 - DNA, 18 bp, Artificial Sequence
  Description of Artificial Sequence: Synthetic oligonucleotide
gagacctcactcagccac

SEQ ID NO: 7675 - DNA, 18 bp, Artificial Sequence
  Description of Artificial Sequence: Synthetic oligonucleotide
ccccagagacctcactca

SEQ ID NO: 7676 - DNA, 18 bp, Artificial Sequence
  Description of Artificial Sequence: Synthetic oligonucleotide
tcaacccccagagacctc

SEQ ID NO: 7677 - DNA, 18 bp, Artificial Sequence
  Description of Artificial Sequence: Synthetic oligonucleotide
ccaactcaacccccagag

SEQ ID NO: 7678 - DNA, 18 bp, Artificial Sequence
  Description of Artificial Sequence: Synthetic oligonucleotide
cagtcccaactcaacccc

SEQ ID NO: 7679 - DNA, 18 bp, Artificial Sequence
  Description of Artificial Sequence: Synthetic oligonucleotide
aggcccagtcccaactca

SEQ ID NO: 7680 - DNA, 18 bp, Artificial Sequence
  Description of Artificial Sequence: Synthetic oligonucleotide
gaaccaggcccagtccca

SEQ ID NO: 7681 - DNA, 18 bp, Artificial Sequence
  Description of Artificial Sequence: Synthetic oligonucleotide
ctggagaaccaggcccag

SEQ ID NO: 7682 - DNA, 18 bp, Artificial Sequence
  Description of Artificial Sequence: Synthetic oligonucleotide
cagtcctggagaaccagg

SEQ ID NO: 7683 - DNA, 18 bp, Artificial Sequence
  Description of Artificial Sequence: Synthetic oligonucleotide
gtgtacagtcctggagaa

SEQ ID NO: 7684 - DNA, 18 bp, Artificial Sequence
  Description of Artificial Sequence: Synthetic oligonucleotide
tgcaagtgtacagtcctg

SEQ ID NO: 7685 - DNA, 18 bp, Artificial Sequence
  Description of Artificial Sequence: Synthetic oligonucleotide
ggtcttgcaagtgtacag

SEQ ID NO: 7686 - DNA, 18 bp, Artificial Sequence
  Description of Artificial Sequence: Synthetic oligonucleotide
tctggggtcttgcaagtg

SEQ ID NO: 7687 - DNA, 18 bp, Artificial Sequence
  Description of Artificial Sequence: Synthetic oligonucleotide
tgaactctggggtcttgc

SEQ ID NO: 7688 - DNA, 18 bp, Artificial Sequence
  Description of Artificial Sequence: Synthetic oligonucleotide
cccgatgaactctggggt

SEQ ID NO: 7689 - DNA, 18 bp, Artificial Sequence
  Description of Artificial Sequence: Synthetic oligonucleotide
atctgcccgatgaactct

SEQ ID NO: 7690 - DNA, 18 bp, Artificial Sequence
  Description of Artificial Sequence: Synthetic oligonucleotide
tgaggatctgcccgatga

SEQ ID NO: 7691 - DNA, 18 bp, Artificial Sequence
  Description of Artificial Sequence: Synthetic oligonucleotide
aacagtgaggatctgccc

SEQ ID NO: 7692 - DNA, 18 bp, Artificial Sequence
  Description of Artificial Sequence: Synthetic oligonucleotide
tctgtaacagtgaggatc

SEQ ID NO: 7693 - DNA, 18 bp, Artificial Sequence
  Description of Artificial Sequence: Synthetic oligonucleotide
actcgtctgtaacagtga

SEQ ID NO: 7694 - DNA, 18 bp, Artificial Sequence
  Description of Artificial Sequence: Synthetic oligonucleotide
ggtgtactcgtctgtaac

SEQ ID NO: 7695 - DNA, 18 bp, Artificial Sequence
  Description of Artificial Sequence: Synthetic oligonucleotide
gcctcggtgtactcgtct

SEQ ID NO: 7696 - DNA, 18 bp, Artificial Sequence
  Description of Artificial Sequence: Synthetic oligonucleotide
ttggggcctcggtgtact

SEQ ID NO: 7697 - DNA, 18 bp, Artificial Sequence
  Description of Artificial Sequence: Synthetic oligonucleotide
ccctcttggggcctcggt

SEQ ID NO: 7698 - DNA, 18 bp, Artificial Sequence
  Description of Artificial Sequence: Synthetic oligonucleotide
cctccccctcttggggcc

SEQ ID NO: 7699 - DNA, 18 bp, Artificial Sequence
  Description of Artificial Sequence: Synthetic oligonucleotide
agccacctccccctcttg

SEQ ID NO: 7700 - DNA, 18 bp, Artificial Sequence
  Description of Artificial Sequence: Synthetic oligonucleotide
tggcgagccacctccccc

SEQ ID NO: 7701 - DNA, 18 bp, Artificial Sequence
  Description of Artificial Sequence: Synthetic oligonucleotide
caacttggcgagccacct

SEQ ID NO: 7702 - DNA, 18 bp, Artificial Sequence
  Description of Artificial Sequence: Synthetic oligonucleotide
gtctgcaacttggcgagc

SEQ ID NO: 7703 - DNA, 18 bp, Artificial Sequence
  Description of Artificial Sequence: Synthetic oligonucleotide
actctgtctgcaacttgg

SEQ ID NO: 7704 - DNA, 18 bp, Artificial Sequence
  Description of Artificial Sequence: Synthetic oligonucleotide
gtctcactctgtctgcaa

SEQ ID NO: 7705 - DNA, 18 bp, Artificial Sequence
  Description of Artificial Sequence: Synthetic oligonucleotide
cgggagtctcactctgtc

SEQ ID NO: 7706 - DNA, 18 bp, Artificial Sequence
  Description of Artificial Sequence: Synthetic oligonucleotide
cagggcgggagtctcact

SEQ ID NO: 7707 - DNA, 18 bp, Artificial Sequence
  Description of Artificial Sequence: Synthetic oligonucleotide
cacggcagggcgggagtc

SEQ ID NO: 7708 - DNA, 18 bp, Artificial Sequence
  Description of Artificial Sequence: Synthetic oligonucleotide
ggatccacggcagggcgg

SEQ ID NO: 7709 - DNA, 18 bp, Artificial Sequence
  Description of Artificial Sequence: Synthetic oligonucleotide
cgacgggatccacggcag

SEQ ID NO: 7710 - DNA, 18 bp, Artificial Sequence
  Description of Artificial Sequence: Synthetic oligonucleotide
cattgcgacgggatccac

SEQ ID NO: 7711 - DNA, 18 bp, Artificial Sequence
  Description of Artificial Sequence: Synthetic oligonucleotide
cgtctcattgcgacggga

SEQ ID NO: 7712 - DNA, 18 bp, Artificial Sequence
  Description of Artificial Sequence: Synthetic oligonucleotide
agcaacgtctcattgcga

SEQ ID NO: 7713 - DNA, 18 bp, Artificial Sequence
  Description of Artificial Sequence: Synthetic oligonucleotide
ggggcagcaacgtctcat

SEQ ID NO: 7714 - DNA, 18 bp, Artificial Sequence
  Description of Artificial Sequence: Synthetic oligonucleotide
cgccaggggcagcaacgt

SEQ ID NO: 7715 - DNA, 18 bp, Artificial Sequence
  Description of Artificial Sequence: Synthetic oligonucleotide
cacagcgccaggggcagc

SEQ ID NO: 7716 - DNA, 18 bp, Artificial Sequence
  Description of Artificial Sequence: Synthetic oligonucleotide
aggggcacagcgccaggg

SEQ ID NO: 7717 - DNA, 18 bp, Artificial Sequence
  Description of Artificial Sequence: Synthetic oligonucleotide
gagagaggggcacagcgc

SEQ ID NO: 7718 - DNA, 18 bp, Artificial Sequence
  Description of Artificial Sequence: Synthetic oligonucleotide
gagctgagagaggggcac

SEQ ID NO: 7719 - DNA, 18 bp, Artificial Sequence
  Description of Artificial Sequence: Synthetic oligonucleotide
ggcaggagctgagagagg

SEQ ID NO: 7720 - DNA, 18 bp, Artificial Sequence
  Description of Artificial Sequence: Synthetic oligonucleotide
agccaggcaggagctgag

SEQ ID NO: 7721 - DNA, 18 bp, Artificial Sequence
  Description of Artificial Sequence: Synthetic oligonucleotide
taggaagccaggcaggag

SEQ ID NO: 7722 - DNA, 18 bp, Artificial Sequence
  Description of Artificial Sequence: Synthetic oligonucleotide
gggagtaggaagccaggc

SEQ ID NO: 7723 - DNA, 18 bp, Artificial Sequence
  Description of Artificial Sequence: Synthetic oligonucleotide
gggcagggagtaggaagc

SEQ ID NO: 7724 - DNA, 18 bp, Artificial Sequence
  Description of Artificial Sequence: Synthetic oligonucleotide
acgcagggcagggagtag

SEQ ID NO: 7725 - DNA, 18 bp, Artificial Sequence
  Description of Artificial Sequence: Synthetic oligonucleotide
gcgggacgcagggcaggg

SEQ ID NO: 7726 - DNA, 18 bp, Artificial Sequence
  Description of Artificial Sequence: Synthetic oligonucleotide
gagccgcgggacgcaggg

SEQ ID NO: 7727 - DNA, 18 bp, Artificial Sequence
  Description of Artificial Sequence: Synthetic oligonucleotide
tgggggagccgcgggacg

SEQ ID NO: 7728 - DNA, 18 bp, Artificial Sequence
  Description of Artificial Sequence: Synthetic oligonucleotide
gaatatgggggagccgcg

SEQ ID NO: 7729 - DNA, 18 bp, Artificial Sequence
  Description of Artificial Sequence: Synthetic oligonucleotide
acctagaatatgggggag

SEQ ID NO: 7730 - DNA, 18 bp, Artificial Sequence
  Description of Artificial Sequence: Synthetic oligonucleotide
ccaccacctagaatatgg

SEQ ID NO: 7731 - DNA, 18 bp, Artificial Sequence
  Description of Artificial Sequence: Synthetic oligonucleotide
taggcccaccacctagaa

SEQ ID NO: 7732 - DNA, 18 bp, Artificial Sequence
  Description of Artificial Sequence: Synthetic oligonucleotide
gggactaggcccaccacc

SEQ ID NO: 7733 - DNA, 18 bp, Artificial Sequence
  Description of Artificial Sequence: Synthetic oligonucleotide
gagaggggactaggccca

SEQ ID NO: 7734 - DNA, 18 bp, Artificial Sequence
  Description of Artificial Sequence: Synthetic oligonucleotide
gggctgagaggggactag

SEQ ID NO: 7735 - DNA, 18 bp, Artificial Sequence
  Description of Artificial Sequence: Synthetic oligonucleotide
cagctgggctgagagggg

SEQ ID NO: 7736 - DNA, 18 bp, Artificial Sequence
  Description of Artificial Sequence: Synthetic oligonucleotide
ctgggcagctgggctgag

SEQ ID NO: 7737 - DNA, 18 bp, Artificial Sequence
  Description of Artificial Sequence: Synthetic oligonucleotide
tcccactgggcagctggg

SEQ ID NO: 7738 - DNA, 18 bp, Artificial Sequence
  Description of Artificial Sequence: Synthetic oligonucleotide
acccctcccactgggcag

SEQ ID NO: 7739 - DNA, 18 bp, Artificial Sequence
  Description of Artificial Sequence: Synthetic oligonucleotide
ccctgacccctcccactg

SEQ ID NO: 7740 - DNA, 18 bp, Artificial Sequence
  Description of Artificial Sequence: Synthetic oligonucleotide
gaccgccctgacccctcc

SEQ ID NO: 7741 - DNA, 18 bp, Artificial Sequence
  Description of Artificial Sequence: Synthetic oligonucleotide
tcccagaccgccctgacc

SEQ ID NO: 7742 - DNA, 18 bp, Artificial Sequence
  Description of Artificial Sequence: Synthetic oligonucleotide
gtatctcccagaccgccc

SEQ ID NO: 7743 - DNA, 18 bp, Artificial Sequence
  Description of Artificial Sequence: Synthetic oligonucleotide
gggccgtatctcccagac

SEQ ID NO: 7744 - DNA, 18 bp, Artificial Sequence
  Description of Artificial Sequence: Synthetic oligonucleotide
ctcctgggccgtatctcc

SEQ ID NO: 7745 - DNA, 18 bp, Artificial Sequence
  Description of Artificial Sequence: Synthetic oligonucleotide
ctctcctcctgggccgta

SEQ ID NO: 7746 - DNA, 18 bp, Artificial Sequence
  Description of Artificial Sequence: Synthetic oligonucleotide
cgaggctctcctcctggg

SEQ ID NO: 7747 - DNA, 18 bp, Artificial Sequence
  Description of Artificial Sequence: Synthetic oligonucleotide
gcaggcgaggctctcctc

SEQ ID NO: 7748 - DNA, 18 bp, Artificial Sequence
  Description of Artificial Sequence: Synthetic oligonucleotide
ggtcagcaggcgaggctc

SEQ ID NO: 7749 - DNA, 18 bp, Artificial Sequence
  Description of Artificial Sequence: Synthetic oligonucleotide
aggccggtcagcaggcga

SEQ ID NO: 7750 - DNA, 18 bp, Artificial Sequence
  Description of Artificial Sequence: Synthetic oligonucleotide
ggcacaggccggtcagca

SEQ ID NO: 7751 - DNA, 18 bp, Artificial Sequence
  Description of Artificial Sequence: Synthetic oligonucleotide
tgtcgggcacaggccggt

SEQ ID NO: 7752 - DNA, 18 bp, Artificial Sequence
  Description of Artificial Sequence: Synthetic oligonucleotide
tgtcacggggcctcgggc

SEQ ID NO: 7753 - DNA, 18 bp, Artificial Sequence
  Description of Artificial Sequence: Synthetic oligonucleotide
cctcctgtcacggggcct

SEQ ID NO: 7754 - DNA, 18 bp, Artificial Sequence
  Description of Artificial Sequence: Synthetic oligonucleotide
ttccccctcctgtcacgg

SEQ ID NO: 7755 - DNA, 18 bp, Artificial Sequence
  Description of Artificial Sequence: Synthetic oligonucleotide
tcaccttccccctcctgt

SEQ ID NO: 7756 - DNA, 18 bp, Artificial Sequence
  Description of Artificial Sequence: Synthetic oligonucleotide
agagctcaccttccccct

SEQ ID NO: 7757 - DNA, 18 bp, Artificial Sequence
  Description of Artificial Sequence: Synthetic oligonucleotide
caggcagagctcaccttc

SEQ ID NO: 7758 - DNA, 18 bp, Artificial Sequence
  Description of Artificial Sequence: Synthetic oligonucleotide
gagctcaggcagagctca

SEQ ID NO: 7759 - DNA, 18 bp, Artificial Sequence
  Description of Artificial Sequence: Synthetic oligonucleotide
gccaagagctcaggcaga

SEQ ID NO: 7760 - DNA, 18 bp, Artificial Sequence
  Description of Artificial Sequence: Synthetic oligonucleotide
gcagggccaagagctcag

SEQ ID NO: 7761 - DNA, 18 bp, Artificial Sequence
  Description of Artificial Sequence: Synthetic oligonucleotide
ctctggcagggccaagag

SEQ ID NO: 7762 - DNA, 18 bp, Artificial Sequence
  Description of Artificial Sequence: Synthetic oligonucleotide
gaagcctctggcagggcc

SEQ ID NO: 7763 - DNA, 18 bp, Artificial Sequence
  Description of Artificial Sequence: Synthetic oligonucleotide
aggcggaagcctctggca

SEQ ID NO: 7764 - DNA, 18 bp, Artificial Sequence
  Description of Artificial Sequence: Synthetic oligonucleotide
atggcaggcggaagcctc

SEQ ID NO: 7765 - DNA, 18 bp, Artificial Sequence
  Description of Artificial Sequence: Synthetic oligonucleotide
ccggaatggcaggcggaa

SEQ ID NO: 7766 - DNA, 18 bp, Artificial Sequence
  Description of Artificial Sequence: Synthetic oligonucleotide
agcccccggaatggcagg

SEQ ID NO: 7767 - DNA, 18 bp, Artificial Sequence
  Description of Artificial Sequence: Synthetic oligonucleotide
gtgggagcccccggaatg

SEQ ID NO: 7768 - DNA, 18 bp, Artificial Sequence
  Description of Artificial Sequence: Synthetic oligonucleotide
aagacgtgggagcccccg

SEQ ID NO: 7769 - DNA, 18 bp, Artificial Sequence
  Description of Artificial Sequence: Synthetic oligonucleotide
tgagtaagacgtgggagc

SEQ ID NO: 7770 - DNA, 18 bp, Artificial Sequence
  Description of Artificial Sequence: Synthetic oligonucleotide
tcgaatgagtaagacgtg

SEQ ID NO: 7771 - DNA, 18 bp, Artificial Sequence
  Description of Artificial Sequence: Synthetic oligonucleotide
ctcgatcgaatgagtaag

SEQ ID NO: 7772 - DNA, 18 bp, Artificial Sequence
  Description of Artificial Sequence: Synthetic oligonucleotide
aaaaactcgatcgaatga

SEQ ID NO: 7773 - DNA, 18 bp, Artificial Sequence
  Description of Artificial Sequence: Synthetic oligonucleotide
aaaaaaaaaactcgatcg

SEQ ID NO: 7774 - DNA, 18 bp, Artificial Sequence
  Description of Artificial Sequence: Synthetic oligonucleotide
aaacaaaaaaaaaaactc

SEQ ID NO: 7775 - DNA, 18 bp, Artificial Sequence
  Description of Artificial Sequence: Synthetic oligonucleotide
aaaacaaacaaaaaaaaa

SEQ ID NO: 7776 - DNA, 18 bp, Artificial Sequence
  Description of Artificial Sequence: Synthetic oligonucleotide
aaacaaaaacaaacaaaa

SEQ ID NO: 7777 - DNA, 18 bp, Artificial Sequence
  Description of Artificial Sequence: Synthetic oligonucleotide
aaaaaaaacaaaaacaaa

SEQ ID NO: 7778 - DNA, 18 bp, Artificial Sequence
  Description of Artificial Sequence: Synthetic oligonucleotide
ggtcgccggtgcccggta

SEQ ID NO: 7779 - DNA, 18 bp, Artificial Sequence
  Description of Artificial Sequence: Synthetic oligonucleotide
gcgaaggtcgccggtgcc

SEQ ID NO: 7780 - DNA, 18 bp, Artificial Sequence
  Description of Artificial Sequence: Synthetic oligonucleotide
ccatggcgaaggtcgccg

SEQ ID NO: 7781 - DNA, 18 bp, Artificial Sequence
  Description of Artificial Sequence: Synthetic oligonucleotide
ctgtcccatggcgaaggt

SEQ ID NO: 7782 - DNA, 18 bp, Artificial Sequence
  Description of Artificial Sequence: Synthetic oligonucleotide
gctccctgtcccatggcg

SEQ ID NO: 7783 - DNA, 18 bp, Artificial Sequence
  Description of Artificial Sequence: Synthetic oligonucleotide
cccacgctccctgtccca

SEQ ID NO: 7784 - DNA, 18 bp, Artificial Sequence
  Description of Artificial Sequence: Synthetic oligonucleotide
ccgttcccacgctccctg

SEQ ID NO: 7785 - DNA, 18 bp, Artificial Sequence
  Description of Artificial Sequence: Synthetic oligonucleotide
gaccgccgttcccacgct

SEQ ID NO: 7786 - DNA, 18 bp, Artificial Sequence
  Description of Artificial Sequence: Synthetic oligonucleotide
cccccgaccgccgttccc

SEQ ID NO: 7787 - DNA, 18 bp, Artificial Sequence
  Description of Artificial Sequence: Synthetic oligonucleotide
ctccgcccccgaccgccg

SEQ ID NO: 7788 - DNA, 18 bp, Artificial Sequence
  Description of Artificial Sequence: Synthetic oligonucleotide
gcctcctccgcccccgac

SEQ ID NO: 7789 - DNA, 18 bp, Artificial Sequence
  Description of Artificial Sequence: Synthetic oligonucleotide
ccgaggcctcctccgccc

SEQ ID NO: 7790 - DNA, 18 bp, Artificial Sequence
  Description of Artificial Sequence: Synthetic oligonucleotide
ccacgccgaggcctcctc

SEQ ID NO: 7791 - DNA, 18 bp, Artificial Sequence
  Description of Artificial Sequence: Synthetic oligonucleotide
tttggccacgccgaggcc

SEQ ID NO: 7792 - DNA, 18 bp, Artificial Sequence
  Description of Artificial Sequence: Synthetic oligonucleotide
ggtgctttggccacgccg

SEQ ID NO: 7793 - DNA, 18 bp, Artificial Sequence
  Description of Artificial Sequence: Synthetic oligonucleotide
atcaaggtgctttggcca

SEQ ID NO: 7794 - DNA, 18 bp, Artificial Sequence
  Description of Artificial Sequence: Synthetic oligonucleotide
attagatcaaggtgcttt

SEQ ID NO: 7795 - DNA, 18 bp, Artificial Sequence
  Description of Artificial Sequence: Synthetic oligonucleotide
aggacattagatcaaggt

SEQ ID NO: 7796 - DNA, 18 bp, Artificial Sequence
  Description of Artificial Sequence: Synthetic oligonucleotide
gggggaggacattagatc

SEQ ID NO: 7797 - DNA, 18 bp, Artificial Sequence
  Description of Artificial Sequence: Synthetic oligonucleotide
cccccgggggaggacatt

SEQ ID NO: 7798 - DNA, 18 bp, Artificial Sequence
  Description of Artificial Sequence: Synthetic oligonucleotide
acgcgcccccgggggagg

SEQ ID NO: 7799 - DNA, 18 bp, Artificial Sequence
  Description of Artificial Sequence: Synthetic oligonucleotide
gtggaacgcgcccccggg

SEQ ID NO: 7800 - DNA, 18 bp, Artificial Sequence
  Description of Artificial Sequence: Synthetic oligonucleotide
ctgctgtggaacgcgccc

SEQ ID NO: 7801 - DNA, 18 bp, Artificial Sequence
  Description of Artificial Sequence: Synthetic oligonucleotide
agcagctgctgtggaacg

SEQ ID NO: 7802 - DNA, 18 bp, Artificial Sequence
  Description of Artificial Sequence: Synthetic oligonucleotide
gtgacagcagctgctgtg

SEQ ID NO: 7803 - DNA, 18 bp, Artificial Sequence
  Description of Artificial Sequence: Synthetic oligonucleotide
cctaagtgacagcagctg

SEQ ID NO: 7804 - DNA, 18 bp, Artificial Sequence
  Description of Artificial Sequence: Synthetic oligonucleotide
ctctgcctaagtgacagc

SEQ ID NO: 7805 - DNA, 18 bp, Artificial Sequence
  Description of Artificial Sequence: Synthetic oligonucleotide
gcaccctctgcctaagtg

SEQ ID NO: 7806 - DNA, 18 bp, Artificial Sequence
  Description of Artificial Sequence: Synthetic oligonucleotide
ggaaggcaccctctgcct

SEQ ID NO: 7807 - DNA, 18 bp, Artificial Sequence
  Description of Artificial Sequence: Synthetic oligonucleotide
cttctggaaggcaccctc

SEQ ID NO: 7808 - DNA, 18 bp, Artificial Sequence
  Description of Artificial Sequence: Synthetic oligonucleotide
tggcgcttctggaaggca

SEQ ID NO: 7809 - DNA, 18 bp, Artificial Sequence
  Description of Artificial Sequence: Synthetic oligonucleotide
agcggtggcgcttctgga

SEQ ID NO: 7810 - DNA, 18 bp, Artificial Sequence
  Description of Artificial Sequence: Synthetic oligonucleotide
tactaagcggtggcgctt

SEQ ID NO: 7811 - DNA, 18 bp, Artificial Sequence
  Description of Artificial Sequence: Synthetic oligonucleotide
cccgctactaagcggtgg

SEQ ID NO: 7812 - DNA, 18 bp, Artificial Sequence
  Description of Artificial Sequence: Synthetic oligonucleotide
caatccccgctactaagc

SEQ ID NO: 7813 - DNA, 18 bp, Artificial Sequence
  Description of Artificial Sequence: Synthetic oligonucleotide
caaggcaatccccgctac

SEQ ID NO: 7814 - DNA, 18 bp, Artificial Sequence
  Description of Artificial Sequence: Synthetic oligonucleotide
atgcacaaggcaatcccc

SEQ ID NO: 7815 - DNA, 18 bp, Artificial Sequence
  Description of Artificial Sequence: Synthetic oligonucleotide
gactcatgcacaaggcaa

SEQ ID NO: 7816 - DNA, 18 bp, Artificial Sequence
  Description of Artificial Sequence: Synthetic oligonucleotide
aatgggactcatgcacaa

SEQ ID NO: 7817 - DNA, 18 bp, Artificial Sequence
  Description of Artificial Sequence: Synthetic oligonucleotide
atggaaatgggactcatg

SEQ ID NO: 7818 - DNA, 18 bp, Artificial Sequence
  Description of Artificial Sequence: Synthetic oligonucleotide
ctcggatggaaatgggac

SEQ ID NO: 7819 - DNA, 18 bp, Artificial Sequence
  Description of Artificial Sequence: Synthetic oligonucleotide
cagctctcggatggaaat

SEQ ID NO: 7820 - DNA, 18 bp, Artificial Sequence
  Description of Artificial Sequence: Synthetic oligonucleotide
gcgcacagctctcggatg

SEQ ID NO: 7821 - DNA, 18 bp, Artificial Sequence
  Description of Artificial Sequence: Synthetic oligonucleotide
ccaaggcgcacagctctc

SEQ ID NO: 7822 - DNA, 18 bp, Artificial Sequence
  Description of Artificial Sequence: Synthetic oligonucleotide
agagcccaaggcgcacag

SEQ ID NO: 7823 - DNA, 18 bp, Artificial Sequence
  Description of Artificial Sequence: Synthetic oligonucleotide
ggtgcagagcccaaggcg

SEQ ID NO: 7824 - DNA, 18 bp, Artificial Sequence
  Description of Artificial Sequence: Synthetic oligonucleotide
tggaaggtgcagagccca

SEQ ID NO: 7825 - DNA, 18 bp, Artificial Sequence
  Description of Artificial Sequence: Synthetic oligonucleotide
catactggaaggtgcaga

SEQ ID NO: 7826 - DNA, 18 bp, Artificial Sequence
  Description of Artificial Sequence: Synthetic oligonucleotide
gcccacatactggaaggt

SEQ ID NO: 7827 - DNA, 18 bp, Artificial Sequence
  Description of Artificial Sequence: Synthetic oligonucleotide
ctcccgcccacatactgg

SEQ ID NO: 7828 - DNA, 18 bp, Artificial Sequence
  Description of Artificial Sequence: Synthetic oligonucleotide
cgactctcccgcccacat

SEQ ID NO: 7829 - DNA, 18 bp, Artificial Sequence
  Description of Artificial Sequence: Synthetic oligonucleotide
tccctcgactctcccgcc

SEQ ID NO: 7830 - DNA, 18 bp, Artificial Sequence
  Description of Artificial Sequence: Synthetic oligonucleotide
caagttccctcgactctc

SEQ ID NO: 7831 - DNA, 18 bp, Artificial Sequence
  Description of Artificial Sequence: Synthetic oligonucleotide
ccgggcaagttccctcga

SEQ ID NO: 7832 - DNA, 18 bp, Artificial Sequence
  Description of Artificial Sequence: Synthetic oligonucleotide
acctgccgggcaagttcc

SEQ ID NO: 7833 - DNA, 18 bp, Artificial Sequence
  Description of Artificial Sequence: Synthetic oligonucleotide
gcctgacctgccgggcaa

SEQ ID NO: 7834 - DNA, 18 bp, Artificial Sequence
  Description of Artificial Sequence: Synthetic oligonucleotide
gccctgcctgacctgccg

SEQ ID NO: 7835 - DNA, 18 bp, Artificial Sequence
  Description of Artificial Sequence: Synthetic oligonucleotide
tccctgccctgcctgacc

SEQ ID NO: 7836 - DNA, 18 bp, Artificial Sequence
  Description of Artificial Sequence: Synthetic oligonucleotide
ttctgtccctgccctgcc

SEQ ID NO: 7837 - DNA, 18 bp, Artificial Sequence
  Description of Artificial Sequence: Synthetic oligonucleotide
tttacttctgtccctgcc

SEQ ID NO: 7838 - DNA, 18 bp, Artificial Sequence
  Description of Artificial Sequence: Synthetic oligonucleotide
ttctatttacttctgtcc

SEQ ID NO: 7839 - DNA, 18 bp, Artificial Sequence
  Description of Artificial Sequence: Synthetic oligonucleotide
tccgcttctatttacttc

SEQ ID NO: 7840 - DNA, 18 bp, Artificial Sequence
  Description of Artificial Sequence: Synthetic oligonucleotide
accgatccgcttctattt

SEQ ID NO: 7841 - DNA, 18 bp, Artificial Sequence
  Description of Artificial Sequence: Synthetic oligonucleotide
aacttaccgatccgcttc

SEQ ID NO: 7842 - DNA, 18 bp, Artificial Sequence
  Description of Artificial Sequence: Synthetic oligonucleotide
aaaataacttaccgatcc

SEQ ID NO: 7843 - DNA, 18 bp, Artificial Sequence
  Description of Artificial Sequence: Synthetic oligonucleotide
gcggtaaaataacttacc

SEQ ID NO: 7844 - DNA, 18 bp, Artificial Sequence
  Description of Artificial Sequence: Synthetic oligonucleotide
ggtgcgcggtaaaataac

SEQ ID NO: 7845 - DNA, 18 bp, Artificial Sequence
  Description of Artificial Sequence: Synthetic oligonucleotide
ttattggtgcgcggtaaa

SEQ ID NO: 7846 - DNA, 18 bp, Artificial Sequence
  Description of Artificial Sequence: Synthetic oligonucleotide
tctctttattggtgcgcg

SEQ ID NO: 7847 - DNA, 18 bp, Artificial Sequence
  Description of Artificial Sequence: Synthetic oligonucleotide
cccagtctctttattggt

SEQ ID NO: 7848 - DNA, 18 bp, Artificial Sequence
  Description of Artificial Sequence: Synthetic oligonucleotide
ttctccccagtctcttta

SEQ ID NO: 7849 - DNA, 18 bp, Artificial Sequence
  Description of Artificial Sequence: Synthetic oligonucleotide
ctggtttctccccagtct

SEQ ID NO: 7850 - DNA, 18 bp, Artificial Sequence
  Description of Artificial Sequence: Synthetic oligonucleotide
cctttctggtttctcccc

SEQ ID NO: 7851 - DNA, 18 bp, Artificial Sequence
  Description of Artificial Sequence: Synthetic oligonucleotide
gctctcctttctggtttc

SEQ ID NO: 7852 - DNA, 18 bp, Artificial Sequence
  Description of Artificial Sequence: Synthetic oligonucleotide
aacgtgctctcctttctg

SEQ ID NO: 7853 - DNA, 18 bp, Artificial Sequence
  Description of Artificial Sequence: Synthetic oligonucleotide
tacggaacgtgctctcct

SEQ ID NO: 7854 - DNA, 18 bp, Artificial Sequence
  Description of Artificial Sequence: Synthetic oligonucleotide
gtttttacggaacgtgct

SEQ ID NO: 7855 - DNA, 18 bp, Artificial Sequence
  Description of Artificial Sequence: Synthetic oligonucleotide
ttgttgtttttacggaac

SEQ ID NO: 7856 - DNA, 18 bp, Artificial Sequence
  Description of Artificial Sequence: Synthetic oligonucleotide
agtagttgttgtttttac

SEQ ID NO: 7857 - DNA, 18 bp, Artificial Sequence
  Description of Artificial Sequence: Synthetic oligonucleotide
cgactagtagttgttgtt

SEQ ID NO: 7858 - DNA, 18 bp, Artificial Sequence
  Description of Artificial Sequence: Synthetic oligonucleotide
tcggccgactagtagttg

SEQ ID NO: 7859 - DNA, 18 bp, Artificial Sequence
  Description of Artificial Sequence: Synthetic oligonucleotide
ggagttcggccgactagt

SEQ ID NO: 7860 - DNA, 18 bp, Artificial Sequence
  Description of Artificial Sequence: Synthetic oligonucleotide
cgcttggagttcggccga

SEQ ID NO: 7861 - DNA, 18 bp, Artificial Sequence
  Description of Artificial Sequence: Synthetic oligonucleotide
ggtcacgcttggagttcg

SEQ ID NO: 7862 - DNA, 18 bp, Artificial Sequence
  Description of Artificial Sequence: Synthetic oligonucleotide
aagctggtcacgcttgga

SEQ ID NO: 7863 - DNA, 18 bp, Artificial Sequence
  Description of Artificial Sequence: Synthetic oligonucleotide
acagaaagctggtcacgc

SEQ ID NO: 7864 - DNA, 18 bp, Artificial Sequence
  Description of Artificial Sequence: Synthetic oligonucleotide
tcccaacagaaagctggt

SEQ ID NO: 7865 - DNA, 18 bp, Artificial Sequence
  Description of Artificial Sequence: Synthetic oligonucleotide
agtgttcccaacagaaag

SEQ ID NO: 7866 - DNA, 18 bp, Artificial Sequence
  Description of Artificial Sequence: Synthetic oligonucleotide
ctttgagtgttcccaaca

SEQ ID NO: 7867 - DNA, 18 bp, Artificial Sequence
  Description of Artificial Sequence: Synthetic oligonucleotide
ctgacctttgagtgttcc

SEQ ID NO: 7868 - DNA, 18 bp, Artificial Sequence
  Description of Artificial Sequence: Synthetic oligonucleotide
caccactgacctttgagt

SEQ ID NO: 7869 - DNA, 18 bp, Artificial Sequence
  Description of Artificial Sequence: Synthetic oligonucleotide
ctttacaccactgacctt

SEQ ID NO: 7870 - DNA, 18 bp, Artificial Sequence
  Description of Artificial Sequence: Synthetic oligonucleotide
gtattctttacaccactg

SEQ ID NO: 7871 - DNA, 18 bp, Artificial Sequence
  Description of Artificial Sequence: Synthetic oligonucleotide
cttttgtattctttacac

SEQ ID NO: 7872 - DNA, 18 bp, Artificial Sequence
  Description of Artificial Sequence: Synthetic oligonucleotide
cactccttttgtattctt

SEQ ID NO: 7873 - DNA, 18 bp, Artificial Sequence
  Description of Artificial Sequence: Synthetic oligonucleotide
aaaaccactccttttgta

SEQ ID NO: 7874 - DNA, 18 bp, Artificial Sequence
  Description of Artificial Sequence: Synthetic oligonucleotide
gtggaaaaaccactcctt

SEQ ID NO: 7875 - DNA, 18 bp, Artificial Sequence
  Description of Artificial Sequence: Synthetic oligonucleotide
tgcacgtggaaaaaccac

SEQ ID NO: 7876 - DNA, 18 bp, Artificial Sequence
  Description of Artificial Sequence: Synthetic oligonucleotide
attagtgcacgtggaaaa

SEQ ID NO: 7877 - DNA, 18 bp, Artificial Sequence
  Description of Artificial Sequence: Synthetic oligonucleotide
aatatattagtgcacgtg

SEQ ID NO: 7878 - DNA, 18 bp, Artificial Sequence
  Description of Artificial Sequence: Synthetic oligonucleotide
cgataaatatattagtgc

SEQ ID NO: 7879 - DNA, 18 bp, Artificial Sequence
  Description of Artificial Sequence: Synthetic oligonucleotide
gtacgcgataaatatatt

SEQ ID NO: 7880 - DNA, 18 bp, Artificial Sequence
  Description of Artificial Sequence: Synthetic oligonucleotide
tctgtgtacgcgataaat

SEQ ID NO: 7881 - DNA, 18 bp, Artificial Sequence
  Description of Artificial Sequence: Synthetic oligonucleotide
ttttatctgtgtacgcga

SEQ ID NO: 7882 - DNA, 18 bp, Artificial Sequence
  Description of Artificial Sequence: Synthetic oligonucleotide
catgcttttatctgtgta

SEQ ID NO: 7883 - DNA, 18 bp, Artificial Sequence
  Description of Artificial Sequence: Synthetic oligonucleotide
atccacatgcttttatct

SEQ ID NO: 7884 - DNA, 18 bp, Artificial Sequence
  Description of Artificial Sequence: Synthetic oligonucleotide
tccaaatccacatgcttt

SEQ ID NO: 7885 - DNA, 18 bp, Artificial Sequence
  Description of Artificial Sequence: Synthetic oligonucleotide
aagtttccaaatccacat

SEQ ID NO: 7886 - DNA, 18 bp, Artificial Sequence
  Description of Artificial Sequence: Synthetic oligonucleotide
caagaaagtttccaaatc

SEQ ID NO: 7887 - DNA, 18 bp, Artificial Sequence
  Description of Artificial Sequence: Synthetic oligonucleotide
gaactcaagaaagtttcc

SEQ ID NO: 7888 - DNA, 18 bp, Artificial Sequence
  Description of Artificial Sequence: Synthetic oligonucleotide
ggagagaactcaagaaag

SEQ ID NO: 7889 - DNA, 18 bp, Artificial Sequence
  Description of Artificial Sequence: Synthetic oligonucleotide
aagggggagagaactcaa

SEQ ID NO: 7890 - DNA, 18 bp, Artificial Sequence
  Description of Artificial Sequence: Synthetic oligonucleotide
cgacaccccagccaatgg

SEQ ID NO: 7891 - DNA, 18 bp, Artificial Sequence
  Description of Artificial Sequence: Synthetic oligonucleotide
ctcgccgacaccccagcc

SEQ ID NO: 7892 - DNA, 18 bp, Artificial Sequence
  Description of Artificial Sequence: Synthetic oligonucleotide
acacactcgccgacaccc

SEQ ID NO: 7893 - DNA, 18 bp, Artificial Sequence
  Description of Artificial Sequence: Synthetic oligonucleotide
cacgaacacactcgccga

SEQ ID NO: 7894 - DNA, 18 bp, Artificial Sequence
  Description of Artificial Sequence: Synthetic oligonucleotide
cgctccacgaacacactc

SEQ ID NO: 7895 - DNA, 18 bp, Artificial Sequence
  Description of Artificial Sequence: Synthetic oligonucleotide
ggacgcgctccacgaaca

SEQ ID NO: 7896 - DNA, 18 bp, Artificial Sequence
  Description of Artificial Sequence: Synthetic oligonucleotide
ccccaggacgcgctccac

SEQ ID NO: 7897 - DNA, 18 bp, Artificial Sequence
  Description of Artificial Sequence: Synthetic oligonucleotide
gtcgtccccaggacgcgc

SEQ ID NO: 7898 - DNA, 18 bp, Artificial Sequence
  Description of Artificial Sequence: Synthetic oligonucleotide
cgggagtcgtccccagga

SEQ ID NO: 7899 - DNA, 18 bp, Artificial Sequence
  Description of Artificial Sequence: Synthetic oligonucleotide
aatgccgggagtcgtccc

SEQ ID NO: 7900 - DNA, 18 bp, Artificial Sequence
  Description of Artificial Sequence: Synthetic oligonucleotide
ccgataatgccgggagtc

SEQ ID NO: 7901 - DNA, 18 bp, Artificial Sequence
  Description of Artificial Sequence: Synthetic oligonucleotide
cctggccgataatgccgg

SEQ ID NO: 7902 - DNA, 18 bp, Artificial Sequence
  Description of Artificial Sequence: Synthetic oligonucleotide
ctcaacctggccgataat

SEQ ID NO: 7903 - DNA, 18 bp, Artificial Sequence
  Description of Artificial Sequence: Synthetic oligonucleotide
gcggactcaacctggccg

SEQ ID NO: 7904 - DNA, 18 bp, Artificial Sequence
  Description of Artificial Sequence: Synthetic oligonucleotide
caggagcggactcaacct

SEQ ID NO: 7905 - DNA, 18 bp, Artificial Sequence
  Description of Artificial Sequence: Synthetic oligonucleotide
aatgccaggagcggactc

SEQ ID NO: 7906 - DNA, 18 bp, Artificial Sequence
  Description of Artificial Sequence: Synthetic oligonucleotide
cgcggaatgccaggagcg

SEQ ID NO: 7907 - DNA, 18 bp, Artificial Sequence
  Description of Artificial Sequence: Synthetic oligonucleotide
ctttccgcggaatgccag

SEQ ID NO: 7908 - DNA, 18 bp, Artificial Sequence
  Description of Artificial Sequence: Synthetic oligonucleotide
cccatctttccgcggaat

SEQ ID NO: 7909 - DNA, 18 bp, Artificial Sequence
  Description of Artificial Sequence: Synthetic oligonucleotide
acccacccatctttccgc

SEQ ID NO: 7910 - DNA, 18 bp, Artificial Sequence
  Description of Artificial Sequence: Synthetic oligonucleotide
ccggcacccacccatctt

SEQ ID NO: 7911 - DNA, 18 bp, Artificial Sequence
  Description of Artificial Sequence: Synthetic oligonucleotide
tctgcccggcacccaccc

SEQ ID NO: 7912 - DNA, 18 bp, Artificial Sequence
  Description of Artificial Sequence: Synthetic oligonucleotide
acacctctgcccggcacc

SEQ ID NO: 7913 - DNA, 18 bp, Artificial Sequence
  Description of Artificial Sequence: Synthetic oligonucleotide
tggccacacctctgcccg

SEQ ID NO: 7914 - DNA, 18 bp, Artificial Sequence
  Description of Artificial Sequence: Synthetic oligonucleotide
gcaggtggccacacctct

SEQ ID NO: 7915 - DNA, 18 bp, Artificial Sequence
  Description of Artificial Sequence: Synthetic oligonucleotide
ccatcgcaggtggccaca

SEQ ID NO: 7916 - DNA, 18 bp, Artificial Sequence
  Description of Artificial Sequence: Synthetic oligonucleotide
aatccccatcgcaggtgg

SEQ ID NO: 7917 - DNA, 18 bp, Artificial Sequence
  Description of Artificial Sequence: Synthetic oligonucleotide
aggtcaatccccatcgca

SEQ ID NO: 7918 - DNA, 18 bp, Artificial Sequence
  Description of Artificial Sequence: Synthetic oligonucleotide
ctcggaggtcaatcccca

SEQ ID NO: 7919 - DNA, 18 bp, Artificial Sequence
  Description of Artificial Sequence: Synthetic oligonucleotide
ctcccctcggaggtcaat

SEQ ID NO: 7920 - DNA, 18 bp, Artificial Sequence
  Description of Artificial Sequence: Synthetic oligonucleotide
gccccctcccctcggagg

SEQ ID NO: 7921 - DNA, 18 bp, Artificial Sequence
  Description of Artificial Sequence: Synthetic oligonucleotide
gaagggccccctcccctc

SEQ ID NO: 7922 - DNA, 18 bp, Artificial Sequence
  Description of Artificial Sequence: Synthetic oligonucleotide
gtctagaagggccccctc

SEQ ID NO: 7923 - DNA, 18 bp, Artificial Sequence
  Description of Artificial Sequence: Synthetic oligonucleotide
acgacgtctagaagggcc

SEQ ID NO: 7924 - DNA, 18 bp, Artificial Sequence
  Description of Artificial Sequence: Synthetic oligonucleotide
acggcacgacgtctagaa

SEQ ID NO: 7925 - DNA, 18 bp, Artificial Sequence
  Description of Artificial Sequence: Synthetic oligonucleotide
atcccacggcacgacgtc

SEQ ID NO: 7926 - DNA, 18 bp, Artificial Sequence
  Description of Artificial Sequence: Synthetic oligonucleotide
tacctatcccacggcacg

SEQ ID NO: 7927 - DNA, 18 bp, Artificial Sequence
  Description of Artificial Sequence: Synthetic oligonucleotide
gaaggtacctatcccacg

SEQ ID NO: 7928 - DNA, 18 bp, Artificial Sequence
  Description of Artificial Sequence: Synthetic oligonucleotide
gagcagaaggtacctatc

SEQ ID NO: 7929 - DNA, 18 bp, Artificial Sequence
  Description of Artificial Sequence: Synthetic oligonucleotide
ggagggagcagaaggtac

SEQ ID NO: 7930 - DNA, 18 bp, Artificial Sequence
  Description of Artificial Sequence: Synthetic oligonucleotide
ggcggggagggagcagaa

SEQ ID NO: 7931 - DNA, 18 bp, Artificial Sequence
  Description of Artificial Sequence: Synthetic oligonucleotide
agggtggcggggagggag

SEQ ID NO: 7932 - DNA, 18 bp, Artificial Sequence
  Description of Artificial Sequence: Synthetic oligonucleotide
aagttcaggacagaggcc

SEQ ID NO: 7933 - DNA, 18 bp, Artificial Sequence
  Description of Artificial Sequence: Synthetic oligonucleotide
ttaaaaagttcaggacag

SEQ ID NO: 7934 - DNA, 18 bp, Artificial Sequence
  Description of Artificial Sequence: Synthetic oligonucleotide
ccgggttaaaaagttcag

SEQ ID NO: 7935 - DNA, 18 bp, Artificial Sequence
  Description of Artificial Sequence: Synthetic oligonucleotide
tggcaccgggttaaaaag

SEQ ID NO: 7936 - DNA, 18 bp, Artificial Sequence
  Description of Artificial Sequence: Synthetic oligonucleotide
ggttgtggcaccgggtta

SEQ ID NO: 7937 - DNA, 18 bp, Artificial Sequence
  Description of Artificial Sequence: Synthetic oligonucleotide
cctcgggttgtggcaccg

SEQ ID NO: 7938 - DNA, 18 bp, Artificial Sequence
  Description of Artificial Sequence: Synthetic oligonucleotide
gagaccctcgggttgtgg

SEQ ID NO: 7939 - DNA, 18 bp, Artificial Sequence
  Description of Artificial Sequence: Synthetic oligonucleotide
ctatggagaccctcgggt

SEQ ID NO: 7940 - DNA, 18 bp, Artificial Sequence
  Description of Artificial Sequence: Synthetic oligonucleotide
tgcccctatggagaccct

SEQ ID NO: 7941 - DNA, 18 bp, Artificial Sequence
  Description of Artificial Sequence: Synthetic oligonucleotide
ttacctgcccctatggag

SEQ ID NO: 7942 - DNA, 18 bp, Artificial Sequence
  Description of Artificial Sequence: Synthetic oligonucleotide
cccgtttacctgccccta

SEQ ID NO: 7943 - DNA, 18 bp, Artificial Sequence
  Description of Artificial Sequence: Synthetic oligonucleotide
aaatccccgtttacctgc

SEQ ID NO: 7944 - DNA, 18 bp, Artificial Sequence
  Description of Artificial Sequence: Synthetic oligonucleotide
gattaaaatccccgttta

SEQ ID NO: 7945 - DNA, 18 bp, Artificial Sequence
  Description of Artificial Sequence: Synthetic oligonucleotide
aaaatgattaaaatcccc

SEQ ID NO: 7946 - DNA, 18 bp, Artificial Sequence
  Description of Artificial Sequence: Synthetic oligonucleotide
cacttaaaatgattaaaa

SEQ ID NO: 7947 - DNA, 18 bp, Artificial Sequence
  Description of Artificial Sequence: Synthetic oligonucleotide
taagacacttaaaatgat

SEQ ID NO: 7948 - DNA, 18 bp, Artificial Sequence
  Description of Artificial Sequence: Synthetic oligonucleotide
cattctaagacacttaaa

SEQ ID NO: 7949 - DNA, 18 bp, Artificial Sequence
  Description of Artificial Sequence: Synthetic oligonucleotide
aatatcattctaagacac

SEQ ID NO: 7950 - DNA, 18 bp, Artificial Sequence
  Description of Artificial Sequence: Synthetic oligonucleotide
cccaaaatatcattctaa

SEQ ID NO: 7951 - DNA, 18 bp, Artificial Sequence
  Description of Artificial Sequence: Synthetic oligonucleotide
tttttcccaaaatatcat

SEQ ID NO: 7952 - DNA, 18 bp, Artificial Sequence
  Description of Artificial Sequence: Synthetic oligonucleotide
agtgctttttcccaaaat

SEQ ID NO: 7953 - DNA, 18 bp, Artificial Sequence
  Description of Artificial Sequence: Synthetic oligonucleotide
aaaggagtgctttttccc

SEQ ID NO: 7954 - DNA, 18 bp, Artificial Sequence
  Description of Artificial Sequence: Synthetic oligonucleotide
taggaaaaggagtgcttt

SEQ ID NO: 7955 - DNA, 18 bp, Artificial Sequence
  Description of Artificial Sequence: Synthetic oligonucleotide
gtccttaggaaaaggagt

SEQ ID NO: 7956 - DNA, 18 bp, Artificial Sequence
  Description of Artificial Sequence: Synthetic oligonucleotide
tcgcagtccttaggaaaa

SEQ ID NO: 7957 - DNA, 18 bp, Artificial Sequence
  Description of Artificial Sequence: Synthetic oligonucleotide
ccgagtcgcagtccttag

SEQ ID NO: 7958 - DNA, 18 bp, Artificial Sequence
  Description of Artificial Sequence: Synthetic oligonucleotide
gttcaccgagtcgcagtc

SEQ ID NO: 7959 - DNA, 18 bp, Artificial Sequence
  Description of Artificial Sequence: Synthetic oligonucleotide
tttctgttcaccgagtcg

SEQ ID NO: 7960 - DNA, 18 bp, Artificial Sequence
  Description of Artificial Sequence: Synthetic oligonucleotide
cctcctttctgttcaccg

SEQ ID NO: 7961 - DNA, 18 bp, Artificial Sequence
  Description of Artificial Sequence: Synthetic oligonucleotide
catagcctcctttctgtt

SEQ ID NO: 7962 - DNA, 18 bp, Artificial Sequence
  Description of Artificial Sequence: Synthetic oligonucleotide
caccgcatagcctccttt

SEQ ID NO: 7963 - DNA, 18 bp, Artificial Sequence
  Description of Artificial Sequence: Synthetic oligonucleotide
ggccacaccgcatagcct

SEQ ID NO: 7964 - DNA, 18 bp, Artificial Sequence
  Description of Artificial Sequence: Synthetic oligonucleotide
catgagtctgcagctgtc

SEQ ID NO: 7965 - DNA, 18 bp, Artificial Sequence
  Description of Artificial Sequence: Synthetic oligonucleotide
ccctccatgagtctgcag

SEQ ID NO: 7966 - DNA, 18 bp, Artificial Sequence
  Description of Artificial Sequence: Synthetic oligonucleotide
ataccccctccatgagtc

SEQ ID NO: 7967 - DNA, 18 bp, Artificial Sequence
  Description of Artificial Sequence: Synthetic oligonucleotide
cccacataccccctccat

SEQ ID NO: 7968 - DNA, 18 bp, Artificial Sequence
  Description of Artificial Sequence: Synthetic oligonucleotide
gcacccccacataccccc

SEQ ID NO: 7969 - DNA, 18 bp, Artificial Sequence
  Description of Artificial Sequence: Synthetic oligonucleotide
agactgcacccccacata

SEQ ID NO: 7970 - DNA, 18 bp, Artificial Sequence
  Description of Artificial Sequence: Synthetic oligonucleotide
ggcaaagactgcaccccc

SEQ ID NO: 7971 - DNA, 18 bp, Artificial Sequence
  Description of Artificial Sequence: Synthetic oligonucleotide
aaccaggcaaagactgca

SEQ ID NO: 7972 - DNA, 18 bp, Artificial Sequence
  Description of Artificial Sequence: Synthetic oligonucleotide
ccccaaaccaggcaaaga

SEQ ID NO: 7973 - DNA, 18 bp, Artificial Sequence
  Description of Artificial Sequence: Synthetic oligonucleotide
accctccccaaaccaggc

SEQ ID NO: 7974 - DNA, 18 bp, Artificial Sequence
  Description of Artificial Sequence: Synthetic oligonucleotide
gggagaccctccccaaac

SEQ ID NO: 7975 - DNA, 18 bp, Artificial Sequence
  Description of Artificial Sequence: Synthetic oligonucleotide
actctgggagaccctccc

SEQ ID NO: 7976 - DNA, 18 bp, Artificial Sequence
  Description of Artificial Sequence: Synthetic oligonucleotide
ttataactctgggagacc

SEQ ID NO: 7977 - DNA, 18 bp, Artificial Sequence
  Description of Artificial Sequence: Synthetic oligonucleotide
atcaattataactctggg

SEQ ID NO: 7978 - DNA, 18 bp, Artificial Sequence
  Description of Artificial Sequence: Synthetic oligonucleotide
gccccatcaattataact

SEQ ID NO: 7979 - DNA, 18 bp, Artificial Sequence
  Description of Artificial Sequence: Synthetic oligonucleotide
ctgaggccccatcaatta

SEQ ID NO: 7980 - DNA, 18 bp, Artificial Sequence
  Description of Artificial Sequence: Synthetic oligonucleotide
cagccctgaggccccatc

SEQ ID NO: 7981 - DNA, 18 bp, Artificial Sequence
  Description of Artificial Sequence: Synthetic oligonucleotide
gtaggcagccctgaggcc

SEQ ID NO: 7982 - DNA, 18 bp, Artificial Sequence
  Description of Artificial Sequence: Synthetic oligonucleotide
ctatggtaggcagccctg

SEQ ID NO: 7983 - DNA, 18 bp, Artificial Sequence
  Description of Artificial Sequence: Synthetic oligonucleotide
tgggtctatggtaggcag

SEQ ID NO: 7984 - DNA, 18 bp, Artificial Sequence
  Description of Artificial Sequence: Synthetic oligonucleotide
gagcttgggtctatggta

SEQ ID NO: 7985 - DNA, 18 bp, Artificial Sequence
  Description of Artificial Sequence: Synthetic oligonucleotide
gtccagagcttgggtcta

SEQ ID NO: 7986 - DNA, 18 bp, Artificial Sequence
  Description of Artificial Sequence: Synthetic oligonucleotide
gctgagtccagagcttgg

SEQ ID NO: 7987 - DNA, 18 bp, Artificial Sequence
  Description of Artificial Sequence: Synthetic oligonucleotide
tgcaagctgagtccagag

SEQ ID NO: 7988 - DNA, 18 bp, Artificial Sequence
  Description of Artificial Sequence: Synthetic oligonucleotide
ttaattgcaagctgagtc

SEQ ID NO: 7989 - DNA, 18 bp, Artificial Sequence
  Description of Artificial Sequence: Synthetic oligonucleotide
ctcagctccaaggcctgg

SEQ ID NO: 7990 - DNA, 18 bp, Artificial Sequence
  Description of Artificial Sequence: Synthetic oligonucleotide
cccttctcagctccaagg

SEQ ID NO: 7991 - DNA, 18 bp, Artificial Sequence
  Description of Artificial Sequence: Synthetic oligonucleotide
gaagacccttctcagctc

SEQ ID NO: 7992 - DNA, 18 bp, Artificial Sequence
  Description of Artificial Sequence: Synthetic oligonucleotide
cagctgaagacccttctc

SEQ ID NO: 7993 - DNA, 18 bp, Artificial Sequence
  Description of Artificial Sequence: Synthetic oligonucleotide
atccccagctgaagaccc

SEQ ID NO: 7994 - DNA, 18 bp, Artificial Sequence
  Description of Artificial Sequence: Synthetic oligonucleotide
caggcatccccagctgaa

SEQ ID NO: 7995 - DNA, 18 bp, Artificial Sequence
  Description of Artificial Sequence: Synthetic oligonucleotide
agtaccaggcatccccag

SEQ ID NO: 7996 - DNA, 18 bp, Artificial Sequence
  Description of Artificial Sequence: Synthetic oligonucleotide
aggagagtaccaggcatc

SEQ ID NO: 7997 - DNA, 18 bp, Artificial Sequence
  Description of Artificial Sequence: Synthetic oligonucleotide
gagggaggagagtaccag

SEQ ID NO: 7998 - DNA, 18 bp, Artificial Sequence
  Description of Artificial Sequence: Synthetic oligonucleotide
aaggagagggaggagagt

SEQ ID NO: 7999 - DNA, 18 bp, Artificial Sequence
  Description of Artificial Sequence: Synthetic oligonucleotide
ggattaaggagagggagg

SEQ ID NO: 8000 - DNA, 18 bp, Artificial Sequence
  Description of Artificial Sequence: Synthetic oligonucleotide
gtgtaggattaaggagag

SEQ ID NO: 8001 - DNA, 18 bp, Artificial Sequence
  Description of Artificial Sequence: Synthetic oligonucleotide
gccttgtgtaggattaag

SEQ ID NO: 8002 - DNA, 18 bp, Artificial Sequence
  Description of Artificial Sequence: Synthetic oligonucleotide
aatctgccttgtgtagga

SEQ ID NO: 8003 - DNA, 18 bp, Artificial Sequence
  Description of Artificial Sequence: Synthetic oligonucleotide
ccaggaatctgccttgtg

SEQ ID NO: 8004 - DNA, 18 bp, Artificial Sequence
  Description of Artificial Sequence: Synthetic oligonucleotide
cggggccaggaatctgcc

SEQ ID NO: 8005 - DNA, 18 bp, Artificial Sequence
  Description of Artificial Sequence: Synthetic oligonucleotide
aagggcggggccaggaat

SEQ ID NO: 8006 - DNA, 18 bp, Artificial Sequence
  Description of Artificial Sequence: Synthetic oligonucleotide
gggaaaagggcggggcca

SEQ ID NO: 8007 - DNA, 18 bp, Artificial Sequence
  Description of Artificial Sequence: Synthetic oligonucleotide
aggaggggaaaagggcgg

SEQ ID NO: 8008 - DNA, 18 bp, Artificial Sequence
  Description of Artificial Sequence: Synthetic oligonucleotide
gaacgaggaggggaaaag

SEQ ID NO: 8009 - DNA, 18 bp, Artificial Sequence
  Description of Artificial Sequence: Synthetic oligonucleotide
gggaggaacgaggagggg

SEQ ID NO: 8010 - DNA, 18 bp, Artificial Sequence
  Description of Artificial Sequence: Synthetic oligonucleotide
tggtggggaggaacgagg

SEQ ID NO: 8011 - DNA, 18 bp, Artificial Sequence
  Description of Artificial Sequence: Synthetic oligonucleotide
aaagatggtggggaggaa

SEQ ID NO: 8012 - DNA, 18 bp, Artificial Sequence
  Description of Artificial Sequence: Synthetic oligonucleotide
taagcaaagatggtgggg

SEQ ID NO: 8013 - DNA, 18 bp, Artificial Sequence
  Description of Artificial Sequence: Synthetic oligonucleotide
cagagtaagcaaagatgg

SEQ ID NO: 8014 - DNA, 18 bp, Artificial Sequence
  Description of Artificial Sequence: Synthetic oligonucleotide
cagatcaagcgtcgcacg

SEQ ID NO: 8015 - DNA, 18 bp, Artificial Sequence
  Description of Artificial Sequence: Synthetic oligonucleotide
ggaagcagatcaagcgtc

SEQ ID NO: 8016 - DNA, 18 bp, Artificial Sequence
  Description of Artificial Sequence: Synthetic oligonucleotide
acttaggaagcagatcaa

SEQ ID NO: 8017 - DNA, 18 bp, Artificial Sequence
  Description of Artificial Sequence: Synthetic oligonucleotide
tagggacttaggaagcag

SEQ ID NO: 8018 - DNA, 18 bp, Artificial Sequence
  Description of Artificial Sequence: Synthetic oligonucleotide
agctttagggacttagga

SEQ ID NO: 8019 - DNA, 18 bp, Artificial Sequence
  Description of Artificial Sequence: Synthetic oligonucleotide
ttgtgagctttagggact

SEQ ID NO: 8020 - DNA, 18 bp, Artificial Sequence
  Description of Artificial Sequence: Synthetic oligonucleotide
ccagtttgtgagctttag

SEQ ID NO: 8021 - DNA, 18 bp, Artificial Sequence
  Description of Artificial Sequence: Synthetic oligonucleotide
tctggccagtttgtgagc

SEQ ID NO: 8022 - DNA, 18 bp, Artificial Sequence
  Description of Artificial Sequence: Synthetic oligonucleotide
taggttctggccagtttg

SEQ ID NO: 8023 - DNA, 18 bp, Artificial Sequence
  Description of Artificial Sequence: Synthetic oligonucleotide
atttttaggttctggcca

SEQ ID NO: 8024 - DNA, 18 bp, Artificial Sequence
  Description of Artificial Sequence: Synthetic oligonucleotide
tactgatttttaggttct

SEQ ID NO: 8025 - DNA, 18 bp, Artificial Sequence
  Description of Artificial Sequence: Synthetic oligonucleotide
ccagatactgatttttag

SEQ ID NO: 8026 - DNA, 18 bp, Artificial Sequence
  Description of Artificial Sequence: Synthetic oligonucleotide
ttaccccagatactgatt

SEQ ID NO: 8027 - DNA, 18 bp, Artificial Sequence
  Description of Artificial Sequence: Synthetic oligonucleotide
aatatttaccccagatac

SEQ ID NO: 8028 - DNA, 18 bp, Artificial Sequence
  Description of Artificial Sequence: Synthetic oligonucleotide
agtgtaatatttacccca

SEQ ID NO: 8029 - DNA, 18 bp, Artificial Sequence
  Description of Artificial Sequence: Synthetic oligonucleotide
aagcaagtgtaatattta

SEQ ID NO: 8030 - DNA, 18 bp, Artificial Sequence
  Description of Artificial Sequence: Synthetic oligonucleotide
taggaaagcaagtgtaat

SEQ ID NO: 8031 - DNA, 18 bp, Artificial Sequence
  Description of Artificial Sequence: Synthetic oligonucleotide
atcactaggaaagcaagt

SEQ ID NO: 8032 - DNA, 18 bp, Artificial Sequence
  Description of Artificial Sequence: Synthetic oligonucleotide
cagaaatcactaggaaag

SEQ ID NO: 8033 - DNA, 18 bp, Artificial Sequence
  Description of Artificial Sequence: Synthetic oligonucleotide
aaaaacagaaatcactag

SEQ ID NO: 8034 - DNA, 18 bp, Artificial Sequence
  Description of Artificial Sequence: Synthetic oligonucleotide
acagaaaaaacagaaatc

SEQ ID NO: 8035 - DNA, 18 bp, Artificial Sequence
  Description of Artificial Sequence: Synthetic oligonucleotide
atgagacagaaaaaacag

SEQ ID NO: 8036 - DNA, 18 bp, Artificial Sequence
  Description of Artificial Sequence: Synthetic oligonucleotide
acaggatgagacagaaaa

SEQ ID NO: 8037 - DNA, 18 bp, Artificial Sequence
  Description of Artificial Sequence: Synthetic oligonucleotide
agaaaacaggatgagaca

SEQ ID NO: 8038 - DNA, 18 bp, Artificial Sequence
  Description of Artificial Sequence: Synthetic oligonucleotide
aagccagaaaacaggatg

SEQ ID NO: 8039 - DNA, 18 bp, Artificial Sequence
  Description of Artificial Sequence: Synthetic oligonucleotide
tattaaagccagaaaaca

SEQ ID NO: 8040 - DNA, 18 bp, Artificial Sequence
  Description of Artificial Sequence: Synthetic oligonucleotide
tcacatattaaagccaga

SEQ ID NO: 8041 - DNA, 18 bp, Artificial Sequence
  Description of Artificial Sequence: Synthetic oligonucleotide
tccattcacatattaaag

SEQ ID NO: 8042 - DNA, 18 bp, Artificial Sequence
  Description of Artificial Sequence: Synthetic oligonucleotide
taaggtccattcacatat

SEQ ID NO: 8043 - DNA, 18 bp, Artificial Sequence
  Description of Artificial Sequence: Synthetic oligonucleotide
aggaataaggtccattca

SEQ ID NO: 8044 - DNA, 18 bp, Artificial Sequence
  Description of Artificial Sequence: Synthetic oligonucleotide
ggtaaaggaataaggtcc

SEQ ID NO: 8045 - DNA, 18 bp, Artificial Sequence
  Description of Artificial Sequence: Synthetic oligonucleotide
tttctggtaaaggaataa

SEQ ID NO: 8046 - DNA, 18 bp, Artificial Sequence
  Description of Artificial Sequence: Synthetic oligonucleotide
atatttttctggtaaagg

SEQ ID NO: 8047 - DNA, 18 bp, Artificial Sequence
  Description of Artificial Sequence: Synthetic oligonucleotide
acaaaatatttttctggt

SEQ ID NO: 8048 - DNA, 18 bp, Artificial Sequence
  Description of Artificial Sequence: Synthetic oligonucleotide
aattcacaaaatattttt

SEQ ID NO: 8049 - DNA, 18 bp, Artificial Sequence
  Description of Artificial Sequence: Synthetic oligonucleotide
tccagccacctccaggcc

SEQ ID NO: 8050 - DNA, 18 bp, Artificial Sequence
  Description of Artificial Sequence: Synthetic oligonucleotide
cccattccagccacctcc

SEQ ID NO: 8051 - DNA, 18 bp, Artificial Sequence
  Description of Artificial Sequence: Synthetic oligonucleotide
ggcagcccattccagcca

SEQ ID NO: 8052 - DNA, 18 bp, Artificial Sequence
  Description of Artificial Sequence: Synthetic oligonucleotide
cccaaggcagcccattcc

SEQ ID NO: 8053 - DNA, 18 bp, Artificial Sequence
  Description of Artificial Sequence: Synthetic oligonucleotide
catcccccaaggcagccc

SEQ ID NO: 8054 - DNA, 18 bp, Artificial Sequence
  Description of Artificial Sequence: Synthetic oligonucleotide
ggattcatcccccaaggc

SEQ ID NO: 8055 - DNA, 18 bp, Artificial Sequence
  Description of Artificial Sequence: Synthetic oligonucleotide
acctgggattcatccccc

SEQ ID NO: 8056 - DNA, 18 bp, Artificial Sequence
  Description of Artificial Sequence: Synthetic oligonucleotide
tgggcacctgggattcat

SEQ ID NO: 8057 - DNA, 18 bp, Artificial Sequence
  Description of Artificial Sequence: Synthetic oligonucleotide
gacactgggcacctggga

SEQ ID NO: 8058 - DNA, 18 bp, Artificial Sequence
  Description of Artificial Sequence: Synthetic oligonucleotide
ggcttgacactgggcacc

SEQ ID NO: 8059 - DNA, 18 bp, Artificial Sequence
  Description of Artificial Sequence: Synthetic oligonucleotide
ctcatggcttgacactgg

SEQ ID NO: 8060 - DNA, 18 bp, Artificial Sequence
  Description of Artificial Sequence: Synthetic oligonucleotide
ggcttctcatggcttgac

SEQ ID NO: 8061 - DNA, 18 bp, Artificial Sequence
  Description of Artificial Sequence: Synthetic oligonucleotide
caataggcttctcatggc

SEQ ID NO: 8062 - DNA, 18 bp, Artificial Sequence
  Description of Artificial Sequence: Synthetic oligonucleotide
caggacaataggcttctc

SEQ ID NO: 8063 - DNA, 18 bp, Artificial Sequence
  Description of Artificial Sequence: Synthetic oligonucleotide
tgctgcaggacaataggc

SEQ ID NO: 8064 - DNA, 18 bp, Artificial Sequence
  Description of Artificial Sequence: Synthetic oligonucleotide
gtaactgctgcaggacaa

SEQ ID NO: 8065 - DNA, 18 bp, Artificial Sequence
  Description of Artificial Sequence: Synthetic oligonucleotide
cataggtaactgctgcag

SEQ ID NO: 8066 - DNA, 18 bp, Artificial Sequence
  Description of Artificial Sequence: Synthetic oligonucleotide
gtgtgcataggtaactgc

SEQ ID NO: 8067 - DNA, 18 bp, Artificial Sequence
  Description of Artificial Sequence: Synthetic oligonucleotide
ggctggtgtgcataggta

SEQ ID NO: 8068 - DNA, 18 bp, Artificial Sequence
  Description of Artificial Sequence: Synthetic oligonucleotide
gaaaaggctggtgtgcat

SEQ ID NO: 8069 - DNA, 18 bp, Artificial Sequence
  Description of Artificial Sequence: Synthetic oligonucleotide
tggaggaaaaggctggtg

SEQ ID NO: 8070 - DNA, 18 bp, Artificial Sequence
  Description of Artificial Sequence: Synthetic oligonucleotide
agctgtggaggaaaaggc

SEQ ID NO: 8071 - DNA, 18 bp, Artificial Sequence
  Description of Artificial Sequence: Synthetic oligonucleotide
aaaaaagctgtggaggaa

SEQ ID NO: 8072 - DNA, 18 bp, Artificial Sequence
  Description of Artificial Sequence: Synthetic oligonucleotide
gcctgaaaaaagctgtgg

SEQ ID NO: 8073 - DNA, 18 bp, Artificial Sequence
  Description of Artificial Sequence: Synthetic oligonucleotide
gatgggcctgaaaaaagc

SEQ ID NO: 8074 - DNA, 18 bp, Artificial Sequence
  Description of Artificial Sequence: Synthetic oligonucleotide
tgagggatgggcctgaaa

SEQ ID NO: 8075 - DNA, 18 bp, Artificial Sequence
  Description of Artificial Sequence: Synthetic oligonucleotide
acttctgagggatgggcc

SEQ ID NO: 8076 - DNA, 18 bp, Artificial Sequence
  Description of Artificial Sequence: Synthetic oligonucleotide
gtaggacttctgagggat

SEQ ID NO: 8077 - DNA, 18 bp, Artificial Sequence
  Description of Artificial Sequence: Synthetic oligonucleotide
actttgtaggacttctga

SEQ ID NO: 8078 - DNA, 18 bp, Artificial Sequence
  Description of Artificial Sequence: Synthetic oligonucleotide
tggacactttgtaggact

SEQ ID NO: 8079 - DNA, 18 bp, Artificial Sequence
  Description of Artificial Sequence: Synthetic oligonucleotide
gagattggacactttgta

SEQ ID NO: 8080 - DNA, 18 bp, Artificial Sequence
  Description of Artificial Sequence: Synthetic oligonucleotide
tgattgagattggacact

SEQ ID NO: 8081 - DNA, 18 bp, Artificial Sequence
  Description of Artificial Sequence: Synthetic oligonucleotide
agggatgattgagattgg

SEQ ID NO: 8082 - DNA, 18 bp, Artificial Sequence
  Description of Artificial Sequence: Synthetic oligonucleotide
ccagcagggatgattgag

SEQ ID NO: 8083 - DNA, 18 bp, Artificial Sequence
  Description of Artificial Sequence: Synthetic oligonucleotide
agtgcccagcagggatga

SEQ ID NO: 8084 - DNA, 18 bp, Artificial Sequence
  Description of Artificial Sequence: Synthetic oligonucleotide
aactcagtgcccagcagg

SEQ ID NO: 8085 - DNA, 18 bp, Artificial Sequence
  Description of Artificial Sequence: Synthetic oligonucleotide
aaaagaactcagtgccca

SEQ ID NO: 8086 - DNA, 18 bp, Artificial Sequence
  Description of Artificial Sequence: Synthetic oligonucleotide
aaggtaaaagaactcagt

SEQ ID NO: 8087 - DNA, 18 bp, Artificial Sequence
  Description of Artificial Sequence: Synthetic oligonucleotide
aaagaaaggtaaaagaac

SEQ ID NO: 8088 - DNA, 18 bp, Artificial Sequence
  Description of Artificial Sequence: Synthetic oligonucleotide
aagaaaaagaaaggtaaa

SEQ ID NO: 8089 - DNA, 18 bp, Artificial Sequence
  Description of Artificial Sequence: Synthetic oligonucleotide
gaaaaaagaaaaagaaag

SEQ ID NO: 8090 - DNA, 18 bp, Artificial Sequence
  Description of Artificial Sequence: Synthetic oligonucleotide
aaaaagaaaaaagaaaaa

SEQ ID NO: 8091 - DNA, 18 bp, Artificial Sequence
  Description of Artificial Sequence: Synthetic oligonucleotide
aaaaaaaaaagaaaaaag

SEQ ID NO: 8092 - DNA, 18 bp, Artificial Sequence
  Description of Artificial Sequence: Synthetic oligonucleotide
atctcaaaaaaaaaagaa

SEQ ID NO: 8093 - DNA, 18 bp, Artificial Sequence
  Description of Artificial Sequence: Synthetic oligonucleotide
actccatctcaaaaaaaa

SEQ ID NO: 8094 - DNA, 18 bp, Artificial Sequence
  Description of Artificial Sequence: Synthetic oligonucleotide
gcgagactccatctcaaa

SEQ ID NO: 8095 - DNA, 18 bp, Artificial Sequence
  Description of Artificial Sequence: Synthetic oligonucleotide
acagagcgagactccatc

SEQ ID NO: 8096 - DNA, 18 bp, Artificial Sequence
  Description of Artificial Sequence: Synthetic oligonucleotide
tggggacagagcgagact

SEQ ID NO: 8097 - DNA, 18 bp, Artificial Sequence
  Description of Artificial Sequence: Synthetic oligonucleotide
agtcttggggacagagcg

SEQ ID NO: 8098 - DNA, 18 bp, Artificial Sequence
  Description of Artificial Sequence: Synthetic oligonucleotide
actccagtcttggggaca

SEQ ID NO: 8099 - DNA, 18 bp, Artificial Sequence
  Description of Artificial Sequence: Synthetic oligonucleotide
accacactccagtcttgg

SEQ ID NO: 8100 - DNA, 18 bp, Artificial Sequence
  Description of Artificial Sequence: Synthetic oligonucleotide
gcaccaccacactccagt

SEQ ID NO: 8101 - DNA, 18 bp, Artificial Sequence
  Description of Artificial Sequence: Synthetic oligonucleotide
agattgcaccaccacact

SEQ ID NO: 8102 - DNA, 18 bp, Artificial Sequence
  Description of Artificial Sequence: Synthetic oligonucleotide
agccgagattgcaccacc

SEQ ID NO: 8103 - DNA, 18 bp, Artificial Sequence
  Description of Artificial Sequence: Synthetic oligonucleotide
aagtgagccgagattgca

SEQ ID NO: 8104 - DNA, 18 bp, Artificial Sequence
  Description of Artificial Sequence: Synthetic oligonucleotide
ggttgaagtgagccgaga

SEQ ID NO: 8105 - DNA, 18 bp, Artificial Sequence
  Description of Artificial Sequence: Synthetic oligonucleotide
gcggaggttgaagtgagc

SEQ ID NO: 8106 - DNA, 18 bp, Artificial Sequence
  Description of Artificial Sequence: Synthetic oligonucleotide
gggaggcggaggttgaag

SEQ ID NO: 8107 - DNA, 18 bp, Artificial Sequence
  Description of Artificial Sequence: Synthetic oligonucleotide
aacctgggaggcggaggt

SEQ ID NO: 8108 - DNA, 18 bp, Artificial Sequence
  Description of Artificial Sequence: Synthetic oligonucleotide
gcttgaacctgggaggcg

SEQ ID NO: 8109 - DNA, 18 bp, Artificial Sequence
  Description of Artificial Sequence: Synthetic oligonucleotide
gaattgcttgaacctggg

SEQ ID NO: 8110 - DNA, 18 bp, Artificial Sequence
  Description of Artificial Sequence: Synthetic oligonucleotide
caggagaattgcttgaac

SEQ ID NO: 8111 - DNA, 18 bp, Artificial Sequence
  Description of Artificial Sequence: Synthetic oligonucleotide
tgaggcaggagaattgct

SEQ ID NO: 8112 - DNA, 18 bp, Artificial Sequence
  Description of Artificial Sequence: Synthetic oligonucleotide
gaggctgaggcaggagaa

SEQ ID NO: 8113 - DNA, 18 bp, Artificial Sequence
  Description of Artificial Sequence: Synthetic oligonucleotide
ctcaggaggctgaggcag

SEQ ID NO: 8114 - DNA, 18 bp, Artificial Sequence
  Description of Artificial Sequence: Synthetic oligonucleotide
agctactcaggaggctga

SEQ ID NO: 8115 - DNA, 18 bp, Artificial Sequence
  Description of Artificial Sequence: Synthetic oligonucleotide
atcccagctactcaggag

SEQ ID NO: 8116 - DNA, 18 bp, Artificial Sequence
  Description of Artificial Sequence: Synthetic oligonucleotide
ctgtaatcccagctactc

SEQ ID NO: 8117 - DNA, 18 bp, Artificial Sequence
  Description of Artificial Sequence: Synthetic oligonucleotide
ggcacctgtaatcccagc

SEQ ID NO: 8118 - DNA, 18 bp, Artificial Sequence
  Description of Artificial Sequence: Synthetic oligonucleotide
tggagggcacctgtaatc

SEQ ID NO: 8119 - DNA, 18 bp, Artificial Sequence
  Description of Artificial Sequence: Synthetic oligonucleotide
gttggtggagggcacctg

SEQ ID NO: 8120 - DNA, 18 bp, Artificial Sequence
  Description of Artificial Sequence: Synthetic oligonucleotide
caagtgttggtggagggc

SEQ ID NO: 8121 - DNA, 18 bp, Artificial Sequence
  Description of Artificial Sequence: Synthetic oligonucleotide
ttagccaagtgttggtgg

SEQ ID NO: 8122 - DNA, 18 bp, Artificial Sequence
  Description of Artificial Sequence: Synthetic oligonucleotide
aaaaattagccaagtgtt

SEQ ID NO: 8123 - DNA, 18 bp, Artificial Sequence
  Description of Artificial Sequence: Synthetic oligonucleotide
atacaaaaaattagccaa

SEQ ID NO: 8124 - DNA, 18 bp, Artificial Sequence
  Description of Artificial Sequence: Synthetic oligonucleotide
aaaaaatacaaaaaatta

SEQ ID NO: 8125 - DNA, 18 bp, Artificial Sequence
  Description of Artificial Sequence: Synthetic oligonucleotide
actaaaaaaaatacaaaa

SEQ ID NO: 8126 - DNA, 18 bp, Artificial Sequence
  Description of Artificial Sequence: Synthetic oligonucleotide
tctctactaaaaaaaata

SEQ ID NO: 8127 - DNA, 18 bp, Artificial Sequence
  Description of Artificial Sequence: Synthetic oligonucleotide
ccctgtctctactaaaaa

SEQ ID NO: 8128 - DNA, 18 bp, Artificial Sequence
  Description of Artificial Sequence: Synthetic oligonucleotide
tgaaaccctgtctctact

SEQ ID NO: 8129 - DNA, 18 bp, Artificial Sequence
  Description of Artificial Sequence: Synthetic oligonucleotide
cgtggtgaaaccctgtct

SEQ ID NO: 8130 - DNA, 18 bp, Artificial Sequence
  Description of Artificial Sequence: Synthetic oligonucleotide
accaacgtggtgaaaccc

SEQ ID NO: 8131 - DNA, 18 bp, Artificial Sequence
  Description of Artificial Sequence: Synthetic oligonucleotide
gcctgaccaacgtggtga

SEQ ID NO: 8132 - DNA, 18 bp, Artificial Sequence
  Description of Artificial Sequence: Synthetic oligonucleotide
gaccagcctgaccaacgt

SEQ ID NO: 8133 - DNA, 18 bp, Artificial Sequence
  Description of Artificial Sequence: Synthetic oligonucleotide
ttcaagaccagcctgacc

SEQ ID NO: 8134 - DNA, 18 bp, Artificial Sequence
  Description of Artificial Sequence: Synthetic oligonucleotide
aggagttcaagaccagcc

SEQ ID NO: 8135 - DNA, 18 bp, Artificial Sequence
  Description of Artificial Sequence: Synthetic oligonucleotide
acgtcaggagttcaagac

SEQ ID NO: 8136 - DNA, 18 bp, Artificial Sequence
  Description of Artificial Sequence: Synthetic oligonucleotide
acctgacgtcaggagttc

SEQ ID NO: 8137 - DNA, 18 bp, Artificial Sequence
  Description of Artificial Sequence: Synthetic oligonucleotide
agatcacctgacgtcagg

SEQ ID NO: 8138 - DNA, 18 bp, Artificial Sequence
  Description of Artificial Sequence: Synthetic oligonucleotide
cgggcagatcacctgacg

SEQ ID NO: 8139 - DNA, 18 bp, Artificial Sequence
  Description of Artificial Sequence: Synthetic oligonucleotide
tgaggcgggcagatcacc

SEQ ID NO: 8140 - DNA, 18 bp, Artificial Sequence
  Description of Artificial Sequence: Synthetic oligonucleotide
gcttccaccttatgtccc

SEQ ID NO: 8141 - DNA, 18 bp, Artificial Sequence
  Description of Artificial Sequence: Synthetic oligonucleotide
agcctgcttccaccttat

SEQ ID NO: 8142 - DNA, 18 bp, Artificial Sequence
  Description of Artificial Sequence: Synthetic oligonucleotide
cagccagcctgcttccac

SEQ ID NO: 8143 - DNA, 18 bp, Artificial Sequence
  Description of Artificial Sequence: Synthetic oligonucleotide
cccagcagccagcctgct

SEQ ID NO: 8144 - DNA, 18 bp, Artificial Sequence
  Description of Artificial Sequence: Synthetic oligonucleotide
gaagccccagcagccagc

SEQ ID NO: 8145 - DNA, 18 bp, Artificial Sequence
  Description of Artificial Sequence: Synthetic oligonucleotide
tccctgaagccccagcag

SEQ ID NO: 8146 - DNA, 18 bp, Artificial Sequence
  Description of Artificial Sequence: Synthetic oligonucleotide
ggaaatccctgaagcccc

SEQ ID NO: 8147 - DNA, 18 bp, Artificial Sequence
  Description of Artificial Sequence: Synthetic oligonucleotide
tatggggaaatccctgaa

SEQ ID NO: 8148 - DNA, 18 bp, Artificial Sequence
  Description of Artificial Sequence: Synthetic oligonucleotide
ccgtatatggggaaatcc

SEQ ID NO: 8149 - DNA, 18 bp, Artificial Sequence
  Description of Artificial Sequence: Synthetic oligonucleotide
atataccgtatatgggga

SEQ ID NO: 8150 - DNA, 18 bp, Artificial Sequence
  Description of Artificial Sequence: Synthetic oligonucleotide
ttaatatataccgtatat

SEQ ID NO: 8151 - DNA, 18 bp, Artificial Sequence
  Description of Artificial Sequence: Synthetic oligonucleotide
ttttgttaatatataccg

SEQ ID NO: 8152 - DNA, 18 bp, Artificial Sequence
  Description of Artificial Sequence: Synthetic oligonucleotide
ccaaattttgttaatata

SEQ ID NO: 8153 - DNA, 18 bp, Artificial Sequence
  Description of Artificial Sequence: Synthetic oligonucleotide
ccgtcccaaattttgtta

SEQ ID NO: 8154 - DNA, 18 bp, Artificial Sequence
  Description of Artificial Sequence: Synthetic oligonucleotide
aaagcccgtcccaaattt

SEQ ID NO: 8155 - DNA, 18 bp, Artificial Sequence
  Description of Artificial Sequence: Synthetic oligonucleotide
cctccaaagcccgtccca

SEQ ID NO: 8156 - DNA, 18 bp, Artificial Sequence
  Description of Artificial Sequence: Synthetic oligonucleotide
ctcaccctccaaagcccg

SEQ ID NO: 8157 - DNA, 18 bp, Artificial Sequence
  Description of Artificial Sequence: Synthetic oligonucleotide
ggcttctcaccctccaaa

SEQ ID NO: 8158 - DNA, 18 bp, Artificial Sequence
  Description of Artificial Sequence: Synthetic oligonucleotide
cagctggcttctcaccct

SEQ ID NO: 8159 - DNA, 18 bp, Artificial Sequence
  Description of Artificial Sequence: Synthetic oligonucleotide
acagtcagctggcttctc

SEQ ID NO: 8160 - DNA, 18 bp, Artificial Sequence
  Description of Artificial Sequence: Synthetic oligonucleotide
agcctacagtcagctggc

SEQ ID NO: 8161 - DNA, 18 bp, Artificial Sequence
  Description of Artificial Sequence: Synthetic oligonucleotide
cactaagcctacagtcag

SEQ ID NO: 8162 - DNA, 18 bp, Artificial Sequence
  Description of Artificial Sequence: Synthetic oligonucleotide
cgaggcactaagcctaca

SEQ ID NO: 8163 - DNA, 18 bp, Artificial Sequence
  Description of Artificial Sequence: Synthetic oligonucleotide
gcgtacgaggcactaagc

SEQ ID NO: 8164 - DNA, 18 bp, Artificial Sequence
  Description of Artificial Sequence: Synthetic oligonucleotide
aataagcgtacgaggcac

SEQ ID NO: 8165 - DNA, 18 bp, Artificial Sequence
  Description of Artificial Sequence: Synthetic oligonucleotide
gtgggaataagcgtacga

SEQ ID NO: 8166 - DNA, 18 bp, Artificial Sequence
  Description of Artificial Sequence: Synthetic oligonucleotide
ttgctccggactgggaca

SEQ ID NO: 8167 - DNA, 18 bp, Artificial Sequence
  Description of Artificial Sequence: Synthetic oligonucleotide
ggttgttgctccggactg

SEQ ID NO: 8168 - DNA, 18 bp, Artificial Sequence
  Description of Artificial Sequence: Synthetic oligonucleotide
gcgatggttgttgctccg

SEQ ID NO: 8169 - DNA, 18 bp, Artificial Sequence
  Description of Artificial Sequence: Synthetic oligonucleotide
ctcatgcgatggttgttg

SEQ ID NO: 8170 - DNA, 18 bp, Artificial Sequence
  Description of Artificial Sequence: Synthetic oligonucleotide
gctggctcatgcgatggt

SEQ ID NO: 8171 - DNA, 18 bp, Artificial Sequence
  Description of Artificial Sequence: Synthetic oligonucleotide
ccacggctggctcatgcg

SEQ ID NO: 8172 - DNA, 18 bp, Artificial Sequence
  Description of Artificial Sequence: Synthetic oligonucleotide
tggggccacggctggctc

SEQ ID NO: 8173 - DNA, 18 bp, Artificial Sequence
  Description of Artificial Sequence: Synthetic oligonucleotide
cgaggtggggccacggct

SEQ ID NO: 8174 - DNA, 18 bp, Artificial Sequence
  Description of Artificial Sequence: Synthetic oligonucleotide
aatagcgaggtggggcca

SEQ ID NO: 8175 - DNA, 18 bp, Artificial Sequence
  Description of Artificial Sequence: Synthetic oligonucleotide
cagttaatagcgaggtgg

SEQ ID NO: 8176 - DNA, 18 bp, Artificial Sequence
  Description of Artificial Sequence: Synthetic oligonucleotide
tgtgccagttaatagcga

SEQ ID NO: 8177 - DNA, 18 bp, Artificial Sequence
  Description of Artificial Sequence: Synthetic oligonucleotide
ttgtgtgtgccagttaat

SEQ ID NO: 8178 - DNA, 18 bp, Artificial Sequence
  Description of Artificial Sequence: Synthetic oligonucleotide
ccgccttgtgtgtgccag

SEQ ID NO: 8179 - DNA, 18 bp, Artificial Sequence
  Description of Artificial Sequence: Synthetic oligonucleotide
agtagccgccttgtgtgt

SEQ ID NO: 8180 - DNA, 18 bp, Artificial Sequence
  Description of Artificial Sequence: Synthetic oligonucleotide
gaaccagtagccgccttg

SEQ ID NO: 8181 - DNA, 18 bp, Artificial Sequence
  Description of Artificial Sequence: Synthetic oligonucleotide
gccgagaaccagtagccg

SEQ ID NO: 8182 - DNA, 18 bp, Artificial Sequence
  Description of Artificial Sequence: Synthetic oligonucleotide
cttgggccgagaaccagt

SEQ ID NO: 8183 - DNA, 18 bp, Artificial Sequence
  Description of Artificial Sequence: Synthetic oligonucleotide
ccacacttgggccgagaa

SEQ ID NO: 8184 - DNA, 18 bp, Artificial Sequence
  Description of Artificial Sequence: Synthetic oligonucleotide
gcaggccacacttgggcc

SEQ ID NO: 8185 - DNA, 18 bp, Artificial Sequence
  Description of Artificial Sequence: Synthetic oligonucleotide
taggagcaggccacactt

SEQ ID NO: 8186 - DNA, 18 bp, Artificial Sequence
  Description of Artificial Sequence: Synthetic oligonucleotide
agaggtaggagcaggcca

SEQ ID NO: 8187 - DNA, 18 bp, Artificial Sequence
  Description of Artificial Sequence: Synthetic oligonucleotide
agtggagaggtaggagca

SEQ ID NO: 8188 - DNA, 18 bp, Artificial Sequence
  Description of Artificial Sequence: Synthetic oligonucleotide
cctggagtggagaggtag

SEQ ID NO: 8189 - DNA, 18 bp, Artificial Sequence
  Description of Artificial Sequence: Synthetic oligonucleotide
ccagccctggagtggaga

SEQ ID NO: 8190 - DNA, 18 bp, Artificial Sequence
  Description of Artificial Sequence: Synthetic oligonucleotide
actcaccagccctggagt

SEQ ID NO: 8191 - DNA, 18 bp, Artificial Sequence
  Description of Artificial Sequence: Synthetic oligonucleotide
gggagactcaccagccct

SEQ ID NO: 8192 - DNA, 18 bp, Artificial Sequence
  Description of Artificial Sequence: Synthetic oligonucleotide
aggcagggagactcacca

SEQ ID NO: 8193 - DNA, 18 bp, Artificial Sequence
  Description of Artificial Sequence: Synthetic oligonucleotide
ggctcaggcagggagact

SEQ ID NO: 8194 - DNA, 18 bp, Artificial Sequence
  Description of Artificial Sequence: Synthetic oligonucleotide
gccacggctcaggcaggg

SEQ ID NO: 8195 - DNA, 18 bp, Artificial Sequence
  Description of Artificial Sequence: Synthetic oligonucleotide
gggctgccacggctcagg

SEQ ID NO: 8196 - DNA, 18 bp, Artificial Sequence
  Description of Artificial Sequence: Synthetic oligonucleotide
caaaagggctgccacggc

SEQ ID NO: 8197 - DNA, 18 bp, Artificial Sequence
  Description of Artificial Sequence: Synthetic oligonucleotide
cgagtcaaaagggctgcc

SEQ ID NO: 8198 - DNA, 18 bp, Artificial Sequence
  Description of Artificial Sequence: Synthetic oligonucleotide
cttggcgagtcaaaaggg

SEQ ID NO: 8199 - DNA, 18 bp, Artificial Sequence
  Description of Artificial Sequence: Synthetic oligonucleotide
cccaccttggcgagtcaa

SEQ ID NO: 8200 - DNA, 18 bp, Artificial Sequence
  Description of Artificial Sequence: Synthetic oligonucleotide
ggaagcccaccttggcga

SEQ ID NO: 8201 - DNA, 18 bp, Artificial Sequence
  Description of Artificial Sequence: Synthetic oligonucleotide
gggcaggaagcccacctt

SEQ ID NO: 8202 - DNA, 18 bp, Artificial Sequence
  Description of Artificial Sequence: Synthetic oligonucleotide
ggcttgggcaggaagccc

SEQ ID NO: 8203 - DNA, 18 bp, Artificial Sequence
  Description of Artificial Sequence: Synthetic oligonucleotide
gccatggcttgggcagga

SEQ ID NO: 8204 - DNA, 18 bp, Artificial Sequence
  Description of Artificial Sequence: Synthetic oligonucleotide
ggcaggccatggcttggg

SEQ ID NO: 8205 - DNA, 18 bp, Artificial Sequence
  Description of Artificial Sequence: Synthetic oligonucleotide
cggcaggcaggccatggc

SEQ ID NO: 8206 - DNA, 18 bp, Artificial Sequence
  Description of Artificial Sequence: Synthetic oligonucleotide
agaggcggcaggcaggcc

SEQ ID NO: 8207 - DNA, 18 bp, Artificial Sequence
  Description of Artificial Sequence: Synthetic oligonucleotide
aagggagaggcggcaggc

SEQ ID NO: 8208 - DNA, 18 bp, Artificial Sequence
  Description of Artificial Sequence: Synthetic oligonucleotide
cctttaagggagaggcgg

SEQ ID NO: 8209 - DNA, 18 bp, Artificial Sequence
  Description of Artificial Sequence: Synthetic oligonucleotide
agatgcctttaagggaga

SEQ ID NO: 8210 - DNA, 18 bp, Artificial Sequence
  Description of Artificial Sequence: Synthetic oligonucleotide
cagacagatgcctttaag

SEQ ID NO: 8211 - DNA, 18 bp, Artificial Sequence
  Description of Artificial Sequence: Synthetic oligonucleotide
acccacagacagatgcct

SEQ ID NO: 8212 - DNA, 18 bp, Artificial Sequence
  Description of Artificial Sequence: Synthetic oligonucleotide
acaaaacccacagacaga

SEQ ID NO: 8213 - DNA, 18 bp, Artificial Sequence
  Description of Artificial Sequence: Synthetic oligonucleotide
ggcggaggtgagggagtt

SEQ ID NO: 8214 - DNA, 18 bp, Artificial Sequence
  Description of Artificial Sequence: Synthetic oligonucleotide
gggaaggcggaggtgagg

SEQ ID NO: 8215 - DNA, 18 bp, Artificial Sequence
  Description of Artificial Sequence: Synthetic oligonucleotide
agggggggaaggcggagg

SEQ ID NO: 8216 - DNA, 18 bp, Artificial Sequence
  Description of Artificial Sequence: Synthetic oligonucleotide
cctggagggggggaaggc

SEQ ID NO: 8217 - DNA, 18 bp, Artificial Sequence
  Description of Artificial Sequence: Synthetic oligonucleotide
cggggcctggaggggggg

SEQ ID NO: 8218 - DNA, 18 bp, Artificial Sequence
  Description of Artificial Sequence: Synthetic oligonucleotide
cggggcggggcctggagg

SEQ ID NO: 8219 - DNA, 18 bp, Artificial Sequence
  Description of Artificial Sequence: Synthetic oligonucleotide
gcggccggggcggggcct

SEQ ID NO: 8220 - DNA, 18 bp, Artificial Sequence
  Description of Artificial Sequence: Synthetic oligonucleotide
gggctgcggccggggcgg

SEQ ID NO: 8221 - DNA, 18 bp, Artificial Sequence
  Description of Artificial Sequence: Synthetic oligonucleotide
gggcggggctgcggccgg

SEQ ID NO: 8222 - DNA, 18 bp, Artificial Sequence
  Description of Artificial Sequence: Synthetic oligonucleotide
gctgggggcggggctgcg

SEQ ID NO: 8223 - DNA, 18 bp, Artificial Sequence
  Description of Artificial Sequence: Synthetic oligonucleotide
ttagggctgggggcgggg

SEQ ID NO: 8224 - DNA, 18 bp, Artificial Sequence
  Description of Artificial Sequence: Synthetic oligonucleotide
ggaggttagggctggggg

SEQ ID NO: 8225 - DNA, 18 bp, Artificial Sequence
  Description of Artificial Sequence: Synthetic oligonucleotide
ggggcggaggttagggct

SEQ ID NO: 8226 - DNA, 18 bp, Artificial Sequence
  Description of Artificial Sequence: Synthetic oligonucleotide
tgggcggggcggaggtta

SEQ ID NO: 8227 - DNA, 18 bp, Artificial Sequence
  Description of Artificial Sequence: Synthetic oligonucleotide
cggggtgggcggggcgga

SEQ ID NO: 8228 - DNA, 18 bp, Artificial Sequence
  Description of Artificial Sequence: Synthetic oligonucleotide
gggcgcggggtgggcggg

SEQ ID NO: 8229 - DNA, 18 bp, Artificial Sequence
  Description of Artificial Sequence: Synthetic oligonucleotide
cactggggcgcggggtgg

SEQ ID NO: 8230 - DNA, 18 bp, Artificial Sequence
  Description of Artificial Sequence: Synthetic oligonucleotide
ctaggcactggggcgcgg

SEQ ID NO: 8231 - DNA, 18 bp, Artificial Sequence
  Description of Artificial Sequence: Synthetic oligonucleotide
gggccctaggcactgggg

SEQ ID NO: 8232 - DNA, 18 bp, Artificial Sequence
  Description of Artificial Sequence: Synthetic oligonucleotide
gtagggggccctaggcac

SEQ ID NO: 8233 - DNA, 18 bp, Artificial Sequence
  Description of Artificial Sequence: Synthetic oligonucleotide
gggaggtagggggcccta

SEQ ID NO: 8234 - DNA, 18 bp, Artificial Sequence
  Description of Artificial Sequence: Synthetic oligonucleotide
ggtcagggaggtaggggg

SEQ ID NO: 8235 - DNA, 18 bp, Artificial Sequence
  Description of Artificial Sequence: Synthetic oligonucleotide
aaatgggtcagggaggta

SEQ ID NO: 8236 - DNA, 18 bp, Artificial Sequence
  Description of Artificial Sequence: Synthetic oligonucleotide
gaggaaaatgggtcaggg

SEQ ID NO: 8237 - DNA, 18 bp, Artificial Sequence
  Description of Artificial Sequence: Synthetic oligonucleotide
ttagtgaggaaaatgggt

SEQ ID NO: 8238 - DNA, 18 bp, Artificial Sequence
  Description of Artificial Sequence: Synthetic oligonucleotide
ggcggttagtgaggaaaa

SEQ ID NO: 8239 - DNA, 18 bp, Artificial Sequence
  Description of Artificial Sequence: Synthetic oligonucleotide
gaaggggcggttagtgag

SEQ ID NO: 8240 - DNA, 18 bp, Artificial Sequence
  Description of Artificial Sequence: Synthetic oligonucleotide
ggactgaaggggcggtta

SEQ ID NO: 8241 - DNA, 18 bp, Artificial Sequence
  Description of Artificial Sequence: Synthetic oligonucleotide
aggagggactgaaggggc

SEQ ID NO: 8242 - DNA, 18 bp, Artificial Sequence
  Description of Artificial Sequence: Synthetic oligonucleotide
cggggaggagggactgaa

SEQ ID NO: 8243 - DNA, 18 bp, Artificial Sequence
  Description of Artificial Sequence: Synthetic oligonucleotide
gaagacggggaggaggga

SEQ ID NO: 8244 - DNA, 18 bp, Artificial Sequence
  Description of Artificial Sequence: Synthetic oligonucleotide
ggagagaagacggggagg

SEQ ID NO: 8245 - DNA, 18 bp, Artificial Sequence
  Description of Artificial Sequence: Synthetic oligonucleotide
ggaggggagagaagacgg

SEQ ID NO: 8246 - DNA, 18 bp, Artificial Sequence
  Description of Artificial Sequence: Synthetic oligonucleotide
cgggaggaggggagagaa

SEQ ID NO: 8247 - DNA, 18 bp, Artificial Sequence
  Description of Artificial Sequence: Synthetic oligonucleotide
gggtgcgggaggagggga

SEQ ID NO: 8248 - DNA, 18 bp, Artificial Sequence
  Description of Artificial Sequence: Synthetic oligonucleotide
tgggtgggtgcgggagga

SEQ ID NO: 8249 - DNA, 18 bp, Artificial Sequence
  Description of Artificial Sequence: Synthetic oligonucleotide
agggatgggtgggtgcgg

SEQ ID NO: 8250 - DNA, 18 bp, Artificial Sequence
  Description of Artificial Sequence: Synthetic oligonucleotide
ggaagagggatgggtggg

SEQ ID NO: 8251 - DNA, 18 bp, Artificial Sequence
  Description of Artificial Sequence: Synthetic oligonucleotide
gccctggaagagggatgg

SEQ ID NO: 8252 - DNA, 18 bp, Artificial Sequence
  Description of Artificial Sequence: Synthetic oligonucleotide
ggggggccctggaagagg

SEQ ID NO: 8253 - DNA, 18 bp, Artificial Sequence
  Description of Artificial Sequence: Synthetic oligonucleotide
cctggggggggccctgga

SEQ ID NO: 8254 - DNA, 18 bp, Artificial Sequence
  Description of Artificial Sequence: Synthetic oligonucleotide
tcgcgcctggggggggcc

SEQ ID NO: 8255 - DNA, 18 bp, Artificial Sequence
  Description of Artificial Sequence: Synthetic oligonucleotide
ccgcctcgcgcctggggg

SEQ ID NO: 8256 - DNA, 18 bp, Artificial Sequence
  Description of Artificial Sequence: Synthetic oligonucleotide
catttccgcctcgcgcct

SEQ ID NO: 8257 - DNA, 18 bp, Artificial Sequence
  Description of Artificial Sequence: Synthetic oligonucleotide
tgacccatttccgcctcg

SEQ ID NO: 8258 - DNA, 18 bp, Artificial Sequence
  Description of Artificial Sequence: Synthetic oligonucleotide
gtcggtgacccatttccg

SEQ ID NO: 8259 - DNA, 18 bp, Artificial Sequence
  Description of Artificial Sequence: Synthetic oligonucleotide
cgcgggtcggtgacccat

SEQ ID NO: 8260 - DNA, 18 bp, Artificial Sequence
  Description of Artificial Sequence: Synthetic oligonucleotide
ccacccgcgggtcggtga

SEQ ID NO: 8261 - DNA, 18 bp, Artificial Sequence
  Description of Artificial Sequence: Synthetic oligonucleotide
ccattccacccgcgggtc

SEQ ID NO: 8262 - DNA, 18 bp, Artificial Sequence
  Description of Artificial Sequence: Synthetic oligonucleotide
gccgcccattccacccgc

SEQ ID NO: 8263 - DNA, 18 bp, Artificial Sequence
  Description of Artificial Sequence: Synthetic oligonucleotide
cccaggccgcccattcca

SEQ ID NO: 8264 - DNA, 18 bp, Artificial Sequence
  Description of Artificial Sequence: Synthetic oligonucleotide
gtaaccccaggccgccca

SEQ ID NO: 8265 - DNA, 18 bp, Artificial Sequence
  Description of Artificial Sequence: Synthetic oligonucleotide
tcccagtaaccccaggcc

SEQ ID NO: 8266 - DNA, 18 bp, Artificial Sequence
  Description of Artificial Sequence: Synthetic oligonucleotide
caccgtcccagtaacccc

SEQ ID NO: 8267 - DNA, 18 bp, Artificial Sequence
  Description of Artificial Sequence: Synthetic oligonucleotide
ttactcaccgtcccagta

SEQ ID NO: 8268 - DNA, 18 bp, Artificial Sequence
  Description of Artificial Sequence: Synthetic oligonucleotide
ggcagttactcaccgtcc

SEQ ID NO: 8269 - DNA, 18 bp, Artificial Sequence
  Description of Artificial Sequence: Synthetic oligonucleotide
gggccggcagttactcac

SEQ ID NO: 8270 - DNA, 18 bp, Artificial Sequence
  Description of Artificial Sequence: Synthetic oligonucleotide
gacgggggccggcagtta

SEQ ID NO: 8271 - DNA, 18 bp, Artificial Sequence
  Description of Artificial Sequence: Synthetic oligonucleotide
ttgcggacgggggccggc

SEQ ID NO: 8272 - DNA, 18 bp, Artificial Sequence
  Description of Artificial Sequence: Synthetic oligonucleotide
cccgattgcggacggggg

SEQ ID NO: 8273 - DNA, 18 bp, Artificial Sequence
  Description of Artificial Sequence: Synthetic oligonucleotide
gggagcccgattgcggac

SEQ ID NO: 8274 - DNA, 18 bp, Artificial Sequence
  Description of Artificial Sequence: Synthetic oligonucleotide
acggagggagcccgattg

SEQ ID NO: 8275 - DNA, 18 bp, Artificial Sequence
  Description of Artificial Sequence: Synthetic oligonucleotide
gcccgacggagggagccc

SEQ ID NO: 8276 - DNA, 18 bp, Artificial Sequence
  Description of Artificial Sequence: Synthetic oligonucleotide
ctcgcgcccgacggaggg

SEQ ID NO: 8277 - DNA, 18 bp, Artificial Sequence
  Description of Artificial Sequence: Synthetic oligonucleotide
gccccctcgcgcccgacg

SEQ ID NO: 8278 - DNA, 18 bp, Artificial Sequence
  Description of Artificial Sequence: Synthetic oligonucleotide
ggggtgccccctcgcgcc

SEQ ID NO: 8279 - DNA, 18 bp, Artificial Sequence
  Description of Artificial Sequence: Synthetic oligonucleotide
gccctggggtgccccctc

SEQ ID NO: 8280 - DNA, 18 bp, Artificial Sequence
  Description of Artificial Sequence: Synthetic oligonucleotide
ccccagccctggggtgcc

SEQ ID NO: 8281 - DNA, 18 bp, Artificial Sequence
  Description of Artificial Sequence: Synthetic oligonucleotide
agtccccccagccctggg

SEQ ID NO: 8282 - DNA, 18 bp, Artificial Sequence
  Description of Artificial Sequence: Synthetic oligonucleotide
aacctagtccccccagcc

SEQ ID NO: 8283 - DNA, 18 bp, Artificial Sequence
  Description of Artificial Sequence: Synthetic oligonucleotide
ggaggaacctagtccccc

SEQ ID NO: 8284 - DNA, 18 bp, Artificial Sequence
  Description of Artificial Sequence: Synthetic oligonucleotide
gggttggaggaacctagt

SEQ ID NO: 8285 - DNA, 18 bp, Artificial Sequence
  Description of Artificial Sequence: Synthetic oligonucleotide
ccccggggttggaggaac

SEQ ID NO: 8286 - DNA, 18 bp, Artificial Sequence
  Description of Artificial Sequence: Synthetic oligonucleotide
gggccccccggggttgga

SEQ ID NO: 8287 - DNA, 18 bp, Artificial Sequence
  Description of Artificial Sequence: Synthetic oligonucleotide
tgtaggggccccccgggg

SEQ ID NO: 8288 - DNA, 18 bp, Artificial Sequence
  Description of Artificial Sequence: Synthetic oligonucleotide
ctgggtgtaggggccccc

SEQ ID NO: 8289 - DNA, 18 bp, Artificial Sequence
  Description of Artificial Sequence: Synthetic oligonucleotide
accttcctgacagtccac

SEQ ID NO: 8290 - DNA, 18 bp, Artificial Sequence
  Description of Artificial Sequence: Synthetic oligonucleotide
tccccaccttcctgacag

SEQ ID NO: 8291 - DNA, 18 bp, Artificial Sequence
  Description of Artificial Sequence: Synthetic oligonucleotide
cacagtccccaccttcct

SEQ ID NO: 8292 - DNA, 18 bp, Artificial Sequence
  Description of Artificial Sequence: Synthetic oligonucleotide
acacccacagtccccacc

SEQ ID NO: 8293 - DNA, 18 bp, Artificial Sequence
  Description of Artificial Sequence: Synthetic oligonucleotide
aaaccacacccacagtcc

SEQ ID NO: 8294 - DNA, 18 bp, Artificial Sequence
  Description of Artificial Sequence: Synthetic oligonucleotide
ggctcaaaccacacccac

SEQ ID NO: 8295 - DNA, 18 bp, Artificial Sequence
  Description of Artificial Sequence: Synthetic oligonucleotide
aaccgggctcaaaccaca

SEQ ID NO: 8296 - DNA, 18 bp, Artificial Sequence
  Description of Artificial Sequence: Synthetic oligonucleotide
ccttcaaccgggctcaaa

SEQ ID NO: 8297 - DNA, 18 bp, Artificial Sequence
  Description of Artificial Sequence: Synthetic oligonucleotide
cacccccttcaaccgggc

SEQ ID NO: 8298 - DNA, 18 bp, Artificial Sequence
  Description of Artificial Sequence: Synthetic oligonucleotide
aaccccacccccttcaac

SEQ ID NO: 8299 - DNA, 18 bp, Artificial Sequence
  Description of Artificial Sequence: Synthetic oligonucleotide
cctcaaaccccaccccct

SEQ ID NO: 8300 - DNA, 18 bp, Artificial Sequence
  Description of Artificial Sequence: Synthetic oligonucleotide
tggtccctcaaaccccac

SEQ ID NO: 8301 - DNA, 18 bp, Artificial Sequence
  Description of Artificial Sequence: Synthetic oligonucleotide
gcgactggtccctcaaac

SEQ ID NO: 8302 - DNA, 18 bp, Artificial Sequence
  Description of Artificial Sequence: Synthetic oligonucleotide
gaggtgcgactggtccct

SEQ ID NO: 8303 - DNA, 18 bp, Artificial Sequence
  Description of Artificial Sequence: Synthetic oligonucleotide
agtcagaggtgcgactgg

SEQ ID NO: 8304 - DNA, 18 bp, Artificial Sequence
  Description of Artificial Sequence: Synthetic oligonucleotide
ggtggagtcagaggtgcg

SEQ ID NO: 8305 - DNA, 18 bp, Artificial Sequence
  Description of Artificial Sequence: Synthetic oligonucleotide
gagggggtggagtcagag

SEQ ID NO: 8306 - DNA, 18 bp, Artificial Sequence
  Description of Artificial Sequence: Synthetic oligonucleotide
aggcctggccctagcggc

SEQ ID NO: 8307 - DNA, 18 bp, Artificial Sequence
  Description of Artificial Sequence: Synthetic oligonucleotide
gcaggaggcctggcccta

SEQ ID NO: 8308 - DNA, 18 bp, Artificial Sequence
  Description of Artificial Sequence: Synthetic oligonucleotide
cccctgcaggaggcctgg

SEQ ID NO: 8309 - DNA, 18 bp, Artificial Sequence
  Description of Artificial Sequence: Synthetic oligonucleotide
ccccgcccctgcaggagg

SEQ ID NO: 8310 - DNA, 18 bp, Artificial Sequence
  Description of Artificial Sequence: Synthetic oligonucleotide
ttttcccccgcccctgca

SEQ ID NO: 8311 - DNA, 18 bp, Artificial Sequence
  Description of Artificial Sequence: Synthetic oligonucleotide
accccttttcccccgccc

SEQ ID NO: 8312 - DNA, 18 bp, Artificial Sequence
  Description of Artificial Sequence: Synthetic oligonucleotide
cggggaccccttttcccc

SEQ ID NO: 8313 - DNA, 18 bp, Artificial Sequence
  Description of Artificial Sequence: Synthetic oligonucleotide
gactccggggaccccttt

SEQ ID NO: 8314 - DNA, 18 bp, Artificial Sequence
  Description of Artificial Sequence: Synthetic oligonucleotide
tagatgactccggggacc

SEQ ID NO: 8315 - DNA, 18 bp, Artificial Sequence
  Description of Artificial Sequence: Synthetic oligonucleotide
cgctgtagatgactccgg

SEQ ID NO: 8316 - DNA, 18 bp, Artificial Sequence
  Description of Artificial Sequence: Synthetic oligonucleotide
ctccccgctgtagatgac

SEQ ID NO: 8317 - DNA, 18 bp, Artificial Sequence
  Description of Artificial Sequence: Synthetic oligonucleotide
ctcccctccccgctgtag

SEQ ID NO: 8318 - DNA, 18 bp, Artificial Sequence
  Description of Artificial Sequence: Synthetic oligonucleotide
tactactcccctccccgc

SEQ ID NO: 8319 - DNA, 18 bp, Artificial Sequence
  Description of Artificial Sequence: Synthetic oligonucleotide
gctcctactactcccctc

SEQ ID NO: 8320 - DNA, 18 bp, Artificial Sequence
  Description of Artificial Sequence: Synthetic oligonucleotide
gaggggctcctactactc

SEQ ID NO: 8321 - DNA, 18 bp, Artificial Sequence
  Description of Artificial Sequence: Synthetic oligonucleotide
gccccgaggggctcctac

SEQ ID NO: 8322 - DNA, 18 bp, Artificial Sequence
  Description of Artificial Sequence: Synthetic oligonucleotide
cagaagccccgaggggct

SEQ ID NO: 8323 - DNA, 18 bp, Artificial Sequence
  Description of Artificial Sequence: Synthetic oligonucleotide
ggccccagaagccccgag

SEQ ID NO: 8324 - DNA, 18 bp, Artificial Sequence
  Description of Artificial Sequence: Synthetic oligonucleotide
cgggtggccccagaagcc

SEQ ID NO: 8325 - DNA, 18 bp, Artificial Sequence
  Description of Artificial Sequence: Synthetic oligonucleotide
cccaccgggtggccccag

SEQ ID NO: 8326 - DNA, 18 bp, Artificial Sequence
  Description of Artificial Sequence: Synthetic oligonucleotide
cttgccccaccgggtggc

SEQ ID NO: 8327 - DNA, 18 bp, Artificial Sequence
  Description of Artificial Sequence: Synthetic oligonucleotide
acctccttgccccaccgg

SEQ ID NO: 8328 - DNA, 18 bp, Artificial Sequence
  Description of Artificial Sequence: Synthetic oligonucleotide
ctcaaacctccttgcccc

SEQ ID NO: 8329 - DNA, 18 bp, Artificial Sequence
  Description of Artificial Sequence: Synthetic oligonucleotide
tgatcctcaaacctcctt

SEQ ID NO: 8330 - DNA, 18 bp, Artificial Sequence
  Description of Artificial Sequence: Synthetic oligonucleotide
gggggtgatcctcaaacc

SEQ ID NO: 8331 - DNA, 18 bp, Artificial Sequence
  Description of Artificial Sequence: Synthetic oligonucleotide
ccacggggggtgatcctc

SEQ ID NO: 8332 - DNA, 18 bp, Artificial Sequence
  Description of Artificial Sequence: Synthetic oligonucleotide
ttttcccacggggggtga

SEQ ID NO: 8333 - DNA, 18 bp, Artificial Sequence
  Description of Artificial Sequence: Synthetic oligonucleotide
cccccttttcccacgggg

SEQ ID NO: 8334 - DNA, 18 bp, Artificial Sequence
  Description of Artificial Sequence: Synthetic oligonucleotide
tgaagcccccttttccca

SEQ ID NO: 8335 - DNA, 18 bp, Artificial Sequence
  Description of Artificial Sequence: Synthetic oligonucleotide
gtctttgaagcccccttt

SEQ ID NO: 8336 - DNA, 18 bp, Artificial Sequence
  Description of Artificial Sequence: Synthetic oligonucleotide
gggatgtctttgaagccc

SEQ ID NO: 8337 - DNA, 18 bp, Artificial Sequence
  Description of Artificial Sequence: Synthetic oligonucleotide
ctggtgggatgtctttga

SEQ ID NO: 8338 - DNA, 18 bp, Artificial Sequence
  Description of Artificial Sequence: Synthetic oligonucleotide
ctcccctggtgggatgtc

SEQ ID NO: 8339 - DNA, 18 bp, Artificial Sequence
  Description of Artificial Sequence: Synthetic oligonucleotide
aactcctcccctggtggg

SEQ ID NO: 8340 - DNA, 18 bp, Artificial Sequence
  Description of Artificial Sequence: Synthetic oligonucleotide
cccggaactcctcccctg

SEQ ID NO: 8341 - DNA, 18 bp, Artificial Sequence
  Description of Artificial Sequence: Synthetic oligonucleotide
gtttccccggaactcctc

SEQ ID NO: 8342 - DNA, 18 bp, Artificial Sequence
  Description of Artificial Sequence: Synthetic oligonucleotide
tttgcgtttccccggaac

SEQ ID NO: 8343 - DNA, 18 bp, Artificial Sequence
  Description of Artificial Sequence: Synthetic oligonucleotide
cttcatttgcgtttcccc

SEQ ID NO: 8344 - DNA, 18 bp, Artificial Sequence
  Description of Artificial Sequence: Synthetic oligonucleotide
cccatcttcatttgcgtt

SEQ ID NO: 8345 - DNA, 18 bp, Artificial Sequence
  Description of Artificial Sequence: Synthetic oligonucleotide
ttgaacccatcttcattt

SEQ ID NO: 8346 - DNA, 18 bp, Artificial Sequence
  Description of Artificial Sequence: Synthetic oligonucleotide
gccttttgaacccatctt

SEQ ID NO: 8347 - DNA, 18 bp, Artificial Sequence
  Description of Artificial Sequence: Synthetic oligonucleotide
aggctgccttttgaaccc

SEQ ID NO: 8348 - DNA, 18 bp, Artificial Sequence
  Description of Artificial Sequence: Synthetic oligonucleotide
acgaaaggctgccttttg

SEQ ID NO: 8349 - DNA, 18 bp, Artificial Sequence
  Description of Artificial Sequence: Synthetic oligonucleotide
ccattacgaaaggctgcc

SEQ ID NO: 8350 - DNA, 18 bp, Artificial Sequence
  Description of Artificial Sequence: Synthetic oligonucleotide
cttacccattacgaaagg

SEQ ID NO: 8351 - DNA, 18 bp, Artificial Sequence
  Description of Artificial Sequence: Synthetic oligonucleotide
gagctcttacccattacg

SEQ ID NO: 8352 - DNA, 18 bp, Artificial Sequence
  Description of Artificial Sequence: Synthetic oligonucleotide
agttcgagctcttaccca

SEQ ID NO: 8353 - DNA, 18 bp, Artificial Sequence
  Description of Artificial Sequence: Synthetic oligonucleotide
tccaaagttcgagctctt

SEQ ID NO: 8354 - DNA, 18 bp, Artificial Sequence
  Description of Artificial Sequence: Synthetic oligonucleotide
caggctccaaagttcgag

SEQ ID NO: 8355 - DNA, 18 bp, Artificial Sequence
  Description of Artificial Sequence: Synthetic oligonucleotide
ccaggcaggctccaaagt

SEQ ID NO: 8356 - DNA, 18 bp, Artificial Sequence
  Description of Artificial Sequence: Synthetic oligonucleotide
ccaacccaggcaggctcc

SEQ ID NO: 8357 - DNA, 18 bp, Artificial Sequence
  Description of Artificial Sequence: Synthetic oligonucleotide
acattccaacccaggcag

SEQ ID NO: 8358 - DNA, 18 bp, Artificial Sequence
  Description of Artificial Sequence: Synthetic oligonucleotide
attaaacattccaaccca

SEQ ID NO: 8359 - DNA, 18 bp, Artificial Sequence
  Description of Artificial Sequence: Synthetic oligonucleotide
gatacattaaacattcca

SEQ ID NO: 8360 - DNA, 18 bp, Artificial Sequence
  Description of Artificial Sequence: Synthetic oligonucleotide
gcccagatacattaaaca

SEQ ID NO: 8361 - DNA, 18 bp, Artificial Sequence
  Description of Artificial Sequence: Synthetic oligonucleotide
ctgaggcccagatacatt

SEQ ID NO: 8362 - DNA, 18 bp, Artificial Sequence
  Description of Artificial Sequence: Synthetic oligonucleotide
ggaaactgaggcccagat

SEQ ID NO: 8363 - DNA, 18 bp, Artificial Sequence
  Description of Artificial Sequence: Synthetic oligonucleotide
gatgaggaaactgaggcc

SEQ ID NO: 8364 - DNA, 18 bp, Artificial Sequence
  Description of Artificial Sequence: Synthetic oligonucleotide
tcccagatgaggaaactg

SEQ ID NO: 8365 - DNA, 18 bp, Artificial Sequence
  Description of Artificial Sequence: Synthetic oligonucleotide
tcacttcccagatgagga

SEQ ID NO: 8366 - DNA, 18 bp, Artificial Sequence
  Description of Artificial Sequence: Synthetic oligonucleotide
tactatcacttcccagat

SEQ ID NO: 8367 - DNA, 18 bp, Artificial Sequence
  Description of Artificial Sequence: Synthetic oligonucleotide
gcagatactatcacttcc

SEQ ID NO: 8368 - DNA, 18 bp, Artificial Sequence
  Description of Artificial Sequence: Synthetic oligonucleotide
gtgaggcagatactatca

SEQ ID NO: 8369 - DNA, 18 bp, Artificial Sequence
  Description of Artificial Sequence: Synthetic oligonucleotide
tccccgtgaggcagatac

SEQ ID NO: 8370 - DNA, 18 bp, Artificial Sequence
  Description of Artificial Sequence: Synthetic oligonucleotide
taacatccccgtgaggca

SEQ ID NO: 8371 - DNA, 18 bp, Artificial Sequence
  Description of Artificial Sequence: Synthetic oligonucleotide
gaccataacatccccgtg

SEQ ID NO: 8372 - DNA, 18 bp, Artificial Sequence
  Description of Artificial Sequence: Synthetic oligonucleotide
tcttagaccataacatcc

SEQ ID NO: 8373 - DNA, 18 bp, Artificial Sequence
  Description of Artificial Sequence: Synthetic oligonucleotide
tgaatcccagggaagaag

SEQ ID NO: 8374 - DNA, 18 bp, Artificial Sequence
  Description of Artificial Sequence: Synthetic oligonucleotide
gaatctgaatcccaggga

SEQ ID NO: 8375 - DNA, 18 bp, Artificial Sequence
  Description of Artificial Sequence: Synthetic oligonucleotide
gggaagaatctgaatccc

SEQ ID NO: 8376 - DNA, 18 bp, Artificial Sequence
  Description of Artificial Sequence: Synthetic oligonucleotide
agagtgggaagaatctga

SEQ ID NO: 8377 - DNA, 18 bp, Artificial Sequence
  Description of Artificial Sequence: Synthetic oligonucleotide
gcacaagagtgggaagaa

SEQ ID NO: 8378 - DNA, 18 bp, Artificial Sequence
  Description of Artificial Sequence: Synthetic oligonucleotide
ccacagcacaagagtggg

SEQ ID NO: 8379 - DNA, 18 bp, Artificial Sequence
  Description of Artificial Sequence: Synthetic oligonucleotide
tcctaccacagcacaaga

SEQ ID NO: 8380 - DNA, 18 bp, Artificial Sequence
  Description of Artificial Sequence: Synthetic oligonucleotide
ctgggtcctaccacagca

SEQ ID NO: 8381 - DNA, 18 bp, Artificial Sequence
  Description of Artificial Sequence: Synthetic oligonucleotide
agcttctgggtcctacca

SEQ ID NO: 8382 - DNA, 18 bp, Artificial Sequence
  Description of Artificial Sequence: Synthetic oligonucleotide
cctgcagcttctgggtcc

SEQ ID NO: 8383 - DNA, 18 bp, Artificial Sequence
  Description of Artificial Sequence: Synthetic oligonucleotide
cagcccctgcagcttctg

SEQ ID NO: 8384 - DNA, 18 bp, Artificial Sequence
  Description of Artificial Sequence: Synthetic oligonucleotide
tatttcagcccctgcagc

SEQ ID NO: 8385 - DNA, 18 bp, Artificial Sequence
  Description of Artificial Sequence: Synthetic oligonucleotide
ggctttatttcagcccct

SEQ ID NO: 8386 - DNA, 18 bp, Artificial Sequence
  Description of Artificial Sequence: Synthetic oligonucleotide
gaaggggctttatttcag

SEQ ID NO: 8387 - DNA, 18 bp, Artificial Sequence
  Description of Artificial Sequence: Synthetic oligonucleotide
ggggagaaggggctttat

SEQ ID NO: 8388 - DNA, 18 bp, Artificial Sequence
  Description of Artificial Sequence: Synthetic oligonucleotide
aggatggggagaaggggc

SEQ ID NO: 8389 - DNA, 18 bp, Artificial Sequence
  Description of Artificial Sequence: Synthetic oligonucleotide
gggacaggatggggagaa

SEQ ID NO: 8390 - DNA, 18 bp, Artificial Sequence
  Description of Artificial Sequence: Synthetic oligonucleotide
gccgtgggacaggatggg

SEQ ID NO: 8391 - DNA, 18 bp, Artificial Sequence
  Description of Artificial Sequence: Synthetic oligonucleotide
gaggggccgtgggacagg

SEQ ID NO: 8392 - DNA, 18 bp, Artificial Sequence
  Description of Artificial Sequence: Synthetic oligonucleotide
ccggtgaggggccgtggg

SEQ ID NO: 8393 - DNA, 18 bp, Artificial Sequence
  Description of Artificial Sequence: Synthetic oligonucleotide
cacacccggtgaggggcc

SEQ ID NO: 8394 - DNA, 18 bp, Artificial Sequence
  Description of Artificial Sequence: Synthetic oligonucleotide
gaagccacacccggtgag

SEQ ID NO: 8395 - DNA, 18 bp, Artificial Sequence
  Description of Artificial Sequence: Synthetic oligonucleotide
ccagagaagccacacccg

SEQ ID NO: 8396 - DNA, 18 bp, Artificial Sequence
  Description of Artificial Sequence: Synthetic oligonucleotide
ctgggccagagaagccac

SEQ ID NO: 8397 - DNA, 18 bp, Artificial Sequence
  Description of Artificial Sequence: Synthetic oligonucleotide
gggtgctgggccagagaa

SEQ ID NO: 8398 - DNA, 18 bp, Artificial Sequence
  Description of Artificial Sequence: Synthetic oligonucleotide
ccggggggtgctgggcca

SEQ ID NO: 8399 - DNA, 18 bp, Artificial Sequence
  Description of Artificial Sequence: Synthetic oligonucleotide
agcccccggggggtgctg

SEQ ID NO: 8400 - DNA, 18 bp, Artificial Sequence
  Description of Artificial Sequence: Synthetic oligonucleotide
aaagaagcccccgggggg

SEQ ID NO: 8401 - DNA, 18 bp, Artificial Sequence
  Description of Artificial Sequence: Synthetic oligonucleotide
gccctaaagaagcccccg

SEQ ID NO: 8402 - DNA, 18 bp, Artificial Sequence
  Description of Artificial Sequence: Synthetic oligonucleotide
tggggaaggaagaagaca

SEQ ID NO: 8403 - DNA, 18 bp, Artificial Sequence
  Description of Artificial Sequence: Synthetic oligonucleotide
gaatttggggaaggaaga

SEQ ID NO: 8404 - DNA, 18 bp, Artificial Sequence
  Description of Artificial Sequence: Synthetic oligonucleotide
ctgctgaatttggggaag

SEQ ID NO: 8405 - DNA, 18 bp, Artificial Sequence
  Description of Artificial Sequence: Synthetic oligonucleotide
ctcctctgctgaatttgg

SEQ ID NO: 8406 - DNA, 18 bp, Artificial Sequence
  Description of Artificial Sequence: Synthetic oligonucleotide
tgtatctcctctgctgaa

SEQ ID NO: 8407 - DNA, 18 bp, Artificial Sequence
  Description of Artificial Sequence: Synthetic oligonucleotide
acccttgtatctcctctg

SEQ ID NO: 8408 - DNA, 18 bp, Artificial Sequence
  Description of Artificial Sequence: Synthetic oligonucleotide
caaatacccttgtatctc

SEQ ID NO: 8409 - DNA, 18 bp, Artificial Sequence
  Description of Artificial Sequence: Synthetic oligonucleotide
ctcatcaaatacccttgt

SEQ ID NO: 8410 - DNA, 18 bp, Artificial Sequence
  Description of Artificial Sequence: Synthetic oligonucleotide
cagccctcatcaaatacc

SEQ ID NO: 8411 - DNA, 18 bp, Artificial Sequence
  Description of Artificial Sequence: Synthetic oligonucleotide
ttctgcagccctcatcaa

SEQ ID NO: 8412 - DNA, 18 bp, Artificial Sequence
  Description of Artificial Sequence: Synthetic oligonucleotide
tactgttctgcagccctc

SEQ ID NO: 8413 - DNA, 18 bp, Artificial Sequence
  Description of Artificial Sequence: Synthetic oligonucleotide
caacttactgttctgcag

SEQ ID NO: 8414 - DNA, 18 bp, Artificial Sequence
  Description of Artificial Sequence: Synthetic oligonucleotide
aaaagcaacttactgttc

SEQ ID NO: 8415 - DNA, 18 bp, Artificial Sequence
  Description of Artificial Sequence: Synthetic oligonucleotide
attttaaaagcaacttac

SEQ ID NO: 8416 - DNA, 18 bp, Artificial Sequence
  Description of Artificial Sequence: Synthetic oligonucleotide
aatgaattttaaaagcaa

SEQ ID NO: 8417 - DNA, 18 bp, Artificial Sequence
  Description of Artificial Sequence: Synthetic oligonucleotide
tggaaaatgaattttaaa

SEQ ID NO: 8418 - DNA, 18 bp, Artificial Sequence
  Description of Artificial Sequence: Synthetic oligonucleotide
cattttggaaaatgaatt

SEQ ID NO: 8419 - DNA, 18 bp, Artificial Sequence
  Description of Artificial Sequence: Synthetic oligonucleotide
gaatgcattttggaaaat

SEQ ID NO: 8420 - DNA, 18 bp, Artificial Sequence
  Description of Artificial Sequence: Synthetic oligonucleotide
cttcagaatgcattttgg

SEQ ID NO: 8421 - DNA, 18 bp, Artificial Sequence
  Description of Artificial Sequence: Synthetic oligonucleotide
cttttcttcagaatgcat

SEQ ID NO: 8422 - DNA, 18 bp, Artificial Sequence
  Description of Artificial Sequence: Synthetic oligonucleotide
cctctcttttcttcagaa

SEQ ID NO: 8423 - DNA, 18 bp, Artificial Sequence
  Description of Artificial Sequence: Synthetic oligonucleotide
tttgacctctcttttctt

SEQ ID NO: 8424 - DNA, 18 bp, Artificial Sequence
  Description of Artificial Sequence: Synthetic oligonucleotide
tcttgtttgacctctctt

SEQ ID NO: 8425 - DNA, 18 bp, Artificial Sequence
  Description of Artificial Sequence: Synthetic oligonucleotide
caagatcttgtttgacct

SEQ ID NO: 8426 - DNA, 18 bp, Artificial Sequence
  Description of Artificial Sequence: Synthetic oligonucleotide
ttttccaagatcttgttt

SEQ ID NO: 8427 - DNA, 18 bp, Artificial Sequence
  Description of Artificial Sequence: Synthetic oligonucleotide
ggaagttttccaagatct

SEQ ID NO: 8428 - DNA, 18 bp, Artificial Sequence
  Description of Artificial Sequence: Synthetic oligonucleotide
ctggaggaagttttccaa

SEQ ID NO: 8429 - DNA, 18 bp, Artificial Sequence
  Description of Artificial Sequence: Synthetic oligonucleotide
aaaagctggaggaagttt

SEQ ID NO: 8430 - DNA, 18 bp, Artificial Sequence
  Description of Artificial Sequence: Synthetic oligonucleotide
tttagaaaagctggagga

SEQ ID NO: 8431 - DNA, 18 bp, Artificial Sequence
  Description of Artificial Sequence: Synthetic oligonucleotide
ctacatttagaaaagctg

SEQ ID NO: 8432 - DNA, 18 bp, Artificial Sequence
  Description of Artificial Sequence: Synthetic oligonucleotide
catctctacatttagaaa

SEQ ID NO: 8433 - DNA, 18 bp, Artificial Sequence
  Description of Artificial Sequence: Synthetic oligonucleotide
gtcttcatctctacattt

SEQ ID NO: 8434 - DNA, 18 bp, Artificial Sequence
  Description of Artificial Sequence: Synthetic oligonucleotide
aaagagtcttcatctcta

SEQ ID NO: 8435 - DNA, 18 bp, Artificial Sequence
  Description of Artificial Sequence: Synthetic oligonucleotide
caccccgcccagaactgg

SEQ ID NO: 8436 - DNA, 18 bp, Artificial Sequence
  Description of Artificial Sequence: Synthetic oligonucleotide
gttcccaccccgcccaga

SEQ ID NO: 8437 - DNA, 18 bp, Artificial Sequence
  Description of Artificial Sequence: Synthetic oligonucleotide
tctgggttcccaccccgc

SEQ ID NO: 8438 - DNA, 18 bp, Artificial Sequence
  Description of Artificial Sequence: Synthetic oligonucleotide
ccccgtctgggttcccac

SEQ ID NO: 8439 - DNA, 18 bp, Artificial Sequence
  Description of Artificial Sequence: Synthetic oligonucleotide
gggtcccccgtctgggtt

SEQ ID NO: 8440 - DNA, 18 bp, Artificial Sequence
  Description of Artificial Sequence: Synthetic oligonucleotide
cctaggggtcccccgtct

SEQ ID NO: 8441 - DNA, 18 bp, Artificial Sequence
  Description of Artificial Sequence: Synthetic oligonucleotide
cggcgcctaggggtcccc

SEQ ID NO: 8442 - DNA, 18 bp, Artificial Sequence
  Description of Artificial Sequence: Synthetic oligonucleotide
gggcccggcgcctagggg

SEQ ID NO: 8443 - DNA, 18 bp, Artificial Sequence
  Description of Artificial Sequence: Synthetic oligonucleotide
agggagggcccggcgcct

SEQ ID NO: 8444 - DNA, 18 bp, Artificial Sequence
  Description of Artificial Sequence: Synthetic oligonucleotide
gggagagggagggcccgg

SEQ ID NO: 8445 - DNA, 18 bp, Artificial Sequence
  Description of Artificial Sequence: Synthetic oligonucleotide
gtacggggagagggaggg

SEQ ID NO: 8446 - DNA, 18 bp, Artificial Sequence
  Description of Artificial Sequence: Synthetic oligonucleotide
gaaaagtacggggagagg

SEQ ID NO: 8447 - DNA, 18 bp, Artificial Sequence
  Description of Artificial Sequence: Synthetic oligonucleotide
agggggaaaagtacgggg

SEQ ID NO: 8448 - DNA, 18 bp, Artificial Sequence
  Description of Artificial Sequence: Synthetic oligonucleotide
tgggaagggggaaaagta

SEQ ID NO: 8449 - DNA, 18 bp, Artificial Sequence
  Description of Artificial Sequence: Synthetic oligonucleotide
atgactgggaagggggaa

SEQ ID NO: 8450 - DNA, 18 bp, Artificial Sequence
  Description of Artificial Sequence: Synthetic oligonucleotide
aagaaatgactgggaagg

SEQ ID NO: 8451 - DNA, 18 bp, Artificial Sequence
  Description of Artificial Sequence: Synthetic oligonucleotide
cgcagaagaaatgactgg

SEQ ID NO: 8452 - DNA, 18 bp, Artificial Sequence
  Description of Artificial Sequence: Synthetic oligonucleotide
ggttccgcagaagaaatg

SEQ ID NO: 8453 - DNA, 18 bp, Artificial Sequence
  Description of Artificial Sequence: Synthetic oligonucleotide
gtggaggttccgcagaag

SEQ ID NO: 8454 - DNA, 18 bp, Artificial Sequence
  Description of Artificial Sequence: Synthetic oligonucleotide
gaggggtggaggttccgc

SEQ ID NO: 8455 - DNA, 18 bp, Artificial Sequence
  Description of Artificial Sequence: Synthetic oligonucleotide
cactggaggggtggaggt

SEQ ID NO: 8456 - DNA, 18 bp, Artificial Sequence
  Description of Artificial Sequence: Synthetic oligonucleotide
gcacccactggaggggtg

SEQ ID NO: 8457 - DNA, 18 bp, Artificial Sequence
  Description of Artificial Sequence: Synthetic oligonucleotide
gtcccgcacccactggag

SEQ ID NO: 8458 - DNA, 18 bp, Artificial Sequence
  Description of Artificial Sequence: Synthetic oligonucleotide
ctagggtcccgcacccac

SEQ ID NO: 8459 - DNA, 18 bp, Artificial Sequence
  Description of Artificial Sequence: Synthetic oligonucleotide
gctgcctagggtcccgca

SEQ ID NO: 8460 - DNA, 18 bp, Artificial Sequence
  Description of Artificial Sequence: Synthetic oligonucleotide
ggcctgctgcctagggtc

SEQ ID NO: 8461 - DNA, 18 bp, Artificial Sequence
  Description of Artificial Sequence: Synthetic oligonucleotide
tgcctggcctgctgccta

SEQ ID NO: 8462 - DNA, 18 bp, Artificial Sequence
  Description of Artificial Sequence: Synthetic oligonucleotide
ggcggtgcctggcctgct

SEQ ID NO: 8463 - DNA, 18 bp, Artificial Sequence
  Description of Artificial Sequence: Synthetic oligonucleotide
agagcggcggtgcctggc

SEQ ID NO: 8464 - DNA, 18 bp, Artificial Sequence
  Description of Artificial Sequence: Synthetic oligonucleotide
cagtcagagcggcggtgc

SEQ ID NO: 8465 - DNA, 18 bp, Artificial Sequence
  Description of Artificial Sequence: Synthetic oligonucleotide
gcccccagtcagagcggc

SEQ ID NO: 8466 - DNA, 18 bp, Artificial Sequence
  Description of Artificial Sequence: Synthetic oligonucleotide
tcggggcccccagtcaga

SEQ ID NO: 8467 - DNA, 18 bp, Artificial Sequence
  Description of Artificial Sequence: Synthetic oligonucleotide
ctgcttcggggcccccag

SEQ ID NO: 8468 - DNA, 18 bp, Artificial Sequence
  Description of Artificial Sequence: Synthetic oligonucleotide
gttaactgcttcggggcc

SEQ ID NO: 8469 - DNA, 18 bp, Artificial Sequence
  Description of Artificial Sequence: Synthetic oligonucleotide
ggcccgttaactgcttcg

SEQ ID NO: 8470 - DNA, 18 bp, Artificial Sequence
  Description of Artificial Sequence: Synthetic oligonucleotide
tgtccggcccgttaactg

SEQ ID NO: 8471 - DNA, 18 bp, Artificial Sequence
  Description of Artificial Sequence: Synthetic oligonucleotide
tttgctgtccggcccgtt

SEQ ID NO: 8472 - DNA, 18 bp, Artificial Sequence
  Description of Artificial Sequence: Synthetic oligonucleotide
tccactttgctgtccggc

SEQ ID NO: 8473 - DNA, 18 bp, Artificial Sequence
  Description of Artificial Sequence: Synthetic oligonucleotide
aactttccactttgctgt

SEQ ID NO: 8474 - DNA, 18 bp, Artificial Sequence
  Description of Artificial Sequence: Synthetic oligonucleotide
ggtctaactttccacttt

SEQ ID NO: 8475 - DNA, 18 bp, Artificial Sequence
  Description of Artificial Sequence: Synthetic oligonucleotide
cagctggtctaactttcc

SEQ ID NO: 8476 - DNA, 18 bp, Artificial Sequence
  Description of Artificial Sequence: Synthetic oligonucleotide
ggtcccagctggtctaac

SEQ ID NO: 8477 - DNA, 18 bp, Artificial Sequence
  Description of Artificial Sequence: Synthetic oligonucleotide
cccctggtcccagctggt

SEQ ID NO: 8478 - DNA, 18 bp, Artificial Sequence
  Description of Artificial Sequence: Synthetic oligonucleotide
cacctcccctggtcccag

SEQ ID NO: 8479 - DNA, 18 bp, Artificial Sequence
  Description of Artificial Sequence: Synthetic oligonucleotide
gtgcccacctcccctggt

SEQ ID NO: 8480 - DNA, 18 bp, Artificial Sequence
  Description of Artificial Sequence: Synthetic oligonucleotide
gccgggtgcccacctccc

SEQ ID NO: 8481 - DNA, 18 bp, Artificial Sequence
  Description of Artificial Sequence: Synthetic oligonucleotide
ccgcagccgggtgcccac

SEQ ID NO: 8482 - DNA, 18 bp, Artificial Sequence
  Description of Artificial Sequence: Synthetic oligonucleotide
tcctcccgcagccgggtg

SEQ ID NO: 8483 - DNA, 18 bp, Artificial Sequence
  Description of Artificial Sequence: Synthetic oligonucleotide
gccgctcctcccgcagcc

SEQ ID NO: 8484 - DNA, 18 bp, Artificial Sequence
  Description of Artificial Sequence: Synthetic oligonucleotide
gcctggccgctcctcccg

SEQ ID NO: 8485 - DNA, 18 bp, Artificial Sequence
  Description of Artificial Sequence: Synthetic oligonucleotide
tgccagcctggccgctcc

SEQ ID NO: 8486 - DNA, 18 bp, Artificial Sequence
  Description of Artificial Sequence: Synthetic oligonucleotide
ggcagtgccagcctggcc

SEQ ID NO: 8487 - DNA, 18 bp, Artificial Sequence
  Description of Artificial Sequence: Synthetic oligonucleotide
aggggggcagtgccagcc

SEQ ID NO: 8488 - DNA, 18 bp, Artificial Sequence
  Description of Artificial Sequence: Synthetic oligonucleotide
aagttaggggggcagtgc

SEQ ID NO: 8489 - DNA, 18 bp, Artificial Sequence
  Description of Artificial Sequence: Synthetic oligonucleotide
agagcaagttaggggggc

SEQ ID NO: 8490 - DNA, 18 bp, Artificial Sequence
  Description of Artificial Sequence: Synthetic oligonucleotide
gatcgagagcaagttagg

SEQ ID NO: 8491 - DNA, 18 bp, Artificial Sequence
  Description of Artificial Sequence: Synthetic oligonucleotide
ggcaggatcgagagcaag

SEQ ID NO: 8492 - DNA, 18 bp, Artificial Sequence
  Description of Artificial Sequence: Synthetic oligonucleotide
agaccggcaggatcgaga

SEQ ID NO: 8493 - DNA, 18 bp, Artificial Sequence
  Description of Artificial Sequence: Synthetic oligonucleotide
ggacgagaccggcaggat

SEQ ID NO: 8494 - DNA, 18 bp, Artificial Sequence
  Description of Artificial Sequence: Synthetic oligonucleotide
gcaggtctactccatccc

SEQ ID NO: 8495 - DNA, 18 bp, Artificial Sequence
  Description of Artificial Sequence: Synthetic oligonucleotide
gggcagcaggtctactcc

SEQ ID NO: 8496 - DNA, 18 bp, Artificial Sequence
  Description of Artificial Sequence: Synthetic oligonucleotide
cttccgggcagcaggtct

SEQ ID NO: 8497 - DNA, 18 bp, Artificial Sequence
  Description of Artificial Sequence: Synthetic oligonucleotide
tgatccttccgggcagca

SEQ ID NO: 8498 - DNA, 18 bp, Artificial Sequence
  Description of Artificial Sequence: Synthetic oligonucleotide
cccactgatccttccggg

SEQ ID NO: 8499 - DNA, 18 bp, Artificial Sequence
  Description of Artificial Sequence: Synthetic oligonucleotide
taccacccactgatcctt

SEQ ID NO: 8500 - DNA, 18 bp, Artificial Sequence
  Description of Artificial Sequence: Synthetic oligonucleotide
tctcctaccacccactga

SEQ ID NO: 8501 - DNA, 18 bp, Artificial Sequence
  Description of Artificial Sequence: Synthetic oligonucleotide
caccttctcctaccaccc

SEQ ID NO: 8502 - DNA, 18 bp, Artificial Sequence
  Description of Artificial Sequence: Synthetic oligonucleotide
ctgctcaccttctcctac

SEQ ID NO: 8503 - DNA, 18 bp, Artificial Sequence
  Description of Artificial Sequence: Synthetic oligonucleotide
cctacctgctcaccttct

SEQ ID NO: 8504 - DNA, 18 bp, Artificial Sequence
  Description of Artificial Sequence: Synthetic oligonucleotide
acttccctacctgctcac

SEQ ID NO: 8505 - DNA, 18 bp, Artificial Sequence
  Description of Artificial Sequence: Synthetic oligonucleotide
tacctacttccctacctg

SEQ ID NO: 8506 - DNA, 18 bp, Artificial Sequence
  Description of Artificial Sequence: Synthetic oligonucleotide
ccagctacctacttccct

SEQ ID NO: 8507 - DNA, 18 bp, Artificial Sequence
  Description of Artificial Sequence: Synthetic oligonucleotide
cccgtccagctacctact

SEQ ID NO: 8508 - DNA, 18 bp, Artificial Sequence
  Description of Artificial Sequence: Synthetic oligonucleotide
gggtccccgtccagctac

SEQ ID NO: 8509 - DNA, 18 bp, Artificial Sequence
  Description of Artificial Sequence: Synthetic oligonucleotide
agcctgggtccccgtcca

SEQ ID NO: 8510 - DNA, 18 bp, Artificial Sequence
  Description of Artificial Sequence: Synthetic oligonucleotide
tctggagcctgggtcccc

SEQ ID NO: 8511 - DNA, 18 bp, Artificial Sequence
  Description of Artificial Sequence: Synthetic oligonucleotide
acaactctggagcctggg

SEQ ID NO: 8512 - DNA, 18 bp, Artificial Sequence
  Description of Artificial Sequence: Synthetic oligonucleotide
gagacacaactctggagc

SEQ ID NO: 8513 - DNA, 18 bp, Artificial Sequence
  Description of Artificial Sequence: Synthetic oligonucleotide
tggctgagacacaactct

SEQ ID NO: 8514 - DNA, 18 bp, Artificial Sequence
  Description of Artificial Sequence: Synthetic oligonucleotide
aacgctggctgagacaca

SEQ ID NO: 8515 - DNA, 18 bp, Artificial Sequence
  Description of Artificial Sequence: Synthetic oligonucleotide
tagggaacgctggctgag

SEQ ID NO: 8516 - DNA, 18 bp, Artificial Sequence
  Description of Artificial Sequence: Synthetic oligonucleotide
cactctagggaacgctgg

SEQ ID NO: 8517 - DNA, 18 bp, Artificial Sequence
  Description of Artificial Sequence: Synthetic oligonucleotide
tccaccactctagggaac

SEQ ID NO: 8518 - DNA, 18 bp, Artificial Sequence
  Description of Artificial Sequence: Synthetic oligonucleotide
tgaattccaccactctag

SEQ ID NO: 8519 - DNA, 18 bp, Artificial Sequence
  Description of Artificial Sequence: Synthetic oligonucleotide
gtatttgaattccaccac

SEQ ID NO: 8520 - DNA, 18 bp, Artificial Sequence
  Description of Artificial Sequence: Synthetic oligonucleotide
caagagtatttgaattcc

SEQ ID NO: 8521 - DNA, 18 bp, Artificial Sequence
  Description of Artificial Sequence: Synthetic oligonucleotide
atgagcaagagtatttga

SEQ ID NO: 8522 - DNA, 18 bp, Artificial Sequence
  Description of Artificial Sequence: Synthetic oligonucleotide
agcacatgagcaagagta

SEQ ID NO: 8523 - DNA, 18 bp, Artificial Sequence
  Description of Artificial Sequence: Synthetic oligonucleotide
tagggagcacatgagcaa

SEQ ID NO: 8524 - DNA, 18 bp, Artificial Sequence
  Description of Artificial Sequence: Synthetic oligonucleotide
tacaagcatttcaaggta

SEQ ID NO: 8525 - DNA, 18 bp, Artificial Sequence
  Description of Artificial Sequence: Synthetic oligonucleotide
tagcttacaagcatttca

SEQ ID NO: 8526 - DNA, 18 bp, Artificial Sequence
  Description of Artificial Sequence: Synthetic oligonucleotide
cacagtagcttacaagca

SEQ ID NO: 8527 - DNA, 18 bp, Artificial Sequence
  Description of Artificial Sequence: Synthetic oligonucleotide
tacagcacagtagcttac

SEQ ID NO: 8528 - DNA, 18 bp, Artificial Sequence
  Description of Artificial Sequence: Synthetic oligonucleotide
aaacatacagcacagtag

SEQ ID NO: 8529 - DNA, 18 bp, Artificial Sequence
  Description of Artificial Sequence: Synthetic oligonucleotide
actagaaacatacagcac

SEQ ID NO: 8530 - DNA, 18 bp, Artificial Sequence
  Description of Artificial Sequence: Synthetic oligonucleotide
tggctactagaaacatac

SEQ ID NO: 8531 - DNA, 18 bp, Artificial Sequence
  Description of Artificial Sequence: Synthetic oligonucleotide
ttctgtggctactagaaa

SEQ ID NO: 8532 - DNA, 18 bp, Artificial Sequence
  Description of Artificial Sequence: Synthetic oligonucleotide
aggtattctgtggctact

SEQ ID NO: 8533 - DNA, 18 bp, Artificial Sequence
  Description of Artificial Sequence: Synthetic oligonucleotide
ctaaaaggtattctgtgg

SEQ ID NO: 8534 - DNA, 18 bp, Artificial Sequence
  Description of Artificial Sequence: Synthetic oligonucleotide
gtcgcctaaaaggtattc

SEQ ID NO: 8535 - DNA, 18 bp, Artificial Sequence
  Description of Artificial Sequence: Synthetic oligonucleotide
tttatgtcgcctaaaagg

SEQ ID NO: 8536 - DNA, 18 bp, Artificial Sequence
  Description of Artificial Sequence: Synthetic oligonucleotide
ggatttttatgtcgccta

SEQ ID NO: 8537 - DNA, 18 bp, Artificial Sequence
  Description of Artificial Sequence: Synthetic oligonucleotide
aatgaggatttttatgtc

SEQ ID NO: 8538 - DNA, 18 bp, Artificial Sequence
  Description of Artificial Sequence: Synthetic oligonucleotide
acgaaaatgaggattttt

SEQ ID NO: 8539 - DNA, 18 bp, Artificial Sequence
  Description of Artificial Sequence: Synthetic oligonucleotide
accacacgaaaatgagga

SEQ ID NO: 8540 - DNA, 18 bp, Artificial Sequence
  Description of Artificial Sequence: Synthetic oligonucleotide
acaaaaccacacgaaaat

SEQ ID NO: 8541 - DNA, 18 bp, Artificial Sequence
  Description of Artificial Sequence: Synthetic oligonucleotide
cctcaacaaaaccacacg

SEQ ID NO: 8542 - DNA, 18 bp, Artificial Sequence
  Description of Artificial Sequence: Synthetic oligonucleotide
aaccccctcaacaaaacc

SEQ ID NO: 8543 - DNA, 18 bp, Artificial Sequence
  Description of Artificial Sequence: Synthetic oligonucleotide
gccagaaccccctcaaca

SEQ ID NO: 8544 - DNA, 18 bp, Artificial Sequence
  Description of Artificial Sequence: Synthetic oligonucleotide
tatcagccagaaccccct

SEQ ID NO: 8545 - DNA, 18 bp, Artificial Sequence
  Description of Artificial Sequence: Synthetic oligonucleotide
tatgctatcagccagaac

SEQ ID NO: 8546 - DNA, 18 bp, Artificial Sequence
  Description of Artificial Sequence: Synthetic oligonucleotide
ggacatatgctatcagcc

SEQ ID NO: 8547 - DNA, 18 bp, Artificial Sequence
  Description of Artificial Sequence: Synthetic oligonucleotide
tgtcccccagcctgggcc

SEQ ID NO: 8548 - DNA, 18 bp, Artificial Sequence
  Description of Artificial Sequence: Synthetic oligonucleotide
gatgatgtcccccagcct

SEQ ID NO: 8549 - DNA, 18 bp, Artificial Sequence
  Description of Artificial Sequence: Synthetic oligonucleotide
gctcagatgatgtccccc

SEQ ID NO: 8550 - DNA, 18 bp, Artificial Sequence
  Description of Artificial Sequence: Synthetic oligonucleotide
tcctggctcagatgatgt

SEQ ID NO: 8551 - DNA, 18 bp, Artificial Sequence
  Description of Artificial Sequence: Synthetic oligonucleotide
gggactcctggctcagat

SEQ ID NO: 8552 - DNA, 18 bp, Artificial Sequence
  Description of Artificial Sequence: Synthetic oligonucleotide
gcacagggactcctggct

SEQ ID NO: 8553 - DNA, 18 bp, Artificial Sequence
  Description of Artificial Sequence: Synthetic oligonucleotide
acagggcacagggactcc

SEQ ID NO: 8554 - DNA, 18 bp, Artificial Sequence
  Description of Artificial Sequence: Synthetic oligonucleotide
gagtgacagggcacaggg

SEQ ID NO: 8555 - DNA, 18 bp, Artificial Sequence
  Description of Artificial Sequence: Synthetic oligonucleotide
gctgggagtgacagggca

SEQ ID NO: 8556 - DNA, 18 bp, Artificial Sequence
  Description of Artificial Sequence: Synthetic oligonucleotide
gcccagctgggagtgaca

SEQ ID NO: 8557 - DNA, 18 bp, Artificial Sequence
  Description of Artificial Sequence: Synthetic oligonucleotide
cacctgcccagctgggag

SEQ ID NO: 8558 - DNA, 18 bp, Artificial Sequence
  Description of Artificial Sequence: Synthetic oligonucleotide
gagcccacctgcccagct

SEQ ID NO: 8559 - DNA, 18 bp, Artificial Sequence
  Description of Artificial Sequence: Synthetic oligonucleotide
gtgaggagcccacctgcc

SEQ ID NO: 8560 - DNA, 18 bp, Artificial Sequence
  Description of Artificial Sequence: Synthetic oligonucleotide
ggtgggtgaggagcccac

SEQ ID NO: 8561 - DNA, 18 bp, Artificial Sequence
  Description of Artificial Sequence: Synthetic oligonucleotide
ctgcgggtgggtgaggag

SEQ ID NO: 8562 - DNA, 18 bp, Artificial Sequence
  Description of Artificial Sequence: Synthetic oligonucleotide
ggggcctgcgggtgggtg

SEQ ID NO: 8563 - DNA, 18 bp, Artificial Sequence
  Description of Artificial Sequence: Synthetic oligonucleotide
gatgaggggcctgcgggt

SEQ ID NO: 8564 - DNA, 18 bp, Artificial Sequence
  Description of Artificial Sequence: Synthetic oligonucleotide
cccctgatgaggggcctg

SEQ ID NO: 8565 - DNA, 18 bp, Artificial Sequence
  Description of Artificial Sequence: Synthetic oligonucleotide
agtctcccctgatgaggg

SEQ ID NO: 8566 - DNA, 18 bp, Artificial Sequence
  Description of Artificial Sequence: Synthetic oligonucleotide
cgcagagtctcccctgat

SEQ ID NO: 8567 - DNA, 18 bp, Artificial Sequence
  Description of Artificial Sequence: Synthetic oligonucleotide
tgccccgcagagtctccc

SEQ ID NO: 8568 - DNA, 18 bp, Artificial Sequence
  Description of Artificial Sequence: Synthetic oligonucleotide
acctctgccccgcagagt

SEQ ID NO: 8569 - DNA, 18 bp, Artificial Sequence
  Description of Artificial Sequence: Synthetic oligonucleotide
actccacctctgccccgc

SEQ ID NO: 8570 - DNA, 18 bp, Artificial Sequence
  Description of Artificial Sequence: Synthetic oligonucleotide
ccatcactccacctctgc

SEQ ID NO: 8571 - DNA, 18 bp, Artificial Sequence
  Description of Artificial Sequence: Synthetic oligonucleotide
ggggtccatcactccacc

SEQ ID NO: 8572 - DNA, 18 bp, Artificial Sequence
  Description of Artificial Sequence: Synthetic oligonucleotide
tgggaggggtccatcact

SEQ ID NO: 8573 - DNA, 18 bp, Artificial Sequence
  Description of Artificial Sequence: Synthetic oligonucleotide
agacctgggaggggtcca

SEQ ID NO: 8574 - DNA, 18 bp, Artificial Sequence
  Description of Artificial Sequence: Synthetic oligonucleotide
gccccagacctgggaggg

SEQ ID NO: 8575 - DNA, 18 bp, Artificial Sequence
  Description of Artificial Sequence: Synthetic oligonucleotide
tttgagccccagacctgg

SEQ ID NO: 8576 - DNA, 18 bp, Artificial Sequence
  Description of Artificial Sequence: Synthetic oligonucleotide
gtgagtttgagccccaga

SEQ ID NO: 8577 - DNA, 18 bp, Artificial Sequence
  Description of Artificial Sequence: Synthetic oligonucleotide
agagagtgagtttgagcc

SEQ ID NO: 8578 - DNA, 18 bp, Artificial Sequence
  Description of Artificial Sequence: Synthetic oligonucleotide
aggggagagagtgagttt

SEQ ID NO: 8579 - DNA, 18 bp, Artificial Sequence
  Description of Artificial Sequence: Synthetic oligonucleotide
aagggaggggagagagtg

SEQ ID NO: 8580 - DNA, 18 bp, Artificial Sequence
  Description of Artificial Sequence: Synthetic oligonucleotide
gccccaggttcaagaaga

SEQ ID NO: 8581 - DNA, 18 bp, Artificial Sequence
  Description of Artificial Sequence: Synthetic oligonucleotide
acttggccccaggttcaa

SEQ ID NO: 8582 - DNA, 18 bp, Artificial Sequence
  Description of Artificial Sequence: Synthetic oligonucleotide
aacatacttggccccagg

SEQ ID NO: 8583 - DNA, 18 bp, Artificial Sequence
  Description of Artificial Sequence: Synthetic oligonucleotide
attttaacatacttggcc

SEQ ID NO: 8584 - DNA, 18 bp, Artificial Sequence
  Description of Artificial Sequence: Synthetic oligonucleotide
aatacattttaacatact

SEQ ID NO: 8585 - DNA, 18 bp, Artificial Sequence
  Description of Artificial Sequence: Synthetic oligonucleotide
tatccaatacattttaac

SEQ ID NO: 8586 - DNA, 18 bp, Artificial Sequence
  Description of Artificial Sequence: Synthetic oligonucleotide
aaaattatccaatacatt

SEQ ID NO: 8587 - DNA, 18 bp, Artificial Sequence
  Description of Artificial Sequence: Synthetic oligonucleotide
ataggaaaattatccaat

SEQ ID NO: 8588 - DNA, 18 bp, Artificial Sequence
  Description of Artificial Sequence: Synthetic oligonucleotide
gtatcataggaaaattat

SEQ ID NO: 8589 - DNA, 18 bp, Artificial Sequence
  Description of Artificial Sequence: Synthetic oligonucleotide
agatagtatcataggaaa

SEQ ID NO: 8590 - DNA, 18 bp, Artificial Sequence
  Description of Artificial Sequence: Synthetic oligonucleotide
acttaagatagtatcata

SEQ ID NO: 8591 - DNA, 18 bp, Artificial Sequence
  Description of Artificial Sequence: Synthetic oligonucleotide
tacatacttaagatagta

SEQ ID NO: 8592 - DNA, 18 bp, Artificial Sequence
  Description of Artificial Sequence: Synthetic oligonucleotide
acaaatacatacttaaga

SEQ ID NO: 8593 - DNA, 18 bp, Artificial Sequence
  Description of Artificial Sequence: Synthetic oligonucleotide
tgcaaacaaatacatact

SEQ ID NO: 8594 - DNA, 18 bp, Artificial Sequence
  Description of Artificial Sequence: Synthetic oligonucleotide
tgaattgcaaacaaatac

SEQ ID NO: 8595 - DNA, 18 bp, Artificial Sequence
  Description of Artificial Sequence: Synthetic oligonucleotide
gaaaatgaattgcaaaca

SEQ ID NO: 8596 - DNA, 18 bp, Artificial Sequence
  Description of Artificial Sequence: Synthetic oligonucleotide
caaaagaaaatgaattgc

SEQ ID NO: 8597 - DNA, 18 bp, Artificial Sequence
  Description of Artificial Sequence: Synthetic oligonucleotide
cctttcaaaagaaaatga

SEQ ID NO: 8598 - DNA, 18 bp, Artificial Sequence
  Description of Artificial Sequence: Synthetic oligonucleotide
acaatcctttcaaaagaa

SEQ ID NO: 8599 - DNA, 18 bp, Artificial Sequence
  Description of Artificial Sequence: Synthetic oligonucleotide
atgatacaatcctttcaa

SEQ ID NO: 8600 - DNA, 18 bp, Artificial Sequence
  Description of Artificial Sequence: Synthetic oligonucleotide
cttttatgatacaatcct

SEQ ID NO: 8601 - DNA, 18 bp, Artificial Sequence
  Description of Artificial Sequence: Synthetic oligonucleotide
atccacttttatgataca

SEQ ID NO: 8602 - DNA, 18 bp, Artificial Sequence
  Description of Artificial Sequence: Synthetic oligonucleotide
tcaacatccacttttatg

SEQ ID NO: 8603 - DNA, 18 bp, Artificial Sequence
  Description of Artificial Sequence: Synthetic oligonucleotide
gagattcaacatccactt

SEQ ID NO: 8604 - DNA, 18 bp, Artificial Sequence
  Description of Artificial Sequence: Synthetic oligonucleotide
ataaagagattcaacatc

SEQ ID NO: 8605 - DNA, 18 bp, Artificial Sequence
  Description of Artificial Sequence: Synthetic oligonucleotide
ccgctccgaggccgggag

SEQ ID NO: 8606 - DNA, 18 bp, Artificial Sequence
  Description of Artificial Sequence: Synthetic oligonucleotide
tccgtccgctccgaggcc

SEQ ID NO: 8607 - DNA, 18 bp, Artificial Sequence
  Description of Artificial Sequence: Synthetic oligonucleotide
ccggatccgtccgctccg

SEQ ID NO: 8608 - DNA, 18 bp, Artificial Sequence
  Description of Artificial Sequence: Synthetic oligonucleotide
ccctcccggatccgtccg

SEQ ID NO: 8609 - DNA, 18 bp, Artificial Sequence
  Description of Artificial Sequence: Synthetic oligonucleotide
tggctccctcccggatcc

SEQ ID NO: 8610 - DNA, 18 bp, Artificial Sequence
  Description of Artificial Sequence: Synthetic oligonucleotide
ccgcctggctccctcccg

SEQ ID NO: 8611 - DNA, 18 bp, Artificial Sequence
  Description of Artificial Sequence: Synthetic oligonucleotide
atgggccgcctggctccc

SEQ ID NO: 8612 - DNA, 18 bp, Artificial Sequence
  Description of Artificial Sequence: Synthetic oligonucleotide
tccccatgggccgcctgg

SEQ ID NO: 8613 - DNA, 18 bp, Artificial Sequence
  Description of Artificial Sequence: Synthetic oligonucleotide
gcccctccccatgggccg

SEQ ID NO: 8614 - DNA, 18 bp, Artificial Sequence
  Description of Artificial Sequence: Synthetic oligonucleotide
cccctgcccctccccatg

SEQ ID NO: 8615 - DNA, 18 bp, Artificial Sequence
  Description of Artificial Sequence: Synthetic oligonucleotide
ctaagcccctgcccctcc

SEQ ID NO: 8616 - DNA, 18 bp, Artificial Sequence
  Description of Artificial Sequence: Synthetic oligonucleotide
agcggctaagcccctgcc

SEQ ID NO: 8617 - DNA, 18 bp, Artificial Sequence
  Description of Artificial Sequence: Synthetic oligonucleotide
tcgccagcggctaagccc

SEQ ID NO: 8618 - DNA, 18 bp, Artificial Sequence
  Description of Artificial Sequence: Synthetic oligonucleotide
ctcactcgccagcggcta

SEQ ID NO: 8619 - DNA, 18 bp, Artificial Sequence
  Description of Artificial Sequence: Synthetic oligonucleotide
cggtcctcactcgccagc

SEQ ID NO: 8620 - DNA, 18 bp, Artificial Sequence
  Description of Artificial Sequence: Synthetic oligonucleotide
cgacccggtcctcactcg

SEQ ID NO: 8621 - DNA, 18 bp, Artificial Sequence
  Description of Artificial Sequence: Synthetic oligonucleotide
tctcccgacccggtcctc

SEQ ID NO: 8622 - DNA, 18 bp, Artificial Sequence
  Description of Artificial Sequence: Synthetic oligonucleotide
ccctttctcccgacccgg

SEQ ID NO: 8623 - DNA, 18 bp, Artificial Sequence
  Description of Artificial Sequence: Synthetic oligonucleotide
gcgacccctttctcccga

SEQ ID NO: 8624 - DNA, 18 bp, Artificial Sequence
  Description of Artificial Sequence: Synthetic oligonucleotide
caggtgcgacccctttct

SEQ ID NO: 8625 - DNA, 18 bp, Artificial Sequence
  Description of Artificial Sequence: Synthetic oligonucleotide
aactccaggtgcgacccc

SEQ ID NO: 8626 - DNA, 18 bp, Artificial Sequence
  Description of Artificial Sequence: Synthetic oligonucleotide
ggctgaactccaggtgcg

SEQ ID NO: 8627 - DNA, 18 bp, Artificial Sequence
  Description of Artificial Sequence: Synthetic oligonucleotide
caagaggctgaactccag

SEQ ID NO: 8628 - DNA, 18 bp, Artificial Sequence
  Description of Artificial Sequence: Synthetic oligonucleotide
ctacccaagaggctgaac

SEQ ID NO: 8629 - DNA, 18 bp, Artificial Sequence
  Description of Artificial Sequence: Synthetic oligonucleotide
cgcccctacccaagaggc

SEQ ID NO: 8630 - DNA, 18 bp, Artificial Sequence
  Description of Artificial Sequence: Synthetic oligonucleotide
tatcccgcccctacccaa

SEQ ID NO: 8631 - DNA, 18 bp, Artificial Sequence
  Description of Artificial Sequence: Synthetic oligonucleotide
ccacgtatcccgccccta

SEQ ID NO: 8632 - DNA, 18 bp, Artificial Sequence
  Description of Artificial Sequence: Synthetic oligonucleotide
tcgccccacgtatcccgc

SEQ ID NO: 8633 - DNA, 18 bp, Artificial Sequence
  Description of Artificial Sequence: Synthetic oligonucleotide
tcgagtcgccccacgtat

SEQ ID NO: 8634 - DNA, 18 bp, Artificial Sequence
  Description of Artificial Sequence: Synthetic oligonucleotide
gctcctcgagtcgcccca

SEQ ID NO: 8635 - DNA, 18 bp, Artificial Sequence
  Description of Artificial Sequence: Synthetic oligonucleotide
tggcagctcctcgagtcg

SEQ ID NO: 8636 - DNA, 18 bp, Artificial Sequence
  Description of Artificial Sequence: Synthetic oligonucleotide
agtcctggcagctcctcg

SEQ ID NO: 8637 - DNA, 18 bp, Artificial Sequence
  Description of Artificial Sequence: Synthetic oligonucleotide
tccctagtcctggcagct

SEQ ID NO: 8638 - DNA, 18 bp, Artificial Sequence
  Description of Artificial Sequence: Synthetic oligonucleotide
agccctccctagtcctgg

SEQ ID NO: 8639 - DNA, 18 bp, Artificial Sequence
  Description of Artificial Sequence: Synthetic oligonucleotide
cccgcagccctccctagt

SEQ ID NO: 8640 - DNA, 18 bp, Artificial Sequence
  Description of Artificial Sequence: Synthetic oligonucleotide
cttggcccgcagccctcc

SEQ ID NO: 8641 - DNA, 18 bp, Artificial Sequence
  Description of Artificial Sequence: Synthetic oligonucleotide
cccgtcttggcccgcagc

SEQ ID NO: 8642 - DNA, 18 bp, Artificial Sequence
  Description of Artificial Sequence: Synthetic oligonucleotide
cccgccccgtcttggccc

SEQ ID NO: 8643 - DNA, 18 bp, Artificial Sequence
  Description of Artificial Sequence: Synthetic oligonucleotide
cagatcccgccccgtctt

SEQ ID NO: 8644 - DNA, 18 bp, Artificial Sequence
  Description of Artificial Sequence: Synthetic oligonucleotide
tcatccagatcccgcccc

SEQ ID NO: 8645 - DNA, 18 bp, Artificial Sequence
  Description of Artificial Sequence: Synthetic oligonucleotide
aaacgtcatccagatccc

SEQ ID NO: 8646 - DNA, 18 bp, Artificial Sequence
  Description of Artificial Sequence: Synthetic oligonucleotide
gaggcaaacgtcatccag

SEQ ID NO: 8647 - DNA, 18 bp, Artificial Sequence
  Description of Artificial Sequence: Synthetic oligonucleotide
tcttagaggcaaacgtca

SEQ ID NO: 8648 - DNA, 18 bp, Artificial Sequence
  Description of Artificial Sequence: Synthetic oligonucleotide
tggcgtcttagaggcaaa

SEQ ID NO: 8649 - DNA, 18 bp, Artificial Sequence
  Description of Artificial Sequence: Synthetic oligonucleotide
cctcgtggcgtcttagag

SEQ ID NO: 8650 - DNA, 18 bp, Artificial Sequence
  Description of Artificial Sequence: Synthetic oligonucleotide
ggcctcctcgtggcgtct

SEQ ID NO: 8651 - DNA, 18 bp, Artificial Sequence
  Description of Artificial Sequence: Synthetic oligonucleotide
agcctggcctcctcgtgg

SEQ ID NO: 8652 - DNA, 18 bp, Artificial Sequence
  Description of Artificial Sequence: Synthetic oligonucleotide
tgcaaagcctggcctcct

SEQ ID NO: 8653 - DNA, 18 bp, Artificial Sequence
  Description of Artificial Sequence: Synthetic oligonucleotide
atggttgcaaagcctggc

SEQ ID NO: 8654 - DNA, 18 bp, Artificial Sequence
  Description of Artificial Sequence: Synthetic oligonucleotide
tggagatggttgcaaagc

SEQ ID NO: 8655 - DNA, 18 bp, Artificial Sequence
  Description of Artificial Sequence: Synthetic oligonucleotide
ctttatggagatggttgc

SEQ ID NO: 8656 - DNA, 18 bp, Artificial Sequence
  Description of Artificial Sequence: Synthetic oligonucleotide
cccttctttatggagatg

SEQ ID NO: 8657 - DNA, 18 bp, Artificial Sequence
  Description of Artificial Sequence: Synthetic oligonucleotide
cttgccccttctttatgg

SEQ ID NO: 8658 - DNA, 18 bp, Artificial Sequence
  Description of Artificial Sequence: Synthetic oligonucleotide
tcgaacttgccccttctt

SEQ ID NO: 8659 - DNA, 18 bp, Artificial Sequence
  Description of Artificial Sequence: Synthetic oligonucleotide
cgtcctcgaacttgcccc

SEQ ID NO: 8660 - DNA, 18 bp, Artificial Sequence
  Description of Artificial Sequence: Synthetic oligonucleotide
ctttccgtcctcgaactt

SEQ ID NO: 8661 - DNA, 18 bp, Artificial Sequence
  Description of Artificial Sequence: Synthetic oligonucleotide
gtgggctttccgtcctcg

SEQ ID NO: 8662 - DNA, 18 bp, Artificial Sequence
  Description of Artificial Sequence: Synthetic oligonucleotide
tttgagtgggctttccgt

SEQ ID NO: 8663 - DNA, 18 bp, Artificial Sequence
  Description of Artificial Sequence: Synthetic oligonucleotide
cgccctttgagtgggctt

SEQ ID NO: 8664 - DNA, 18 bp, Artificial Sequence
  Description of Artificial Sequence: Synthetic oligonucleotide
ccccccgccctttgagtg

SEQ ID NO: 8665 - DNA, 18 bp, Artificial Sequence
  Description of Artificial Sequence: Synthetic oligonucleotide
ccccgccccccgcccttt

SEQ ID NO: 8666 - DNA, 18 bp, Artificial Sequence
  Description of Artificial Sequence: Synthetic oligonucleotide
ccaggccccgccccccgc

SEQ ID NO: 8667 - DNA, 18 bp, Artificial Sequence
  Description of Artificial Sequence: Synthetic oligonucleotide
tcttgccaggccccgccc

SEQ ID NO: 8668 - DNA, 18 bp, Artificial Sequence
  Description of Artificial Sequence: Synthetic oligonucleotide
ccccctcttgccaggccc

SEQ ID NO: 8669 - DNA, 18 bp, Artificial Sequence
  Description of Artificial Sequence: Synthetic oligonucleotide
ccacaccccctcttgcca

SEQ ID NO: 8670 - DNA, 18 bp, Artificial Sequence
  Description of Artificial Sequence: Synthetic oligonucleotide
cctggccacaccccctct

SEQ ID NO: 8671 - DNA, 18 bp, Artificial Sequence
  Description of Artificial Sequence: Synthetic oligonucleotide
gggatcctggccacaccc

SEQ ID NO: 8672 - DNA, 18 bp, Artificial Sequence
  Description of Artificial Sequence: Synthetic oligonucleotide
tgcctgggatcctggcca

SEQ ID NO: 8673 - DNA, 18 bp, Artificial Sequence
  Description of Artificial Sequence: Synthetic oligonucleotide
tttactgcctgggatcct

SEQ ID NO: 8674 - DNA, 18 bp, Artificial Sequence
  Description of Artificial Sequence: Synthetic oligonucleotide
cacaatttactgcctggg

SEQ ID NO: 8675 - DNA, 18 bp, Artificial Sequence
  Description of Artificial Sequence: Synthetic oligonucleotide
cgccgcacaatttactgc

SEQ ID NO: 8676 - DNA, 18 bp, Artificial Sequence
  Description of Artificial Sequence: Synthetic oligonucleotide
gaccccgccgcacaattt

SEQ ID NO: 8677 - DNA, 18 bp, Artificial Sequence
  Description of Artificial Sequence: Synthetic oligonucleotide
atccagaccccgccgcac

SEQ ID NO: 8678 - DNA, 18 bp, Artificial Sequence
  Description of Artificial Sequence: Synthetic oligonucleotide
tttccatccagaccccgc

SEQ ID NO: 8679 - DNA, 18 bp, Artificial Sequence
  Description of Artificial Sequence: Synthetic oligonucleotide
ccgcctttccatccagac

SEQ ID NO: 8680 - DNA, 18 bp, Artificial Sequence
  Description of Artificial Sequence: Synthetic oligonucleotide
gggccccgcctttccatc

SEQ ID NO: 8681 - DNA, 18 bp, Artificial Sequence
  Description of Artificial Sequence: Synthetic oligonucleotide
tcagcgggccccgccttt

SEQ ID NO: 8682 - DNA, 18 bp, Artificial Sequence
  Description of Artificial Sequence: Synthetic oligonucleotide
ttctttcagcgggccccg

SEQ ID NO: 8683 - DNA, 18 bp, Artificial Sequence
  Description of Artificial Sequence: Synthetic oligonucleotide
tcgccttctttcagcggg

SEQ ID NO: 8684 - DNA, 18 bp, Artificial Sequence
  Description of Artificial Sequence: Synthetic oligonucleotide
tcggatcgccttctttca

SEQ ID NO: 8685 - DNA, 18 bp, Artificial Sequence
  Description of Artificial Sequence: Synthetic oligonucleotide
agaactcggatcgccttc

SEQ ID NO: 8686 - DNA, 18 bp, Artificial Sequence
  Description of Artificial Sequence: Synthetic oligonucleotide
gtagcagaactcggatcg

SEQ ID NO: 8687 - DNA, 18 bp, Artificial Sequence
  Description of Artificial Sequence: Synthetic oligonucleotide
aggaagtagcagaactcg

SEQ ID NO: 8688 - DNA, 18 bp, Artificial Sequence
  Description of Artificial Sequence: Synthetic oligonucleotide
ttactaggaagtagcaga

SEQ ID NO: 8689 - DNA, 18 bp, Artificial Sequence
  Description of Artificial Sequence: Synthetic oligonucleotide
gtcccttactaggaagta

SEQ ID NO: 8690 - DNA, 18 bp, Artificial Sequence
  Description of Artificial Sequence: Synthetic oligonucleotide
gagacgtcccttactagg

SEQ ID NO: 8691 - DNA, 18 bp, Artificial Sequence
  Description of Artificial Sequence: Synthetic oligonucleotide
ctccagagacgtccctta

SEQ ID NO: 8692 - DNA, 18 bp, Artificial Sequence
  Description of Artificial Sequence: Synthetic oligonucleotide
aatctctccagagacgtc

SEQ ID NO: 8693 - DNA, 18 bp, Artificial Sequence
  Description of Artificial Sequence: Synthetic oligonucleotide
ctcagaatctctccagag

SEQ ID NO: 8694 - DNA, 18 bp, Artificial Sequence
  Description of Artificial Sequence: Synthetic oligonucleotide
aacacctcagaatctctc

SEQ ID NO: 8695 - DNA, 18 bp, Artificial Sequence
  Description of Artificial Sequence: Synthetic oligonucleotide
cctcaaacacctcagaat

SEQ ID NO: 8696 - DNA, 18 bp, Artificial Sequence
  Description of Artificial Sequence: Synthetic oligonucleotide
actgacctcaaacacctc

SEQ ID NO: 8697 - DNA, 18 bp, Artificial Sequence
  Description of Artificial Sequence: Synthetic oligonucleotide
aaaccactgacctcaaac

SEQ ID NO: 8698 - DNA, 18 bp, Artificial Sequence
  Description of Artificial Sequence: Synthetic oligonucleotide
attgaaaaccactgacct

SEQ ID NO: 8699 - DNA, 18 bp, Artificial Sequence
  Description of Artificial Sequence: Synthetic oligonucleotide
ccaagattgaaaaccact

SEQ ID NO: 8700 - DNA, 18 bp, Artificial Sequence
  Description of Artificial Sequence: Synthetic oligonucleotide
gccaaccaagattgaaaa

SEQ ID NO: 8701 - DNA, 18 bp, Artificial Sequence
  Description of Artificial Sequence: Synthetic oligonucleotide
gtgtagccaaccaagatt

SEQ ID NO: 8702 - DNA, 18 bp, Artificial Sequence
  Description of Artificial Sequence: Synthetic oligonucleotide
cctatgtgtagccaacca

SEQ ID NO: 8703 - DNA, 18 bp, Artificial Sequence
  Description of Artificial Sequence: Synthetic oligonucleotide
tgattcctatgtgtagcc

SEQ ID NO: 8704 - DNA, 18 bp, Artificial Sequence
  Description of Artificial Sequence: Synthetic oligonucleotide
tcaagtgattcctatgtg

SEQ ID NO: 8705 - DNA, 18 bp, Artificial Sequence
  Description of Artificial Sequence: Synthetic oligonucleotide
gcccctcaagtgattcct

SEQ ID NO: 8706 - DNA, 18 bp, Artificial Sequence
  Description of Artificial Sequence: Synthetic oligonucleotide
ctcaagcccctcaagtga

SEQ ID NO: 8707 - DNA, 18 bp, Artificial Sequence
  Description of Artificial Sequence: Synthetic oligonucleotide
tttttctcaagcccctca

SEQ ID NO: 8708 - DNA, 18 bp, Artificial Sequence
  Description of Artificial Sequence: Synthetic oligonucleotide
cggtatttttctcaagcc

SEQ ID NO: 8709 - DNA, 18 bp, Artificial Sequence
  Description of Artificial Sequence: Synthetic oligonucleotide
ggtgtcggtatttttctc

SEQ ID NO: 8710 - DNA, 18 bp, Artificial Sequence
  Description of Artificial Sequence: Synthetic oligonucleotide
actcaggtgtcggtattt

SEQ ID NO: 8711 - DNA, 18 bp, Artificial Sequence
  Description of Artificial Sequence: Synthetic oligonucleotide
gtgggactcaggtgtcgg

SEQ ID NO: 8712 - DNA, 18 bp, Artificial Sequence
  Description of Artificial Sequence: Synthetic oligonucleotide
cgggggtgggactcaggt

SEQ ID NO: 8713 - DNA, 18 bp, Artificial Sequence
  Description of Artificial Sequence: Synthetic oligonucleotide
tttctcgggggtgggact

SEQ ID NO: 8714 - DNA, 18 bp, Artificial Sequence
  Description of Artificial Sequence: Synthetic oligonucleotide
cagaatttctcgggggtg

SEQ ID NO: 8715 - DNA, 18 bp, Artificial Sequence
  Description of Artificial Sequence: Synthetic oligonucleotide
ttcatcagaatttctcgg

SEQ ID NO: 8716 - DNA, 18 bp, Artificial Sequence
  Description of Artificial Sequence: Synthetic oligonucleotide
cccatttcatcagaattt

SEQ ID NO: 8717 - DNA, 18 bp, Artificial Sequence
  Description of Artificial Sequence: Synthetic oligonucleotide
ctggacccatttcatcag

SEQ ID NO: 8718 - DNA, 18 bp, Artificial Sequence
  Description of Artificial Sequence: Synthetic oligonucleotide
gcaccctggacccatttc

SEQ ID NO: 8719 - DNA, 18 bp, Artificial Sequence
  Description of Artificial Sequence: Synthetic oligonucleotide
gtgagggaatgagaactc

SEQ ID NO: 8720 - DNA, 18 bp, Artificial Sequence
  Description of Artificial Sequence: Synthetic oligonucleotide
gccaggtgagggaatgag

SEQ ID NO: 8721 - DNA, 18 bp, Artificial Sequence
  Description of Artificial Sequence: Synthetic oligonucleotide
ctgaagccaggtgaggga

SEQ ID NO: 8722 - DNA, 18 bp, Artificial Sequence
  Description of Artificial Sequence: Synthetic oligonucleotide
gtgcgctgaagccaggtg

SEQ ID NO: 8723 - DNA, 18 bp, Artificial Sequence
  Description of Artificial Sequence: Synthetic oligonucleotide
gagaagtgcgctgaagcc

SEQ ID NO: 8724 - DNA, 18 bp, Artificial Sequence
  Description of Artificial Sequence: Synthetic oligonucleotide
gtcgggagaagtgcgctg

SEQ ID NO: 8725 - DNA, 18 bp, Artificial Sequence
  Description of Artificial Sequence: Synthetic oligonucleotide
agtaggtcgggagaagtg

SEQ ID NO: 8726 - DNA, 18 bp, Artificial Sequence
  Description of Artificial Sequence: Synthetic oligonucleotide
gccccagtaggtcgggag

SEQ ID NO: 8727 - DNA, 18 bp, Artificial Sequence
  Description of Artificial Sequence: Synthetic oligonucleotide
ggtttgccccagtaggtc

SEQ ID NO: 8728 - DNA, 18 bp, Artificial Sequence
  Description of Artificial Sequence: Synthetic oligonucleotide
ccttcggtttgccccagt

SEQ ID NO: 8729 - DNA, 18 bp, Artificial Sequence
  Description of Artificial Sequence: Synthetic oligonucleotide
ggcgcccttcggtttgcc

SEQ ID NO: 8730 - DNA, 18 bp, Artificial Sequence
  Description of Artificial Sequence: Synthetic oligonucleotide
tcccgggcgcccttcggt

SEQ ID NO: 8731 - DNA, 18 bp, Artificial Sequence
  Description of Artificial Sequence: Synthetic oligonucleotide
cgggctcccgggcgccct

SEQ ID NO: 8732 - DNA, 18 bp, Artificial Sequence
  Description of Artificial Sequence: Synthetic oligonucleotide
gagaccgggctcccgggc

SEQ ID NO: 8733 - DNA, 18 bp, Artificial Sequence
  Description of Artificial Sequence: Synthetic oligonucleotide
tcagagagaccgggctcc

SEQ ID NO: 8734 - DNA, 18 bp, Artificial Sequence
  Description of Artificial Sequence: Synthetic oligonucleotide
caacctcagagagaccgg

SEQ ID NO: 8735 - DNA, 18 bp, Artificial Sequence
  Description of Artificial Sequence: Synthetic oligonucleotide
ctgaccaacctcagagag

SEQ ID NO: 8736 - DNA, 18 bp, Artificial Sequence
  Description of Artificial Sequence: Synthetic oligonucleotide
agggactgaccaacctca

SEQ ID NO: 8737 - DNA, 18 bp, Artificial Sequence
  Description of Artificial Sequence: Synthetic oligonucleotide
tccccagggactgaccaa

SEQ ID NO: 8738 - DNA, 18 bp, Artificial Sequence
  Description of Artificial Sequence: Synthetic oligonucleotide
catcctccccagggactg

SEQ ID NO: 8739 - DNA, 18 bp, Artificial Sequence
  Description of Artificial Sequence: Synthetic oligonucleotide
gctcacatcctccccagg

SEQ ID NO: 8740 - DNA, 18 bp, Artificial Sequence
  Description of Artificial Sequence: Synthetic oligonucleotide
ccccagctcacatcctcc

SEQ ID NO: 8741 - DNA, 18 bp, Artificial Sequence
  Description of Artificial Sequence: Synthetic oligonucleotide
ggcttccccagctcacat

SEQ ID NO: 8742 - DNA, 18 bp, Artificial Sequence
  Description of Artificial Sequence: Synthetic oligonucleotide
tgagaggcttccccagct

SEQ ID NO: 8743 - DNA, 18 bp, Artificial Sequence
  Description of Artificial Sequence: Synthetic oligonucleotide
aggtctgagaggcttccc

SEQ ID NO: 8744 - DNA, 18 bp, Artificial Sequence
  Description of Artificial Sequence: Synthetic oligonucleotide
gaggtaggtctgagaggc

SEQ ID NO: 8745 - DNA, 18 bp, Artificial Sequence
  Description of Artificial Sequence: Synthetic oligonucleotide
gggtggaggtaggtctga

SEQ ID NO: 8746 - DNA, 18 bp, Artificial Sequence
  Description of Artificial Sequence: Synthetic oligonucleotide
aaccagggtggaggtagg

SEQ ID NO: 8747 - DNA, 18 bp, Artificial Sequence
  Description of Artificial Sequence: Synthetic oligonucleotide
tcctaaaccagggtggag

SEQ ID NO: 8748 - DNA, 18 bp, Artificial Sequence
  Description of Artificial Sequence: Synthetic oligonucleotide
ttacatcctaaaccaggg

SEQ ID NO: 8749 - DNA, 18 bp, Artificial Sequence
  Description of Artificial Sequence: Synthetic oligonucleotide
aagccttacatcctaaac

SEQ ID NO: 8750 - DNA, 18 bp, Artificial Sequence
  Description of Artificial Sequence: Synthetic oligonucleotide
cacacaagccttacatcc

SEQ ID NO: 8751 - DNA, 18 bp, Artificial Sequence
  Description of Artificial Sequence: Synthetic oligonucleotide
tcccccacacaagcctta

SEQ ID NO: 8752 - DNA, 18 bp, Artificial Sequence
  Description of Artificial Sequence: Synthetic oligonucleotide
cttcttcccccacacaag

SEQ ID NO: 8753 - DNA, 18 bp, Artificial Sequence
  Description of Artificial Sequence: Synthetic oligonucleotide
atcaacttcttcccccac

SEQ ID NO: 8754 - DNA, 18 bp, Artificial Sequence
  Description of Artificial Sequence: Synthetic oligonucleotide
acgggatcaacttcttcc

SEQ ID NO: 8755 - DNA, 18 bp, Artificial Sequence
  Description of Artificial Sequence: Synthetic oligonucleotide
atcccacgggatcaactt

SEQ ID NO: 8756 - DNA, 18 bp, Artificial Sequence
  Description of Artificial Sequence: Synthetic oligonucleotide
gggaaatcccacgggatc

SEQ ID NO: 8757 - DNA, 18 bp, Artificial Sequence
  Description of Artificial Sequence: Synthetic oligonucleotide
tcctgtaccatctttcct

SEQ ID NO: 8758 - DNA, 18 bp, Artificial Sequence
  Description of Artificial Sequence: Synthetic oligonucleotide
ccccttcctgtaccatct

SEQ ID NO: 8759 - DNA, 18 bp, Artificial Sequence
  Description of Artificial Sequence: Synthetic oligonucleotide
tccatccccttcctgtac

SEQ ID NO: 8760 - DNA, 18 bp, Artificial Sequence
  Description of Artificial Sequence: Synthetic oligonucleotide
tgttatccatccccttcc

SEQ ID NO: 8761 - DNA, 18 bp, Artificial Sequence
  Description of Artificial Sequence: Synthetic oligonucleotide
gttcctgttatccatccc

SEQ ID NO: 8762 - DNA, 18 bp, Artificial Sequence
  Description of Artificial Sequence: Synthetic oligonucleotide
cccacgttcctgttatcc

SEQ ID NO: 8763 - DNA, 18 bp, Artificial Sequence
  Description of Artificial Sequence: Synthetic oligonucleotide
tggttcccacgttcctgt

SEQ ID NO: 8764 - DNA, 18 bp, Artificial Sequence
  Description of Artificial Sequence: Synthetic oligonucleotide
gtgagtggttcccacgtt

SEQ ID NO: 8765 - DNA, 18 bp, Artificial Sequence
  Description of Artificial Sequence: Synthetic oligonucleotide
gtcctgtgagtggttccc

SEQ ID NO: 8766 - DNA, 18 bp, Artificial Sequence
  Description of Artificial Sequence: Synthetic oligonucleotide
tcccagtcctgtgagtgg

SEQ ID NO: 8767 - DNA, 18 bp, Artificial Sequence
  Description of Artificial Sequence: Synthetic oligonucleotide
ttcattcccagtcctgtg

SEQ ID NO: 8768 - DNA, 18 bp, Artificial Sequence
  Description of Artificial Sequence: Synthetic oligonucleotide
cttgcttcattcccagtc

SEQ ID NO: 8769 - DNA, 18 bp, Artificial Sequence
  Description of Artificial Sequence: Synthetic oligonucleotide
taggtcttgcttcattcc

SEQ ID NO: 8770 - DNA, 18 bp, Artificial Sequence
  Description of Artificial Sequence: Synthetic oligonucleotide
aaacttaggtcttgcttc

SEQ ID NO: 8771 - DNA, 18 bp, Artificial Sequence
  Description of Artificial Sequence: Synthetic oligonucleotide
cctggaaacttaggtctt

SEQ ID NO: 8772 - DNA, 18 bp, Artificial Sequence
  Description of Artificial Sequence: Synthetic oligonucleotide
tcagccctggaaacttag

SEQ ID NO: 8773 - DNA, 18 bp, Artificial Sequence
  Description of Artificial Sequence: Synthetic oligonucleotide
tggtatcagccctggaaa

SEQ ID NO: 8774 - DNA, 18 bp, Artificial Sequence
  Description of Artificial Sequence: Synthetic oligonucleotide
tcacctggtatcagccct

SEQ ID NO: 8775 - DNA, 18 bp, Artificial Sequence
  Description of Artificial Sequence: Synthetic oligonucleotide
gcacatcacctggtatca

SEQ ID NO: 8776 - DNA, 18 bp, Artificial Sequence
  Description of Artificial Sequence: Synthetic oligonucleotide
ggatagcacatcacctgg

SEQ ID NO: 8777 - DNA, 18 bp, Artificial Sequence
  Description of Artificial Sequence: Synthetic oligonucleotide
gctcaggatagcacatca

SEQ ID NO: 8778 - DNA, 18 bp, Artificial Sequence
  Description of Artificial Sequence: Synthetic oligonucleotide
tgtttgctcaggatagca

SEQ ID NO: 8779 - DNA, 18 bp, Artificial Sequence
  Description of Artificial Sequence: Synthetic oligonucleotide
ttgtgtgtttgctcagga

SEQ ID NO: 8780 - DNA, 18 bp, Artificial Sequence
  Description of Artificial Sequence: Synthetic oligonucleotide
agccattgtgtgtttgct

SEQ ID NO: 8781 - DNA, 18 bp, Artificial Sequence
  Description of Artificial Sequence: Synthetic oligonucleotide
aggacagccattgtgtgt

SEQ ID NO: 8782 - DNA, 18 bp, Artificial Sequence
  Description of Artificial Sequence: Synthetic oligonucleotide
ttcaaaggacagccattg

SEQ ID NO: 8783 - DNA, 18 bp, Artificial Sequence
  Description of Artificial Sequence: Synthetic oligonucleotide
agttcttcaaaggacagc

SEQ ID NO: 8784 - DNA, 18 bp, Artificial Sequence
  Description of Artificial Sequence: Synthetic oligonucleotide
cctcaagttcttcaaagg

SEQ ID NO: 8785 - DNA, 18 bp, Artificial Sequence
  Description of Artificial Sequence: Synthetic oligonucleotide
tgagtcctcaagttcttc

SEQ ID NO: 8786 - DNA, 18 bp, Artificial Sequence
  Description of Artificial Sequence: Synthetic oligonucleotide
atgtgtgagtcctcaagt

SEQ ID NO: 8787 - DNA, 18 bp, Artificial Sequence
  Description of Artificial Sequence: Synthetic oligonucleotide
tgggcatgtgtgagtcct

SEQ ID NO: 8788 - DNA, 18 bp, Artificial Sequence
  Description of Artificial Sequence: Synthetic oligonucleotide
tgccgtgggcatgtgtga

SEQ ID NO: 8789 - DNA, 18 bp, Artificial Sequence
  Description of Artificial Sequence: Synthetic oligonucleotide
caaggtgccgtgggcatg

SEQ ID NO: 8790 - DNA, 18 bp, Artificial Sequence
  Description of Artificial Sequence: Synthetic oligonucleotide
agtgccaaggtgccgtgg

SEQ ID NO: 8791 - DNA, 18 bp, Artificial Sequence
  Description of Artificial Sequence: Synthetic oligonucleotide
ctcctagtgccaaggtgc

SEQ ID NO: 8792 - DNA, 18 bp, Artificial Sequence
  Description of Artificial Sequence: Synthetic oligonucleotide
actggctcctagtgccaa

SEQ ID NO: 8793 - DNA, 18 bp, Artificial Sequence
  Description of Artificial Sequence: Synthetic oligonucleotide
ccatcactggctcctagt

SEQ ID NO: 8794 - DNA, 18 bp, Artificial Sequence
  Description of Artificial Sequence: Synthetic oligonucleotide
tggccccatcactggctc

SEQ ID NO: 8795 - DNA, 18 bp, Artificial Sequence
  Description of Artificial Sequence: Synthetic oligonucleotide
tgggctggccccatcact

SEQ ID NO: 8796 - DNA, 18 bp, Artificial Sequence
  Description of Artificial Sequence: Synthetic oligonucleotide
tggcatgggctggcccca

SEQ ID NO: 8797 - DNA, 18 bp, Artificial Sequence
  Description of Artificial Sequence: Synthetic oligonucleotide
gccattggcatgggctgg

SEQ ID NO: 8798 - DNA, 18 bp, Artificial Sequence
  Description of Artificial Sequence: Synthetic oligonucleotide
cgcttgccattggcatgg

SEQ ID NO: 8799 - DNA, 18 bp, Artificial Sequence
  Description of Artificial Sequence: Synthetic oligonucleotide
ccttacgcttgccattgg

SEQ ID NO: 8800 - DNA, 18 bp, Artificial Sequence
  Description of Artificial Sequence: Synthetic oligonucleotide
agaagccttacgcttgcc

SEQ ID NO: 8801 - DNA, 18 bp, Artificial Sequence
  Description of Artificial Sequence: Synthetic oligonucleotide
aacccagaagccttacgc

SEQ ID NO: 8802 - DNA, 18 bp, Artificial Sequence
  Description of Artificial Sequence: Synthetic oligonucleotide
atttgaacccagaagcct

SEQ ID NO: 8803 - DNA, 18 bp, Artificial Sequence
  Description of Artificial Sequence: Synthetic oligonucleotide
gcaaaatttgaacccaga

SEQ ID NO: 8804 - DNA, 18 bp, Artificial Sequence
  Description of Artificial Sequence: Synthetic oligonucleotide
gactggcaaaatttgaac

SEQ ID NO: 8805 - DNA, 18 bp, Artificial Sequence
  Description of Artificial Sequence: Synthetic oligonucleotide
cctaggactggcaaaatt

SEQ ID NO: 8806 - DNA, 18 bp, Artificial Sequence
  Description of Artificial Sequence: Synthetic oligonucleotide
tggttcctaggactggca

SEQ ID NO: 8807 - DNA, 18 bp, Artificial Sequence
  Description of Artificial Sequence: Synthetic oligonucleotide
tagggtggttcctaggac

SEQ ID NO: 8808 - DNA, 18 bp, Artificial Sequence
  Description of Artificial Sequence: Synthetic oligonucleotide
tgaggtagggtggttcct

SEQ ID NO: 8809 - DNA, 18 bp, Artificial Sequence
  Description of Artificial Sequence: Synthetic oligonucleotide
atcattgaggtagggtgg

SEQ ID NO: 8810 - DNA, 18 bp, Artificial Sequence
  Description of Artificial Sequence: Synthetic oligonucleotide
gtgctatcattgaggtag

SEQ ID NO: 8811 - DNA, 18 bp, Artificial Sequence
  Description of Artificial Sequence: Synthetic oligonucleotide
tagttgtgctatcattga

SEQ ID NO: 8812 - DNA, 18 bp, Artificial Sequence
  Description of Artificial Sequence: Synthetic oligonucleotide
aagactagttgtgctatc

SEQ ID NO: 8813 - DNA, 18 bp, Artificial Sequence
  Description of Artificial Sequence: Synthetic oligonucleotide
cctccaagactagttgtg

SEQ ID NO: 8814 - DNA, 18 bp, Artificial Sequence
  Description of Artificial Sequence: Synthetic oligonucleotide
agacccctccaagactag

SEQ ID NO: 8815 - DNA, 18 bp, Artificial Sequence
  Description of Artificial Sequence: Synthetic oligonucleotide
cttgcagacccctccaag

SEQ ID NO: 8816 - DNA, 18 bp, Artificial Sequence
  Description of Artificial Sequence: Synthetic oligonucleotide
atttccttgcagacccct

SEQ ID NO: 8817 - DNA, 18 bp, Artificial Sequence
  Description of Artificial Sequence: Synthetic oligonucleotide
gtttgatttccttgcaga

SEQ ID NO: 8818 - DNA, 18 bp, Artificial Sequence
  Description of Artificial Sequence: Synthetic oligonucleotide
agaaggtttgatttcctt

SEQ ID NO: 8819 - DNA, 18 bp, Artificial Sequence
  Description of Artificial Sequence: Synthetic oligonucleotide
ctagaagaaggtttgatt

SEQ ID NO: 8820 - DNA, 18 bp, Artificial Sequence
  Description of Artificial Sequence: Synthetic oligonucleotide
acccactagaagaaggtt

SEQ ID NO: 8821 - DNA, 18 bp, Artificial Sequence
  Description of Artificial Sequence: Synthetic oligonucleotide
ggttcacccactagaaga

SEQ ID NO: 8822 - DNA, 18 bp, Artificial Sequence
  Description of Artificial Sequence: Synthetic oligonucleotide
gaatgtcttcactaaaag

SEQ ID NO: 8823 - DNA, 18 bp, Artificial Sequence
  Description of Artificial Sequence: Synthetic oligonucleotide
aggtagaatgtcttcact

SEQ ID NO: 8824 - DNA, 18 bp, Artificial Sequence
  Description of Artificial Sequence: Synthetic oligonucleotide
tttgaaggtagaatgtct

SEQ ID NO: 8825 - DNA, 18 bp, Artificial Sequence
  Description of Artificial Sequence: Synthetic oligonucleotide
ttctttttgaaggtagaa

SEQ ID NO: 8826 - DNA, 18 bp, Artificial Sequence
  Description of Artificial Sequence: Synthetic oligonucleotide
catttttctttttgaagg

SEQ ID NO: 8827 - DNA, 18 bp, Artificial Sequence
  Description of Artificial Sequence: Synthetic oligonucleotide
cttgtcatttttcttttt

SEQ ID NO: 8828 - DNA, 18 bp, Artificial Sequence
  Description of Artificial Sequence: Synthetic oligonucleotide
accaacttgtcatttttc

SEQ ID NO: 8829 - DNA, 18 bp, Artificial Sequence
  Description of Artificial Sequence: Synthetic oligonucleotide
tctggaccaacttgtcat

SEQ ID NO: 8830 - DNA, 18 bp, Artificial Sequence
  Description of Artificial Sequence: Synthetic oligonucleotide
atctgtctggaccaactt

SEQ ID NO: 8831 - DNA, 18 bp, Artificial Sequence
  Description of Artificial Sequence: Synthetic oligonucleotide
aaaatatctgtctggacc

SEQ ID NO: 8832 - DNA, 18 bp, Artificial Sequence
  Description of Artificial Sequence: Synthetic oligonucleotide
ctttcaaaatatctgtct

SEQ ID NO: 8833 - DNA, 18 bp, Artificial Sequence
  Description of Artificial Sequence: Synthetic oligonucleotide
atttactttcaaaatatc

SEQ ID NO: 8834 - DNA, 18 bp, Artificial Sequence
  Description of Artificial Sequence: Synthetic oligonucleotide
tagacatttactttcaaa

SEQ ID NO: 8835 - DNA, 18 bp, Artificial Sequence
  Description of Artificial Sequence: Synthetic oligonucleotide
ttctttagacatttactt

SEQ ID NO: 8836 - DNA, 18 bp, Artificial Sequence
  Description of Artificial Sequence: Synthetic oligonucleotide
ttttgttctttagacatt

SEQ ID NO: 8837 - DNA, 18 bp, Artificial Sequence
  Description of Artificial Sequence: Synthetic oligonucleotide
taaaattttgttctttag

SEQ ID NO: 8838 - DNA, 18 bp, Artificial Sequence
  Description of Artificial Sequence: Synthetic oligonucleotide
ttcattaaaattttgttc

SEQ ID NO: 8839 - DNA, 18 bp, Artificial Sequence
  Description of Artificial Sequence: Synthetic oligonucleotide
cttatttcattaaaattt

SEQ ID NO: 8840 - DNA, 18 bp, Artificial Sequence
  Description of Artificial Sequence: Synthetic oligonucleotide
tacaacttatttcattaa

SEQ ID NO: 8841 - DNA, 18 bp, Artificial Sequence
  Description of Artificial Sequence: Synthetic oligonucleotide
tggtctacaacttatttc

SEQ ID NO: 8842 - DNA, 18 bp, Artificial Sequence
  Description of Artificial Sequence: Synthetic oligonucleotide
cataatggtctacaactt

SEQ ID NO: 8843 - DNA, 18 bp, Artificial Sequence
  Description of Artificial Sequence: Synthetic oligonucleotide
tatttcataatggtctac

SEQ ID NO: 8844 - DNA, 18 bp, Artificial Sequence
  Description of Artificial Sequence: Synthetic oligonucleotide
aaatgtatttcataatgg

SEQ ID NO: 8845 - DNA, 18 bp, Artificial Sequence
  Description of Artificial Sequence: Synthetic oligonucleotide
gttctaaatgtatttcat

SEQ ID NO: 8846 - DNA, 18 bp, Artificial Sequence
  Description of Artificial Sequence: Synthetic oligonucleotide
tattggttctaaatgtat

SEQ ID NO: 8847 - DNA, 18 bp, Artificial Sequence
  Description of Artificial Sequence: Synthetic oligonucleotide
tgatatattggttctaaa

SEQ ID NO: 8848 - DNA, 18 bp, Artificial Sequence
  Description of Artificial Sequence: Synthetic oligonucleotide
atttctgatatattggtt

SEQ ID NO: 8849 - DNA, 18 bp, Artificial Sequence
  Description of Artificial Sequence: Synthetic oligonucleotide
tattaatttctgatatat

SEQ ID NO: 8850 - DNA, 18 bp, Artificial Sequence
  Description of Artificial Sequence: Synthetic oligonucleotide
tattttattaatttctga

SEQ ID NO: 8851 - DNA, 18 bp, Artificial Sequence
  Description of Artificial Sequence: Synthetic oligonucleotide
gcatttattttattaatt

SEQ ID NO: 8852 - DNA, 18 bp, Artificial Sequence
  Description of Artificial Sequence: Synthetic oligonucleotide
taagagcatttattttat

SEQ ID NO: 8853 - DNA, 18 bp, Artificial Sequence
  Description of Artificial Sequence: Synthetic oligonucleotide
ttagttaagagcatttat

SEQ ID NO: 8854 - DNA, 18 bp, Artificial Sequence
  Description of Artificial Sequence: Synthetic oligonucleotide
atttattagttaagagca

SEQ ID NO: 8855 - DNA, 18 bp, Artificial Sequence
  Description of Artificial Sequence: Synthetic oligonucleotide
attccatttattagttaa

SEQ ID NO: 8856 - DNA, 18 bp, Artificial Sequence
  Description of Artificial Sequence: Synthetic oligonucleotide
agcactgccagatgtcac

SEQ ID NO: 8857 - DNA, 18 bp, Artificial Sequence
  Description of Artificial Sequence: Synthetic oligonucleotide
ctgcaagcactgccagat

SEQ ID NO: 8858 - DNA, 18 bp, Artificial Sequence
  Description of Artificial Sequence: Synthetic oligonucleotide
ggcttctgcaagcactgc

SEQ ID NO: 8859 - DNA, 18 bp, Artificial Sequence
  Description of Artificial Sequence: Synthetic oligonucleotide
ccaggggcttctgcaagc

SEQ ID NO: 8860 - DNA, 18 bp, Artificial Sequence
  Description of Artificial Sequence: Synthetic oligonucleotide
cctgcccaggggcttctg

SEQ ID NO: 8861 - DNA, 18 bp, Artificial Sequence
  Description of Artificial Sequence: Synthetic oligonucleotide
gggagcctgcccaggggc

SEQ ID NO: 8862 - DNA, 18 bp, Artificial Sequence
  Description of Artificial Sequence: Synthetic oligonucleotide
tgcaggggagcctgccca

SEQ ID NO: 8863 - DNA, 18 bp, Artificial Sequence
  Description of Artificial Sequence: Synthetic oligonucleotide
ctggttgcaggggagcct

SEQ ID NO: 8864 - DNA, 18 bp, Artificial Sequence
  Description of Artificial Sequence: Synthetic oligonucleotide
tttcgctggttgcagggg

SEQ ID NO: 8865 - DNA, 18 bp, Artificial Sequence
  Description of Artificial Sequence: Synthetic oligonucleotide
tgacctttcgctggttgc

SEQ ID NO: 8866 - DNA, 18 bp, Artificial Sequence
  Description of Artificial Sequence: Synthetic oligonucleotide
agaggtgacctttcgctg

SEQ ID NO: 8867 - DNA, 18 bp, Artificial Sequence
  Description of Artificial Sequence: Synthetic oligonucleotide
tgggcagaggtgaccttt

SEQ ID NO: 8868 - DNA, 18 bp, Artificial Sequence
  Description of Artificial Sequence: Synthetic oligonucleotide
ctccttgggcagaggtga

SEQ ID NO: 8869 - DNA, 18 bp, Artificial Sequence
  Description of Artificial Sequence: Synthetic oligonucleotide
accacctccttgggcaga

SEQ ID NO: 8870 - DNA, 18 bp, Artificial Sequence
  Description of Artificial Sequence: Synthetic oligonucleotide
actctaccacctccttgg

SEQ ID NO: 8871 - DNA, 18 bp, Artificial Sequence
  Description of Artificial Sequence: Synthetic oligonucleotide
gctgcactctaccacctc

SEQ ID NO: 8872 - DNA, 18 bp, Artificial Sequence
  Description of Artificial Sequence: Synthetic oligonucleotide
ttgaagctgcactctacc

SEQ ID NO: 8873 - DNA, 18 bp, Artificial Sequence
  Description of Artificial Sequence: Synthetic oligonucleotide
aaatgttgaagctgcact

SEQ ID NO: 8874 - DNA, 18 bp, Artificial Sequence
  Description of Artificial Sequence: Synthetic oligonucleotide
cacacaaatgttgaagct

SEQ ID NO: 8875 - DNA, 18 bp, Artificial Sequence
  Description of Artificial Sequence: Synthetic oligonucleotide
gagaccacacaaatgttg

SEQ ID NO: 8876 - DNA, 18 bp, Artificial Sequence
  Description of Artificial Sequence: Synthetic oligonucleotide
gcaaagagaccacacaaa

SEQ ID NO: 8877 - DNA, 18 bp, Artificial Sequence
  Description of Artificial Sequence: Synthetic oligonucleotide
cttgagcaaagagaccac

SEQ ID NO: 8878 - DNA, 18 bp, Artificial Sequence
  Description of Artificial Sequence: Synthetic oligonucleotide
tctggcttgagcaaagag

SEQ ID NO: 8879 - DNA, 18 bp, Artificial Sequence
  Description of Artificial Sequence: Synthetic oligonucleotide
tgccatctggcttgagca

SEQ ID NO: 8880 - DNA, 18 bp, Artificial Sequence
  Description of Artificial Sequence: Synthetic oligonucleotide
gaacatgccatctggctt

SEQ ID NO: 8881 - DNA, 18 bp, Artificial Sequence
  Description of Artificial Sequence: Synthetic oligonucleotide
gggtggaacatgccatct

SEQ ID NO: 8882 - DNA, 18 bp, Artificial Sequence
  Description of Artificial Sequence: Synthetic oligonucleotide
atgtggggtggaacatgc

SEQ ID NO: 8883 - DNA, 18 bp, Artificial Sequence
  Description of Artificial Sequence: Synthetic oligonucleotide
cttccatgtggggtggaa

SEQ ID NO: 8884 - DNA, 18 bp, Artificial Sequence
  Description of Artificial Sequence: Synthetic oligonucleotide
tgttacttccatgtgggg

SEQ ID NO: 8885 - DNA, 18 bp, Artificial Sequence
  Description of Artificial Sequence: Synthetic oligonucleotide
tcttctgttacttccatg

SEQ ID NO: 8886 - DNA, 18 bp, Artificial Sequence
  Description of Artificial Sequence: Synthetic oligonucleotide
ggtagtcttctgttactt

SEQ ID NO: 8887 - DNA, 18 bp, Artificial Sequence
  Description of Artificial Sequence: Synthetic oligonucleotide
ttctgggtagtcttctgt

SEQ ID NO: 8888 - DNA, 18 bp, Artificial Sequence
  Description of Artificial Sequence: Synthetic oligonucleotide
acattttctgggtagtct

SEQ ID NO: 8889 - DNA, 18 bp, Artificial Sequence
  Description of Artificial Sequence: Synthetic oligonucleotide
aaatgacattttctgggt

SEQ ID NO: 8890 - DNA, 18 bp, Artificial Sequence
  Description of Artificial Sequence: Synthetic oligonucleotide
tacagaaatgacattttc

SEQ ID NO: 8891 - DNA, 18 bp, Artificial Sequence
  Description of Artificial Sequence: Synthetic oligonucleotide
gtgcttacagaaatgaca

SEQ ID NO: 8892 - DNA, 18 bp, Artificial Sequence
  Description of Artificial Sequence: Synthetic oligonucleotide
caatggtgcttacagaaa

SEQ ID NO: 8893 - DNA, 18 bp, Artificial Sequence
  Description of Artificial Sequence: Synthetic oligonucleotide
acttccaatggtgcttac

SEQ ID NO: 8894 - DNA, 18 bp, Artificial Sequence
  Description of Artificial Sequence: Synthetic oligonucleotide
aggggacttccaatggtg

SEQ ID NO: 8895 - DNA, 18 bp, Artificial Sequence
  Description of Artificial Sequence: Synthetic oligonucleotide
cacttaggggacttccaa

SEQ ID NO: 8896 - DNA, 18 bp, Artificial Sequence
  Description of Artificial Sequence: Synthetic oligonucleotide
gctgtcacttaggggact

SEQ ID NO: 8897 - DNA, 18 bp, Artificial Sequence
  Description of Artificial Sequence: Synthetic oligonucleotide
ttattgctgtcacttagg

SEQ ID NO: 8898 - DNA, 18 bp, Artificial Sequence
  Description of Artificial Sequence: Synthetic oligonucleotide
tatggttattgctgtcac

SEQ ID NO: 8899 - DNA, 18 bp, Artificial Sequence
  Description of Artificial Sequence: Synthetic oligonucleotide
gttcttatggttattgct

SEQ ID NO: 8900 - DNA, 18 bp, Artificial Sequence
  Description of Artificial Sequence: Synthetic oligonucleotide
aaaaagttcttatggtta

SEQ ID NO: 8901 - DNA, 18 bp, Artificial Sequence
  Description of Artificial Sequence: Synthetic oligonucleotide
gaaagaaaaagttcttat

SEQ ID NO: 8902 - DNA, 18 bp, Artificial Sequence
  Description of Artificial Sequence: Synthetic oligonucleotide
gggaggaaagaaaaagtt

SEQ ID NO: 8903 - DNA, 18 bp, Artificial Sequence
  Description of Artificial Sequence: Synthetic oligonucleotide
aaggagggaggaaagaaa

SEQ ID NO: 8904 - DNA, 18 bp, Artificial Sequence
  Description of Artificial Sequence: Synthetic oligonucleotide
ggaagaaggagggaggaa

SEQ ID NO: 8905 - DNA, 18 bp, Artificial Sequence
  Description of Artificial Sequence: Synthetic oligonucleotide
gacaaggaagaaggaggg

SEQ ID NO: 8906 - DNA, 18 bp, Artificial Sequence
  Description of Artificial Sequence: Synthetic oligonucleotide
caggggacaaggaagaag

SEQ ID NO: 8907 - DNA, 18 bp, Artificial Sequence
  Description of Artificial Sequence: Synthetic oligonucleotide
gaaggcaggggacaagga

SEQ ID NO: 8908 - DNA, 18 bp, Artificial Sequence
  Description of Artificial Sequence: Synthetic oligonucleotide
aatatgaaggcaggggac

SEQ ID NO: 8909 - DNA, 18 bp, Artificial Sequence
  Description of Artificial Sequence: Synthetic oligonucleotide
gttgcaatatgaaggcag

SEQ ID NO: 8910 - DNA, 18 bp, Artificial Sequence
  Description of Artificial Sequence: Synthetic oligonucleotide
tcagagttgcaatatgaa

SEQ ID NO: 8911 - DNA, 18 bp, Artificial Sequence
  Description of Artificial Sequence: Synthetic oligonucleotide
tactatcagagttgcaat

SEQ ID NO: 8912 - DNA, 18 bp, Artificial Sequence
  Description of Artificial Sequence: Synthetic oligonucleotide
gtgaatactatcagagtt

SEQ ID NO: 8913 - DNA, 18 bp, Artificial Sequence
  Description of Artificial Sequence: Synthetic oligonucleotide
acgcccgtgctgagtggc

SEQ ID NO: 8914 - DNA, 18 bp, Artificial Sequence
  Description of Artificial Sequence: Synthetic oligonucleotide
tcctcacgcccgtgctga

SEQ ID NO: 8915 - DNA, 18 bp, Artificial Sequence
  Description of Artificial Sequence: Synthetic oligonucleotide
ggggctcctcacgcccgt

SEQ ID NO: 8916 - DNA, 18 bp, Artificial Sequence
  Description of Artificial Sequence: Synthetic oligonucleotide
cctgtggggctcctcacg

SEQ ID NO: 8917 - DNA, 18 bp, Artificial Sequence
  Description of Artificial Sequence: Synthetic oligonucleotide
cccagcctgtggggctcc

SEQ ID NO: 8918 - DNA, 18 bp, Artificial Sequence
  Description of Artificial Sequence: Synthetic oligonucleotide
agtgtcccagcctgtggg

SEQ ID NO: 8919 - DNA, 18 bp, Artificial Sequence
  Description of Artificial Sequence: Synthetic oligonucleotide
cacccagtgtcccagcct

SEQ ID NO: 8920 - DNA, 18 bp, Artificial Sequence
  Description of Artificial Sequence: Synthetic oligonucleotide
agaggcacccagtgtccc

SEQ ID NO: 8921 - DNA, 18 bp, Artificial Sequence
  Description of Artificial Sequence: Synthetic oligonucleotide
gtggcagaggcacccagt

SEQ ID NO: 8922 - DNA, 18 bp, Artificial Sequence
  Description of Artificial Sequence: Synthetic oligonucleotide
caccagtggcagaggcac

SEQ ID NO: 8923 - DNA, 18 bp, Artificial Sequence
  Description of Artificial Sequence: Synthetic oligonucleotide
ggcctcaccagtggcaga

SEQ ID NO: 8924 - DNA, 18 bp, Artificial Sequence
  Description of Artificial Sequence: Synthetic oligonucleotide
tgagcggcctcaccagtg

SEQ ID NO: 8925 - DNA, 18 bp, Artificial Sequence
  Description of Artificial Sequence: Synthetic oligonucleotide
tgtgctgagcggcctcac

SEQ ID NO: 8926 - DNA, 18 bp, Artificial Sequence
  Description of Artificial Sequence: Synthetic oligonucleotide
acgcctgtgctgagcggc

SEQ ID NO: 8927 - DNA, 18 bp, Artificial Sequence
  Description of Artificial Sequence: Synthetic oligonucleotide
tcctgacgcctgtgctga

SEQ ID NO: 8928 - DNA, 18 bp, Artificial Sequence
  Description of Artificial Sequence: Synthetic oligonucleotide
ggggctcctgacgcctgt

SEQ ID NO: 8929 - DNA, 18 bp, Artificial Sequence
  Description of Artificial Sequence: Synthetic oligonucleotide
cctgtggggctcctgacg

SEQ ID NO: 8930 - DNA, 18 bp, Artificial Sequence
  Description of Artificial Sequence: Synthetic oligonucleotide
cccagcctgtggggctcc

SEQ ID NO: 8931 - DNA, 18 bp, Artificial Sequence
  Description of Artificial Sequence: Synthetic oligonucleotide
agtgtcccagcctgtggg

SEQ ID NO: 8932 - DNA, 18 bp, Artificial Sequence
  Description of Artificial Sequence: Synthetic oligonucleotide
cacccagtgtcccagcct

SEQ ID NO: 8933 - DNA, 18 bp, Artificial Sequence
  Description of Artificial Sequence: Synthetic oligonucleotide
agaggcacccagtgtccc

SEQ ID NO: 8934 - DNA, 18 bp, Artificial Sequence
  Description of Artificial Sequence: Synthetic oligonucleotide
cttgtagaggcacccagt

SEQ ID NO: 8935 - DNA, 18 bp, Artificial Sequence
  Description of Artificial Sequence: Synthetic oligonucleotide
ctggccttgtagaggcac

SEQ ID NO: 8936 - DNA, 18 bp, Artificial Sequence
  Description of Artificial Sequence: Synthetic oligonucleotide
agcagctggccttgtaga

SEQ ID NO: 8937 - DNA, 18 bp, Artificial Sequence
  Description of Artificial Sequence: Synthetic oligonucleotide
cccagagcagctggcctt

SEQ ID NO: 8938 - DNA, 18 bp, Artificial Sequence
  Description of Artificial Sequence: Synthetic oligonucleotide
tcaggcccagagcagctg

SEQ ID NO: 8939 - DNA, 18 bp, Artificial Sequence
  Description of Artificial Sequence: Synthetic oligonucleotide
ggtcttcaggcccagagc

SEQ ID NO: 8940 - DNA, 18 bp, Artificial Sequence
  Description of Artificial Sequence: Synthetic oligonucleotide
gctggggtcttcaggccc

SEQ ID NO: 8941 - DNA, 18 bp, Artificial Sequence
  Description of Artificial Sequence: Synthetic oligonucleotide
gacgcgctggggtcttca

SEQ ID NO: 8942 - DNA, 18 bp, Artificial Sequence
  Description of Artificial Sequence: Synthetic oligonucleotide
tcaaggacgcgctggggt

SEQ ID NO: 8943 - DNA, 18 bp, Artificial Sequence
  Description of Artificial Sequence: Synthetic oligonucleotide
aacagtcaaggacgcgct

SEQ ID NO: 8944 - DNA, 18 bp, Artificial Sequence
  Description of Artificial Sequence: Synthetic oligonucleotide
aaaggaacagtcaaggac

SEQ ID NO: 8945 - DNA, 18 bp, Artificial Sequence
  Description of Artificial Sequence: Synthetic oligonucleotide
tccgcaaaggaacagtca

SEQ ID NO: 8946 - DNA, 18 bp, Artificial Sequence
  Description of Artificial Sequence: Synthetic oligonucleotide
cttactccgcaaaggaac

SEQ ID NO: 8947 - DNA, 18 bp, Artificial Sequence
  Description of Artificial Sequence: Synthetic oligonucleotide
aggggcttactccgcaaa

SEQ ID NO: 8948 - DNA, 18 bp, Artificial Sequence
  Description of Artificial Sequence: Synthetic oligonucleotide
tgcgcaggggcttactcc

SEQ ID NO: 8949 - DNA, 18 bp, Artificial Sequence
  Description of Artificial Sequence: Synthetic oligonucleotide
tcagctgcgcaggggctt

SEQ ID NO: 8950 - DNA, 18 bp, Artificial Sequence
  Description of Artificial Sequence: Synthetic oligonucleotide
tctcatcagctgcgcagg

SEQ ID NO: 8951 - DNA, 18 bp, Artificial Sequence
  Description of Artificial Sequence: Synthetic oligonucleotide
tgcagtctcatcagctgc

SEQ ID NO: 8952 - DNA, 18 bp, Artificial Sequence
  Description of Artificial Sequence: Synthetic oligonucleotide
tcaggtgcagtctcatca

SEQ ID NO: 8953 - DNA, 18 bp, Artificial Sequence
  Description of Artificial Sequence: Synthetic oligonucleotide
cttcctcaggtgcagtct

SEQ ID NO: 8954 - DNA, 18 bp, Artificial Sequence
  Description of Artificial Sequence: Synthetic oligonucleotide
gaggccttcctcaggtgc

SEQ ID NO: 8955 - DNA, 18 bp, Artificial Sequence
  Description of Artificial Sequence: Synthetic oligonucleotide
aaccagaggccttcctca

SEQ ID NO: 8956 - DNA, 18 bp, Artificial Sequence
  Description of Artificial Sequence: Synthetic oligonucleotide
ctcgtaaccagaggcctt

SEQ ID NO: 8957 - DNA, 18 bp, Artificial Sequence
  Description of Artificial Sequence: Synthetic oligonucleotide
gcatcctcgtaaccagag

SEQ ID NO: 8958 - DNA, 18 bp, Artificial Sequence
  Description of Artificial Sequence: Synthetic oligonucleotide
cctgggcatcctcgtaac

SEQ ID NO: 8959 - DNA, 18 bp, Artificial Sequence
  Description of Artificial Sequence: Synthetic oligonucleotide
agacacctgggcatcctc

SEQ ID NO: 8960 - DNA, 18 bp, Artificial Sequence
  Description of Artificial Sequence: Synthetic oligonucleotide
catgcagacacctgggca

SEQ ID NO: 8961 - DNA, 18 bp, Artificial Sequence
  Description of Artificial Sequence: Synthetic oligonucleotide
aggcacatgcagacacct

SEQ ID NO: 8962 - DNA, 18 bp, Artificial Sequence
  Description of Artificial Sequence: Synthetic oligonucleotide
gtacaaggcacatgcaga

SEQ ID NO: 8963 - DNA, 18 bp, Artificial Sequence
  Description of Artificial Sequence: Synthetic oligonucleotide
gggaggtacaaggcacat

SEQ ID NO: 8964 - DNA, 18 bp, Artificial Sequence
  Description of Artificial Sequence: Synthetic oligonucleotide
accacgggaggtacaagg

SEQ ID NO: 8965 - DNA, 18 bp, Artificial Sequence
  Description of Artificial Sequence: Synthetic oligonucleotide
ggctgaccacgggaggta

SEQ ID NO: 8966 - DNA, 18 bp, Artificial Sequence
  Description of Artificial Sequence: Synthetic oligonucleotide
ggctgggctgaccacggg

SEQ ID NO: 8967 - DNA, 18 bp, Artificial Sequence
  Description of Artificial Sequence: Synthetic oligonucleotide
gggaaggctgggctgacc

SEQ ID NO: 8968 - DNA, 18 bp, Artificial Sequence
  Description of Artificial Sequence: Synthetic oligonucleotide
agcctgggaaggctgggc

SEQ ID NO: 8969 - DNA, 18 bp, Artificial Sequence
  Description of Artificial Sequence: Synthetic oligonucleotide
ccccaagcctgggaaggc

SEQ ID NO: 8970 - DNA, 18 bp, Artificial Sequence
  Description of Artificial Sequence: Synthetic oligonucleotide
ctacgccccaagcctggg

SEQ ID NO: 8971 - DNA, 18 bp, Artificial Sequence
  Description of Artificial Sequence: Synthetic oligonucleotide
atgggctacgccccaagc

SEQ ID NO: 8972 - DNA, 18 bp, Artificial Sequence
  Description of Artificial Sequence: Synthetic oligonucleotide
ccctgatgggctacgccc

SEQ ID NO: 8973 - DNA, 18 bp, Artificial Sequence
  Description of Artificial Sequence: Synthetic oligonucleotide
cacagccctgatgggcta

SEQ ID NO: 8974 - DNA, 18 bp, Artificial Sequence
  Description of Artificial Sequence: Synthetic oligonucleotide
agacccacagccctgatg

SEQ ID NO: 8975 - DNA, 18 bp, Artificial Sequence
  Description of Artificial Sequence: Synthetic oligonucleotide
taagaagacccacagccc

SEQ ID NO: 8976 - DNA, 18 bp, Artificial Sequence
  Description of Artificial Sequence: Synthetic oligonucleotide
ggagttaagaagacccac

SEQ ID NO: 8977 - DNA, 18 bp, Artificial Sequence
  Description of Artificial Sequence: Synthetic oligonucleotide
ggaggggagttaagaaga

SEQ ID NO: 8978 - DNA, 18 bp, Artificial Sequence
  Description of Artificial Sequence: Synthetic oligonucleotide
cctggggaggggagttaa

SEQ ID NO: 8979 - DNA, 18 bp, Artificial Sequence
  Description of Artificial Sequence: Synthetic oligonucleotide
tgattcctggggagggga

SEQ ID NO: 8980 - DNA, 18 bp, Artificial Sequence
  Description of Artificial Sequence: Synthetic oligonucleotide
gcgcctgattcctgggga

SEQ ID NO: 8981 - DNA, 18 bp, Artificial Sequence
  Description of Artificial Sequence: Synthetic oligonucleotide
acccagcgcctgattcct

SEQ ID NO: 8982 - DNA, 18 bp, Artificial Sequence
  Description of Artificial Sequence: Synthetic oligonucleotide
ccaaagggccggggcgcc

SEQ ID NO: 8983 - DNA, 18 bp, Artificial Sequence
  Description of Artificial Sequence: Synthetic oligonucleotide
ggcttccaaagggccggg

SEQ ID NO: 8984 - DNA, 18 bp, Artificial Sequence
  Description of Artificial Sequence: Synthetic oligonucleotide
ccgccggcttccaaaggg

SEQ ID NO: 8985 - DNA, 18 bp, Artificial Sequence
  Description of Artificial Sequence: Synthetic oligonucleotide
ctctcccgccggcttcca

SEQ ID NO: 8986 - DNA, 18 bp, Artificial Sequence
  Description of Artificial Sequence: Synthetic oligonucleotide
tcgtcctctcccgccggc

SEQ ID NO: 8987 - DNA, 18 bp, Artificial Sequence
  Description of Artificial Sequence: Synthetic oligonucleotide
cagcatcgtcctctcccg

SEQ ID NO: 8988 - DNA, 18 bp, Artificial Sequence
  Description of Artificial Sequence: Synthetic oligonucleotide
ggagccagcatcgtcctc

SEQ ID NO: 8989 - DNA, 18 bp, Artificial Sequence
  Description of Artificial Sequence: Synthetic oligonucleotide
gcctgggagccagcatcg

SEQ ID NO: 8990 - DNA, 18 bp, Artificial Sequence
  Description of Artificial Sequence: Synthetic oligonucleotide
tgtccgcctgggagccag

SEQ ID NO: 8991 - DNA, 18 bp, Artificial Sequence
  Description of Artificial Sequence: Synthetic oligonucleotide
cggcttgtccgcctggga

SEQ ID NO: 8992 - DNA, 18 bp, Artificial Sequence
  Description of Artificial Sequence: Synthetic oligonucleotide
acacgcggcttgtccgcc

SEQ ID NO: 8993 - DNA, 18 bp, Artificial Sequence
  Description of Artificial Sequence: Synthetic oligonucleotide
gtctcacacgcggcttgt

SEQ ID NO: 8994 - DNA, 18 bp, Artificial Sequence
  Description of Artificial Sequence: Synthetic oligonucleotide
ccagcgtctcacacgcgg

SEQ ID NO: 8995 - DNA, 18 bp, Artificial Sequence
  Description of Artificial Sequence: Synthetic oligonucleotide
ggcggccagcgtctcaca

SEQ ID NO: 8996 - DNA, 18 bp, Artificial Sequence
  Description of Artificial Sequence: Synthetic oligonucleotide
cccctggcggccagcgtc

SEQ ID NO: 8997 - DNA, 18 bp, Artificial Sequence
  Description of Artificial Sequence: Synthetic oligonucleotide
gacctcccctggcggcca

SEQ ID NO: 8998 - DNA, 18 bp, Artificial Sequence
  Description of Artificial Sequence: Synthetic oligonucleotide
ccaccgacctcccctggc

SEQ ID NO: 8999 - DNA, 18 bp, Artificial Sequence
  Description of Artificial Sequence: Synthetic oligonucleotide
cgtctccaccgacctccc

SEQ ID NO: 9000 - DNA, 18 bp, Artificial Sequence
  Description of Artificial Sequence: Synthetic oligonucleotide
gtccccgtctccaccgac

SEQ ID NO: 9001 - DNA, 18 bp, Artificial Sequence
  Description of Artificial Sequence: Synthetic oligonucleotide
gaccggtccccgtctcca

SEQ ID NO: 9002 - DNA, 18 bp, Artificial Sequence
  Description of Artificial Sequence: Synthetic oligonucleotide
tagccgaccggtccccgt

SEQ ID NO: 9003 - DNA, 18 bp, Artificial Sequence
  Description of Artificial Sequence: Synthetic oligonucleotide
agaggtagccgaccggtc

SEQ ID NO: 9004 - DNA, 18 bp, Artificial Sequence
  Description of Artificial Sequence: Synthetic oligonucleotide
tccccagaggtagccgac

SEQ ID NO: 9005 - DNA, 18 bp, Artificial Sequence
  Description of Artificial Sequence: Synthetic oligonucleotide
gtctgtccccagaggtag

SEQ ID NO: 9006 - DNA, 18 bp, Artificial Sequence
  Description of Artificial Sequence: Synthetic oligonucleotide
atcctgtctgtccccaga

SEQ ID NO: 9007 - DNA, 18 bp, Artificial Sequence
  Description of Artificial Sequence: Synthetic oligonucleotide
gctgaatcctgtctgtcc

SEQ ID NO: 9008 - DNA, 18 bp, Artificial Sequence
  Description of Artificial Sequence: Synthetic oligonucleotide
ggtgcgctgaatcctgtc

SEQ ID NO: 9009 - DNA, 18 bp, Artificial Sequence
  Description of Artificial Sequence: Synthetic oligonucleotide
ccaagggtgcgctgaatc

SEQ ID NO: 9010 - DNA, 18 bp, Artificial Sequence
  Description of Artificial Sequence: Synthetic oligonucleotide
cacttccaagggtgcgct

SEQ ID NO: 9011 - DNA, 18 bp, Artificial Sequence
  Description of Artificial Sequence: Synthetic oligonucleotide
cgcggcacttccaagggt

SEQ ID NO: 9012 - DNA, 18 bp, Artificial Sequence
  Description of Artificial Sequence: Synthetic oligonucleotide
tacgacgcggcacttcca

SEQ ID NO: 9013 - DNA, 18 bp, Artificial Sequence
  Description of Artificial Sequence: Synthetic oligonucleotide
gcatttacgacgcggcac

SEQ ID NO: 9014 - DNA, 18 bp, Artificial Sequence
  Description of Artificial Sequence: Synthetic oligonucleotide
tcccagcatttacgacgc

SEQ ID NO: 9015 - DNA, 18 bp, Artificial Sequence
  Description of Artificial Sequence: Synthetic oligonucleotide
gcttttcccagcatttac

SEQ ID NO: 9016 - DNA, 18 bp, Artificial Sequence
  Description of Artificial Sequence: Synthetic oligonucleotide
gaaaggcttttcccagca

SEQ ID NO: 9017 - DNA, 18 bp, Artificial Sequence
  Description of Artificial Sequence: Synthetic oligonucleotide
ataacgaaaggcttttcc

SEQ ID NO: 9018 - DNA, 18 bp, Artificial Sequence
  Description of Artificial Sequence: Synthetic oligonucleotide
ggcagataacgaaaggct

SEQ ID NO: 9019 - DNA, 18 bp, Artificial Sequence
  Description of Artificial Sequence: Synthetic oligonucleotide
gctcaggcagataacgaa

SEQ ID NO: 9020 - DNA, 18 bp, Artificial Sequence
  Description of Artificial Sequence: Synthetic oligonucleotide
cacgggctcaggcagata

SEQ ID NO: 9021 - DNA, 18 bp, Artificial Sequence
  Description of Artificial Sequence: Synthetic oligonucleotide
taactcacgggctcaggc

SEQ ID NO: 9022 - DNA, 18 bp, Artificial Sequence
  Description of Artificial Sequence: Synthetic oligonucleotide
tgcattaactcacgggct

SEQ ID NO: 9023 - DNA, 18 bp, Artificial Sequence
  Description of Artificial Sequence: Synthetic oligonucleotide
atctgtgcattaactcac

SEQ ID NO: 9024 - DNA, 18 bp, Artificial Sequence
  Description of Artificial Sequence: Synthetic oligonucleotide
aaagtatctgtgcattaa

SEQ ID NO: 9025 - DNA, 18 bp, Artificial Sequence
  Description of Artificial Sequence: Synthetic oligonucleotide
aaaccaaagtatctgtgc

SEQ ID NO: 9026 - DNA, 18 bp, Artificial Sequence
  Description of Artificial Sequence: Synthetic oligonucleotide
acccgaaaccaaagtatc

SEQ ID NO: 9027 - DNA, 18 bp, Artificial Sequence
  Description of Artificial Sequence: Synthetic oligonucleotide
ttcacacccgaaaccaaa

SEQ ID NO: 9028 - DNA, 18 bp, Artificial Sequence
  Description of Artificial Sequence: Synthetic oligonucleotide
ttttgttcacacccgaaa

SEQ ID NO: 9029 - DNA, 18 bp, Artificial Sequence
  Description of Artificial Sequence: Synthetic oligonucleotide
aaagtttttgttcacacc

SEQ ID NO: 9030 - DNA, 18 bp, Artificial Sequence
  Description of Artificial Sequence: Synthetic oligonucleotide
cgaagaaagtttttgttc

SEQ ID NO: 9031 - DNA, 18 bp, Artificial Sequence
  Description of Artificial Sequence: Synthetic oligonucleotide
ggcttcgaagaaagtttt

SEQ ID NO: 9032 - DNA, 18 bp, Artificial Sequence
  Description of Artificial Sequence: Synthetic oligonucleotide
aactcggcttcgaagaaa

SEQ ID NO: 9033 - DNA, 18 bp, Artificial Sequence
  Description of Artificial Sequence: Synthetic oligonucleotide
tttacaactcggcttcga

SEQ ID NO: 9034 - DNA, 18 bp, Artificial Sequence
  Description of Artificial Sequence: Synthetic oligonucleotide
aggcgtttacaactcggc

SEQ ID NO: 9035 - DNA, 18 bp, Artificial Sequence
  Description of Artificial Sequence: Synthetic oligonucleotide
gcgccaggcgtttacaac

SEQ ID NO: 9036 - DNA, 18 bp, Artificial Sequence
  Description of Artificial Sequence: Synthetic oligonucleotide
ggcgtgcgccaggcgttt

SEQ ID NO: 9037 - DNA, 18 bp, Artificial Sequence
  Description of Artificial Sequence: Synthetic oligonucleotide
gagcaggcgtgcgccagg

SEQ ID NO: 9038 - DNA, 18 bp, Artificial Sequence
  Description of Artificial Sequence: Synthetic oligonucleotide
ctcctgagcaggcgtgcg

SEQ ID NO: 9039 - DNA, 18 bp, Artificial Sequence
  Description of Artificial Sequence: Synthetic oligonucleotide
tttgactcctgagcaggc

SEQ ID NO: 9040 - DNA, 18 bp, Artificial Sequence
  Description of Artificial Sequence: Synthetic oligonucleotide
gggtctttgactcctgag

SEQ ID NO: 9041 - DNA, 18 bp, Artificial Sequence
  Description of Artificial Sequence: Synthetic oligonucleotide
gtgctgggtctttgactc

SEQ ID NO: 9042 - DNA, 18 bp, Artificial Sequence
  Description of Artificial Sequence: Synthetic oligonucleotide
acgcggtgctgggtcttt

SEQ ID NO: 9043 - DNA, 18 bp, Artificial Sequence
  Description of Artificial Sequence: Synthetic oligonucleotide
ccagacaaacgctttcaa

SEQ ID NO: 9044 - DNA, 18 bp, Artificial Sequence
  Description of Artificial Sequence: Synthetic oligonucleotide
taactccagacaaacgct

SEQ ID NO: 9045 - DNA, 18 bp, Artificial Sequence
  Description of Artificial Sequence: Synthetic oligonucleotide
ctttctaactccagacaa

SEQ ID NO: 9046 - DNA, 18 bp, Artificial Sequence
  Description of Artificial Sequence: Synthetic oligonucleotide
gagaactttctaactcca

SEQ ID NO: 9047 - DNA, 18 bp, Artificial Sequence
  Description of Artificial Sequence: Synthetic oligonucleotide
aagaagagaactttctaa

SEQ ID NO: 9048 - DNA, 18 bp, Artificial Sequence
  Description of Artificial Sequence: Synthetic oligonucleotide
tgttgaagaagagaactt

SEQ ID NO: 9049 - DNA, 18 bp, Artificial Sequence
  Description of Artificial Sequence: Synthetic oligonucleotide
ggacgtgttgaagaagag

SEQ ID NO: 9050 - DNA, 18 bp, Artificial Sequence
  Description of Artificial Sequence: Synthetic oligonucleotide
gggagggacgtgttgaag

SEQ ID NO: 9051 - DNA, 18 bp, Artificial Sequence
  Description of Artificial Sequence: Synthetic oligonucleotide
ccctggggagggacgtgt

SEQ ID NO: 9052 - DNA, 18 bp, Artificial Sequence
  Description of Artificial Sequence: Synthetic oligonucleotide
gaacaccctggggaggga

SEQ ID NO: 9053 - DNA, 18 bp, Artificial Sequence
  Description of Artificial Sequence: Synthetic oligonucleotide
gggaggaacaccctgggg

SEQ ID NO: 9054 - DNA, 18 bp, Artificial Sequence
  Description of Artificial Sequence: Synthetic oligonucleotide
tcacagggaggaacaccc

SEQ ID NO: 9055 - DNA, 18 bp, Artificial Sequence
  Description of Artificial Sequence: Synthetic oligonucleotide
ctgggtcacagggaggaa

SEQ ID NO: 9056 - DNA, 18 bp, Artificial Sequence
  Description of Artificial Sequence: Synthetic oligonucleotide
ggcggctgggtcacaggg

SEQ ID NO: 9057 - DNA, 18 bp, Artificial Sequence
  Description of Artificial Sequence: Synthetic oligonucleotide
gtcgaggcggctgggtca

SEQ ID NO: 9058 - DNA, 18 bp, Artificial Sequence
  Description of Artificial Sequence: Synthetic oligonucleotide
ccgaagtcgaggcggctg

SEQ ID NO: 9059 - DNA, 18 bp, Artificial Sequence
  Description of Artificial Sequence: Synthetic oligonucleotide
gcgggccgaagtcgaggc

SEQ ID NO: 9060 - DNA, 18 bp, Artificial Sequence
  Description of Artificial Sequence: Synthetic oligonucleotide
agcaagcgggccgaagtc

SEQ ID NO: 9061 - DNA, 18 bp, Artificial Sequence
  Description of Artificial Sequence: Synthetic oligonucleotide
tcgtgagcaagcgggccg

SEQ ID NO: 9062 - DNA, 18 bp, Artificial Sequence
  Description of Artificial Sequence: Synthetic oligonucleotide
tttattcgtgagcaagcg

SEQ ID NO: 9063 - DNA, 18 bp, Artificial Sequence
  Description of Artificial Sequence: Synthetic oligonucleotide
agttctttattcgtgagc

SEQ ID NO: 9064 - DNA, 18 bp, Artificial Sequence
  Description of Artificial Sequence: Synthetic oligonucleotide
ctctgagttctttattcg

SEQ ID NO: 9065 - DNA, 18 bp, Artificial Sequence
  Description of Artificial Sequence: Synthetic oligonucleotide
cacaactctgagttcttt

SEQ ID NO: 9066 - DNA, 18 bp, Artificial Sequence
  Description of Artificial Sequence: Synthetic oligonucleotide
gcacacacaactctgagt

SEQ ID NO: 9067 - DNA, 18 bp, Artificial Sequence
  Description of Artificial Sequence: Synthetic oligonucleotide
gcattgcacacacaactc

SEQ ID NO: 9068 - DNA, 18 bp, Artificial Sequence
  Description of Artificial Sequence: Synthetic oligonucleotide
ggtgtgcattgcacacac

SEQ ID NO: 9069 - DNA, 18 bp, Artificial Sequence
  Description of Artificial Sequence: Synthetic oligonucleotide
gtctgggtgtgcattgca

SEQ ID NO: 9070 - DNA, 18 bp, Artificial Sequence
  Description of Artificial Sequence: Synthetic oligonucleotide
cgtgtgtctgggtgtgca

SEQ ID NO: 9071 - DNA, 18 bp, Artificial Sequence
  Description of Artificial Sequence: Synthetic oligonucleotide
gcgtgcgtgtgtctgggt

SEQ ID NO: 9072 - DNA, 18 bp, Artificial Sequence
  Description of Artificial Sequence: Synthetic oligonucleotide
tgtgtgcgtgcgtgtgtc

SEQ ID NO: 9073 - DNA, 18 bp, Artificial Sequence
  Description of Artificial Sequence: Synthetic oligonucleotide
gcgtgtgtgtgcgtgcgt

SEQ ID NO: 9074 - DNA, 18 bp, Artificial Sequence
  Description of Artificial Sequence: Synthetic oligonucleotide
cgcgcgcgtgtgtgtgcg

SEQ ID NO: 9075 - DNA, 18 bp, Artificial Sequence
  Description of Artificial Sequence: Synthetic oligonucleotide
gtgtgcgcgcgcgtgtgt

SEQ ID NO: 9076 - DNA, 18 bp, Artificial Sequence
  Description of Artificial Sequence: Synthetic oligonucleotide
catgtgtgtgcgcgcgcg

SEQ ID NO: 9077 - DNA, 18 bp, Artificial Sequence
  Description of Artificial Sequence: Synthetic oligonucleotide
aaaagcatgtgtgtgcgc

SEQ ID NO: 9078 - DNA, 18 bp, Artificial Sequence
  Description of Artificial Sequence: Synthetic oligonucleotide
cagaaaaaagcatgtgtg

SEQ ID NO: 9079 - DNA, 18 bp, Artificial Sequence
  Description of Artificial Sequence: Synthetic oligonucleotide
gggaacagaaaaaagcat

SEQ ID NO: 9080 - DNA, 18 bp, Artificial Sequence
  Description of Artificial Sequence: Synthetic oligonucleotide
cggaggggaacagaaaaa

SEQ ID NO: 9081 - DNA, 18 bp, Artificial Sequence
  Description of Artificial Sequence: Synthetic oligonucleotide
gaaagcggaggggaacag

SEQ ID NO: 9082 - DNA, 18 bp, Artificial Sequence
  Description of Artificial Sequence: Synthetic oligonucleotide
cttcagaaagcggagggg

SEQ ID NO: 9083 - DNA, 18 bp, Artificial Sequence
  Description of Artificial Sequence: Synthetic oligonucleotide
ccaggcttcagaaagcgg

SEQ ID NO: 9084 - DNA, 18 bp, Artificial Sequence
  Description of Artificial Sequence: Synthetic oligonucleotide
tctccccaggcttcagaa

SEQ ID NO: 9085 - DNA, 18 bp, Artificial Sequence
  Description of Artificial Sequence: Synthetic oligonucleotide
tgatttctccccaggctt

SEQ ID NO: 9086 - DNA, 18 bp, Artificial Sequence
  Description of Artificial Sequence: Synthetic oligonucleotide
gtcactgatttctcccca

SEQ ID NO: 9087 - DNA, 18 bp, Artificial Sequence
  Description of Artificial Sequence: Synthetic oligonucleotide
cctctgtcactgatttct

SEQ ID NO: 9088 - DNA, 18 bp, Artificial Sequence
  Description of Artificial Sequence: Synthetic oligonucleotide
aaacacctctgtcactga

SEQ ID NO: 9089 - DNA, 18 bp, Artificial Sequence
  Description of Artificial Sequence: Synthetic oligonucleotide
aaccaaaacacctctgtc

SEQ ID NO: 9090 - DNA, 18 bp, Artificial Sequence
  Description of Artificial Sequence: Synthetic oligonucleotide
aataaaaccaaaacacct

SEQ ID NO: 9091 - DNA, 18 bp, Artificial Sequence
  Description of Artificial Sequence: Synthetic oligonucleotide
ataacaataaaaccaaaa

SEQ ID NO: 9092 - DNA, 18 bp, Artificial Sequence
  Description of Artificial Sequence: Synthetic oligonucleotide
cccacataacaataaaac

SEQ ID NO: 9093 - DNA, 18 bp, Artificial Sequence
  Description of Artificial Sequence: Synthetic oligonucleotide
gaaaacccacataacaat

SEQ ID NO: 9094 - DNA, 18 bp, Artificial Sequence
  Description of Artificial Sequence: Synthetic oligonucleotide
caaaagaaaacccacata

SEQ ID NO: 9095 - DNA, 18 bp, Artificial Sequence
  Description of Artificial Sequence: Synthetic oligonucleotide
aaatacaaaagaaaaccc

SEQ ID NO: 9096 - DNA, 18 bp, Artificial Sequence
  Description of Artificial Sequence: Synthetic oligonucleotide
aaaaaaaatacaaaagaa

SEQ ID NO: 9097 - DNA, 18 bp, Artificial Sequence
  Description of Artificial Sequence: Synthetic oligonucleotide
aaacaaaaaaaaatacaa

SEQ ID NO: 9098 - DNA, 18 bp, Artificial Sequence
  Description of Artificial Sequence: Synthetic oligonucleotide
aaaacaaacaaaaaaaaa

SEQ ID NO: 9099 - DNA, 18 bp, Artificial Sequence
  Description of Artificial Sequence: Synthetic oligonucleotide
aaaacaaaacaaacaaaa

SEQ ID NO: 9100 - DNA, 18 bp, Artificial Sequence
  Description of Artificial Sequence: Synthetic oligonucleotide
gtttaaaaacaaaacaaa

SEQ ID NO: 9101 - DNA, 18 bp, Artificial Sequence
  Description of Artificial Sequence: Synthetic oligonucleotide
tgaatgtttaaaaacaaa

SEQ ID NO: 9102 - DNA, 18 bp, Artificial Sequence
  Description of Artificial Sequence: Synthetic oligonucleotide
gcttttgaatgtttaaaa

SEQ ID NO: 9103 - DNA, 18 bp, Artificial Sequence
  Description of Artificial Sequence: Synthetic oligonucleotide
taattgcttttgaatgtt

SEQ ID NO: 9104 - DNA, 18 bp, Artificial Sequence
  Description of Artificial Sequence: Synthetic oligonucleotide
atcattaattgcttttga

SEQ ID NO: 9105 - DNA, 18 bp, Artificial Sequence
  Description of Artificial Sequence: Synthetic oligonucleotide
gtctgatcattaattgct

SEQ ID NO: 9106 - DNA, 18 bp, Artificial Sequence
  Description of Artificial Sequence: Synthetic oligonucleotide
cctatgtctgatcattaa

SEQ ID NO: 9107 - DNA, 18 bp, Artificial Sequence
  Description of Artificial Sequence: Synthetic oligonucleotide
tttctcctatgtctgatc

SEQ ID NO: 9108 - DNA, 18 bp, Artificial Sequence
  Description of Artificial Sequence: Synthetic oligonucleotide
cagggtttctcctatgtc

SEQ ID NO: 9109 - DNA, 18 bp, Artificial Sequence
  Description of Artificial Sequence: Synthetic oligonucleotide
ctattcagggtttctcct

SEQ ID NO: 9110 - DNA, 18 bp, Artificial Sequence
  Description of Artificial Sequence: Synthetic oligonucleotide
tgtttctattcagggttt

SEQ ID NO: 9111 - DNA, 18 bp, Artificial Sequence
  Description of Artificial Sequence: Synthetic oligonucleotide
agttttgtttctattcag

SEQ ID NO: 9112 - DNA, 18 bp, Artificial Sequence
  Description of Artificial Sequence: Synthetic oligonucleotide
tcaaaagttttgtttcta

SEQ ID NO: 9113 - DNA, 18 bp, Artificial Sequence
  Description of Artificial Sequence: Synthetic oligonucleotide
agcattcaaaagttttgt

SEQ ID NO: 9114 - DNA, 18 bp, Artificial Sequence
  Description of Artificial Sequence: Synthetic oligonucleotide
aatccagcattcaaaagt

SEQ ID NO: 9115 - DNA, 18 bp, Artificial Sequence
  Description of Artificial Sequence: Synthetic oligonucleotide
ttttgaatccagcattca

SEQ ID NO: 9116 - DNA, 18 bp, Artificial Sequence
  Description of Artificial Sequence: Synthetic oligonucleotide
tttttttttgaatccagc

SEQ ID NO: 9117 - DNA, 18 bp, Artificial Sequence
  Description of Artificial Sequence: Synthetic oligonucleotide
ttttttttttttttgaat

SEQ ID NO: 9118 - DNA, 18 bp, Artificial Sequence
  Description of Artificial Sequence: Synthetic oligonucleotide
ataacttttttttttttt

SEQ ID NO: 9119 - DNA, 18 bp, Artificial Sequence
  Description of Artificial Sequence: Synthetic oligonucleotide
tccagataactttttttt

SEQ ID NO: 9120 - DNA, 18 bp, Artificial Sequence
  Description of Artificial Sequence: Synthetic oligonucleotide
agctgtccagataacttt

SEQ ID NO: 9121 - DNA, 18 bp, Artificial Sequence
  Description of Artificial Sequence: Synthetic oligonucleotide
aaagaagctgtccagata

SEQ ID NO: 9122 - DNA, 18 bp, Artificial Sequence
  Description of Artificial Sequence: Synthetic oligonucleotide
gtctcaaagaagctgtcc

SEQ ID NO: 9123 - DNA, 18 bp, Artificial Sequence
  Description of Artificial Sequence: Synthetic oligonucleotide
aaatagtctcaaagaagc

SEQ ID NO: 9124 - DNA, 18 bp, Artificial Sequence
  Description of Artificial Sequence: Synthetic oligonucleotide
tttttaaatagtctcaaa

SEQ ID NO: 9125 - DNA, 18 bp, Artificial Sequence
  Description of Artificial Sequence: Synthetic oligonucleotide
accagtttttaaatagtc

SEQ ID NO: 9126 - DNA, 18 bp, Artificial Sequence
  Description of Artificial Sequence: Synthetic oligonucleotide
gttgtaccagtttttaaa

SEQ ID NO: 9127 - DNA, 18 bp, Artificial Sequence
  Description of Artificial Sequence: Synthetic oligonucleotide
gacctgttgtaccagttt

SEQ ID NO: 9128 - DNA, 18 bp, Artificial Sequence
  Description of Artificial Sequence: Synthetic oligonucleotide
gtagagacctgttgtacc

SEQ ID NO: 9129 - DNA, 18 bp, Artificial Sequence
  Description of Artificial Sequence: Synthetic oligonucleotide
gcgttgtagagacctgtt

SEQ ID NO: 9130 - DNA, 18 bp, Artificial Sequence
  Description of Artificial Sequence: Synthetic oligonucleotide
tcttggcgttgtagagac

SEQ ID NO: 9131 - DNA, 18 bp, Artificial Sequence
  Description of Artificial Sequence: Synthetic oligonucleotide
ttagatcttggcgttgta

SEQ ID NO: 9132 - DNA, 18 bp, Artificial Sequence
  Description of Artificial Sequence: Synthetic oligonucleotide
cttagttagatcttggcg

SEQ ID NO: 9133 - DNA, 18 bp, Artificial Sequence
  Description of Artificial Sequence: Synthetic oligonucleotide
taaagcttagttagatct

SEQ ID NO: 9134 - DNA, 18 bp, Artificial Sequence
  Description of Artificial Sequence: Synthetic oligonucleotide
ccttttaaagcttagtta

SEQ ID NO: 9135 - DNA, 18 bp, Artificial Sequence
  Description of Artificial Sequence: Synthetic oligonucleotide
cttgaccttttaaagctt

SEQ ID NO: 9136 - DNA, 18 bp, Artificial Sequence
  Description of Artificial Sequence: Synthetic oligonucleotide
aacttcttgaccttttaa

SEQ ID NO: 9137 - DNA, 18 bp, Artificial Sequence
  Description of Artificial Sequence: Synthetic oligonucleotide
cataaaacttcttgacct

SEQ ID NO: 9138 - DNA, 18 bp, Artificial Sequence
  Description of Artificial Sequence: Synthetic oligonucleotide
tcagccataaaacttctt

SEQ ID NO: 9139 - DNA, 18 bp, Artificial Sequence
  Description of Artificial Sequence: Synthetic oligonucleotide
ctttgtcagccataaaac

SEQ ID NO: 9140 - DNA, 18 bp, Artificial Sequence
  Description of Artificial Sequence: Synthetic oligonucleotide
gagtcctttgtcagccat

SEQ ID NO: 9141 - DNA, 18 bp, Artificial Sequence
  Description of Artificial Sequence: Synthetic oligonucleotide
tgcgcgagtcctttgtca

SEQ ID NO: 9142 - DNA, 18 bp, Artificial Sequence
  Description of Artificial Sequence: Synthetic oligonucleotide
tgcgttgcgcgagtcctt

SEQ ID NO: 9143 - DNA, 18 bp, Artificial Sequence
  Description of Artificial Sequence: Synthetic oligonucleotide
ccttctgcgttgcgcgag

SEQ ID NO: 9144 - DNA, 18 bp, Artificial Sequence
  Description of Artificial Sequence: Synthetic oligonucleotide
aaaggccttctgcgttgc

SEQ ID NO: 9145 - DNA, 18 bp, Artificial Sequence
  Description of Artificial Sequence: Synthetic oligonucleotide
gtgggaaaggccttctgc

SEQ ID NO: 9146 - DNA, 18 bp, Artificial Sequence
  Description of Artificial Sequence: Synthetic oligonucleotide
ttaaggtgggaaaggcct

SEQ ID NO: 9147 - DNA, 18 bp, Artificial Sequence
  Description of Artificial Sequence: Synthetic oligonucleotide
gaagcttaaggtgggaaa

SEQ ID NO: 9148 - DNA, 18 bp, Artificial Sequence
  Description of Artificial Sequence: Synthetic oligonucleotide
ccccggaagcttaaggtg

SEQ ID NO: 9149 - DNA, 18 bp, Artificial Sequence
  Description of Artificial Sequence: Synthetic oligonucleotide
cagatccccggaagctta

SEQ ID NO: 9150 - DNA, 18 bp, Artificial Sequence
  Description of Artificial Sequence: Synthetic oligonucleotide
attcccagatccccggaa

SEQ ID NO: 9151 - DNA, 18 bp, Artificial Sequence
  Description of Artificial Sequence: Synthetic oligonucleotide
gtaaaattcccagatccc

SEQ ID NO: 9152 - DNA, 18 bp, Artificial Sequence
  Description of Artificial Sequence: Synthetic oligonucleotide
tgggggtaaaattcccag

SEQ ID NO: 9153 - DNA, 18 bp, Artificial Sequence
  Description of Artificial Sequence: Synthetic oligonucleotide
gagaatgggggtaaaatt

SEQ ID NO: 9154 - DNA, 18 bp, Artificial Sequence
  Description of Artificial Sequence: Synthetic oligonucleotide
cagaagagaatgggggta

SEQ ID NO: 9155 - DNA, 18 bp, Artificial Sequence
  Description of Artificial Sequence: Synthetic oligonucleotide
acaaacagaagagaatgg

SEQ ID NO: 9156 - DNA, 18 bp, Artificial Sequence
  Description of Artificial Sequence: Synthetic oligonucleotide
ctcagacaaacagaagag

SEQ ID NO: 9157 - DNA, 18 bp, Artificial Sequence
  Description of Artificial Sequence: Synthetic oligonucleotide
tgagactcagacaaacag

SEQ ID NO: 9158 - DNA, 18 bp, Artificial Sequence
  Description of Artificial Sequence: Synthetic oligonucleotide
ccccgagaaaccctgcct

SEQ ID NO: 9159 - DNA, 18 bp, Artificial Sequence
  Description of Artificial Sequence: Synthetic oligonucleotide
ccccgccccgagaaaccc

SEQ ID NO: 9160 - DNA, 18 bp, Artificial Sequence
  Description of Artificial Sequence: Synthetic oligonucleotide
gccagccccgccccgaga

SEQ ID NO: 9161 - DNA, 18 bp, Artificial Sequence
  Description of Artificial Sequence: Synthetic oligonucleotide
cccgcgccagccccgccc

SEQ ID NO: 9162 - DNA, 18 bp, Artificial Sequence
  Description of Artificial Sequence: Synthetic oligonucleotide
gtggccccgcgccagccc

SEQ ID NO: 9163 - DNA, 18 bp, Artificial Sequence
  Description of Artificial Sequence: Synthetic oligonucleotide
cgtccgtggccccgcgcc

SEQ ID NO: 9164 - DNA, 18 bp, Artificial Sequence
  Description of Artificial Sequence: Synthetic oligonucleotide
gaaagcgtccgtggcccc

SEQ ID NO: 9165 - DNA, 18 bp, Artificial Sequence
  Description of Artificial Sequence: Synthetic oligonucleotide
gatctgaaagcgtccgtg

SEQ ID NO: 9166 - DNA, 18 bp, Artificial Sequence
  Description of Artificial Sequence: Synthetic oligonucleotide
tctaggatctgaaagcgt

SEQ ID NO: 9167 - DNA, 18 bp, Artificial Sequence
  Description of Artificial Sequence: Synthetic oligonucleotide
ctccctctaggatctgaa

SEQ ID NO: 9168 - DNA, 18 bp, Artificial Sequence
  Description of Artificial Sequence: Synthetic oligonucleotide
cctgactccctctaggat

SEQ ID NO: 9169 - DNA, 18 bp, Artificial Sequence
  Description of Artificial Sequence: Synthetic oligonucleotide
ttcagcctgactccctct

SEQ ID NO: 9170 - DNA, 18 bp, Artificial Sequence
  Description of Artificial Sequence: Synthetic oligonucleotide
gcctcttcagcctgactc

SEQ ID NO: 9171 - DNA, 18 bp, Artificial Sequence
  Description of Artificial Sequence: Synthetic oligonucleotide
gtcccgcctcttcagcct

SEQ ID NO: 9172 - DNA, 18 bp, Artificial Sequence
  Description of Artificial Sequence: Synthetic oligonucleotide
ggaaagtcccgcctcttc

SEQ ID NO: 9173 - DNA, 18 bp, Artificial Sequence
  Description of Artificial Sequence: Synthetic oligonucleotide
cgacaggaaagtcccgcc

SEQ ID NO: 9174 - DNA, 18 bp, Artificial Sequence
  Description of Artificial Sequence: Synthetic oligonucleotide
tcttacgacaggaaagtc

SEQ ID NO: 9175 - DNA, 18 bp, Artificial Sequence
  Description of Artificial Sequence: Synthetic oligonucleotide
cgccctcttacgacagga

SEQ ID NO: 9176 - DNA, 18 bp, Artificial Sequence
  Description of Artificial Sequence: Synthetic oligonucleotide
agttccgccctcttacga

SEQ ID NO: 9177 - DNA, 18 bp, Artificial Sequence
  Description of Artificial Sequence: Synthetic oligonucleotide
ctccaagttccgccctct

SEQ ID NO: 9178 - DNA, 18 bp, Artificial Sequence
  Description of Artificial Sequence: Synthetic oligonucleotide
cctgactccaagttccgc

SEQ ID NO: 9179 - DNA, 18 bp, Artificial Sequence
  Description of Artificial Sequence: Synthetic oligonucleotide
gaagtcctgactccaagt

SEQ ID NO: 9180 - DNA, 18 bp, Artificial Sequence
  Description of Artificial Sequence: Synthetic oligonucleotide
cgtgagaagtcctgactc

SEQ ID NO: 9181 - DNA, 18 bp, Artificial Sequence
  Description of Artificial Sequence: Synthetic oligonucleotide
cttcgcgtgagaagtcct

SEQ ID NO: 9182 - DNA, 18 bp, Artificial Sequence
  Description of Artificial Sequence: Synthetic oligonucleotide
cccgccttcgcgtgagaa

SEQ ID NO: 9183 - DNA, 18 bp, Artificial Sequence
  Description of Artificial Sequence: Synthetic oligonucleotide
gaagccccgccttcgcgt

SEQ ID NO: 9184 - DNA, 18 bp, Artificial Sequence
  Description of Artificial Sequence: Synthetic oligonucleotide
atcgagaagccccgcctt

SEQ ID NO: 9185 - DNA, 18 bp, Artificial Sequence
  Description of Artificial Sequence: Synthetic oligonucleotide
cgaaaatcgagaagcccc

SEQ ID NO: 9186 - DNA, 18 bp, Artificial Sequence
  Description of Artificial Sequence: Synthetic oligonucleotide
cccctcgaaaatcgagaa

SEQ ID NO: 9187 - DNA, 18 bp, Artificial Sequence
  Description of Artificial Sequence: Synthetic oligonucleotide
cccgccccctcgaaaatc

SEQ ID NO: 9188 - DNA, 18 bp, Artificial Sequence
  Description of Artificial Sequence: Synthetic oligonucleotide
tcagccccgccccctcga

SEQ ID NO: 9189 - DNA, 18 bp, Artificial Sequence
  Description of Artificial Sequence: Synthetic oligonucleotide
cccagtcagccccgcccc

SEQ ID NO: 9190 - DNA, 18 bp, Artificial Sequence
  Description of Artificial Sequence: Synthetic oligonucleotide
ggaggcccagtcagcccc

SEQ ID NO: 9191 - DNA, 18 bp, Artificial Sequence
  Description of Artificial Sequence: Synthetic oligonucleotide
gatcaggaggcccagtca

SEQ ID NO: 9192 - DNA, 18 bp, Artificial Sequence
  Description of Artificial Sequence: Synthetic oligonucleotide
ttggggatcaggaggccc

SEQ ID NO: 9193 - DNA, 18 bp, Artificial Sequence
  Description of Artificial Sequence: Synthetic oligonucleotide
cccttttggggatcagga

SEQ ID NO: 9194 - DNA, 18 bp, Artificial Sequence
  Description of Artificial Sequence: Synthetic oligonucleotide
cccgccccttttggggat

SEQ ID NO: 9195 - DNA, 18 bp, Artificial Sequence
  Description of Artificial Sequence: Synthetic oligonucleotide
cccgccccgccccttttg

SEQ ID NO: 9196 - DNA, 18 bp, Artificial Sequence
  Description of Artificial Sequence: Synthetic oligonucleotide
ttgcccccgccccgcccc

SEQ ID NO: 9197 - DNA, 18 bp, Artificial Sequence
  Description of Artificial Sequence: Synthetic oligonucleotide
gggtttccacggacgata

SEQ ID NO: 9198 - DNA, 18 bp, Artificial Sequence
  Description of Artificial Sequence: Synthetic oligonucleotide
ttcctgggtttccacgga

SEQ ID NO: 9199 - DNA, 18 bp, Artificial Sequence
  Description of Artificial Sequence: Synthetic oligonucleotide
ttcccttcctgggtttcc

SEQ ID NO: 9200 - DNA, 18 bp, Artificial Sequence
  Description of Artificial Sequence: Synthetic oligonucleotide
ttcttttcccttcctggg

SEQ ID NO: 9201 - DNA, 18 bp, Artificial Sequence
  Description of Artificial Sequence: Synthetic oligonucleotide
cacctttcttttcccttc

SEQ ID NO: 9202 - DNA, 18 bp, Artificial Sequence
  Description of Artificial Sequence: Synthetic oligonucleotide
tcattcacctttcttttc

SEQ ID NO: 9203 - DNA, 18 bp, Artificial Sequence
  Description of Artificial Sequence: Synthetic oligonucleotide
cactttcattcacctttc

SEQ ID NO: 9204 - DNA, 18 bp, Artificial Sequence
  Description of Artificial Sequence: Synthetic oligonucleotide
cccttcactttcattcac

SEQ ID NO: 9205 - DNA, 18 bp, Artificial Sequence
  Description of Artificial Sequence: Synthetic oligonucleotide
cttctcccttcactttca

SEQ ID NO: 9206 - DNA, 18 bp, Artificial Sequence
  Description of Artificial Sequence: Synthetic oligonucleotide
gttcccttctcccttcac

SEQ ID NO: 9207 - DNA, 18 bp, Artificial Sequence
  Description of Artificial Sequence: Synthetic oligonucleotide
cccaggttcccttctccc

SEQ ID NO: 9208 - DNA, 18 bp, Artificial Sequence
  Description of Artificial Sequence: Synthetic oligonucleotide
aatgccccaggttccctt

SEQ ID NO: 9209 - DNA, 18 bp, Artificial Sequence
  Description of Artificial Sequence: Synthetic oligonucleotide
gagacaatgccccaggtt

SEQ ID NO: 9210 - DNA, 18 bp, Artificial Sequence
  Description of Artificial Sequence: Synthetic oligonucleotide
aatcagagacaatgcccc

SEQ ID NO: 9211 - DNA, 18 bp, Artificial Sequence
  Description of Artificial Sequence: Synthetic oligonucleotide
agagcaatcagagacaat

SEQ ID NO: 9212 - DNA, 18 bp, Artificial Sequence
  Description of Artificial Sequence: Synthetic oligonucleotide
atgctagagcaatcagag

SEQ ID NO: 9213 - DNA, 18 bp, Artificial Sequence
  Description of Artificial Sequence: Synthetic oligonucleotide
gactcatgctagagcaat

SEQ ID NO: 9214 - DNA, 18 bp, Artificial Sequence
  Description of Artificial Sequence: Synthetic oligonucleotide
ctaaggactcatgctaga

SEQ ID NO: 9215 - DNA, 18 bp, Artificial Sequence
  Description of Artificial Sequence: Synthetic oligonucleotide
gagcactaaggactcatg

SEQ ID NO: 9216 - DNA, 18 bp, Artificial Sequence
  Description of Artificial Sequence: Synthetic oligonucleotide
atgaagagcactaaggac

SEQ ID NO: 9217 - DNA, 18 bp, Artificial Sequence
  Description of Artificial Sequence: Synthetic oligonucleotide
gccaaatgaagagcacta

SEQ ID NO: 9218 - DNA, 18 bp, Artificial Sequence
  Description of Artificial Sequence: Synthetic oligonucleotide
ggggagccaaatgaagag

SEQ ID NO: 9219 - DNA, 18 bp, Artificial Sequence
  Description of Artificial Sequence: Synthetic oligonucleotide
gattaggggagccaaatg

SEQ ID NO: 9220 - DNA, 18 bp, Artificial Sequence
  Description of Artificial Sequence: Synthetic oligonucleotide
agtcagattaggggagcc

SEQ ID NO: 9221 - DNA, 18 bp, Artificial Sequence
  Description of Artificial Sequence: Synthetic oligonucleotide
ggaggagtcagattaggg

SEQ ID NO: 9222 - DNA, 18 bp, Artificial Sequence
  Description of Artificial Sequence: Synthetic oligonucleotide
gggaaggaggagtcagat

SEQ ID NO: 9223 - DNA, 18 bp, Artificial Sequence
  Description of Artificial Sequence: Synthetic oligonucleotide
agaaagggaaggaggagt

SEQ ID NO: 9224 - DNA, 18 bp, Artificial Sequence
  Description of Artificial Sequence: Synthetic oligonucleotide
gccccccacagtccactc

SEQ ID NO: 9225 - DNA, 18 bp, Artificial Sequence
  Description of Artificial Sequence: Synthetic oligonucleotide
tctccgccccccacagtc

SEQ ID NO: 9226 - DNA, 18 bp, Artificial Sequence
  Description of Artificial Sequence: Synthetic oligonucleotide
tccagtctccgcccccca

SEQ ID NO: 9227 - DNA, 18 bp, Artificial Sequence
  Description of Artificial Sequence: Synthetic oligonucleotide
catcctccagtctccgcc

SEQ ID NO: 9228 - DNA, 18 bp, Artificial Sequence
  Description of Artificial Sequence: Synthetic oligonucleotide
attcccatcctccagtct

SEQ ID NO: 9229 - DNA, 18 bp, Artificial Sequence
  Description of Artificial Sequence: Synthetic oligonucleotide
aatccattcccatcctcc

SEQ ID NO: 9230 - DNA, 18 bp, Artificial Sequence
  Description of Artificial Sequence: Synthetic oligonucleotide
cactcaatccattcccat

SEQ ID NO: 9231 - DNA, 18 bp, Artificial Sequence
  Description of Artificial Sequence: Synthetic oligonucleotide
ccacccactcaatccatt

SEQ ID NO: 9232 - DNA, 18 bp, Artificial Sequence
  Description of Artificial Sequence: Synthetic oligonucleotide
ttggcccacccactcaat

SEQ ID NO: 9233 - DNA, 18 bp, Artificial Sequence
  Description of Artificial Sequence: Synthetic oligonucleotide
attgcttggcccacccac

SEQ ID NO: 9234 - DNA, 18 bp, Artificial Sequence
  Description of Artificial Sequence: Synthetic oligonucleotide
cctctattgcttggccca

SEQ ID NO: 9235 - DNA, 18 bp, Artificial Sequence
  Description of Artificial Sequence: Synthetic oligonucleotide
caccacctctattgcttg

SEQ ID NO: 9236 - DNA, 18 bp, Artificial Sequence
  Description of Artificial Sequence: Synthetic oligonucleotide
tacatcaccacctctatt

SEQ ID NO: 9237 - DNA, 18 bp, Artificial Sequence
  Description of Artificial Sequence: Synthetic oligonucleotide
ctagctacatcaccacct

SEQ ID NO: 9238 - DNA, 18 bp, Artificial Sequence
  Description of Artificial Sequence: Synthetic oligonucleotide
accaactagctacatcac

SEQ ID NO: 9239 - DNA, 18 bp, Artificial Sequence
  Description of Artificial Sequence: Synthetic oligonucleotide
gaagaaccaactagctac

SEQ ID NO: 9240 - DNA, 18 bp, Artificial Sequence
  Description of Artificial Sequence: Synthetic oligonucleotide
acagagaagaaccaacta

SEQ ID NO: 9241 - DNA, 18 bp, Artificial Sequence
  Description of Artificial Sequence: Synthetic oligonucleotide
aataaacagagaagaacc

SEQ ID NO: 9242 - DNA, 18 bp, Artificial Sequence
  Description of Artificial Sequence: Synthetic oligonucleotide
tggagaataaacagagaa

SEQ ID NO: 9243 - DNA, 18 bp, Artificial Sequence
  Description of Artificial Sequence: Synthetic oligonucleotide
aaaactggagaataaaca

SEQ ID NO: 9244 - DNA, 18 bp, Artificial Sequence
  Description of Artificial Sequence: Synthetic oligonucleotide
cctctaaaactggagaat

SEQ ID NO: 9245 - DNA, 18 bp, Artificial Sequence
  Description of Artificial Sequence: Synthetic oligonucleotide
tctgccctctaaaactgg

SEQ ID NO: 9246 - DNA, 18 bp, Artificial Sequence
  Description of Artificial Sequence: Synthetic oligonucleotide
ttaagtctgccctctaaa

SEQ ID NO: 9247 - DNA, 18 bp, Artificial Sequence
  Description of Artificial Sequence: Synthetic oligonucleotide
cccatttaagtctgccct

SEQ ID NO: 9248 - DNA, 18 bp, Artificial Sequence
  Description of Artificial Sequence: Synthetic oligonucleotide
atgtccccatttaagtct

SEQ ID NO: 9249 - DNA, 18 bp, Artificial Sequence
  Description of Artificial Sequence: Synthetic oligonucleotide
gttcaatgtccccattta

SEQ ID NO: 9250 - DNA, 18 bp, Artificial Sequence
  Description of Artificial Sequence: Synthetic oligonucleotide
ttagcgttcaatgtcccc

SEQ ID NO: 9251 - DNA, 18 bp, Artificial Sequence
  Description of Artificial Sequence: Synthetic oligonucleotide
atttcttagcgttcaatg

SEQ ID NO: 9252 - DNA, 18 bp, Artificial Sequence
  Description of Artificial Sequence: Synthetic oligonucleotide
aaaagatttcttagcgtt

SEQ ID NO: 9253 - DNA, 18 bp, Artificial Sequence
  Description of Artificial Sequence: Synthetic oligonucleotide
actcaaaaagatttctta

SEQ ID NO: 9254 - DNA, 18 bp, Artificial Sequence
  Description of Artificial Sequence: Synthetic oligonucleotide
gctggactcaaaaagatt

SEQ ID NO: 9255 - DNA, 18 bp, Artificial Sequence
  Description of Artificial Sequence: Synthetic oligonucleotide
ggtttgctggactcaaaa

SEQ ID NO: 9256 - DNA, 18 bp, Artificial Sequence
  Description of Artificial Sequence: Synthetic oligonucleotide
agcaaggtttgctggact

SEQ ID NO: 9257 - DNA, 18 bp, Artificial Sequence
  Description of Artificial Sequence: Synthetic oligonucleotide
tagagagcaaggtttgct

SEQ ID NO: 9258 - DNA, 18 bp, Artificial Sequence
  Description of Artificial Sequence: Synthetic oligonucleotide
tagactagagagcaaggt

SEQ ID NO: 9259 - DNA, 18 bp, Artificial Sequence
  Description of Artificial Sequence: Synthetic oligonucleotide
tttgctagactagagagc

SEQ ID NO: 9260 - DNA, 18 bp, Artificial Sequence
  Description of Artificial Sequence: Synthetic oligonucleotide
tgtactttgctagactag

SEQ ID NO: 9261 - DNA, 18 bp, Artificial Sequence
  Description of Artificial Sequence: Synthetic oligonucleotide
caacttgtactttgctag

SEQ ID NO: 9262 - DNA, 18 bp, Artificial Sequence
  Description of Artificial Sequence: Synthetic oligonucleotide
cttcacaacttgtacttt

SEQ ID NO: 9263 - DNA, 18 bp, Artificial Sequence
  Description of Artificial Sequence: Synthetic oligonucleotide
cagcccttcacaacttgt

SEQ ID NO: 9264 - DNA, 18 bp, Artificial Sequence
  Description of Artificial Sequence: Synthetic oligonucleotide
cctagcagcccttcacaa

SEQ ID NO: 9265 - DNA, 18 bp, Artificial Sequence
  Description of Artificial Sequence: Synthetic oligonucleotide
aaaagcctagcagccctt

SEQ ID NO: 9266 - DNA, 18 bp, Artificial Sequence
  Description of Artificial Sequence: Synthetic oligonucleotide
aaacaaaaagcctagcag

SEQ ID NO: 9267 - DNA, 18 bp, Artificial Sequence
  Description of Artificial Sequence: Synthetic oligonucleotide
gagagaaacaaaaagcct

SEQ ID NO: 9268 - DNA, 18 bp, Artificial Sequence
  Description of Artificial Sequence: Synthetic oligonucleotide
aaagtgagagaaacaaaa

SEQ ID NO: 9269 - DNA, 18 bp, Artificial Sequence
  Description of Artificial Sequence: Synthetic oligonucleotide
cacgcaaagtgagagaaa

SEQ ID NO: 9270 - DNA, 18 bp, Artificial Sequence
  Description of Artificial Sequence: Synthetic oligonucleotide
aggggcacgcaaagtgag

SEQ ID NO: 9271 - DNA, 18 bp, Artificial Sequence
  Description of Artificial Sequence: Synthetic oligonucleotide
tacccaggggcacgcaaa

SEQ ID NO: 9272 - DNA, 18 bp, Artificial Sequence
  Description of Artificial Sequence: Synthetic oligonucleotide
cccagtacccaggggcac

SEQ ID NO: 9273 - DNA, 18 bp, Artificial Sequence
  Description of Artificial Sequence: Synthetic oligonucleotide
tttaccccagtacccagg

SEQ ID NO: 9274 - DNA, 18 bp, Artificial Sequence
  Description of Artificial Sequence: Synthetic oligonucleotide
agccctttaccccagtac

SEQ ID NO: 9275 - DNA, 18 bp, Artificial Sequence
  Description of Artificial Sequence: Synthetic oligonucleotide
atgagagccctttacccc

SEQ ID NO: 9276 - DNA, 18 bp, Artificial Sequence
  Description of Artificial Sequence: Synthetic oligonucleotide
agaacatgagagcccttt

SEQ ID NO: 9277 - DNA, 18 bp, Artificial Sequence
  Description of Artificial Sequence: Synthetic oligonucleotide
tggggagaacatgagagc

SEQ ID NO: 9278 - DNA, 18 bp, Artificial Sequence
  Description of Artificial Sequence: Synthetic oligonucleotide
acctgtggggagaacatg

SEQ ID NO: 9279 - DNA, 18 bp, Artificial Sequence
  Description of Artificial Sequence: Synthetic oligonucleotide
cacacacctgtggggaga

SEQ ID NO: 9280 - DNA, 18 bp, Artificial Sequence
  Description of Artificial Sequence: Synthetic oligonucleotide
cccctcacacacctgtgg

SEQ ID NO: 9281 - DNA, 18 bp, Artificial Sequence
  Description of Artificial Sequence: Synthetic oligonucleotide
tctcccccctcacacacc

SEQ ID NO: 9282 - DNA, 18 bp, Artificial Sequence
  Description of Artificial Sequence: Synthetic oligonucleotide
caagctctcccccctcac

SEQ ID NO: 9283 - DNA, 18 bp, Artificial Sequence
  Description of Artificial Sequence: Synthetic oligonucleotide
aaactcaagctctccccc

SEQ ID NO: 9284 - DNA, 18 bp, Artificial Sequence
  Description of Artificial Sequence: Synthetic oligonucleotide
gccagaaactcaagctct

SEQ ID NO: 9285 - DNA, 18 bp, Artificial Sequence
  Description of Artificial Sequence: Synthetic oligonucleotide
atgaggccagaaactcaa

SEQ ID NO: 9286 - DNA, 18 bp, Artificial Sequence
  Description of Artificial Sequence: Synthetic oligonucleotide
aggcaatgaggccagaaa

SEQ ID NO: 9287 - DNA, 18 bp, Artificial Sequence
  Description of Artificial Sequence: Synthetic oligonucleotide
caaataggcaatgaggcc

SEQ ID NO: 9288 - DNA, 18 bp, Artificial Sequence
  Description of Artificial Sequence: Synthetic oligonucleotide
ctttacaaataggcaatg

SEQ ID NO: 9289 - DNA, 18 bp, Artificial Sequence
  Description of Artificial Sequence: Synthetic oligonucleotide
tacagctttacaaatagg

SEQ ID NO: 9290 - DNA, 18 bp, Artificial Sequence
  Description of Artificial Sequence: Synthetic oligonucleotide
taggctacagctttacaa

SEQ ID NO: 9291 - DNA, 18 bp, Artificial Sequence
  Description of Artificial Sequence: Synthetic oligonucleotide
ccctttaggctacagctt

SEQ ID NO: 9292 - DNA, 18 bp, Artificial Sequence
  Description of Artificial Sequence: Synthetic oligonucleotide
gagagccctttaggctac

SEQ ID NO: 9293 - DNA, 18 bp, Artificial Sequence
  Description of Artificial Sequence: Synthetic oligonucleotide
attgggagagccctttag

SEQ ID NO: 9294 - DNA, 18 bp, Artificial Sequence
  Description of Artificial Sequence: Synthetic oligonucleotide
gctgcattgggagagccc

SEQ ID NO: 9295 - DNA, 18 bp, Artificial Sequence
  Description of Artificial Sequence: Synthetic oligonucleotide
accaggctgcattgggag

SEQ ID NO: 9296 - DNA, 18 bp, Artificial Sequence
  Description of Artificial Sequence: Synthetic oligonucleotide
ttcagaccaggctgcatt

SEQ ID NO: 9297 - DNA, 18 bp, Artificial Sequence
  Description of Artificial Sequence: Synthetic oligonucleotide
gcagtttcagaccaggct

SEQ ID NO: 9298 - DNA, 18 bp, Artificial Sequence
  Description of Artificial Sequence: Synthetic oligonucleotide
ttaaagcagtttcagacc

SEQ ID NO: 9299 - DNA, 18 bp, Artificial Sequence
  Description of Artificial Sequence: Synthetic oligonucleotide
gcttcttaaagcagtttc

SEQ ID NO: 9300 - DNA, 18 bp, Artificial Sequence
  Description of Artificial Sequence: Synthetic oligonucleotide
cagaggcttcttaaagca

SEQ ID NO: 9301 - DNA, 18 bp, Artificial Sequence
  Description of Artificial Sequence: Synthetic oligonucleotide
agggtcagaggcttctta

SEQ ID NO: 9302 - DNA, 18 bp, Artificial Sequence
  Description of Artificial Sequence: Synthetic oligonucleotide
tgaagagggtcagaggct

SEQ ID NO: 9303 - DNA, 18 bp, Artificial Sequence
  Description of Artificial Sequence: Synthetic oligonucleotide
taccctgaagagggtcag

SEQ ID NO: 9304 - DNA, 18 bp, Artificial Sequence
  Description of Artificial Sequence: Synthetic oligonucleotide
gcacttaccctgaagagg

SEQ ID NO: 9305 - DNA, 18 bp, Artificial Sequence
  Description of Artificial Sequence: Synthetic oligonucleotide
gctgagcacttaccctga

SEQ ID NO: 9306 - DNA, 18 bp, Artificial Sequence
  Description of Artificial Sequence: Synthetic oligonucleotide
ggggagctgagcacttac

SEQ ID NO: 9307 - DNA, 18 bp, Artificial Sequence
  Description of Artificial Sequence: Synthetic oligonucleotide
cacatggggagctgagca

SEQ ID NO: 9308 - DNA, 18 bp, Artificial Sequence
  Description of Artificial Sequence: Synthetic oligonucleotide
aaacccacatggggagct

SEQ ID NO: 9309 - DNA, 18 bp, Artificial Sequence
  Description of Artificial Sequence: Synthetic oligonucleotide
gccccaaacccacatggg

SEQ ID NO: 9310 - DNA, 18 bp, Artificial Sequence
  Description of Artificial Sequence: Synthetic oligonucleotide
cactggccccaaacccac

SEQ ID NO: 9311 - DNA, 18 bp, Artificial Sequence
  Description of Artificial Sequence: Synthetic oligonucleotide
aaaatcactggccccaaa

SEQ ID NO: 9312 - DNA, 18 bp, Artificial Sequence
  Description of Artificial Sequence: Synthetic oligonucleotide
caacaaaaatcactggcc

SEQ ID NO: 9313 - DNA, 18 bp, Artificial Sequence
  Description of Artificial Sequence: Synthetic oligonucleotide
aatgccaacaaaaatcac

SEQ ID NO: 9314 - DNA, 18 bp, Artificial Sequence
  Description of Artificial Sequence: Synthetic oligonucleotide
gtataaatgccaacaaaa

SEQ ID NO: 9315 - DNA, 18 bp, Artificial Sequence
  Description of Artificial Sequence: Synthetic oligonucleotide
tgtttgtataaatgccaa

SEQ ID NO: 9316 - DNA, 18 bp, Artificial Sequence
  Description of Artificial Sequence: Synthetic oligonucleotide
ccaattgtttgtataaat

SEQ ID NO: 9317 - DNA, 18 bp, Artificial Sequence
  Description of Artificial Sequence: Synthetic oligonucleotide
tatctccaattgtttgta

SEQ ID NO: 9318 - DNA, 18 bp, Artificial Sequence
  Description of Artificial Sequence: Synthetic oligonucleotide
gacaatatctccaattgt

SEQ ID NO: 9319 - DNA, 18 bp, Artificial Sequence
  Description of Artificial Sequence: Synthetic oligonucleotide
aagtagacaatatctcca

SEQ ID NO: 9320 - DNA, 18 bp, Artificial Sequence
  Description of Artificial Sequence: Synthetic oligonucleotide
tagcaaagtagacaatat

SEQ ID NO: 9321 - DNA, 18 bp, Artificial Sequence
  Description of Artificial Sequence: Synthetic oligonucleotide
aattgtagcaaagtagac

SEQ ID NO: 9322 - DNA, 18 bp, Artificial Sequence
  Description of Artificial Sequence: Synthetic oligonucleotide
tacggaattgtagcaaag

SEQ ID NO: 9323 - DNA, 18 bp, Artificial Sequence
  Description of Artificial Sequence: Synthetic oligonucleotide
taacttacggaattgtag

SEQ ID NO: 9324 - DNA, 18 bp, Artificial Sequence
  Description of Artificial Sequence: Synthetic oligonucleotide
gccaataacttacggaat

SEQ ID NO: 9325 - DNA, 18 bp, Artificial Sequence
  Description of Artificial Sequence: Synthetic oligonucleotide
agttagccaataacttac

SEQ ID NO: 9326 - DNA, 18 bp, Artificial Sequence
  Description of Artificial Sequence: Synthetic oligonucleotide
agagacgcctgcatgtca

SEQ ID NO: 9327 - DNA, 18 bp, Artificial Sequence
  Description of Artificial Sequence: Synthetic oligonucleotide
aaaagagagacgcctgca

SEQ ID NO: 9328 - DNA, 18 bp, Artificial Sequence
  Description of Artificial Sequence: Synthetic oligonucleotide
ggacaaaaagagagacgc

SEQ ID NO: 9329 - DNA, 18 bp, Artificial Sequence
  Description of Artificial Sequence: Synthetic oligonucleotide
ttaaaggacaaaaagaga

SEQ ID NO: 9330 - DNA, 18 bp, Artificial Sequence
  Description of Artificial Sequence: Synthetic oligonucleotide
atcccttaaaggacaaaa

SEQ ID NO: 9331 - DNA, 18 bp, Artificial Sequence
  Description of Artificial Sequence: Synthetic oligonucleotide
ggaagatcccttaaagga

SEQ ID NO: 9332 - DNA, 18 bp, Artificial Sequence
  Description of Artificial Sequence: Synthetic oligonucleotide
caggtggaagatccctta

SEQ ID NO: 9333 - DNA, 18 bp, Artificial Sequence
  Description of Artificial Sequence: Synthetic oligonucleotide
catggcaggtggaagatc

SEQ ID NO: 9334 - DNA, 18 bp, Artificial Sequence
  Description of Artificial Sequence: Synthetic oligonucleotide
gtgcgcatggcaggtgga

SEQ ID NO: 9335 - DNA, 18 bp, Artificial Sequence
  Description of Artificial Sequence: Synthetic oligonucleotide
ggagagtgcgcatggcag

SEQ ID NO: 9336 - DNA, 18 bp, Artificial Sequence
  Description of Artificial Sequence: Synthetic oligonucleotide
ctgctggagagtgcgcat

SEQ ID NO: 9337 - DNA, 18 bp, Artificial Sequence
  Description of Artificial Sequence: Synthetic oligonucleotide
gcactctgctggagagtg

SEQ ID NO: 9338 - DNA, 18 bp, Artificial Sequence
  Description of Artificial Sequence: Synthetic oligonucleotide
agccggcactctgctgga

SEQ ID NO: 9339 - DNA, 18 bp, Artificial Sequence
  Description of Artificial Sequence: Synthetic oligonucleotide
acacaagccggcactctg

SEQ ID NO: 9340 - DNA, 18 bp, Artificial Sequence
  Description of Artificial Sequence: Synthetic oligonucleotide
tctagacacaagccggca

SEQ ID NO: 9341 - DNA, 18 bp, Artificial Sequence
  Description of Artificial Sequence: Synthetic oligonucleotide
ccccatctagacacaagc

SEQ ID NO: 9342 - DNA, 18 bp, Artificial Sequence
  Description of Artificial Sequence: Synthetic oligonucleotide
tctttccccatctagaca

SEQ ID NO: 9343 - DNA, 18 bp, Artificial Sequence
  Description of Artificial Sequence: Synthetic oligonucleotide
cctgctctttccccatct

SEQ ID NO: 9344 - DNA, 18 bp, Artificial Sequence
  Description of Artificial Sequence: Synthetic oligonucleotide
atgaacctgctctttccc

SEQ ID NO: 9345 - DNA, 18 bp, Artificial Sequence
  Description of Artificial Sequence: Synthetic oligonucleotide
acccgatgaacctgctct

SEQ ID NO: 9346 - DNA, 18 bp, Artificial Sequence
  Description of Artificial Sequence: Synthetic oligonucleotide
ccagtacccgatgaacct

SEQ ID NO: 9347 - DNA, 18 bp, Artificial Sequence
  Description of Artificial Sequence: Synthetic oligonucleotide
gggtcccagtacccgatg

SEQ ID NO: 9348 - DNA, 18 bp, Artificial Sequence
  Description of Artificial Sequence: Synthetic oligonucleotide
ctgctgggtcccagtacc

SEQ ID NO: 9349 - DNA, 18 bp, Artificial Sequence
  Description of Artificial Sequence: Synthetic oligonucleotide
tcacactgctgggtccca

SEQ ID NO: 9350 - DNA, 18 bp, Artificial Sequence
  Description of Artificial Sequence: Synthetic oligonucleotide
ctggatcacactgctggg

SEQ ID NO: 9351 - DNA, 18 bp, Artificial Sequence
  Description of Artificial Sequence: Synthetic oligonucleotide
gctctctggatcacactg

SEQ ID NO: 9352 - DNA, 18 bp, Artificial Sequence
  Description of Artificial Sequence: Synthetic oligonucleotide
ccactgctctctggatca

SEQ ID NO: 9353 - DNA, 18 bp, Artificial Sequence
  Description of Artificial Sequence: Synthetic oligonucleotide
gtctcccactgctctctg

SEQ ID NO: 9354 - DNA, 18 bp, Artificial Sequence
  Description of Artificial Sequence: Synthetic oligonucleotide
ccagcgtctcccactgct

SEQ ID NO: 9355 - DNA, 18 bp, Artificial Sequence
  Description of Artificial Sequence: Synthetic oligonucleotide
tgctgccagcgtctccca

SEQ ID NO: 9356 - DNA, 18 bp, Artificial Sequence
  Description of Artificial Sequence: Synthetic oligonucleotide
cctcctgctgccagcgtc

SEQ ID NO: 9357 - DNA, 18 bp, Artificial Sequence
  Description of Artificial Sequence: Synthetic oligonucleotide
attaacctcctgctgcca

SEQ ID NO: 9358 - DNA, 18 bp, Artificial Sequence
  Description of Artificial Sequence: Synthetic oligonucleotide
aggacattaacctcctgc

SEQ ID NO: 9359 - DNA, 18 bp, Artificial Sequence
  Description of Artificial Sequence: Synthetic oligonucleotide
cacagaggacattaacct

SEQ ID NO: 9360 - DNA, 18 bp, Artificial Sequence
  Description of Artificial Sequence: Synthetic oligonucleotide
gagagcacagaggacatt

SEQ ID NO: 9361 - DNA, 18 bp, Artificial Sequence
  Description of Artificial Sequence: Synthetic oligonucleotide
tccctgagagcacagagg

SEQ ID NO: 9362 - DNA, 18 bp, Artificial Sequence
  Description of Artificial Sequence: Synthetic oligonucleotide
aggtgtccctgagagcac

SEQ ID NO: 9363 - DNA, 18 bp, Artificial Sequence
  Description of Artificial Sequence: Synthetic oligonucleotide
agaggaggtgtccctgag

SEQ ID NO: 9364 - DNA, 18 bp, Artificial Sequence
  Description of Artificial Sequence: Synthetic oligonucleotide
atatcagaggaggtgtcc

SEQ ID NO: 9365 - DNA, 18 bp, Artificial Sequence
  Description of Artificial Sequence: Synthetic oligonucleotide
tcagcatatcagaggagg

SEQ ID NO: 9366 - DNA, 18 bp, Artificial Sequence
  Description of Artificial Sequence: Synthetic oligonucleotide
tgccctcagcatatcaga

SEQ ID NO: 9367 - DNA, 18 bp, Artificial Sequence
  Description of Artificial Sequence: Synthetic oligonucleotide
aacactgccctcagcata

SEQ ID NO: 9368 - DNA, 18 bp, Artificial Sequence
  Description of Artificial Sequence: Synthetic oligonucleotide
tccccaacactgccctca

SEQ ID NO: 9369 - DNA, 18 bp, Artificial Sequence
  Description of Artificial Sequence: Synthetic oligonucleotide
aaaggtccccaacactgc

SEQ ID NO: 9370 - DNA, 18 bp, Artificial Sequence
  Description of Artificial Sequence: Synthetic oligonucleotide
taggcaaaggtccccaac

SEQ ID NO: 9371 - DNA, 18 bp, Artificial Sequence
  Description of Artificial Sequence: Synthetic oligonucleotide
gtatgtaggcaaaggtcc

SEQ ID NO: 9372 - DNA, 18 bp, Artificial Sequence
  Description of Artificial Sequence: Synthetic oligonucleotide
tgccggtatgtaggcaaa

SEQ ID NO: 9373 - DNA, 18 bp, Artificial Sequence
  Description of Artificial Sequence: Synthetic oligonucleotide
gacaatgccggtatgtag

SEQ ID NO: 9374 - DNA, 18 bp, Artificial Sequence
  Description of Artificial Sequence: Synthetic oligonucleotide
gaaaggacaatgccggta

SEQ ID NO: 9375 - DNA, 18 bp, Artificial Sequence
  Description of Artificial Sequence: Synthetic oligonucleotide
tcaaggaaaggacaatgc

SEQ ID NO: 9376 - DNA, 18 bp, Artificial Sequence
  Description of Artificial Sequence: Synthetic oligonucleotide
aaacttcaaggaaaggac

SEQ ID NO: 9377 - DNA, 18 bp, Artificial Sequence
  Description of Artificial Sequence: Synthetic oligonucleotide
ctgcaaaacttcaaggaa

SEQ ID NO: 9378 - DNA, 18 bp, Artificial Sequence
  Description of Artificial Sequence: Synthetic oligonucleotide
cccagctgcaaaacttca

SEQ ID NO: 9379 - DNA, 18 bp, Artificial Sequence
  Description of Artificial Sequence: Synthetic oligonucleotide
acccacccagctgcaaaa

SEQ ID NO: 9380 - DNA, 18 bp, Artificial Sequence
  Description of Artificial Sequence: Synthetic oligonucleotide
caacaatgaaagtgaaga

SEQ ID NO: 9381 - DNA, 18 bp, Artificial Sequence
  Description of Artificial Sequence: Synthetic oligonucleotide
atgggcaacaatgaaagt

SEQ ID NO: 9382 - DNA, 18 bp, Artificial Sequence
  Description of Artificial Sequence: Synthetic oligonucleotide
tttagatgggcaacaatg

SEQ ID NO: 9383 - DNA, 18 bp, Artificial Sequence
  Description of Artificial Sequence: Synthetic oligonucleotide
aagcttttagatgggcaa

SEQ ID NO: 9384 - DNA, 18 bp, Artificial Sequence
  Description of Artificial Sequence: Synthetic oligonucleotide
ctctgaagcttttagatg

SEQ ID NO: 9385 - DNA, 18 bp, Artificial Sequence
  Description of Artificial Sequence: Synthetic oligonucleotide
tgctgctctgaagctttt

SEQ ID NO: 9386 - DNA, 18 bp, Artificial Sequence
  Description of Artificial Sequence: Synthetic oligonucleotide
gtctgtgctgctctgaag

SEQ ID NO: 9387 - DNA, 18 bp, Artificial Sequence
  Description of Artificial Sequence: Synthetic oligonucleotide
agtcagtctgtgctgctc

SEQ ID NO: 9388 - DNA, 18 bp, Artificial Sequence
  Description of Artificial Sequence: Synthetic oligonucleotide
cttgaagtcagtctgtgc

SEQ ID NO: 9389 - DNA, 18 bp, Artificial Sequence
  Description of Artificial Sequence: Synthetic oligonucleotide
tttatcttgaagtcagtc

SEQ ID NO: 9390 - DNA, 18 bp, Artificial Sequence
  Description of Artificial Sequence: Synthetic oligonucleotide
ctacttttatcttgaagt

SEQ ID NO: 9391 - DNA, 18 bp, Artificial Sequence
  Description of Artificial Sequence: Synthetic oligonucleotide
gactactacttttatctt

SEQ ID NO: 9392 - DNA, 18 bp, Artificial Sequence
  Description of Artificial Sequence: Synthetic oligonucleotide
gcagagactactactttt

SEQ ID NO: 9393 - DNA, 18 bp, Artificial Sequence
  Description of Artificial Sequence: Synthetic oligonucleotide
cagatgcagagactacta

SEQ ID NO: 9394 - DNA, 18 bp, Artificial Sequence
  Description of Artificial Sequence: Synthetic oligonucleotide
gtactcagatgcagagac

SEQ ID NO: 9395 - DNA, 18 bp, Artificial Sequence
  Description of Artificial Sequence: Synthetic oligonucleotide
atctggtactcagatgca

SEQ ID NO: 9396 - DNA, 18 bp, Artificial Sequence
  Description of Artificial Sequence: Synthetic oligonucleotide
gcaggatctggtactcag

SEQ ID NO: 9397 - DNA, 18 bp, Artificial Sequence
  Description of Artificial Sequence: Synthetic oligonucleotide
ctattgcaggatctggta

SEQ ID NO: 9398 - DNA, 18 bp, Artificial Sequence
  Description of Artificial Sequence: Synthetic oligonucleotide
atctcctattgcaggatc

SEQ ID NO: 9399 - DNA, 18 bp, Artificial Sequence
  Description of Artificial Sequence: Synthetic oligonucleotide
gccttatctcctattgca

SEQ ID NO: 9400 - DNA, 18 bp, Artificial Sequence
  Description of Artificial Sequence: Synthetic oligonucleotide
aaatggccttatctccta

SEQ ID NO: 9401 - DNA, 18 bp, Artificial Sequence
  Description of Artificial Sequence: Synthetic oligonucleotide
tggtgaaatggccttatc

SEQ ID NO: 9402 - DNA, 18 bp, Artificial Sequence
  Description of Artificial Sequence: Synthetic oligonucleotide
tgttgtggtgaaatggcc

SEQ ID NO: 9403 - DNA, 18 bp, Artificial Sequence
  Description of Artificial Sequence: Synthetic oligonucleotide
agaactgttgtggtgaaa

SEQ ID NO: 9404 - DNA, 18 bp, Artificial Sequence
  Description of Artificial Sequence: Synthetic oligonucleotide
acttcagaactgttgtgg

SEQ ID NO: 9405 - DNA, 18 bp, Artificial Sequence
  Description of Artificial Sequence: Synthetic oligonucleotide
ctgctacttcagaactgt

SEQ ID NO: 9406 - DNA, 18 bp, Artificial Sequence
  Description of Artificial Sequence: Synthetic oligonucleotide
catacctgctacttcaga

SEQ ID NO: 9407 - DNA, 18 bp, Artificial Sequence
  Description of Artificial Sequence: Synthetic oligonucleotide
tgtaccatacctgctact

SEQ ID NO: 9408 - DNA, 18 bp, Artificial Sequence
  Description of Artificial Sequence: Synthetic oligonucleotide
cctactgtaccatacctg

SEQ ID NO: 9409 - DNA, 18 bp, Artificial Sequence
  Description of Artificial Sequence: Synthetic oligonucleotide
taccccctactgtaccat

SEQ ID NO: 9410 - DNA, 18 bp, Artificial Sequence
  Description of Artificial Sequence: Synthetic oligonucleotide
taaaataccccctactgt

SEQ ID NO: 9411 - DNA, 18 bp, Artificial Sequence
  Description of Artificial Sequence: Synthetic oligonucleotide
tgatttaaaataccccct

SEQ ID NO: 9412 - DNA, 18 bp, Artificial Sequence
  Description of Artificial Sequence: Synthetic oligonucleotide
caaaatgatttaaaatac

SEQ ID NO: 9413 - DNA, 18 bp, Artificial Sequence
  Description of Artificial Sequence: Synthetic oligonucleotide
tttcccaaaatgatttaa

SEQ ID NO: 9414 - DNA, 18 bp, Artificial Sequence
  Description of Artificial Sequence: Synthetic oligonucleotide
caacatttcccaaaatga

SEQ ID NO: 9415 - DNA, 18 bp, Artificial Sequence
  Description of Artificial Sequence: Synthetic oligonucleotide
gactgcaacatttcccaa

SEQ ID NO: 9416 - DNA, 18 bp, Artificial Sequence
  Description of Artificial Sequence: Synthetic oligonucleotide
ttggtgactgcaacattt

SEQ ID NO: 9417 - DNA, 18 bp, Artificial Sequence
  Description of Artificial Sequence: Synthetic oligonucleotide
tcaagttggtgactgcaa

SEQ ID NO: 9418 - DNA, 18 bp, Artificial Sequence
  Description of Artificial Sequence: Synthetic oligonucleotide
ttaagtcaagttggtgac

SEQ ID NO: 9419 - DNA, 18 bp, Artificial Sequence
  Description of Artificial Sequence: Synthetic oligonucleotide
aagacttaagtcaagttg

SEQ ID NO: 9420 - DNA, 18 bp, Artificial Sequence
  Description of Artificial Sequence: Synthetic oligonucleotide
aaaagaagacttaagtca

SEQ ID NO: 9421 - DNA, 18 bp, Artificial Sequence
  Description of Artificial Sequence: Synthetic oligonucleotide
aatccaaaagaagactta

SEQ ID NO: 9422 - DNA, 18 bp, Artificial Sequence
  Description of Artificial Sequence: Synthetic oligonucleotide
tacagaatccaaaagaag

SEQ ID NO: 9423 - DNA, 18 bp, Artificial Sequence
  Description of Artificial Sequence: Synthetic oligonucleotide
aaaattacagaatccaaa

SEQ ID NO: 9424 - DNA, 18 bp, Artificial Sequence
  Description of Artificial Sequence: Synthetic oligonucleotide
gccagaaaattacagaat

SEQ ID NO: 9425 - DNA, 18 bp, Artificial Sequence
  Description of Artificial Sequence: Synthetic oligonucleotide
acaatgccagaaaattac

SEQ ID NO: 9426 - DNA, 18 bp, Artificial Sequence
  Description of Artificial Sequence: Synthetic oligonucleotide
ttagaacaatgccagaaa

SEQ ID NO: 9427 - DNA, 18 bp, Artificial Sequence
  Description of Artificial Sequence: Synthetic oligonucleotide
tagaattagaacaatgcc

SEQ ID NO: 9428 - DNA, 18 bp, Artificial Sequence
  Description of Artificial Sequence: Synthetic oligonucleotide
gaaaatagaattagaaca

SEQ ID NO: 9429 - DNA, 18 bp, Artificial Sequence
  Description of Artificial Sequence: Synthetic oligonucleotide
tcgacttccacctggaca

SEQ ID NO: 9430 - DNA, 18 bp, Artificial Sequence
  Description of Artificial Sequence: Synthetic oligonucleotide
caccctcgacttccacct

SEQ ID NO: 9431 - DNA, 18 bp, Artificial Sequence
  Description of Artificial Sequence: Synthetic oligonucleotide
cccttcaccctcgacttc

SEQ ID NO: 9432 - DNA, 18 bp, Artificial Sequence
  Description of Artificial Sequence: Synthetic oligonucleotide
ctgtccccttcaccctcg

SEQ ID NO: 9433 - DNA, 18 bp, Artificial Sequence
  Description of Artificial Sequence: Synthetic oligonucleotide
ctgtcctgtccccttcac

SEQ ID NO: 9434 - DNA, 18 bp, Artificial Sequence
  Description of Artificial Sequence: Synthetic oligonucleotide
gaggtctgtcctgtcccc

SEQ ID NO: 9435 - DNA, 18 bp, Artificial Sequence
  Description of Artificial Sequence: Synthetic oligonucleotide
ttgccgaggtctgtcctg

SEQ ID NO: 9436 - DNA, 18 bp, Artificial Sequence
  Description of Artificial Sequence: Synthetic oligonucleotide
gccctttgccgaggtctg

SEQ ID NO: 9437 - DNA, 18 bp, Artificial Sequence
  Description of Artificial Sequence: Synthetic oligonucleotide
gggaagccctttgccgag

SEQ ID NO: 9438 - DNA, 18 bp, Artificial Sequence
  Description of Artificial Sequence: Synthetic oligonucleotide
ggtgtgggaagccctttg

SEQ ID NO: 9439 - DNA, 18 bp, Artificial Sequence
  Description of Artificial Sequence: Synthetic oligonucleotide
caagaggtgtgggaagcc

SEQ ID NO: 9440 - DNA, 18 bp, Artificial Sequence
  Description of Artificial Sequence: Synthetic oligonucleotide
gggcccaagaggtgtggg

SEQ ID NO: 9441 - DNA, 18 bp, Artificial Sequence
  Description of Artificial Sequence: Synthetic oligonucleotide
ctcaggggcccaagaggt

SEQ ID NO: 9442 - DNA, 18 bp, Artificial Sequence
  Description of Artificial Sequence: Synthetic oligonucleotide
tggtcctcaggggcccaa

SEQ ID NO: 9443 - DNA, 18 bp, Artificial Sequence
  Description of Artificial Sequence: Synthetic oligonucleotide
catcttggtcctcagggg

SEQ ID NO: 9444 - DNA, 18 bp, Artificial Sequence
  Description of Artificial Sequence: Synthetic oligonucleotide
cttgtcatcttggtcctc

SEQ ID NO: 9445 - DNA, 18 bp, Artificial Sequence
  Description of Artificial Sequence: Synthetic oligonucleotide
ccatccttgtcatcttgg

SEQ ID NO: 9446 - DNA, 18 bp, Artificial Sequence
  Description of Artificial Sequence: Synthetic oligonucleotide
ccccaccatccttgtcat

SEQ ID NO: 9447 - DNA, 18 bp, Artificial Sequence
  Description of Artificial Sequence: Synthetic oligonucleotide
gaagtccccaccatcctt

SEQ ID NO: 9448 - DNA, 18 bp, Artificial Sequence
  Description of Artificial Sequence: Synthetic oligonucleotide
ccactgaagtccccacca

SEQ ID NO: 9449 - DNA, 18 bp, Artificial Sequence
  Description of Artificial Sequence: Synthetic oligonucleotide
cagtgccactgaagtccc

SEQ ID NO: 9450 - DNA, 18 bp, Artificial Sequence
  Description of Artificial Sequence: Synthetic oligonucleotide
gcctccagtgccactgaa

SEQ ID NO: 9451 - DNA, 18 bp, Artificial Sequence
  Description of Artificial Sequence: Synthetic oligonucleotide
ggaaggcctccagtgcca

SEQ ID NO: 9452 - DNA, 18 bp, Artificial Sequence
  Description of Artificial Sequence: Synthetic oligonucleotide
agtcgggaaggcctccag

SEQ ID NO: 9453 - DNA, 18 bp, Artificial Sequence
  Description of Artificial Sequence: Synthetic oligonucleotide
tgaatagtcgggaaggcc

SEQ ID NO: 9454 - DNA, 18 bp, Artificial Sequence
  Description of Artificial Sequence: Synthetic oligonucleotide
gcggctgaatagtcggga

SEQ ID NO: 9455 - DNA, 18 bp, Artificial Sequence
  Description of Artificial Sequence: Synthetic oligonucleotide
ggttggcggctgaatagt

SEQ ID NO: 9456 - DNA, 18 bp, Artificial Sequence
  Description of Artificial Sequence: Synthetic oligonucleotide
aatggggttggcggctga

SEQ ID NO: 9457 - DNA, 18 bp, Artificial Sequence
  Description of Artificial Sequence: Synthetic oligonucleotide
actttaatggggttggcg

SEQ ID NO: 9458 - DNA, 18 bp, Artificial Sequence
  Description of Artificial Sequence: Synthetic oligonucleotide
gtgtcactttaatggggt

SEQ ID NO: 9459 - DNA, 18 bp, Artificial Sequence
  Description of Artificial Sequence: Synthetic oligonucleotide
ccgatgtgtcactttaat

SEQ ID NO: 9460 - DNA, 18 bp, Artificial Sequence
  Description of Artificial Sequence: Synthetic oligonucleotide
actcaccgatgtgtcact

SEQ ID NO: 9461 - DNA, 18 bp, Artificial Sequence
  Description of Artificial Sequence: Synthetic oligonucleotide
tggacactcaccgatgtg

SEQ ID NO: 9462 - DNA, 18 bp, Artificial Sequence
  Description of Artificial Sequence: Synthetic oligonucleotide
ccacctggacactcaccg

SEQ ID NO: 9463 - DNA, 18 bp, Artificial Sequence
  Description of Artificial Sequence: Synthetic oligonucleotide
gacttccacctggacact

SEQ ID NO: 9464 - DNA, 18 bp, Artificial Sequence
  Description of Artificial Sequence: Synthetic oligonucleotide
ccctcgacttccacctgg

SEQ ID NO: 9465 - DNA, 18 bp, Artificial Sequence
  Description of Artificial Sequence: Synthetic oligonucleotide
cttcaccctcgacttcca

SEQ ID NO: 9466 - DNA, 18 bp, Artificial Sequence
  Description of Artificial Sequence: Synthetic oligonucleotide
gtccccttcaccctcgac

SEQ ID NO: 9467 - DNA, 18 bp, Artificial Sequence
  Description of Artificial Sequence: Synthetic oligonucleotide
gtcctgtccccttcaccc

SEQ ID NO: 9468 - DNA, 18 bp, Artificial Sequence
  Description of Artificial Sequence: Synthetic oligonucleotide
ggtctgtcctgtcccctt

SEQ ID NO: 9469 - DNA, 18 bp, Artificial Sequence
  Description of Artificial Sequence: Synthetic oligonucleotide
gccgaggtctgtcctgtc

SEQ ID NO: 9470 - DNA, 18 bp, Artificial Sequence
  Description of Artificial Sequence: Synthetic oligonucleotide
cccttgccgaggtctgtc

SEQ ID NO: 9471 - DNA, 18 bp, Artificial Sequence
  Description of Artificial Sequence: Synthetic oligonucleotide
ggaagcccttgccgaggt

SEQ ID NO: 9472 - DNA, 18 bp, Artificial Sequence
  Description of Artificial Sequence: Synthetic oligonucleotide
gtgtgggaagcccttgcc

SEQ ID NO: 9473 - DNA, 18 bp, Artificial Sequence
  Description of Artificial Sequence: Synthetic oligonucleotide
aagaggtgtgggaagccc

SEQ ID NO: 9474 - DNA, 18 bp, Artificial Sequence
  Description of Artificial Sequence: Synthetic oligonucleotide
tgcccaagaggtgtggga

SEQ ID NO: 9475 - DNA, 18 bp, Artificial Sequence
  Description of Artificial Sequence: Synthetic oligonucleotide
ccaggtgcccaagaggtg

SEQ ID NO: 9476 - DNA, 18 bp, Artificial Sequence
  Description of Artificial Sequence: Synthetic oligonucleotide
gcagcccaggtgcccaag

SEQ ID NO: 9477 - DNA, 18 bp, Artificial Sequence
  Description of Artificial Sequence: Synthetic oligonucleotide
ggggagcagcccaggtgc

SEQ ID NO: 9478 - DNA, 18 bp, Artificial Sequence
  Description of Artificial Sequence: Synthetic oligonucleotide
tggagggggagcagccca

SEQ ID NO: 9479 - DNA, 18 bp, Artificial Sequence
  Description of Artificial Sequence: Synthetic oligonucleotide
ggtggtggagggggagca

SEQ ID NO: 9480 - DNA, 18 bp, Artificial Sequence
  Description of Artificial Sequence: Synthetic oligonucleotide
tcggaggtggtggagggg

SEQ ID NO: 9481 - DNA, 18 bp, Artificial Sequence
  Description of Artificial Sequence: Synthetic oligonucleotide
gtggctcggaggtggtgg

SEQ ID NO: 9482 - DNA, 18 bp, Artificial Sequence
  Description of Artificial Sequence: Synthetic oligonucleotide
cacgtgtggctcggaggt

SEQ ID NO: 9483 - DNA, 18 bp, Artificial Sequence
  Description of Artificial Sequence: Synthetic oligonucleotide
gcacagtgcgcagcgagc

SEQ ID NO: 9484 - DNA, 18 bp, Artificial Sequence
  Description of Artificial Sequence: Synthetic oligonucleotide
acgcggcacagtgcgcag

SEQ ID NO: 9485 - DNA, 18 bp, Artificial Sequence
  Description of Artificial Sequence: Synthetic oligonucleotide
agaagacgcggcacagtg

SEQ ID NO: 9486 - DNA, 18 bp, Artificial Sequence
  Description of Artificial Sequence: Synthetic oligonucleotide
ccagcagaagacgcggca

SEQ ID NO: 9487 - DNA, 18 bp, Artificial Sequence
  Description of Artificial Sequence: Synthetic oligonucleotide
tccccccagcagaagacg

SEQ ID NO: 9488 - DNA, 18 bp, Artificial Sequence
  Description of Artificial Sequence: Synthetic oligonucleotide
acgcttccccccagcaga

SEQ ID NO: 9489 - DNA, 18 bp, Artificial Sequence
  Description of Artificial Sequence: Synthetic oligonucleotide
gactgacgcttcccccca

SEQ ID NO: 9490 - DNA, 18 bp, Artificial Sequence
  Description of Artificial Sequence: Synthetic oligonucleotide
ccgtggactgacgcttcc

SEQ ID NO: 9491 - DNA, 18 bp, Artificial Sequence
  Description of Artificial Sequence: Synthetic oligonucleotide
cctcaccgtggactgacg

SEQ ID NO: 9492 - DNA, 18 bp, Artificial Sequence
  Description of Artificial Sequence: Synthetic oligonucleotide
gcgagcctcaccgtggac

SEQ ID NO: 9493 - DNA, 18 bp, Artificial Sequence
  Description of Artificial Sequence: Synthetic oligonucleotide
acgcagcgagcctcaccg

SEQ ID NO: 9494 - DNA, 18 bp, Artificial Sequence
  Description of Artificial Sequence: Synthetic oligonucleotide
acagcacgcagcgagcct

SEQ ID NO: 9495 - DNA, 18 bp, Artificial Sequence
  Description of Artificial Sequence: Synthetic oligonucleotide
aaggcacagcacgcagcg

SEQ ID NO: 9496 - DNA, 18 bp, Artificial Sequence
  Description of Artificial Sequence: Synthetic oligonucleotide
agcagaaggcacagcacg

SEQ ID NO: 9497 - DNA, 18 bp, Artificial Sequence
  Description of Artificial Sequence: Synthetic oligonucleotide
cacccagcagaaggcaca

SEQ ID NO: 9498 - DNA, 18 bp, Artificial Sequence
  Description of Artificial Sequence: Synthetic oligonucleotide
cgcctcacccagcagaag

SEQ ID NO: 9499 - DNA, 18 bp, Artificial Sequence
  Description of Artificial Sequence: Synthetic oligonucleotide
tctgccgcctcacccagc

SEQ ID NO: 9500 - DNA, 18 bp, Artificial Sequence
  Description of Artificial Sequence: Synthetic oligonucleotide
gcccctctgccgcctcac

SEQ ID NO: 9501 - DNA, 18 bp, Artificial Sequence
  Description of Artificial Sequence: Synthetic oligonucleotide
gcacggcccctctgccgc

SEQ ID NO: 9502 - DNA, 18 bp, Artificial Sequence
  Description of Artificial Sequence: Synthetic oligonucleotide
agactgcacggcccctct

SEQ ID NO: 9503 - DNA, 18 bp, Artificial Sequence
  Description of Artificial Sequence: Synthetic oligonucleotide
gtcctagactgcacggcc

SEQ ID NO: 9504 - DNA, 18 bp, Artificial Sequence
  Description of Artificial Sequence: Synthetic oligonucleotide
cacatgtcctagactgca

SEQ ID NO: 9505 - DNA, 18 bp, Artificial Sequence
  Description of Artificial Sequence: Synthetic oligonucleotide
tagggcacatgtcctaga

SEQ ID NO: 9506 - DNA, 18 bp, Artificial Sequence
  Description of Artificial Sequence: Synthetic oligonucleotide
cctcatagggcacatgtc

SEQ ID NO: 9507 - DNA, 18 bp, Artificial Sequence
  Description of Artificial Sequence: Synthetic oligonucleotide
ctgcccctcatagggcac

SEQ ID NO: 9508 - DNA, 18 bp, Artificial Sequence
  Description of Artificial Sequence: Synthetic oligonucleotide
ggaagctgcccctcatag

SEQ ID NO: 9509 - DNA, 18 bp, Artificial Sequence
  Description of Artificial Sequence: Synthetic oligonucleotide
gggaaggaagctgcccct

SEQ ID NO: 9510 - DNA, 18 bp, Artificial Sequence
  Description of Artificial Sequence: Synthetic oligonucleotide
ggggagggaaggaagctg

SEQ ID NO: 9511 - DNA, 18 bp, Artificial Sequence
  Description of Artificial Sequence: Synthetic oligonucleotide
tgagtggggagggaagga

SEQ ID NO: 9512 - DNA, 18 bp, Artificial Sequence
  Description of Artificial Sequence: Synthetic oligonucleotide
gtaactgagtggggaggg

SEQ ID NO: 9513 - DNA, 18 bp, Artificial Sequence
  Description of Artificial Sequence: Synthetic oligonucleotide
caagggtaactgagtggg

SEQ ID NO: 9514 - DNA, 18 bp, Artificial Sequence
  Description of Artificial Sequence: Synthetic oligonucleotide
tcgaggggcccattcctc

SEQ ID NO: 9515 - DNA, 18 bp, Artificial Sequence
  Description of Artificial Sequence: Synthetic oligonucleotide
ccacttcgaggggcccat

SEQ ID NO: 9516 - DNA, 18 bp, Artificial Sequence
  Description of Artificial Sequence: Synthetic oligonucleotide
ccggcccacttcgagggg

SEQ ID NO: 9517 - DNA, 18 bp, Artificial Sequence
  Description of Artificial Sequence: Synthetic oligonucleotide
ccggcccggcccacttcg

SEQ ID NO: 9518 - DNA, 18 bp, Artificial Sequence
  Description of Artificial Sequence: Synthetic oligonucleotide
tggggccggcccggccca

SEQ ID NO: 9519 - DNA, 18 bp, Artificial Sequence
  Description of Artificial Sequence: Synthetic oligonucleotide
gcaggtggggccggcccg

SEQ ID NO: 9520 - DNA, 18 bp, Artificial Sequence
  Description of Artificial Sequence: Synthetic oligonucleotide
cagaggcaggtggggccg

SEQ ID NO: 9521 - DNA, 18 bp, Artificial Sequence
  Description of Artificial Sequence: Synthetic oligonucleotide
ctgggcagaggcaggtgg

SEQ ID NO: 9522 - DNA, 18 bp, Artificial Sequence
  Description of Artificial Sequence: Synthetic oligonucleotide
caaatctgggcagaggca

SEQ ID NO: 9523 - DNA, 18 bp, Artificial Sequence
  Description of Artificial Sequence: Synthetic oligonucleotide
gagggcaaatctgggcag

SEQ ID NO: 9524 - DNA, 18 bp, Artificial Sequence
  Description of Artificial Sequence: Synthetic oligonucleotide
aggaggagggcaaatctg

SEQ ID NO: 9525 - DNA, 18 bp, Artificial Sequence
  Description of Artificial Sequence: Synthetic oligonucleotide
agagcaggaggagggcaa

SEQ ID NO: 9526 - DNA, 18 bp, Artificial Sequence
  Description of Artificial Sequence: Synthetic oligonucleotide
tgggcagagcaggaggag

SEQ ID NO: 9527 - DNA, 18 bp, Artificial Sequence
  Description of Artificial Sequence: Synthetic oligonucleotide
cctcctgggcagagcagg

SEQ ID NO: 9528 - DNA, 18 bp, Artificial Sequence
  Description of Artificial Sequence: Synthetic oligonucleotide
cgccacctcctgggcaga

SEQ ID NO: 9529 - DNA, 18 bp, Artificial Sequence
  Description of Artificial Sequence: Synthetic oligonucleotide
ctggacgccacctcctgg

SEQ ID NO: 9530 - DNA, 18 bp, Artificial Sequence
  Description of Artificial Sequence: Synthetic oligonucleotide
gactgctggacgccacct

SEQ ID NO: 9531 - DNA, 18 bp, Artificial Sequence
  Description of Artificial Sequence: Synthetic oligonucleotide
gcctggactgctggacgc

SEQ ID NO: 9532 - DNA, 18 bp, Artificial Sequence
  Description of Artificial Sequence: Synthetic oligonucleotide
gccctgcctggactgctg

SEQ ID NO: 9533 - DNA, 18 bp, Artificial Sequence
  Description of Artificial Sequence: Synthetic oligonucleotide
cccatgccctgcctggac

SEQ ID NO: 9534 - DNA, 18 bp, Artificial Sequence
  Description of Artificial Sequence: Synthetic oligonucleotide
cccaccccatgccctgcc

SEQ ID NO: 9535 - DNA, 18 bp, Artificial Sequence
  Description of Artificial Sequence: Synthetic oligonucleotide
ggggccccaccccatgcc

SEQ ID NO: 9536 - DNA, 18 bp, Artificial Sequence
  Description of Artificial Sequence: Synthetic oligonucleotide
cctgcggggccccacccc

SEQ ID NO: 9537 - DNA, 18 bp, Artificial Sequence
  Description of Artificial Sequence: Synthetic oligonucleotide
gagggcctgcggggcccc

SEQ ID NO: 9538 - DNA, 18 bp, Artificial Sequence
  Description of Artificial Sequence: Synthetic oligonucleotide
caggggagggcctgcggg

SEQ ID NO: 9539 - DNA, 18 bp, Artificial Sequence
  Description of Artificial Sequence: Synthetic oligonucleotide
aggcacaggggagggcct

SEQ ID NO: 9540 - DNA, 18 bp, Artificial Sequence
  Description of Artificial Sequence: Synthetic oligonucleotide
aagggaggcacaggggag

SEQ ID NO: 9541 - DNA, 18 bp, Artificial Sequence
  Description of Artificial Sequence: Synthetic oligonucleotide
tgcagaagggaggcacag

SEQ ID NO: 9542 - DNA, 18 bp, Artificial Sequence
  Description of Artificial Sequence: Synthetic oligonucleotide
cagcatgcagaagggagg

SEQ ID NO: 9543 - DNA, 18 bp, Artificial Sequence
  Description of Artificial Sequence: Synthetic oligonucleotide
agcatcagcatgcagaag

SEQ ID NO: 9544 - DNA, 18 bp, Artificial Sequence
  Description of Artificial Sequence: Synthetic oligonucleotide
cccccagcatcagcatgc

SEQ ID NO: 9545 - DNA, 18 bp, Artificial Sequence
  Description of Artificial Sequence: Synthetic oligonucleotide
ccctgcccccagcatcag

SEQ ID NO: 9546 - DNA, 18 bp, Artificial Sequence
  Description of Artificial Sequence: Synthetic oligonucleotide
caccaccctgcccccagc

SEQ ID NO: 9547 - DNA, 18 bp, Artificial Sequence
  Description of Artificial Sequence: Synthetic oligonucleotide
cgctccaccaccctgccc

SEQ ID NO: 9548 - DNA, 18 bp, Artificial Sequence
  Description of Artificial Sequence: Synthetic oligonucleotide
caccccgctccaccaccc

SEQ ID NO: 9549 - DNA, 18 bp, Artificial Sequence
  Description of Artificial Sequence: Synthetic oligonucleotide
ccctgcaccccgctccac

SEQ ID NO: 9550 - DNA, 18 bp, Artificial Sequence
  Description of Artificial Sequence: Synthetic oligonucleotide
ctgccccctgcaccccgc

SEQ ID NO: 9551 - DNA, 18 bp, Artificial Sequence
  Description of Artificial Sequence: Synthetic oligonucleotide
tagtcctgccccctgcac

SEQ ID NO: 9552 - DNA, 18 bp, Artificial Sequence
  Description of Artificial Sequence: Synthetic oligonucleotide
gcaattagtcctgccccc

SEQ ID NO: 9553 - DNA, 18 bp, Artificial Sequence
  Description of Artificial Sequence: Synthetic oligonucleotide
cagatgcaattagtcctg

SEQ ID NO: 9554 - DNA, 18 bp, Artificial Sequence
  Description of Artificial Sequence: Synthetic oligonucleotide
agggacagatgcaattag

SEQ ID NO: 9555 - DNA, 18 bp, Artificial Sequence
  Description of Artificial Sequence: Synthetic oligonucleotide
ctcccaggctggtaacat

SEQ ID NO: 9556 - DNA, 18 bp, Artificial Sequence
  Description of Artificial Sequence: Synthetic oligonucleotide
caaatctcccaggctggt

SEQ ID NO: 9557 - DNA, 18 bp, Artificial Sequence
  Description of Artificial Sequence: Synthetic oligonucleotide
tccagcaaatctcccagg

SEQ ID NO: 9558 - DNA, 18 bp, Artificial Sequence
  Description of Artificial Sequence: Synthetic oligonucleotide
tctgttccagcaaatctc

SEQ ID NO: 9559 - DNA, 18 bp, Artificial Sequence
  Description of Artificial Sequence: Synthetic oligonucleotide
ccaaatctgttccagcaa

SEQ ID NO: 9560 - DNA, 18 bp, Artificial Sequence
  Description of Artificial Sequence: Synthetic oligonucleotide
cacatccaaatctgttcc

SEQ ID NO: 9561 - DNA, 18 bp, Artificial Sequence
  Description of Artificial Sequence: Synthetic oligonucleotide
atgaacacatccaaatct

SEQ ID NO: 9562 - DNA, 18 bp, Artificial Sequence
  Description of Artificial Sequence: Synthetic oligonucleotide
agattatgaacacatcca

SEQ ID NO: 9563 - DNA, 18 bp, Artificial Sequence
  Description of Artificial Sequence: Synthetic oligonucleotide
caataagattatgaacac

SEQ ID NO: 9564 - DNA, 18 bp, Artificial Sequence
  Description of Artificial Sequence: Synthetic oligonucleotide
tcttacaataagattatg

SEQ ID NO: 9565 - DNA, 18 bp, Artificial Sequence
  Description of Artificial Sequence: Synthetic oligonucleotide
aggcatcttacaataaga

SEQ ID NO: 9566 - DNA, 18 bp, Artificial Sequence
  Description of Artificial Sequence: Synthetic oligonucleotide
tgagaaggcatcttacaa

SEQ ID NO: 9567 - DNA, 18 bp, Artificial Sequence
  Description of Artificial Sequence: Synthetic oligonucleotide
aaaactgagaaggcatct

SEQ ID NO: 9568 - DNA, 18 bp, Artificial Sequence
  Description of Artificial Sequence: Synthetic oligonucleotide
agatcaaaactgagaagg

SEQ ID NO: 9569 - DNA, 18 bp, Artificial Sequence
  Description of Artificial Sequence: Synthetic oligonucleotide
taatgagatcaaaactga

SEQ ID NO: 9570 - DNA, 18 bp, Artificial Sequence
  Description of Artificial Sequence: Synthetic oligonucleotide
aaaattaatgagatcaaa

SEQ ID NO: 9571 - DNA, 18 bp, Artificial Sequence
  Description of Artificial Sequence: Synthetic oligonucleotide
tcttaaaaattaatgaga

SEQ ID NO: 9572 - DNA, 18 bp, Artificial Sequence
  Description of Artificial Sequence: Synthetic oligonucleotide
aattttcttaaaaattaa

SEQ ID NO: 9573 - DNA, 18 bp, Artificial Sequence
  Description of Artificial Sequence: Synthetic oligonucleotide
tttccaattttcttaaaa

SEQ ID NO: 9574 - DNA, 18 bp, Artificial Sequence
  Description of Artificial Sequence: Synthetic oligonucleotide
gacaatttccaattttct

SEQ ID NO: 9575 - DNA, 18 bp, Artificial Sequence
  Description of Artificial Sequence: Synthetic oligonucleotide
atttggacaatttccaat

SEQ ID NO: 9576 - DNA, 18 bp, Artificial Sequence
  Description of Artificial Sequence: Synthetic oligonucleotide
accacatttggacaattt

SEQ ID NO: 9577 - DNA, 18 bp, Artificial Sequence
  Description of Artificial Sequence: Synthetic oligonucleotide
agacaaccacatttggac

SEQ ID NO: 9578 - DNA, 18 bp, Artificial Sequence
  Description of Artificial Sequence: Synthetic oligonucleotide
ccagcagacaaccacatt

SEQ ID NO: 9579 - DNA, 18 bp, Artificial Sequence
  Description of Artificial Sequence: Synthetic oligonucleotide
gaaaaccagcagacaacc

SEQ ID NO: 9580 - DNA, 18 bp, Artificial Sequence
  Description of Artificial Sequence: Synthetic oligonucleotide
cttctgaaaaccagcaga

SEQ ID NO: 9581 - DNA, 18 bp, Artificial Sequence
  Description of Artificial Sequence: Synthetic oligonucleotide
ttttacttctgaaaacca

SEQ ID NO: 9582 - DNA, 18 bp, Artificial Sequence
  Description of Artificial Sequence: Synthetic oligonucleotide
caatgttttacttctgaa

SEQ ID NO: 9583 - DNA, 18 bp, Artificial Sequence
  Description of Artificial Sequence: Synthetic oligonucleotide
gtcagcaatgttttactt

SEQ ID NO: 9584 - DNA, 18 bp, Artificial Sequence
  Description of Artificial Sequence: Synthetic oligonucleotide
tctaagtcagcaatgttt

SEQ ID NO: 9585 - DNA, 18 bp, Artificial Sequence
  Description of Artificial Sequence: Synthetic oligonucleotide
tcttgtctaagtcagcaa

SEQ ID NO: 9586 - DNA, 18 bp, Artificial Sequence
  Description of Artificial Sequence: Synthetic oligonucleotide
ggtcttcttgtctaagtc

SEQ ID NO: 9587 - DNA, 18 bp, Artificial Sequence
  Description of Artificial Sequence: Synthetic oligonucleotide
gggagcactgctaagcca

SEQ ID NO: 9588 - DNA, 18 bp, Artificial Sequence
  Description of Artificial Sequence: Synthetic oligonucleotide
atccggggagcactgcta

SEQ ID NO: 9589 - DNA, 18 bp, Artificial Sequence
  Description of Artificial Sequence: Synthetic oligonucleotide
gagacatccggggagcac

SEQ ID NO: 9590 - DNA, 18 bp, Artificial Sequence
  Description of Artificial Sequence: Synthetic oligonucleotide
ctggggagacatccgggg

SEQ ID NO: 9591 - DNA, 18 bp, Artificial Sequence
  Description of Artificial Sequence: Synthetic oligonucleotide
ggacactggggagacatc

SEQ ID NO: 9592 - DNA, 18 bp, Artificial Sequence
  Description of Artificial Sequence: Synthetic oligonucleotide
cccacggacactggggag

SEQ ID NO: 9593 - DNA, 18 bp, Artificial Sequence
  Description of Artificial Sequence: Synthetic oligonucleotide
acgcccccacggacactg

SEQ ID NO: 9594 - DNA, 18 bp, Artificial Sequence
  Description of Artificial Sequence: Synthetic oligonucleotide
ggcccacgcccccacgga

SEQ ID NO: 9595 - DNA, 18 bp, Artificial Sequence
  Description of Artificial Sequence: Synthetic oligonucleotide
cccccggcccacgccccc

SEQ ID NO: 9596 - DNA, 18 bp, Artificial Sequence
  Description of Artificial Sequence: Synthetic oligonucleotide
aagaccccccggcccacg

SEQ ID NO: 9597 - DNA, 18 bp, Artificial Sequence
  Description of Artificial Sequence: Synthetic oligonucleotide
cgtgcaagaccccccggc

SEQ ID NO: 9598 - DNA, 18 bp, Artificial Sequence
  Description of Artificial Sequence: Synthetic oligonucleotide
ggggacgtgcaagacccc

SEQ ID NO: 9599 - DNA, 18 bp, Artificial Sequence
  Description of Artificial Sequence: Synthetic oligonucleotide
cccgcggggacgtgcaag

SEQ ID NO: 9600 - DNA, 18 bp, Artificial Sequence
  Description of Artificial Sequence: Synthetic oligonucleotide
acccgcccgcggggacgt

SEQ ID NO: 9601 - DNA, 18 bp, Artificial Sequence
  Description of Artificial Sequence: Synthetic oligonucleotide
tggacacccgcccgcggg

SEQ ID NO: 9602 - DNA, 18 bp, Artificial Sequence
  Description of Artificial Sequence: Synthetic oligonucleotide
gtgcctggacacccgccc

SEQ ID NO: 9603 - DNA, 18 bp, Artificial Sequence
  Description of Artificial Sequence: Synthetic oligonucleotide
cgccagtgcctggacacc

SEQ ID NO: 9604 - DNA, 18 bp, Artificial Sequence
  Description of Artificial Sequence: Synthetic oligonucleotide
tcgcacgccagtgcctgg

SEQ ID NO: 9605 - DNA, 18 bp, Artificial Sequence
  Description of Artificial Sequence: Synthetic oligonucleotide
gcccgtcgcacgccagtg

SEQ ID NO: 9606 - DNA, 18 bp, Artificial Sequence
  Description of Artificial Sequence: Synthetic oligonucleotide
caaaagcccgtcgcacgc

SEQ ID NO: 9607 - DNA, 18 bp, Artificial Sequence
  Description of Artificial Sequence: Synthetic oligonucleotide
ctgaccaaaagcccgtcg

SEQ ID NO: 9608 - DNA, 18 bp, Artificial Sequence
  Description of Artificial Sequence: Synthetic oligonucleotide
aggacctgaccaaaagcc

SEQ ID NO: 9609 - DNA, 18 bp, Artificial Sequence
  Description of Artificial Sequence: Synthetic oligonucleotide
gtcgaaggacctgaccaa

SEQ ID NO: 9610 - DNA, 18 bp, Artificial Sequence
  Description of Artificial Sequence: Synthetic oligonucleotide
aagaggtcgaaggacctg

SEQ ID NO: 9611 - DNA, 18 bp, Artificial Sequence
  Description of Artificial Sequence: Synthetic oligonucleotide
atacaaagaggtcgaagg

SEQ ID NO: 9612 - DNA, 18 bp, Artificial Sequence
  Description of Artificial Sequence: Synthetic oligonucleotide
ttctgatacaaagaggtc

SEQ ID NO: 9613 - DNA, 18 bp, Artificial Sequence
  Description of Artificial Sequence: Synthetic oligonucleotide
cggagttctgatacaaag

SEQ ID NO: 9614 - DNA, 18 bp, Artificial Sequence
  Description of Artificial Sequence: Synthetic oligonucleotide
gggaccggagttctgata

SEQ ID NO: 9615 - DNA, 18 bp, Artificial Sequence
  Description of Artificial Sequence: Synthetic oligonucleotide
gcggtgggaccggagttc

SEQ ID NO: 9616 - DNA, 18 bp, Artificial Sequence
  Description of Artificial Sequence: Synthetic oligonucleotide
cctgggcggtgggaccgg

SEQ ID NO: 9617 - DNA, 18 bp, Artificial Sequence
  Description of Artificial Sequence: Synthetic oligonucleotide
tgtctcctgggcggtggg

SEQ ID NO: 9618 - DNA, 18 bp, Artificial Sequence
  Description of Artificial Sequence: Synthetic oligonucleotide
tcacgtgtctcctgggcg

SEQ ID NO: 9619 - DNA, 18 bp, Artificial Sequence
  Description of Artificial Sequence: Synthetic oligonucleotide
gcacttcacgtgtctcct

SEQ ID NO: 9620 - DNA, 18 bp, Artificial Sequence
  Description of Artificial Sequence: Synthetic oligonucleotide
tcaacgcacttcacgtgt

SEQ ID NO: 9621 - DNA, 18 bp, Artificial Sequence
  Description of Artificial Sequence: Synthetic oligonucleotide
agcaatcaacgcacttca

SEQ ID NO: 9622 - DNA, 18 bp, Artificial Sequence
  Description of Artificial Sequence: Synthetic oligonucleotide
ttgtgagcaatcaacgca

SEQ ID NO: 9623 - DNA, 18 bp, Artificial Sequence
  Description of Artificial Sequence: Synthetic oligonucleotide
gagttttgtgagcaatca

SEQ ID NO: 9624 - DNA, 18 bp, Artificial Sequence
  Description of Artificial Sequence: Synthetic oligonucleotide
acgcggagttttgtgagc

SEQ ID NO: 9625 - DNA, 18 bp, Artificial Sequence
  Description of Artificial Sequence: Synthetic oligonucleotide
cccgaacgcggagttttg

SEQ ID NO: 9626 - DNA, 18 bp, Artificial Sequence
  Description of Artificial Sequence: Synthetic oligonucleotide
acccccccgaacgcggag

SEQ ID NO: 9627 - DNA, 18 bp, Artificial Sequence
  Description of Artificial Sequence: Synthetic oligonucleotide
gctacacccccccgaacg

SEQ ID NO: 9628 - DNA, 18 bp, Artificial Sequence
  Description of Artificial Sequence: Synthetic oligonucleotide
ggcaggctacaccccccc

SEQ ID NO: 9629 - DNA, 18 bp, Artificial Sequence
  Description of Artificial Sequence: Synthetic oligonucleotide
ctgccggcaggctacacc

SEQ ID NO: 9630 - DNA, 18 bp, Artificial Sequence
  Description of Artificial Sequence: Synthetic oligonucleotide
gcagcctgccggcaggct

SEQ ID NO: 9631 - DNA, 18 bp, Artificial Sequence
  Description of Artificial Sequence: Synthetic oligonucleotide
tttatgcagcctgccggc

SEQ ID NO: 9632 - DNA, 18 bp, Artificial Sequence
  Description of Artificial Sequence: Synthetic oligonucleotide
tggcatttatgcagcctg

SEQ ID NO: 9633 - DNA, 18 bp, Artificial Sequence
  Description of Artificial Sequence: Synthetic oligonucleotide
gagcttggcatttatgca

SEQ ID NO: 9634 - DNA, 18 bp, Artificial Sequence
  Description of Artificial Sequence: Synthetic oligonucleotide
ctagggagcttggcattt

SEQ ID NO: 9635 - DNA, 18 bp, Artificial Sequence
  Description of Artificial Sequence: Synthetic oligonucleotide
ctcccctagggagcttgg

SEQ ID NO: 9636 - DNA, 18 bp, Artificial Sequence
  Description of Artificial Sequence: Synthetic oligonucleotide
ccttcctcccctagggag

SEQ ID NO: 9637 - DNA, 18 bp, Artificial Sequence
  Description of Artificial Sequence: Synthetic oligonucleotide
tgaacccttcctccccta

SEQ ID NO: 9638 - DNA, 18 bp, Artificial Sequence
  Description of Artificial Sequence: Synthetic oligonucleotide
acccatgaacccttcctc

SEQ ID NO: 9639 - DNA, 18 bp, Artificial Sequence
  Description of Artificial Sequence: Synthetic oligonucleotide
tcacgacccatgaaccct

SEQ ID NO: 9640 - DNA, 18 bp, Artificial Sequence
  Description of Artificial Sequence: Synthetic oligonucleotide
gcctttcacgacccatga

SEQ ID NO: 9641 - DNA, 18 bp, Artificial Sequence
  Description of Artificial Sequence: Synthetic oligonucleotide
ctagcgcctttcacgacc

SEQ ID NO: 9642 - DNA, 18 bp, Artificial Sequence
  Description of Artificial Sequence: Synthetic oligonucleotide
acacaccaggtgaactga

SEQ ID NO: 9643 - DNA, 18 bp, Artificial Sequence
  Description of Artificial Sequence: Synthetic oligonucleotide
aaggcacacaccaggtga

SEQ ID NO: 9644 - DNA, 18 bp, Artificial Sequence
  Description of Artificial Sequence: Synthetic oligonucleotide
tggcaaaggcacacacca

SEQ ID NO: 9645 - DNA, 18 bp, Artificial Sequence
  Description of Artificial Sequence: Synthetic oligonucleotide
taaggtggcaaaggcaca

SEQ ID NO: 9646 - DNA, 18 bp, Artificial Sequence
  Description of Artificial Sequence: Synthetic oligonucleotide
gttgctaaggtggcaaag

SEQ ID NO: 9647 - DNA, 18 bp, Artificial Sequence
  Description of Artificial Sequence: Synthetic oligonucleotide
tatcggttgctaaggtgg

SEQ ID NO: 9648 - DNA, 18 bp, Artificial Sequence
  Description of Artificial Sequence: Synthetic oligonucleotide
ccgcttatcggttgctaa

SEQ ID NO: 9649 - DNA, 18 bp, Artificial Sequence
  Description of Artificial Sequence: Synthetic oligonucleotide
catacccgcttatcggtt

SEQ ID NO: 9650 - DNA, 18 bp, Artificial Sequence
  Description of Artificial Sequence: Synthetic oligonucleotide
ccttacatacccgcttat

SEQ ID NO: 9651 - DNA, 18 bp, Artificial Sequence
  Description of Artificial Sequence: Synthetic oligonucleotide
cgtttccttacatacccg

SEQ ID NO: 9652 - DNA, 18 bp, Artificial Sequence
  Description of Artificial Sequence: Synthetic oligonucleotide
cataacgtttccttacat

SEQ ID NO: 9653 - DNA, 18 bp, Artificial Sequence
  Description of Artificial Sequence: Synthetic oligonucleotide
ctatgcataacgtttcct

SEQ ID NO: 9654 - DNA, 18 bp, Artificial Sequence
  Description of Artificial Sequence: Synthetic oligonucleotide
tgcctctatgcataacgt

SEQ ID NO: 9655 - DNA, 18 bp, Artificial Sequence
  Description of Artificial Sequence: Synthetic oligonucleotide
gtatttgcctctatgcat

SEQ ID NO: 9656 - DNA, 18 bp, Artificial Sequence
  Description of Artificial Sequence: Synthetic oligonucleotide
cttgtgtatttgcctcta

SEQ ID NO: 9657 - DNA, 18 bp, Artificial Sequence
  Description of Artificial Sequence: Synthetic oligonucleotide
acctgcttgtgtatttgc

SEQ ID NO: 9658 - DNA, 18 bp, Artificial Sequence
  Description of Artificial Sequence: Synthetic oligonucleotide
agtatacctgcttgtgta

SEQ ID NO: 9659 - DNA, 18 bp, Artificial Sequence
  Description of Artificial Sequence: Synthetic oligonucleotide
tgtccagtatacctgctt

SEQ ID NO: 9660 - DNA, 18 bp, Artificial Sequence
  Description of Artificial Sequence: Synthetic oligonucleotide
attcatgtccagtatacc

SEQ ID NO: 9661 - DNA, 18 bp, Artificial Sequence
  Description of Artificial Sequence: Synthetic oligonucleotide
cttatattcatgtccagt

SEQ ID NO: 9662 - DNA, 18 bp, Artificial Sequence
  Description of Artificial Sequence: Synthetic oligonucleotide
tggaacttatattcatgt

SEQ ID NO: 9663 - DNA, 18 bp, Artificial Sequence
  Description of Artificial Sequence: Synthetic oligonucleotide
acccatggaacttatatt

SEQ ID NO: 9664 - DNA, 18 bp, Artificial Sequence
  Description of Artificial Sequence: Synthetic oligonucleotide
cgtgcacccatggaactt

SEQ ID NO: 9665 - DNA, 18 bp, Artificial Sequence
  Description of Artificial Sequence: Synthetic oligonucleotide
tctgacgtgcacccatgg

SEQ ID NO: 9666 - DNA, 18 bp, Artificial Sequence
  Description of Artificial Sequence: Synthetic oligonucleotide
ccacgtctgacgtgcacc

SEQ ID NO: 9667 - DNA, 18 bp, Artificial Sequence
  Description of Artificial Sequence: Synthetic oligonucleotide
taaagccacgtctgacgt

SEQ ID NO: 9668 - DNA, 18 bp, Artificial Sequence
  Description of Artificial Sequence: Synthetic oligonucleotide
gaggataaagccacgtct

SEQ ID NO: 9669 - DNA, 18 bp, Artificial Sequence
  Description of Artificial Sequence: Synthetic oligonucleotide
acaaggaggataaagcca

SEQ ID NO: 9670 - DNA, 18 bp, Artificial Sequence
  Description of Artificial Sequence: Synthetic oligonucleotide
gtggtacaaggaggataa

SEQ ID NO: 9671 - DNA, 18 bp, Artificial Sequence
  Description of Artificial Sequence: Synthetic oligonucleotide
aggcagtggtacaaggag

SEQ ID NO: 9672 - DNA, 18 bp, Artificial Sequence
  Description of Artificial Sequence: Synthetic oligonucleotide
gagataatagcgggttct

SEQ ID NO: 9673 - DNA, 18 bp, Artificial Sequence
  Description of Artificial Sequence: Synthetic oligonucleotide
cagacgagataatagcgg

SEQ ID NO: 9674 - DNA, 18 bp, Artificial Sequence
  Description of Artificial Sequence: Synthetic oligonucleotide
gcctgcagacgagataat

SEQ ID NO: 9675 - DNA, 18 bp, Artificial Sequence
  Description of Artificial Sequence: Synthetic oligonucleotide
gactggcctgcagacgag

SEQ ID NO: 9676 - DNA, 18 bp, Artificial Sequence
  Description of Artificial Sequence: Synthetic oligonucleotide
agtccgactggcctgcag

SEQ ID NO: 9677 - DNA, 18 bp, Artificial Sequence
  Description of Artificial Sequence: Synthetic oligonucleotide
ggaccagtccgactggcc

SEQ ID NO: 9678 - DNA, 18 bp, Artificial Sequence
  Description of Artificial Sequence: Synthetic oligonucleotide
cacccggaccagtccgac

SEQ ID NO: 9679 - DNA, 18 bp, Artificial Sequence
  Description of Artificial Sequence: Synthetic oligonucleotide
caggtcacccggaccagt

SEQ ID NO: 9680 - DNA, 18 bp, Artificial Sequence
  Description of Artificial Sequence: Synthetic oligonucleotide
gtgagcaggtcacccgga

SEQ ID NO: 9681 - DNA, 18 bp, Artificial Sequence
  Description of Artificial Sequence: Synthetic oligonucleotide
agttagtgagcaggtcac

SEQ ID NO: 9682 - DNA, 18 bp, Artificial Sequence
  Description of Artificial Sequence: Synthetic oligonucleotide
gccagagttagtgagcag

SEQ ID NO: 9683 - DNA, 18 bp, Artificial Sequence
  Description of Artificial Sequence: Synthetic oligonucleotide
cagaggccagagttagtg

SEQ ID NO: 9684 - DNA, 18 bp, Artificial Sequence
  Description of Artificial Sequence: Synthetic oligonucleotide
agaagcagaggccagagt

SEQ ID NO: 9685 - DNA, 18 bp, Artificial Sequence
  Description of Artificial Sequence: Synthetic oligonucleotide
gaaagagaagcagaggcc

SEQ ID NO: 9686 - DNA, 18 bp, Artificial Sequence
  Description of Artificial Sequence: Synthetic oligonucleotide
caaaggaaagagaagcag

SEQ ID NO: 9687 - DNA, 18 bp, Artificial Sequence
  Description of Artificial Sequence: Synthetic oligonucleotide
caacacaaaggaaagaga

SEQ ID NO: 9688 - DNA, 18 bp, Artificial Sequence
  Description of Artificial Sequence: Synthetic oligonucleotide
tacagcaacacaaaggaa

SEQ ID NO: 9689 - DNA, 18 bp, Artificial Sequence
  Description of Artificial Sequence: Synthetic oligonucleotide
ggggctacagcaacacaa

SEQ ID NO: 9690 - DNA, 18 bp, Artificial Sequence
  Description of Artificial Sequence: Synthetic oligonucleotide
agccgggggctacagcaa

SEQ ID NO: 9691 - DNA, 18 bp, Artificial Sequence
  Description of Artificial Sequence: Synthetic oligonucleotide
agtggagccgggggctac

SEQ ID NO: 9692 - DNA, 18 bp, Artificial Sequence
  Description of Artificial Sequence: Synthetic oligonucleotide
aactcagtggagccgggg

SEQ ID NO: 9693 - DNA, 18 bp, Artificial Sequence
  Description of Artificial Sequence: Synthetic oligonucleotide
gccttaactcagtggagc

SEQ ID NO: 9694 - DNA, 18 bp, Artificial Sequence
  Description of Artificial Sequence: Synthetic oligonucleotide
agtgtgccttaactcagt

SEQ ID NO: 9695 - DNA, 18 bp, Artificial Sequence
  Description of Artificial Sequence: Synthetic oligonucleotide
gactaagtgtgccttaac

SEQ ID NO: 9696 - DNA, 18 bp, Artificial Sequence
  Description of Artificial Sequence: Synthetic oligonucleotide
acctggactaagtgtgcc

SEQ ID NO: 9697 - DNA, 18 bp, Artificial Sequence
  Description of Artificial Sequence: Synthetic oligonucleotide
taactacctggactaagt

SEQ ID NO: 9698 - DNA, 18 bp, Artificial Sequence
  Description of Artificial Sequence: Synthetic oligonucleotide
ctttgtaactacctggac

SEQ ID NO: 9699 - DNA, 18 bp, Artificial Sequence
  Description of Artificial Sequence: Synthetic oligonucleotide
gagagctttgtaactacc

SEQ ID NO: 9700 - DNA, 18 bp, Artificial Sequence
  Description of Artificial Sequence: Synthetic oligonucleotide
tgtaggagagctttgtaa

SEQ ID NO: 9701 - DNA, 18 bp, Artificial Sequence
  Description of Artificial Sequence: Synthetic oligonucleotide
aatgttgtaggagagctt

SEQ ID NO: 9702 - DNA, 18 bp, Artificial Sequence
  Description of Artificial Sequence: Synthetic oligonucleotide
agagaaatgttgtaggag

SEQ ID NO: 9703 - DNA, 18 bp, Artificial Sequence
  Description of Artificial Sequence: Synthetic oligonucleotide
aagtaagagaaatgttgt

SEQ ID NO: 9704 - DNA, 18 bp, Artificial Sequence
  Description of Artificial Sequence: Synthetic oligonucleotide
gaaccaagtaagagaaat

SEQ ID NO: 9705 - DNA, 18 bp, Artificial Sequence
  Description of Artificial Sequence: Synthetic oligonucleotide
ttttggaaccaagtaaga

SEQ ID NO: 9706 - DNA, 18 bp, Artificial Sequence
  Description of Artificial Sequence: Synthetic oligonucleotide
gactgttttggaaccaag

SEQ ID NO: 9707 - DNA, 18 bp, Artificial Sequence
  Description of Artificial Sequence: Synthetic oligonucleotide
cactggactgttttggaa

SEQ ID NO: 9708 - DNA, 18 bp, Artificial Sequence
  Description of Artificial Sequence: Synthetic oligonucleotide
taccccactggactgttt

SEQ ID NO: 9709 - DNA, 18 bp, Artificial Sequence
  Description of Artificial Sequence: Synthetic oligonucleotide
tcccctaccccactggac

SEQ ID NO: 9710 - DNA, 18 bp, Artificial Sequence
  Description of Artificial Sequence: Synthetic oligonucleotide
taacatcccctaccccac

SEQ ID NO: 9711 - DNA, 18 bp, Artificial Sequence
  Description of Artificial Sequence: Synthetic oligonucleotide
ggaaataacatcccctac

SEQ ID NO: 9712 - DNA, 18 bp, Artificial Sequence
  Description of Artificial Sequence: Synthetic oligonucleotide
ttaatggaaataacatcc

SEQ ID NO: 9713 - DNA, 18 bp, Artificial Sequence
  Description of Artificial Sequence: Synthetic oligonucleotide
atcttttaatggaaataa

SEQ ID NO: 9714 - DNA, 18 bp, Artificial Sequence
  Description of Artificial Sequence: Synthetic oligonucleotide
tccccatcttttaatgga

SEQ ID NO: 9715 - DNA, 18 bp, Artificial Sequence
  Description of Artificial Sequence: Synthetic oligonucleotide
ttggctccccatctttta

SEQ ID NO: 9716 - DNA, 18 bp, Artificial Sequence
  Description of Artificial Sequence: Synthetic oligonucleotide
ggcccttggctccccatc

SEQ ID NO: 9717 - DNA, 18 bp, Artificial Sequence
  Description of Artificial Sequence: Synthetic oligonucleotide
cgccaggcccttggctcc

SEQ ID NO: 9718 - DNA, 18 bp, Artificial Sequence
  Description of Artificial Sequence: Synthetic oligonucleotide
cacggcgccaggcccttg

SEQ ID NO: 9719 - DNA, 18 bp, Artificial Sequence
  Description of Artificial Sequence: Synthetic oligonucleotide
tgagccacggcgccaggc

SEQ ID NO: 9720 - DNA, 18 bp, Artificial Sequence
  Description of Artificial Sequence: Synthetic oligonucleotide
attttcaaatccaacctg

SEQ ID NO: 9721 - DNA, 18 bp, Artificial Sequence
  Description of Artificial Sequence: Synthetic oligonucleotide
agaaaattttcaaatcca

SEQ ID NO: 9722 - DNA, 18 bp, Artificial Sequence
  Description of Artificial Sequence: Synthetic oligonucleotide
ctgcaagaaaattttcaa

SEQ ID NO: 9723 - DNA, 18 bp, Artificial Sequence
  Description of Artificial Sequence: Synthetic oligonucleotide
cctacctgcaagaaaatt

SEQ ID NO: 9724 - DNA, 18 bp, Artificial Sequence
  Description of Artificial Sequence: Synthetic oligonucleotide
tataacctacctgcaaga

SEQ ID NO: 9725 - DNA, 18 bp, Artificial Sequence
  Description of Artificial Sequence: Synthetic oligonucleotide
ttgtttataacctacctg

SEQ ID NO: 9726 - DNA, 18 bp, Artificial Sequence
  Description of Artificial Sequence: Synthetic oligonucleotide
cacctttgtttataacct

SEQ ID NO: 9727 - DNA, 18 bp, Artificial Sequence
  Description of Artificial Sequence: Synthetic oligonucleotide
tagatcacctttgtttat

SEQ ID NO: 9728 - DNA, 18 bp, Artificial Sequence
  Description of Artificial Sequence: Synthetic oligonucleotide
tgaaatagatcacctttg

SEQ ID NO: 9729 - DNA, 18 bp, Artificial Sequence
  Description of Artificial Sequence: Synthetic oligonucleotide
tcttttgaaatagatcac

SEQ ID NO: 9730 - DNA, 18 bp, Artificial Sequence
  Description of Artificial Sequence: Synthetic oligonucleotide
tgcaatcttttgaaatag

SEQ ID NO: 9731 - DNA, 18 bp, Artificial Sequence
  Description of Artificial Sequence: Synthetic oligonucleotide
ttttatgcaatcttttga

SEQ ID NO: 9732 - DNA, 18 bp, Artificial Sequence
  Description of Artificial Sequence: Synthetic oligonucleotide
ccaagttttatgcaatct

SEQ ID NO: 9733 - DNA, 18 bp, Artificial Sequence
  Description of Artificial Sequence: Synthetic oligonucleotide
atatcccaagttttatgc

SEQ ID NO: 9734 - DNA, 18 bp, Artificial Sequence
  Description of Artificial Sequence: Synthetic oligonucleotide
ttaaaatatcccaagttt

SEQ ID NO: 9735 - DNA, 18 bp, Artificial Sequence
  Description of Artificial Sequence: Synthetic oligonucleotide
taaaattaaaatatccca

SEQ ID NO: 9736 - DNA, 18 bp, Artificial Sequence
  Description of Artificial Sequence: Synthetic oligonucleotide
ggaattaaaattaaaata

SEQ ID NO: 9737 - DNA, 18 bp, Artificial Sequence
  Description of Artificial Sequence: Synthetic oligonucleotide
attcaggaattaaaatta

SEQ ID NO: 9738 - DNA, 18 bp, Artificial Sequence
  Description of Artificial Sequence: Synthetic oligonucleotide
ataacattcaggaattaa

SEQ ID NO: 9739 - DNA, 18 bp, Artificial Sequence
  Description of Artificial Sequence: Synthetic oligonucleotide
agagaataacattcagga

SEQ ID NO: 9740 - DNA, 18 bp, Artificial Sequence
  Description of Artificial Sequence: Synthetic oligonucleotide
agtaaagagaataacatt

SEQ ID NO: 9741 - DNA, 18 bp, Artificial Sequence
  Description of Artificial Sequence: Synthetic oligonucleotide
tttgaagtaaagagaata

SEQ ID NO: 9742 - DNA, 18 bp, Artificial Sequence
  Description of Artificial Sequence: Synthetic oligonucleotide
taatttttgaagtaaaga

SEQ ID NO: 9743 - DNA, 18 bp, Artificial Sequence
  Description of Artificial Sequence: Synthetic oligonucleotide
aattttaatttttgaagt

SEQ ID NO: 9744 - DNA, 18 bp, Artificial Sequence
  Description of Artificial Sequence: Synthetic oligonucleotide
aaagaaattttaattttt

SEQ ID NO: 9745 - DNA, 18 bp, Artificial Sequence
  Description of Artificial Sequence: Synthetic oligonucleotide
tctaaaaagaaattttaa

SEQ ID NO: 9746 - DNA, 18 bp, Artificial Sequence
  Description of Artificial Sequence: Synthetic oligonucleotide
gcttggacccgaactgtt

SEQ ID NO: 9747 - DNA, 18 bp, Artificial Sequence
  Description of Artificial Sequence: Synthetic oligonucleotide
tccccgcttggacccgaa

SEQ ID NO: 9748 - DNA, 18 bp, Artificial Sequence
  Description of Artificial Sequence: Synthetic oligonucleotide
ctccttccccgcttggac

SEQ ID NO: 9749 - DNA, 18 bp, Artificial Sequence
  Description of Artificial Sequence: Synthetic oligonucleotide
cagagctccttccccgct

SEQ ID NO: 9750 - DNA, 18 bp, Artificial Sequence
  Description of Artificial Sequence: Synthetic oligonucleotide
catcccagagctccttcc

SEQ ID NO: 9751 - DNA, 18 bp, Artificial Sequence
  Description of Artificial Sequence: Synthetic oligonucleotide
gtgcacatcccagagctc

SEQ ID NO: 9752 - DNA, 18 bp, Artificial Sequence
  Description of Artificial Sequence: Synthetic oligonucleotide
aggcagtgcacatcccag

SEQ ID NO: 9753 - DNA, 18 bp, Artificial Sequence
  Description of Artificial Sequence: Synthetic oligonucleotide
cgctcaggcagtgcacat

SEQ ID NO: 9754 - DNA, 18 bp, Artificial Sequence
  Description of Artificial Sequence: Synthetic oligonucleotide
cggttcgctcaggcagtg

SEQ ID NO: 9755 - DNA, 18 bp, Artificial Sequence
  Description of Artificial Sequence: Synthetic oligonucleotide
cttcccggttcgctcagg

SEQ ID NO: 9756 - DNA, 18 bp, Artificial Sequence
  Description of Artificial Sequence: Synthetic oligonucleotide
ccccgcttcccggttcgc

SEQ ID NO: 9757 - DNA, 18 bp, Artificial Sequence
  Description of Artificial Sequence: Synthetic oligonucleotide
gtcctccccgcttcccgg

SEQ ID NO: 9758 - DNA, 18 bp, Artificial Sequence
  Description of Artificial Sequence: Synthetic oligonucleotide
tttcagtcctccccgctt

SEQ ID NO: 9759 - DNA, 18 bp, Artificial Sequence
  Description of Artificial Sequence: Synthetic oligonucleotide
taacttttcagtcctccc

SEQ ID NO: 9760 - DNA, 18 bp, Artificial Sequence
  Description of Artificial Sequence: Synthetic oligonucleotide
tctcttaacttttcagtc

SEQ ID NO: 9761 - DNA, 18 bp, Artificial Sequence
  Description of Artificial Sequence: Synthetic oligonucleotide
atttctctcttaactttt

SEQ ID NO: 9762 - DNA, 18 bp, Artificial Sequence
  Description of Artificial Sequence: Synthetic oligonucleotide
atcacatttctctcttaa

SEQ ID NO: 9763 - DNA, 18 bp, Artificial Sequence
  Description of Artificial Sequence: Synthetic oligonucleotide
cctttatcacatttctct

SEQ ID NO: 9764 - DNA, 18 bp, Artificial Sequence
  Description of Artificial Sequence: Synthetic oligonucleotide
cagcccctttatcacatt

SEQ ID NO: 9765 - DNA, 18 bp, Artificial Sequence
  Description of Artificial Sequence: Synthetic oligonucleotide
gactgcagcccctttatc

SEQ ID NO: 9766 - DNA, 18 bp, Artificial Sequence
  Description of Artificial Sequence: Synthetic oligonucleotide
ctacagactgcagcccct

SEQ ID NO: 9767 - DNA, 18 bp, Artificial Sequence
  Description of Artificial Sequence: Synthetic oligonucleotide
acagactacagactgcag

SEQ ID NO: 9768 - DNA, 18 bp, Artificial Sequence
  Description of Artificial Sequence: Synthetic oligonucleotide
cgcctacagactacagac

SEQ ID NO: 9769 - DNA, 18 bp, Artificial Sequence
  Description of Artificial Sequence: Synthetic oligonucleotide
ttcgacgcctacagacta

SEQ ID NO: 9770 - DNA, 18 bp, Artificial Sequence
  Description of Artificial Sequence: Synthetic oligonucleotide
caaaattcgacgcctaca

SEQ ID NO: 9771 - DNA, 18 bp, Artificial Sequence
  Description of Artificial Sequence: Synthetic oligonucleotide
gaggccaaaattcgacgc

SEQ ID NO: 9772 - DNA, 18 bp, Artificial Sequence
  Description of Artificial Sequence: Synthetic oligonucleotide
aggtggaggccaaaattc

SEQ ID NO: 9773 - DNA, 18 bp, Artificial Sequence
  Description of Artificial Sequence: Synthetic oligonucleotide
tacaaaggtggaggccaa

SEQ ID NO: 9774 - DNA, 18 bp, Artificial Sequence
  Description of Artificial Sequence: Synthetic oligonucleotide
taaactacaaaggtggag

SEQ ID NO: 9775 - DNA, 18 bp, Artificial Sequence
  Description of Artificial Sequence: Synthetic oligonucleotide
gaaactaaactacaaagg

SEQ ID NO: 9776 - DNA, 18 bp, Artificial Sequence
  Description of Artificial Sequence: Synthetic oligonucleotide
ttccagaaactaaactac

SEQ ID NO: 9777 - DNA, 18 bp, Artificial Sequence
  Description of Artificial Sequence: Synthetic oligonucleotide
ccctattccagaaactaa

SEQ ID NO: 9778 - DNA, 18 bp, Artificial Sequence
  Description of Artificial Sequence: Synthetic oligonucleotide
ggacaccctattccagaa

SEQ ID NO: 9779 - DNA, 18 bp, Artificial Sequence
  Description of Artificial Sequence: Synthetic oligonucleotide
gagccggacaccctattc

SEQ ID NO: 9780 - DNA, 18 bp, Artificial Sequence
  Description of Artificial Sequence: Synthetic oligonucleotide
ctgtggagccggacaccc

SEQ ID NO: 9781 - DNA, 18 bp, Artificial Sequence
  Description of Artificial Sequence: Synthetic oligonucleotide
gcagactgtggagccgga

SEQ ID NO: 9782 - DNA, 18 bp, Artificial Sequence
  Description of Artificial Sequence: Synthetic oligonucleotide
ggcgggagcctcggacgc

SEQ ID NO: 9783 - DNA, 18 bp, Artificial Sequence
  Description of Artificial Sequence: Synthetic oligonucleotide
cggggggcgggagcctcg

SEQ ID NO: 9784 - DNA, 18 bp, Artificial Sequence
  Description of Artificial Sequence: Synthetic oligonucleotide
ctcggcggggggcgggag

SEQ ID NO: 9785 - DNA, 18 bp, Artificial Sequence
  Description of Artificial Sequence: Synthetic oligonucleotide
attcgctcggcggggggc

SEQ ID NO: 9786 - DNA, 18 bp, Artificial Sequence
  Description of Artificial Sequence: Synthetic oligonucleotide
gacacattcgctcggcgg

SEQ ID NO: 9787 - DNA, 18 bp, Artificial Sequence
  Description of Artificial Sequence: Synthetic oligonucleotide
ccggggacacattcgctc

SEQ ID NO: 9788 - DNA, 18 bp, Artificial Sequence
  Description of Artificial Sequence: Synthetic oligonucleotide
ggtttccggggacacatt

SEQ ID NO: 9789 - DNA, 18 bp, Artificial Sequence
  Description of Artificial Sequence: Synthetic oligonucleotide
ggacaggtttccggggac

SEQ ID NO: 9790 - DNA, 18 bp, Artificial Sequence
  Description of Artificial Sequence: Synthetic oligonucleotide
gacggggacaggtttccg

SEQ ID NO: 9791 - DNA, 18 bp, Artificial Sequence
  Description of Artificial Sequence: Synthetic oligonucleotide
cgacggacggggacaggt

SEQ ID NO: 9792 - DNA, 18 bp, Artificial Sequence
  Description of Artificial Sequence: Synthetic oligonucleotide
cgccacgacggacgggga

SEQ ID NO: 9793 - DNA, 18 bp, Artificial Sequence
  Description of Artificial Sequence: Synthetic oligonucleotide
cacaacgccacgacggac

SEQ ID NO: 9794 - DNA, 18 bp, Artificial Sequence
  Description of Artificial Sequence: Synthetic oligonucleotide
acgtgcacaacgccacga

SEQ ID NO: 9795 - DNA, 18 bp, Artificial Sequence
  Description of Artificial Sequence: Synthetic oligonucleotide
aggagacgtgcacaacgc

SEQ ID NO: 9796 - DNA, 18 bp, Artificial Sequence
  Description of Artificial Sequence: Synthetic oligonucleotide
gagggaggagacgtgcac

SEQ ID NO: 9797 - DNA, 18 bp, Artificial Sequence
  Description of Artificial Sequence: Synthetic oligonucleotide
ccagggagggaggagacg

SEQ ID NO: 9798 - DNA, 18 bp, Artificial Sequence
  Description of Artificial Sequence: Synthetic oligonucleotide
gcggcccagggagggagg

SEQ ID NO: 9799 - DNA, 18 bp, Artificial Sequence
  Description of Artificial Sequence: Synthetic oligonucleotide
aaccagcggcccagggag

SEQ ID NO: 9800 - DNA, 18 bp, Artificial Sequence
  Description of Artificial Sequence: Synthetic oligonucleotide
cgcgcaaccagcggccca

SEQ ID NO: 9801 - DNA, 18 bp, Artificial Sequence
  Description of Artificial Sequence: Synthetic oligonucleotide
acccgcgcgcaaccagcg

SEQ ID NO: 9802 - DNA, 18 bp, Artificial Sequence
  Description of Artificial Sequence: Synthetic oligonucleotide
tgccgacccgcgcgcaac

SEQ ID NO: 9803 - DNA, 18 bp, Artificial Sequence
  Description of Artificial Sequence: Synthetic oligonucleotide
cctcctgccgacccgcgc

SEQ ID NO: 9804 - DNA, 18 bp, Artificial Sequence
  Description of Artificial Sequence: Synthetic oligonucleotide
ggtatcctcctgccgacc

SEQ ID NO: 9805 - DNA, 18 bp, Artificial Sequence
  Description of Artificial Sequence: Synthetic oligonucleotide
gacggggtatcctcctgc

SEQ ID NO: 9806 - DNA, 18 bp, Artificial Sequence
  Description of Artificial Sequence: Synthetic oligonucleotide
cagaggacggggtatcct

SEQ ID NO: 9807 - DNA, 18 bp, Artificial Sequence
  Description of Artificial Sequence: Synthetic oligonucleotide
aaagtcagaggacggggt

SEQ ID NO: 9808 - DNA, 18 bp, Artificial Sequence
  Description of Artificial Sequence: Synthetic oligonucleotide
gaaccaaagtcagaggac

SEQ ID NO: 9809 - DNA, 18 bp, Artificial Sequence
  Description of Artificial Sequence: Synthetic oligonucleotide
cctccgaaccaaagtcag

SEQ ID NO: 9810 - DNA, 18 bp, Artificial Sequence
  Description of Artificial Sequence: Synthetic oligonucleotide
aggagcctccgaaccaaa

SEQ ID NO: 9811 - DNA, 18 bp, Artificial Sequence
  Description of Artificial Sequence: Synthetic oligonucleotide
gggcgaggagcctccgaa

SEQ ID NO: 9812 - DNA, 18 bp, Artificial Sequence
  Description of Artificial Sequence: Synthetic oligonucleotide
gtggagggcgaggagcct

SEQ ID NO: 9813 - DNA, 18 bp, Artificial Sequence
  Description of Artificial Sequence: Synthetic oligonucleotide
cacaggtggagggcgagg

SEQ ID NO: 9814 - DNA, 18 bp, Artificial Sequence
  Description of Artificial Sequence: Synthetic oligonucleotide
gactacacaggtggaggg

SEQ ID NO: 9815 - DNA, 18 bp, Artificial Sequence
  Description of Artificial Sequence: Synthetic oligonucleotide
cctccgactacacaggtg

SEQ ID NO: 9816 - DNA, 18 bp, Artificial Sequence
  Description of Artificial Sequence: Synthetic oligonucleotide
gcacacctccgactacac

SEQ ID NO: 9817 - DNA, 18 bp, Artificial Sequence
  Description of Artificial Sequence: Synthetic oligonucleotide
gtcgcgcacacctccgac

SEQ ID NO: 9818 - DNA, 18 bp, Artificial Sequence
  Description of Artificial Sequence: Synthetic oligonucleotide
ctgcagtcgcgcacacct

SEQ ID NO: 9819 - DNA, 18 bp, Artificial Sequence
  Description of Artificial Sequence: Synthetic oligonucleotide
cggagctgcagtcgcgca

SEQ ID NO: 9820 - DNA, 18 bp, Artificial Sequence
  Description of Artificial Sequence: Synthetic oligonucleotide
gtagtcggagctgcagtc

SEQ ID NO: 9821 - DNA, 18 bp, Artificial Sequence
  Description of Artificial Sequence: Synthetic oligonucleotide
cccaggtagtcggagctg

SEQ ID NO: 9822 - DNA, 18 bp, Artificial Sequence
  Description of Artificial Sequence: Synthetic oligonucleotide
ctgctcccaggtagtcgg

SEQ ID NO: 9823 - DNA, 18 bp, Artificial Sequence
  Description of Artificial Sequence: Synthetic oligonucleotide
cggaactgctcccaggta

SEQ ID NO: 9824 - DNA, 18 bp, Artificial Sequence
  Description of Artificial Sequence: Synthetic oligonucleotide
gggcgcggaactgctccc

SEQ ID NO: 9825 - DNA, 18 bp, Artificial Sequence
  Description of Artificial Sequence: Synthetic oligonucleotide
gagaggggcgcggaactg

SEQ ID NO: 9826 - DNA, 18 bp, Artificial Sequence
  Description of Artificial Sequence: Synthetic oligonucleotide
gggtggagaggggcgcgg

SEQ ID NO: 9827 - DNA, 18 bp, Artificial Sequence
  Description of Artificial Sequence: Synthetic oligonucleotide
cgcgtgggtggagagggg

SEQ ID NO: 9828 - DNA, 18 bp, Artificial Sequence
  Description of Artificial Sequence: Synthetic oligonucleotide
gggcgcgcgtgggtggag

SEQ ID NO: 9829 - DNA, 18 bp, Artificial Sequence
  Description of Artificial Sequence: Synthetic oligonucleotide
tgggtgggcgcgcgtggg

SEQ ID NO: 9830 - DNA, 18 bp, Artificial Sequence
  Description of Artificial Sequence: Synthetic oligonucleotide
cactgtgggtgggcgcgc

SEQ ID NO: 9831 - DNA, 18 bp, Artificial Sequence
  Description of Artificial Sequence: Synthetic oligonucleotide
cttctcactgtgggtggg

SEQ ID NO: 9832 - DNA, 18 bp, Artificial Sequence
  Description of Artificial Sequence: Synthetic oligonucleotide
gccggcttctcactgtgg

SEQ ID NO: 9833 - DNA, 18 bp, Artificial Sequence
  Description of Artificial Sequence: Synthetic oligonucleotide
ggcccgccggcttctcac

SEQ ID NO: 9834 - DNA, 18 bp, Artificial Sequence
  Description of Artificial Sequence: Synthetic oligonucleotide
accccggcccgccggctt

SEQ ID NO: 9835 - DNA, 18 bp, Artificial Sequence
  Description of Artificial Sequence: Synthetic oligonucleotide
accccaccccggcccgcc

SEQ ID NO: 9836 - DNA, 18 bp, Artificial Sequence
  Description of Artificial Sequence: Synthetic oligonucleotide
tccccaccccaccccggc

SEQ ID NO: 9837 - DNA, 18 bp, Artificial Sequence
  Description of Artificial Sequence: Synthetic oligonucleotide
ttccctccccaccccacc

SEQ ID NO: 9838 - DNA, 18 bp, Artificial Sequence
  Description of Artificial Sequence: Synthetic oligonucleotide
aacccttccctccccacc

SEQ ID NO: 9839 - DNA, 18 bp, Artificial Sequence
  Description of Artificial Sequence: Synthetic oligonucleotide
tgagaaacccttccctcc

SEQ ID NO: 9840 - DNA, 18 bp, Artificial Sequence
  Description of Artificial Sequence: Synthetic oligonucleotide
atccgtgagaaacccttc

SEQ ID NO: 9841 - DNA, 18 bp, Artificial Sequence
  Description of Artificial Sequence: Synthetic oligonucleotide
cgcagatccgtgagaaac

SEQ ID NO: 9842 - DNA, 18 bp, Artificial Sequence
  Description of Artificial Sequence: Synthetic oligonucleotide
gacgccgcagatccgtga

SEQ ID NO: 9843 - DNA, 18 bp, Artificial Sequence
  Description of Artificial Sequence: Synthetic oligonucleotide
atgtggacgccgcagatc

SEQ ID NO: 9844 - DNA, 18 bp, Artificial Sequence
  Description of Artificial Sequence: Synthetic oligonucleotide
ggtgaatgtggacgccgc

SEQ ID NO: 9845 - DNA, 18 bp, Artificial Sequence
  Description of Artificial Sequence: Synthetic oligonucleotide
tcacaggtgaatgtggac

SEQ ID NO: 9846 - DNA, 18 bp, Artificial Sequence
  Description of Artificial Sequence: Synthetic oligonucleotide
cggtctcacaggtgaatg

SEQ ID NO: 9847 - DNA, 18 bp, Artificial Sequence
  Description of Artificial Sequence: Synthetic oligonucleotide
gtccacggtctcacaggt

SEQ ID NO: 9848 - DNA, 18 bp, Artificial Sequence
  Description of Artificial Sequence: Synthetic oligonucleotide
ccagtgtccacggtctca

SEQ ID NO: 9849 - DNA, 18 bp, Artificial Sequence
  Description of Artificial Sequence: Synthetic oligonucleotide
cctcaccagtgtccacgg

SEQ ID NO: 9850 - DNA, 18 bp, Artificial Sequence
  Description of Artificial Sequence: Synthetic oligonucleotide
gctcccctcaccagtgtc

SEQ ID NO: 9851 - DNA, 18 bp, Artificial Sequence
  Description of Artificial Sequence: Synthetic oligonucleotide
tcccagctcccctcacca

SEQ ID NO: 9852 - DNA, 18 bp, Artificial Sequence
  Description of Artificial Sequence: Synthetic oligonucleotide
ggcgatcccagctcccct

SEQ ID NO: 9853 - DNA, 18 bp, Artificial Sequence
  Description of Artificial Sequence: Synthetic oligonucleotide
cgcagggcccggagccgc

SEQ ID NO: 9854 - DNA, 18 bp, Artificial Sequence
  Description of Artificial Sequence: Synthetic oligonucleotide
ccgggcgcagggcccgga

SEQ ID NO: 9855 - DNA, 18 bp, Artificial Sequence
  Description of Artificial Sequence: Synthetic oligonucleotide
ctcggccgggcgcagggc

SEQ ID NO: 9856 - DNA, 18 bp, Artificial Sequence
  Description of Artificial Sequence: Synthetic oligonucleotide
ccgcgctcggccgggcgc

SEQ ID NO: 9857 - DNA, 18 bp, Artificial Sequence
  Description of Artificial Sequence: Synthetic oligonucleotide
ggctaccgcgctcggccg

SEQ ID NO: 9858 - DNA, 18 bp, Artificial Sequence
  Description of Artificial Sequence: Synthetic oligonucleotide
acaaaggctaccgcgctc

SEQ ID NO: 9859 - DNA, 18 bp, Artificial Sequence
  Description of Artificial Sequence: Synthetic oligonucleotide
cgctcacaaaggctaccg

SEQ ID NO: 9860 - DNA, 18 bp, Artificial Sequence
  Description of Artificial Sequence: Synthetic oligonucleotide
gaccccgctcacaaaggc

SEQ ID NO: 9861 - DNA, 18 bp, Artificial Sequence
  Description of Artificial Sequence: Synthetic oligonucleotide
gccaagaccccgctcaca

SEQ ID NO: 9862 - DNA, 18 bp, Artificial Sequence
  Description of Artificial Sequence: Synthetic oligonucleotide
gcaacgccaagaccccgc

SEQ ID NO: 9863 - DNA, 18 bp, Artificial Sequence
  Description of Artificial Sequence: Synthetic oligonucleotide
gcgcagcaacgccaagac

SEQ ID NO: 9864 - DNA, 18 bp, Artificial Sequence
  Description of Artificial Sequence: Synthetic oligonucleotide
gtaatgcgcagcaacgcc

SEQ ID NO: 9865 - DNA, 18 bp, Artificial Sequence
  Description of Artificial Sequence: Synthetic oligonucleotide
agagagtaatgcgcagca

SEQ ID NO: 9866 - DNA, 18 bp, Artificial Sequence
  Description of Artificial Sequence: Synthetic oligonucleotide
ggcggagagagtaatgcg

SEQ ID NO: 9867 - DNA, 18 bp, Artificial Sequence
  Description of Artificial Sequence: Synthetic oligonucleotide
ggcgaggcggagagagta

SEQ ID NO: 9868 - DNA, 18 bp, Artificial Sequence
  Description of Artificial Sequence: Synthetic oligonucleotide
tcttcggcgaggcggaga

SEQ ID NO: 9869 - DNA, 18 bp, Artificial Sequence
  Description of Artificial Sequence: Synthetic oligonucleotide
tccactcttcggcgaggc

SEQ ID NO: 9870 - DNA, 18 bp, Artificial Sequence
  Description of Artificial Sequence: Synthetic oligonucleotide
ctccatccactcttcggc

SEQ ID NO: 9871 - DNA, 18 bp, Artificial Sequence
  Description of Artificial Sequence: Synthetic oligonucleotide
ggagcctccatccactct

SEQ ID NO: 9872 - DNA, 18 bp, Artificial Sequence
  Description of Artificial Sequence: Synthetic oligonucleotide
cccgcggagcctccatcc

SEQ ID NO: 9873 - DNA, 18 bp, Artificial Sequence
  Description of Artificial Sequence: Synthetic oligonucleotide
ttttacccgcggagcctc

SEQ ID NO: 9874 - DNA, 18 bp, Artificial Sequence
  Description of Artificial Sequence: Synthetic oligonucleotide
ggcaattttacccgcgga

SEQ ID NO: 9875 - DNA, 18 bp, Artificial Sequence
  Description of Artificial Sequence: Synthetic oligonucleotide
ttctcggcaattttaccc

SEQ ID NO: 9876 - DNA, 18 bp, Artificial Sequence
  Description of Artificial Sequence: Synthetic oligonucleotide
cctcattctcggcaattt

SEQ ID NO: 9877 - DNA, 18 bp, Artificial Sequence
  Description of Artificial Sequence: Synthetic oligonucleotide
acccacctcattctcggc

SEQ ID NO: 9878 - DNA, 18 bp, Artificial Sequence
  Description of Artificial Sequence: Synthetic oligonucleotide
ggatgacccacctcattc

SEQ ID NO: 9879 - DNA, 18 bp, Artificial Sequence
  Description of Artificial Sequence: Synthetic oligonucleotide
ctctcggatgacccacct

SEQ ID NO: 9880 - DNA, 18 bp, Artificial Sequence
  Description of Artificial Sequence: Synthetic oligonucleotide
atcccctctcggatgacc

SEQ ID NO: 9881 - DNA, 18 bp, Artificial Sequence
  Description of Artificial Sequence: Synthetic oligonucleotide
ttccaatcccctctcgga

SEQ ID NO: 9882 - DNA, 18 bp, Artificial Sequence
  Description of Artificial Sequence: Synthetic oligonucleotide
atggattccaatcccctc

SEQ ID NO: 9883 - DNA, 18 bp, Artificial Sequence
  Description of Artificial Sequence: Synthetic oligonucleotide
cctggatggattccaatc

SEQ ID NO: 9884 - DNA, 18 bp, Artificial Sequence
  Description of Artificial Sequence: Synthetic oligonucleotide
aaaagcctggatggattc

SEQ ID NO: 9885 - DNA, 18 bp, Artificial Sequence
  Description of Artificial Sequence: Synthetic oligonucleotide
gtcggaaaagcctggatg

SEQ ID NO: 9886 - DNA, 18 bp, Artificial Sequence
  Description of Artificial Sequence: Synthetic oligonucleotide
ttagagtcggaaaagcct

SEQ ID NO: 9887 - DNA, 18 bp, Artificial Sequence
  Description of Artificial Sequence: Synthetic oligonucleotide
aggccttagagtcggaaa

SEQ ID NO: 9888 - DNA, 18 bp, Artificial Sequence
  Description of Artificial Sequence: Synthetic oligonucleotide
actgcaggccttagagtc

SEQ ID NO: 9889 - DNA, 18 bp, Artificial Sequence
  Description of Artificial Sequence: Synthetic oligonucleotide
gttttactgcaggcctta

SEQ ID NO: 9890 - DNA, 18 bp, Artificial Sequence
  Description of Artificial Sequence: Synthetic oligonucleotide
cagaggttttactgcagg

SEQ ID NO: 9891 - DNA, 18 bp, Artificial Sequence
  Description of Artificial Sequence: Synthetic oligonucleotide
cactgcagaggttttact

SEQ ID NO: 9892 - DNA, 18 bp, Artificial Sequence
  Description of Artificial Sequence: Synthetic oligonucleotide
cttgacactgcagaggtt

SEQ ID NO: 9893 - DNA, 18 bp, Artificial Sequence
  Description of Artificial Sequence: Synthetic oligonucleotide
ttgcacttgacactgcag

SEQ ID NO: 9894 - DNA, 18 bp, Artificial Sequence
  Description of Artificial Sequence: Synthetic oligonucleotide
tccatttgcacttgacac

SEQ ID NO: 9895 - DNA, 18 bp, Artificial Sequence
  Description of Artificial Sequence: Synthetic oligonucleotide
ccatctccatttgcactt

SEQ ID NO: 9896 - DNA, 18 bp, Artificial Sequence
  Description of Artificial Sequence: Synthetic oligonucleotide
gggcgccatctccatttg

SEQ ID NO: 9897 - DNA, 18 bp, Artificial Sequence
  Description of Artificial Sequence: Synthetic oligonucleotide
gcctagggcgccatctcc

SEQ ID NO: 9898 - DNA, 18 bp, Artificial Sequence
  Description of Artificial Sequence: Synthetic oligonucleotide
gtgatgcctagggcgcca

SEQ ID NO: 9899 - DNA, 18 bp, Artificial Sequence
  Description of Artificial Sequence: Synthetic oligonucleotide
aaagcgtgatgcctaggg

SEQ ID NO: 9900 - DNA, 18 bp, Artificial Sequence
  Description of Artificial Sequence: Synthetic oligonucleotide
cagggaaaggccacaccg

SEQ ID NO: 9901 - DNA, 18 bp, Artificial Sequence
  Description of Artificial Sequence: Synthetic oligonucleotide
ttgcccagggaaaggcca

SEQ ID NO: 9902 - DNA, 18 bp, Artificial Sequence
  Description of Artificial Sequence: Synthetic oligonucleotide
gacgcttgcccagggaaa

SEQ ID NO: 9903 - DNA, 18 bp, Artificial Sequence
  Description of Artificial Sequence: Synthetic oligonucleotide
atcaagacgcttgcccag

SEQ ID NO: 9904 - DNA, 18 bp, Artificial Sequence
  Description of Artificial Sequence: Synthetic oligonucleotide
cccgcatcaagacgcttg

SEQ ID NO: 9905 - DNA, 18 bp, Artificial Sequence
  Description of Artificial Sequence: Synthetic oligonucleotide
ctgggcccgcatcaagac

SEQ ID NO: 9906 - DNA, 18 bp, Artificial Sequence
  Description of Artificial Sequence: Synthetic oligonucleotide
gtaggctgggcccgcatc

SEQ ID NO: 9907 - DNA, 18 bp, Artificial Sequence
  Description of Artificial Sequence: Synthetic oligonucleotide
gaagggtaggctgggccc

SEQ ID NO: 9908 - DNA, 18 bp, Artificial Sequence
  Description of Artificial Sequence: Synthetic oligonucleotide
ggggtgaagggtaggctg

SEQ ID NO: 9909 - DNA, 18 bp, Artificial Sequence
  Description of Artificial Sequence: Synthetic oligonucleotide
cgggaggggtgaagggta

SEQ ID NO: 9910 - DNA, 18 bp, Artificial Sequence
  Description of Artificial Sequence: Synthetic oligonucleotide
ggggacgggaggggtgaa

SEQ ID NO: 9911 - DNA, 18 bp, Artificial Sequence
  Description of Artificial Sequence: Synthetic oligonucleotide
gcagtggggacgggaggg

SEQ ID NO: 9912 - DNA, 18 bp, Artificial Sequence
  Description of Artificial Sequence: Synthetic oligonucleotide
gggaggcagtggggacgg

SEQ ID NO: 9913 - DNA, 18 bp, Artificial Sequence
  Description of Artificial Sequence: Synthetic oligonucleotide
gtggagggaggcagtggg

SEQ ID NO: 9914 - DNA, 18 bp, Artificial Sequence
  Description of Artificial Sequence: Synthetic oligonucleotide
gctgagtggagggaggca

SEQ ID NO: 9915 - DNA, 18 bp, Artificial Sequence
  Description of Artificial Sequence: Synthetic oligonucleotide
ggactgctgagtggaggg

SEQ ID NO: 9916 - DNA, 18 bp, Artificial Sequence
  Description of Artificial Sequence: Synthetic oligonucleotide
aggcaggactgctgagtg

SEQ ID NO: 9917 - DNA, 18 bp, Artificial Sequence
  Description of Artificial Sequence: Synthetic oligonucleotide
gggttaggcaggactgct

SEQ ID NO: 9918 - DNA, 18 bp, Artificial Sequence
  Description of Artificial Sequence: Synthetic oligonucleotide
gactggggttaggcagga

SEQ ID NO: 9919 - DNA, 18 bp, Artificial Sequence
  Description of Artificial Sequence: Synthetic oligonucleotide
ggtgggactggggttagg

SEQ ID NO: 9920 - DNA, 18 bp, Artificial Sequence
  Description of Artificial Sequence: Synthetic oligonucleotide
aagagggtgggactgggg

SEQ ID NO: 9921 - DNA, 18 bp, Artificial Sequence
  Description of Artificial Sequence: Synthetic oligonucleotide
ggcagaagagggtgggac

SEQ ID NO: 9922 - DNA, 18 bp, Artificial Sequence
  Description of Artificial Sequence: Synthetic oligonucleotide
cttcgggcagaagagggt

SEQ ID NO: 9923 - DNA, 18 bp, Artificial Sequence
  Description of Artificial Sequence: Synthetic oligonucleotide
agggacttcgggcagaag

SEQ ID NO: 9924 - DNA, 18 bp, Artificial Sequence
  Description of Artificial Sequence: Synthetic oligonucleotide
gagggagggacttcgggc

SEQ ID NO: 9925 - DNA, 18 bp, Artificial Sequence
  Description of Artificial Sequence: Synthetic oligonucleotide
tgaaggagggagggactt

SEQ ID NO: 9926 - DNA, 18 bp, Artificial Sequence
  Description of Artificial Sequence: Synthetic oligonucleotide
agccgtgaaggagggagg

SEQ ID NO: 9927 - DNA, 18 bp, Artificial Sequence
  Description of Artificial Sequence: Synthetic oligonucleotide
taggaagccgtgaaggag

SEQ ID NO: 9928 - DNA, 18 bp, Artificial Sequence
  Description of Artificial Sequence: Synthetic oligonucleotide
caggttaggaagccgtga

SEQ ID NO: 9929 - DNA, 18 bp, Artificial Sequence
  Description of Artificial Sequence: Synthetic oligonucleotide
cacagcaggttaggaagc

SEQ ID NO: 9930 - DNA, 18 bp, Artificial Sequence
  Description of Artificial Sequence: Synthetic oligonucleotide
aaagtcacagcaggttag

SEQ ID NO: 9931 - DNA, 18 bp, Artificial Sequence
  Description of Artificial Sequence: Synthetic oligonucleotide
cctctaaagtcacagcag

SEQ ID NO: 9932 - DNA, 18 bp, Artificial Sequence
  Description of Artificial Sequence: Synthetic oligonucleotide
cttgacctctaaagtcac

SEQ ID NO: 9933 - DNA, 18 bp, Artificial Sequence
  Description of Artificial Sequence: Synthetic oligonucleotide
ccagccttgacctctaaa

SEQ ID NO: 9934 - DNA, 18 bp, Artificial Sequence
  Description of Artificial Sequence: Synthetic oligonucleotide
ccgggccagccttgacct

SEQ ID NO: 9935 - DNA, 18 bp, Artificial Sequence
  Description of Artificial Sequence: Synthetic oligonucleotide
ccaggccgggccagcctt

SEQ ID NO: 9936 - DNA, 18 bp, Artificial Sequence
  Description of Artificial Sequence: Synthetic oligonucleotide
caggtccaggccgggcca

SEQ ID NO: 9937 - DNA, 18 bp, Artificial Sequence
  Description of Artificial Sequence: Synthetic oligonucleotide
ttccccaggtccaggccg

SEQ ID NO: 9938 - DNA, 18 bp, Artificial Sequence
  Description of Artificial Sequence: Synthetic oligonucleotide
agggcttccccaggtcca

SEQ ID NO: 9939 - DNA, 18 bp, Artificial Sequence
  Description of Artificial Sequence: Synthetic oligonucleotide
cacagagggcttccccag

SEQ ID NO: 9940 - DNA, 18 bp, Artificial Sequence
  Description of Artificial Sequence: Synthetic oligonucleotide
aacgccacagagggcttc

SEQ ID NO: 9941 - DNA, 18 bp, Artificial Sequence
  Description of Artificial Sequence: Synthetic oligonucleotide
gcaggaacgccacagagg

SEQ ID NO: 9942 - DNA, 18 bp, Artificial Sequence
  Description of Artificial Sequence: Synthetic oligonucleotide
ctggggcaggaacgccac

SEQ ID NO: 9943 - DNA, 18 bp, Artificial Sequence
  Description of Artificial Sequence: Synthetic oligonucleotide
ttggtctggggcaggaac

SEQ ID NO: 9944 - DNA, 18 bp, Artificial Sequence
  Description of Artificial Sequence: Synthetic oligonucleotide
tgtacttggtctggggca

SEQ ID NO: 9945 - DNA, 18 bp, Artificial Sequence
  Description of Artificial Sequence: Synthetic oligonucleotide
gaacttgtacttggtctg

SEQ ID NO: 9946 - DNA, 18 bp, Artificial Sequence
  Description of Artificial Sequence: Synthetic oligonucleotide
aggaggaacttgtacttg

SEQ ID NO: 9947 - DNA, 18 bp, Artificial Sequence
  Description of Artificial Sequence: Synthetic oligonucleotide
gggccaggaggaacttgt

SEQ ID NO: 9948 - DNA, 18 bp, Artificial Sequence
  Description of Artificial Sequence: Synthetic oligonucleotide
ccatggggccaggaggaa

SEQ ID NO: 9949 - DNA, 18 bp, Artificial Sequence
  Description of Artificial Sequence: Synthetic oligonucleotide
cctcgccatggggccagg

SEQ ID NO: 9950 - DNA, 18 bp, Artificial Sequence
  Description of Artificial Sequence: Synthetic oligonucleotide
cgacacctcgccatgggg

SEQ ID NO: 9951 - DNA, 18 bp, Artificial Sequence
  Description of Artificial Sequence: Synthetic oligonucleotide
aagtgcgacacctcgcca

SEQ ID NO: 9952 - DNA, 18 bp, Artificial Sequence
  Description of Artificial Sequence: Synthetic oligonucleotide
gagtgaagtgcgacacct

SEQ ID NO: 9953 - DNA, 18 bp, Artificial Sequence
  Description of Artificial Sequence: Synthetic oligonucleotide
gacacgagtgaagtgcga

SEQ ID NO: 9954 - DNA, 18 bp, Artificial Sequence
  Description of Artificial Sequence: Synthetic oligonucleotide
gaagagacacgagtgaag

SEQ ID NO: 9955 - DNA, 18 bp, Artificial Sequence
  Description of Artificial Sequence: Synthetic oligonucleotide
gtggggaagagacacgag

SEQ ID NO: 9956 - DNA, 18 bp, Artificial Sequence
  Description of Artificial Sequence: Synthetic oligonucleotide
ttggggtggggaagagac

SEQ ID NO: 9957 - DNA, 18 bp, Artificial Sequence
  Description of Artificial Sequence: Synthetic oligonucleotide
aaggattggggtggggaa

SEQ ID NO: 9958 - DNA, 18 bp, Artificial Sequence
  Description of Artificial Sequence: Synthetic oligonucleotide
cagggaaggattggggtg

SEQ ID NO: 9959 - DNA, 18 bp, Artificial Sequence
  Description of Artificial Sequence: Synthetic oligonucleotide
gaagtcagggaaggattg

SEQ ID NO: 9960 - DNA, 18 bp, Artificial Sequence
  Description of Artificial Sequence: Synthetic oligonucleotide
agcatgaagtcagggaag

SEQ ID NO: 9961 - DNA, 18 bp, Artificial Sequence
  Description of Artificial Sequence: Synthetic oligonucleotide
cccccagcatgaagtcag

SEQ ID NO: 9962 - DNA, 18 bp, Artificial Sequence
  Description of Artificial Sequence: Synthetic oligonucleotide
ccagccccccagcatgaa

SEQ ID NO: 9963 - DNA, 18 bp, Artificial Sequence
  Description of Artificial Sequence: Synthetic oligonucleotide
ggttgccagccccccagc

SEQ ID NO: 9964 - DNA, 18 bp, Artificial Sequence
  Description of Artificial Sequence: Synthetic oligonucleotide
ccctgggttgccagcccc

SEQ ID NO: 9965 - DNA, 18 bp, Artificial Sequence
  Description of Artificial Sequence: Synthetic oligonucleotide
ctgcaccctgggttgcca

SEQ ID NO: 9966 - DNA, 18 bp, Artificial Sequence
  Description of Artificial Sequence: Synthetic oligonucleotide
ccctgctgcaccctgggt

SEQ ID NO: 9967 - DNA, 18 bp, Artificial Sequence
  Description of Artificial Sequence: Synthetic oligonucleotide
ccagcccctgctgcaccc

SEQ ID NO: 9968 - DNA, 18 bp, Artificial Sequence
  Description of Artificial Sequence: Synthetic oligonucleotide
gaactccagcccctgctg

SEQ ID NO: 9969 - DNA, 18 bp, Artificial Sequence
  Description of Artificial Sequence: Synthetic oligonucleotide
tggtcgaactccagcccc

SEQ ID NO: 9970 - DNA, 18 bp, Artificial Sequence
  Description of Artificial Sequence: Synthetic oligonucleotide
gttcttggtcgaactcca

SEQ ID NO: 9971 - DNA, 18 bp, Artificial Sequence
  Description of Artificial Sequence: Synthetic oligonucleotide
agccggttcttggtcgaa

SEQ ID NO: 9972 - DNA, 18 bp, Artificial Sequence
  Description of Artificial Sequence: Synthetic oligonucleotide
tctgcagccggttcttgg

SEQ ID NO: 9973 - DNA, 18 bp, Artificial Sequence
  Description of Artificial Sequence: Synthetic oligonucleotide
agattcctgaataataca

SEQ ID NO: 9974 - DNA, 18 bp, Artificial Sequence
  Description of Artificial Sequence: Synthetic oligonucleotide
cttgcagattcctgaata

SEQ ID NO: 9975 - DNA, 18 bp, Artificial Sequence
  Description of Artificial Sequence: Synthetic oligonucleotide
tgattcttgcagattcct

SEQ ID NO: 9976 - DNA, 18 bp, Artificial Sequence
  Description of Artificial Sequence: Synthetic oligonucleotide
atttctgattcttgcaga

SEQ ID NO: 9977 - DNA, 18 bp, Artificial Sequence
  Description of Artificial Sequence: Synthetic oligonucleotide
gctggatttctgattctt

SEQ ID NO: 9978 - DNA, 18 bp, Artificial Sequence
  Description of Artificial Sequence: Synthetic oligonucleotide
tttaagctggatttctga

SEQ ID NO: 9979 - DNA, 18 bp, Artificial Sequence
  Description of Artificial Sequence: Synthetic oligonucleotide
ttcagtttaagctggatt

SEQ ID NO: 9980 - DNA, 18 bp, Artificial Sequence
  Description of Artificial Sequence: Synthetic oligonucleotide
tcttcttcagtttaagct

SEQ ID NO: 9981 - DNA, 18 bp, Artificial Sequence
  Description of Artificial Sequence: Synthetic oligonucleotide
ctttttcttcttcagttt

SEQ ID NO: 9982 - DNA, 18 bp, Artificial Sequence
  Description of Artificial Sequence: Synthetic oligonucleotide
atttcctttttcttcttc

SEQ ID NO: 9983 - DNA, 18 bp, Artificial Sequence
  Description of Artificial Sequence: Synthetic oligonucleotide
tgagcatttcctttttct

SEQ ID NO: 9984 - DNA, 18 bp, Artificial Sequence
  Description of Artificial Sequence: Synthetic oligonucleotide
tgacatgagcatttcctt

SEQ ID NO: 9985 - DNA, 18 bp, Artificial Sequence
  Description of Artificial Sequence: Synthetic oligonucleotide
ttcaatgacatgagcatt

SEQ ID NO: 9986 - DNA, 18 bp, Artificial Sequence
  Description of Artificial Sequence: Synthetic oligonucleotide
ggactttcaatgacatga

SEQ ID NO: 9987 - DNA, 18 bp, Artificial Sequence
  Description of Artificial Sequence: Synthetic oligonucleotide
tgaatggactttcaatga

SEQ ID NO: 9988 - DNA, 18 bp, Artificial Sequence
  Description of Artificial Sequence: Synthetic oligonucleotide
ctctatgaatggactttc

SEQ ID NO: 9989 - DNA, 18 bp, Artificial Sequence
  Description of Artificial Sequence: Synthetic oligonucleotide
gcctgctctatgaatgga

SEQ ID NO: 9990 - DNA, 18 bp, Artificial Sequence
  Description of Artificial Sequence: Synthetic oligonucleotide
tgacagcctgctctatga

SEQ ID NO: 9991 - DNA, 18 bp, Artificial Sequence
  Description of Artificial Sequence: Synthetic oligonucleotide
acgcttgacagcctgctc

SEQ ID NO: 9992 - DNA, 18 bp, Artificial Sequence
  Description of Artificial Sequence: Synthetic oligonucleotide
caaccacgcttgacagcc

SEQ ID NO: 9993 - DNA, 18 bp, Artificial Sequence
  Description of Artificial Sequence: Synthetic oligonucleotide
ggatccaaccacgcttga

SEQ ID NO: 9994 - DNA, 18 bp, Artificial Sequence
  Description of Artificial Sequence: Synthetic oligonucleotide
ctcctggatccaaccacg

SEQ ID NO: 9995 - DNA, 18 bp, Artificial Sequence
  Description of Artificial Sequence: Synthetic oligonucleotide
ttgagctcctggatccaa

SEQ ID NO: 9996 - DNA, 18 bp, Artificial Sequence
  Description of Artificial Sequence: Synthetic oligonucleotide
atcacttgagctcctgga

SEQ ID NO: 9997 - DNA, 18 bp, Artificial Sequence
  Description of Artificial Sequence: Synthetic oligonucleotide
aagatatcacttgagctc

SEQ ID NO: 9998 - DNA, 18 bp, Artificial Sequence
  Description of Artificial Sequence: Synthetic oligonucleotide
tcatgaagatatcacttg

SEQ ID NO: 9999 - DNA, 18 bp, Artificial Sequence
  Description of Artificial Sequence: Synthetic oligonucleotide
gcaagtcatgaagatatc

SEQ ID NO: 10000 - DNA, 18 bp, Artificial Sequence
  Description of Artificial Sequence: Synthetic oligonucleotide
agaaagcaagtcatgaag

SEQ ID NO: 10001 - DNA, 18 bp, Artificial Sequence
  Description of Artificial Sequence: Synthetic oligonucleotide
tggagagaaagcaagtca

SEQ ID NO: 10002 - DNA, 18 bp, Artificial Sequence
  Description of Artificial Sequence: Synthetic oligonucleotide
agagatggagagaaagca

SEQ ID NO: 10003 - DNA, 18 bp, Artificial Sequence
  Description of Artificial Sequence: Synthetic oligonucleotide
agctgagagatggagaga

SEQ ID NO: 10004 - DNA, 18 bp, Artificial Sequence
  Description of Artificial Sequence: Synthetic oligonucleotide
agcagagctgagagatgg

SEQ ID NO: 10005 - DNA, 18 bp, Artificial Sequence
  Description of Artificial Sequence: Synthetic oligonucleotide
aagaaagcagagctgaga

SEQ ID NO: 10006 - DNA, 18 bp, Artificial Sequence
  Description of Artificial Sequence: Synthetic oligonucleotide
cagagaagaaagcagagc

SEQ ID NO: 10007 - DNA, 18 bp, Artificial Sequence
  Description of Artificial Sequence: Synthetic oligonucleotide
gtcaacagagaagaaagc

SEQ ID NO: 10008 - DNA, 18 bp, Artificial Sequence
  Description of Artificial Sequence: Synthetic oligonucleotide
aagaagtcaacagagaag

SEQ ID NO: 10009 - DNA, 18 bp, Artificial Sequence
  Description of Artificial Sequence: Synthetic oligonucleotide
tgagaaagaagtcaacag

SEQ ID NO: 10010 - DNA, 18 bp, Artificial Sequence
  Description of Artificial Sequence: Synthetic oligonucleotide
ctacctgagaaagaagtc

SEQ ID NO: 10011 - DNA, 18 bp, Artificial Sequence
  Description of Artificial Sequence: Synthetic oligonucleotide
tatgcctacctgagaaag

SEQ ID NO: 10012 - DNA, 18 bp, Artificial Sequence
  Description of Artificial Sequence: Synthetic oligonucleotide
cagagtatgcctacctga

SEQ ID NO: 10013 - DNA, 18 bp, Artificial Sequence
  Description of Artificial Sequence: Synthetic oligonucleotide
gcatgcagagtatgccta

SEQ ID NO: 10014 - DNA, 18 bp, Artificial Sequence
  Description of Artificial Sequence: Synthetic oligonucleotide
ggtgagcatgcagagtat

SEQ ID NO: 10015 - DNA, 18 bp, Artificial Sequence
  Description of Artificial Sequence: Synthetic oligonucleotide
tttggggtgagcatgcag

SEQ ID NO: 10016 - DNA, 18 bp, Artificial Sequence
  Description of Artificial Sequence: Synthetic oligonucleotide
attggtttggggtgagca

SEQ ID NO: 10017 - DNA, 18 bp, Artificial Sequence
  Description of Artificial Sequence: Synthetic oligonucleotide
gagtgattggtttggggt

SEQ ID NO: 10018 - DNA, 18 bp, Artificial Sequence
  Description of Artificial Sequence: Synthetic oligonucleotide
agctagagtgattggttt

SEQ ID NO: 10019 - DNA, 18 bp, Artificial Sequence
  Description of Artificial Sequence: Synthetic oligonucleotide
tcccaagctagagtgatt

SEQ ID NO: 10020 - DNA, 18 bp, Artificial Sequence
  Description of Artificial Sequence: Synthetic oligonucleotide
ctacatcccaagctagag

SEQ ID NO: 10021 - DNA, 18 bp, Artificial Sequence
  Description of Artificial Sequence: Synthetic oligonucleotide
gtattctacatcccaagc

SEQ ID NO: 10022 - DNA, 18 bp, Artificial Sequence
  Description of Artificial Sequence: Synthetic oligonucleotide
tgaaggtattctacatcc

SEQ ID NO: 10023 - DNA, 18 bp, Artificial Sequence
  Description of Artificial Sequence: Synthetic oligonucleotide
gttaatgaaggtattcta

SEQ ID NO: 10024 - DNA, 18 bp, Artificial Sequence
  Description of Artificial Sequence: Synthetic oligonucleotide
ggctagttaatgaaggta

SEQ ID NO: 10025 - DNA, 18 bp, Artificial Sequence
  Description of Artificial Sequence: Synthetic oligonucleotide
gcccaggctagttaatga

SEQ ID NO: 10026 - DNA, 18 bp, Artificial Sequence
  Description of Artificial Sequence: Synthetic oligonucleotide
aaattgcccaggctagtt

SEQ ID NO: 10027 - DNA, 18 bp, Artificial Sequence
  Description of Artificial Sequence: Synthetic oligonucleotide
agagcaaattgcccaggc

SEQ ID NO: 10028 - DNA, 18 bp, Artificial Sequence
  Description of Artificial Sequence: Synthetic oligonucleotide
gttgcagagcaaattgcc

SEQ ID NO: 10029 - DNA, 18 bp, Artificial Sequence
  Description of Artificial Sequence: Synthetic oligonucleotide
tcacagttgcagagcaaa

SEQ ID NO: 10030 - DNA, 18 bp, Artificial Sequence
  Description of Artificial Sequence: Synthetic oligonucleotide
caacctcacagttgcaga

SEQ ID NO: 10031 - DNA, 18 bp, Artificial Sequence
  Description of Artificial Sequence: Synthetic oligonucleotide
gttaacaacctcacagtt

SEQ ID NO: 10032 - DNA, 18 bp, Artificial Sequence
  Description of Artificial Sequence: Synthetic oligonucleotide
acagagttaacaacctca

SEQ ID NO: 10033 - DNA, 18 bp, Artificial Sequence
  Description of Artificial Sequence: Synthetic oligonucleotide
acctggaagctcggcgtc

SEQ ID NO: 10034 - DNA, 18 bp, Artificial Sequence
  Description of Artificial Sequence: Synthetic oligonucleotide
tggcgacctggaagctcg

SEQ ID NO: 10035 - DNA, 18 bp, Artificial Sequence
  Description of Artificial Sequence: Synthetic oligonucleotide
gatcctggcgacctggaa

SEQ ID NO: 10036 - DNA, 18 bp, Artificial Sequence
  Description of Artificial Sequence: Synthetic oligonucleotide
tggccgatcctggcgacc

SEQ ID NO: 10037 - DNA, 18 bp, Artificial Sequence
  Description of Artificial Sequence: Synthetic oligonucleotide
attcctggccgatcctgg

SEQ ID NO: 10038 - DNA, 18 bp, Artificial Sequence
  Description of Artificial Sequence: Synthetic oligonucleotide
cacacattcctggccgat

SEQ ID NO: 10039 - DNA, 18 bp, Artificial Sequence
  Description of Artificial Sequence: Synthetic oligonucleotide
cccctcacacattcctgg

SEQ ID NO: 10040 - DNA, 18 bp, Artificial Sequence
  Description of Artificial Sequence: Synthetic oligonucleotide
ccttccccctcacacatt

SEQ ID NO: 10041 - DNA, 18 bp, Artificial Sequence
  Description of Artificial Sequence: Synthetic oligonucleotide
ttcccccttccccctcac

SEQ ID NO: 10042 - DNA, 18 bp, Artificial Sequence
  Description of Artificial Sequence: Synthetic oligonucleotide
tgtccttcccccttcccc

SEQ ID NO: 10043 - DNA, 18 bp, Artificial Sequence
  Description of Artificial Sequence: Synthetic oligonucleotide
cctcttgtccttccccct

SEQ ID NO: 10044 - DNA, 18 bp, Artificial Sequence
  Description of Artificial Sequence: Synthetic oligonucleotide
tgaaacctcttgtccttc

SEQ ID NO: 10045 - DNA, 18 bp, Artificial Sequence
  Description of Artificial Sequence: Synthetic oligonucleotide
gggggtgaaacctcttgt

SEQ ID NO: 10046 - DNA, 18 bp, Artificial Sequence
  Description of Artificial Sequence: Synthetic oligonucleotide
aaccagggggtgaaacct

SEQ ID NO: 10047 - DNA, 18 bp, Artificial Sequence
  Description of Artificial Sequence: Synthetic oligonucleotide
aaactaaccagggggtga

SEQ ID NO: 10048 - DNA, 18 bp, Artificial Sequence
  Description of Artificial Sequence: Synthetic oligonucleotide
aggccaaactaaccaggg

SEQ ID NO: 10049 - DNA, 18 bp, Artificial Sequence
  Description of Artificial Sequence: Synthetic oligonucleotide
tagcgaggccaaactaac

SEQ ID NO: 10050 - DNA, 18 bp, Artificial Sequence
  Description of Artificial Sequence: Synthetic oligonucleotide
tgccttagcgaggccaaa

SEQ ID NO: 10051 - DNA, 18 bp, Artificial Sequence
  Description of Artificial Sequence: Synthetic oligonucleotide
ctccctgccttagcgagg

SEQ ID NO: 10052 - DNA, 18 bp, Artificial Sequence
  Description of Artificial Sequence: Synthetic oligonucleotide
ggcggctccctgccttag

SEQ ID NO: 10053 - DNA, 18 bp, Artificial Sequence
  Description of Artificial Sequence: Synthetic oligonucleotide
gtgagggcggctccctgc

SEQ ID NO: 10054 - DNA, 18 bp, Artificial Sequence
  Description of Artificial Sequence: Synthetic oligonucleotide
attgcgtgagggcggctc

SEQ ID NO: 10055 - DNA, 18 bp, Artificial Sequence
  Description of Artificial Sequence: Synthetic oligonucleotide
agctcattgcgtgagggc

SEQ ID NO: 10056 - DNA, 18 bp, Artificial Sequence
  Description of Artificial Sequence: Synthetic oligonucleotide
aagcaagctcattgcgtg

SEQ ID NO: 10057 - DNA, 18 bp, Artificial Sequence
  Description of Artificial Sequence: Synthetic oligonucleotide
tgggtttgacattgaaca

SEQ ID NO: 10058 - DNA, 18 bp, Artificial Sequence
  Description of Artificial Sequence: Synthetic oligonucleotide
taaaatgggtttgacatt

SEQ ID NO: 10059 - DNA, 18 bp, Artificial Sequence
  Description of Artificial Sequence: Synthetic oligonucleotide
gactttaaaatgggtttg

SEQ ID NO: 10060 - DNA, 18 bp, Artificial Sequence
  Description of Artificial Sequence: Synthetic oligonucleotide
gcggggactttaaaatgg

SEQ ID NO: 10061 - DNA, 18 bp, Artificial Sequence
  Description of Artificial Sequence: Synthetic oligonucleotide
cttctgcggggactttaa

SEQ ID NO: 10062 - DNA, 18 bp, Artificial Sequence
  Description of Artificial Sequence: Synthetic oligonucleotide
cgggacttctgcggggac

SEQ ID NO: 10063 - DNA, 18 bp, Artificial Sequence
  Description of Artificial Sequence: Synthetic oligonucleotide
ccctgcgggacttctgcg

SEQ ID NO: 10064 - DNA, 18 bp, Artificial Sequence
  Description of Artificial Sequence: Synthetic oligonucleotide
gcggtccctgcgggactt

SEQ ID NO: 10065 - DNA, 18 bp, Artificial Sequence
  Description of Artificial Sequence: Synthetic oligonucleotide
tgccagcggtccctgcgg

SEQ ID NO: 10066 - DNA, 18 bp, Artificial Sequence
  Description of Artificial Sequence: Synthetic oligonucleotide
acagctgccagcggtccc

SEQ ID NO: 10067 - DNA, 18 bp, Artificial Sequence
  Description of Artificial Sequence: Synthetic oligonucleotide
cctagacagctgccagcg

SEQ ID NO: 10068 - DNA, 18 bp, Artificial Sequence
  Description of Artificial Sequence: Synthetic oligonucleotide
ctctccctagacagctgc

SEQ ID NO: 10069 - DNA, 18 bp, Artificial Sequence
  Description of Artificial Sequence: Synthetic oligonucleotide
ctgtcctctccctagaca

SEQ ID NO: 10070 - DNA, 18 bp, Artificial Sequence
  Description of Artificial Sequence: Synthetic oligonucleotide
actctctgtcctctccct

SEQ ID NO: 10071 - DNA, 18 bp, Artificial Sequence
  Description of Artificial Sequence: Synthetic oligonucleotide
gagccactctctgtcctc

SEQ ID NO: 10072 - DNA, 18 bp, Artificial Sequence
  Description of Artificial Sequence: Synthetic oligonucleotide
gcacagagccactctctg

SEQ ID NO: 10073 - DNA, 18 bp, Artificial Sequence
  Description of Artificial Sequence: Synthetic oligonucleotide
ggagggcacagagccact

SEQ ID NO: 10074 - DNA, 18 bp, Artificial Sequence
  Description of Artificial Sequence: Synthetic oligonucleotide
tgagtggagggcacagag

SEQ ID NO: 10075 - DNA, 18 bp, Artificial Sequence
  Description of Artificial Sequence: Synthetic oligonucleotide
ccaggtgagtggagggca

SEQ ID NO: 10076 - DNA, 18 bp, Artificial Sequence
  Description of Artificial Sequence: Synthetic oligonucleotide
ttcctccaggtgagtgga

SEQ ID NO: 10077 - DNA, 18 bp, Artificial Sequence
  Description of Artificial Sequence: Synthetic oligonucleotide
tacacttcctccaggtga

SEQ ID NO: 10078 - DNA, 18 bp, Artificial Sequence
  Description of Artificial Sequence: Synthetic oligonucleotide
gtagttacacttcctcca

SEQ ID NO: 10079 - DNA, 18 bp, Artificial Sequence
  Description of Artificial Sequence: Synthetic oligonucleotide
ggagagtagttacacttc

SEQ ID NO: 10080 - DNA, 18 bp, Artificial Sequence
  Description of Artificial Sequence: Synthetic oligonucleotide
acctgggagagtagttac

SEQ ID NO: 10081 - DNA, 18 bp, Artificial Sequence
  Description of Artificial Sequence: Synthetic oligonucleotide
caattacctgggagagta

SEQ ID NO: 10082 - DNA, 18 bp, Artificial Sequence
  Description of Artificial Sequence: Synthetic oligonucleotide
ggagtcaattacctggga

SEQ ID NO: 10083 - DNA, 18 bp, Artificial Sequence
  Description of Artificial Sequence: Synthetic oligonucleotide
gcctgggagtcaattacc

SEQ ID NO: 10084 - DNA, 18 bp, Artificial Sequence
  Description of Artificial Sequence: Synthetic oligonucleotide
gtaaagcctgggagtcaa

SEQ ID NO: 10085 - DNA, 18 bp, Artificial Sequence
  Description of Artificial Sequence: Synthetic oligonucleotide
cctaagtaaagcctggga

SEQ ID NO: 10086 - DNA, 18 bp, Artificial Sequence
  Description of Artificial Sequence: Synthetic oligonucleotide
tgagccctaagtaaagcc

SEQ ID NO: 10087 - DNA, 18 bp, Artificial Sequence
  Description of Artificial Sequence: Synthetic oligonucleotide
tttgctgagccctaagta

SEQ ID NO: 10088 - DNA, 18 bp, Artificial Sequence
  Description of Artificial Sequence: Synthetic oligonucleotide
tcagttttgctgagccct

SEQ ID NO: 10089 - DNA, 18 bp, Artificial Sequence
  Description of Artificial Sequence: Synthetic oligonucleotide
ggctttcagttttgctga

SEQ ID NO: 10090 - DNA, 18 bp, Artificial Sequence
  Description of Artificial Sequence: Synthetic oligonucleotide
atctcggctttcagtttt

SEQ ID NO: 10091 - DNA, 18 bp, Artificial Sequence
  Description of Artificial Sequence: Synthetic oligonucleotide
acagcatctcggctttca

SEQ ID NO: 10092 - DNA, 18 bp, Artificial Sequence
  Description of Artificial Sequence: Synthetic oligonucleotide
ttaaaacagcatctcggc

SEQ ID NO: 10093 - DNA, 18 bp, Artificial Sequence
  Description of Artificial Sequence: Synthetic oligonucleotide
ctgtgttaaaacagcatc

SEQ ID NO: 10094 - DNA, 18 bp, Artificial Sequence
  Description of Artificial Sequence: Synthetic oligonucleotide
ctgaactgtgttaaaaca

SEQ ID NO: 10095 - DNA, 18 bp, Artificial Sequence
  Description of Artificial Sequence: Synthetic oligonucleotide
cacggctgaactgtgtta

SEQ ID NO: 10096 - DNA, 18 bp, Artificial Sequence
  Description of Artificial Sequence: Synthetic oligonucleotide
actctcacggctgaactg

SEQ ID NO: 10097 - DNA, 18 bp, Artificial Sequence
  Description of Artificial Sequence: Synthetic oligonucleotide
aagggactctcacggctg

SEQ ID NO: 10098 - DNA, 18 bp, Artificial Sequence
  Description of Artificial Sequence: Synthetic oligonucleotide
tcaaaaagggactctcac

SEQ ID NO: 10099 - DNA, 18 bp, Artificial Sequence
  Description of Artificial Sequence: Synthetic oligonucleotide
acacatcaaaaagggact

SEQ ID NO: 10100 - DNA, 18 bp, Artificial Sequence
  Description of Artificial Sequence: Synthetic oligonucleotide
cacacacacatcaaaaag

SEQ ID NO: 10101 - DNA, 18 bp, Artificial Sequence
  Description of Artificial Sequence: Synthetic oligonucleotide
ccgcccacacacacatca

SEQ ID NO: 10102 - DNA, 18 bp, Artificial Sequence
  Description of Artificial Sequence: Synthetic oligonucleotide
gccggccgcccacacaca

SEQ ID NO: 10103 - DNA, 18 bp, Artificial Sequence
  Description of Artificial Sequence: Synthetic oligonucleotide
cctgtgccggccgcccac

SEQ ID NO: 10104 - DNA, 18 bp, Artificial Sequence
  Description of Artificial Sequence: Synthetic oligonucleotide
ggccgagtcccatgacaa

SEQ ID NO: 10105 - DNA, 18 bp, Artificial Sequence
  Description of Artificial Sequence: Synthetic oligonucleotide
tggccggccgagtcccat

SEQ ID NO: 10106 - DNA, 18 bp, Artificial Sequence
  Description of Artificial Sequence: Synthetic oligonucleotide
cagggtggccggccgagt

SEQ ID NO: 10107 - DNA, 18 bp, Artificial Sequence
  Description of Artificial Sequence: Synthetic oligonucleotide
attgccagggtggccggc

SEQ ID NO: 10108 - DNA, 18 bp, Artificial Sequence
  Description of Artificial Sequence: Synthetic oligonucleotide
ctggaattgccagggtgg

SEQ ID NO: 10109 - DNA, 18 bp, Artificial Sequence
  Description of Artificial Sequence: Synthetic oligonucleotide
tttgactggaattgccag

SEQ ID NO: 10110 - DNA, 18 bp, Artificial Sequence
  Description of Artificial Sequence: Synthetic oligonucleotide
tgccgtttgactggaatt

SEQ ID NO: 10111 - DNA, 18 bp, Artificial Sequence
  Description of Artificial Sequence: Synthetic oligonucleotide
tggcttgccgtttgactg

SEQ ID NO: 10112 - DNA, 18 bp, Artificial Sequence
  Description of Artificial Sequence: Synthetic oligonucleotide
gagtctggcttgccgttt

SEQ ID NO: 10113 - DNA, 18 bp, Artificial Sequence
  Description of Artificial Sequence: Synthetic oligonucleotide
aaagcgagtctggcttgc

SEQ ID NO: 10114 - DNA, 18 bp, Artificial Sequence
  Description of Artificial Sequence: Synthetic oligonucleotide
ccggcaaagcgagtctgg

SEQ ID NO: 10115 - DNA, 18 bp, Artificial Sequence
  Description of Artificial Sequence: Synthetic oligonucleotide
agggaccggcaaagcgag

SEQ ID NO: 10116 - DNA, 18 bp, Artificial Sequence
  Description of Artificial Sequence: Synthetic oligonucleotide
gaggaagggaccggcaaa

SEQ ID NO: 10117 - DNA, 18 bp, Artificial Sequence
  Description of Artificial Sequence: Synthetic oligonucleotide
caggagaggaagggaccg

SEQ ID NO: 10118 - DNA, 18 bp, Artificial Sequence
  Description of Artificial Sequence: Synthetic oligonucleotide
aggggcaggagaggaagg

SEQ ID NO: 10119 - DNA, 18 bp, Artificial Sequence
  Description of Artificial Sequence: Synthetic oligonucleotide
gctgcaggggcaggagag

SEQ ID NO: 10120 - DNA, 18 bp, Artificial Sequence
  Description of Artificial Sequence: Synthetic oligonucleotide
tggcggctgcaggggcag

SEQ ID NO: 10121 - DNA, 18 bp, Artificial Sequence
  Description of Artificial Sequence: Synthetic oligonucleotide
attcctggcggctgcagg

SEQ ID NO: 10122 - DNA, 18 bp, Artificial Sequence
  Description of Artificial Sequence: Synthetic oligonucleotide
gttccattcctggcggct

SEQ ID NO: 10123 - DNA, 18 bp, Artificial Sequence
  Description of Artificial Sequence: Synthetic oligonucleotide
ggactgttccattcctgg

SEQ ID NO: 10124 - DNA, 18 bp, Artificial Sequence
  Description of Artificial Sequence: Synthetic oligonucleotide
ccgcgggactgttccatt

SEQ ID NO: 10125 - DNA, 18 bp, Artificial Sequence
  Description of Artificial Sequence: Synthetic oligonucleotide
ccccaccgcgggactgtt

SEQ ID NO: 10126 - DNA, 18 bp, Artificial Sequence
  Description of Artificial Sequence: Synthetic oligonucleotide
acagtccccaccgcggga

SEQ ID NO: 10127 - DNA, 18 bp, Artificial Sequence
  Description of Artificial Sequence: Synthetic oligonucleotide
ctcccacagtccccaccg

SEQ ID NO: 10128 - DNA, 18 bp, Artificial Sequence
  Description of Artificial Sequence: Synthetic oligonucleotide
tgcgcctcccacagtccc

SEQ ID NO: 10129 - DNA, 18 bp, Artificial Sequence
  Description of Artificial Sequence: Synthetic oligonucleotide
gcgcgtgcgcctcccaca

SEQ ID NO: 10130 - DNA, 18 bp, Artificial Sequence
  Description of Artificial Sequence: Synthetic oligonucleotide
tcctcgcgcgtgcgcctc

SEQ ID NO: 10131 - DNA, 18 bp, Artificial Sequence
  Description of Artificial Sequence: Synthetic oligonucleotide
tacactcctcgcgcgtgc

SEQ ID NO: 10132 - DNA, 18 bp, Artificial Sequence
  Description of Artificial Sequence: Synthetic oligonucleotide
caccctacactcctcgcg

SEQ ID NO: 10133 - DNA, 18 bp, Artificial Sequence
  Description of Artificial Sequence: Synthetic oligonucleotide
acccccaccctacactcc

SEQ ID NO: 10134 - DNA, 18 bp, Artificial Sequence
  Description of Artificial Sequence: Synthetic oligonucleotide
ccagcacccccaccctac

SEQ ID NO: 10135 - DNA, 18 bp, Artificial Sequence
  Description of Artificial Sequence: Synthetic oligonucleotide
cgccgccagcacccccac

SEQ ID NO: 10136 - DNA, 18 bp, Artificial Sequence
  Description of Artificial Sequence: Synthetic oligonucleotide
gcagccgccgccagcacc

SEQ ID NO: 10137 - DNA, 18 bp, Artificial Sequence
  Description of Artificial Sequence: Synthetic oligonucleotide
ccaaagcagccgccgcca

SEQ ID NO: 10138 - DNA, 18 bp, Artificial Sequence
  Description of Artificial Sequence: Synthetic oligonucleotide
cgccgccaaagcagccgc

SEQ ID NO: 10139 - DNA, 18 bp, Artificial Sequence
  Description of Artificial Sequence: Synthetic oligonucleotide
ccaaccgccgccaaagca

SEQ ID NO: 10140 - DNA, 18 bp, Artificial Sequence
  Description of Artificial Sequence: Synthetic oligonucleotide
ggccaccaaccgccgcca

SEQ ID NO: 10141 - DNA, 18 bp, Artificial Sequence
  Description of Artificial Sequence: Synthetic oligonucleotide
cgcacggccaccaaccgc

SEQ ID NO: 10142 - DNA, 18 bp, Artificial Sequence
  Description of Artificial Sequence: Synthetic oligonucleotide
ccgcccgcacggccacca

SEQ ID NO: 10143 - DNA, 18 bp, Artificial Sequence
  Description of Artificial Sequence: Synthetic oligonucleotide
cctccccgcccgcacggc

SEQ ID NO: 10144 - DNA, 18 bp, Artificial Sequence
  Description of Artificial Sequence: Synthetic oligonucleotide
ccctccctccccgcccgc

SEQ ID NO: 10145 - DNA, 18 bp, Artificial Sequence
  Description of Artificial Sequence: Synthetic oligonucleotide
cctccccctccctccccg

SEQ ID NO: 10146 - DNA, 18 bp, Artificial Sequence
  Description of Artificial Sequence: Synthetic oligonucleotide
tctctcctccccctccct

SEQ ID NO: 10147 - DNA, 18 bp, Artificial Sequence
  Description of Artificial Sequence: Synthetic oligonucleotide
cctcttctctcctccccc

SEQ ID NO: 10148 - DNA, 18 bp, Artificial Sequence
  Description of Artificial Sequence: Synthetic oligonucleotide
cacctcctcttctctcct

SEQ ID NO: 10149 - DNA, 18 bp, Artificial Sequence
  Description of Artificial Sequence: Synthetic oligonucleotide
ttctccacctcctcttct

SEQ ID NO: 10150 - DNA, 18 bp, Artificial Sequence
  Description of Artificial Sequence: Synthetic oligonucleotide
aagccttctccacctcct

SEQ ID NO: 10151 - DNA, 18 bp, Artificial Sequence
  Description of Artificial Sequence: Synthetic oligonucleotide
agcccaagccttctccac

SEQ ID NO: 10152 - DNA, 18 bp, Artificial Sequence
  Description of Artificial Sequence: Synthetic oligonucleotide
gcgcgagcccaagccttc

SEQ ID NO: 10153 - DNA, 18 bp, Artificial Sequence
  Description of Artificial Sequence: Synthetic oligonucleotide
cagcggcgcgagcccaag

SEQ ID NO: 10154 - DNA, 18 bp, Artificial Sequence
  Description of Artificial Sequence: Synthetic oligonucleotide
accttcagcggcgcgagc

SEQ ID NO: 10155 - DNA, 18 bp, Artificial Sequence
  Description of Artificial Sequence: Synthetic oligonucleotide
cgcgtaccttcagcggcg

SEQ ID NO: 10156 - DNA, 18 bp, Artificial Sequence
  Description of Artificial Sequence: Synthetic oligonucleotide
cctcacgcgtaccttcag

SEQ ID NO: 10157 - DNA, 18 bp, Artificial Sequence
  Description of Artificial Sequence: Synthetic oligonucleotide
caggccctcacgcgtacc

SEQ ID NO: 10158 - DNA, 18 bp, Artificial Sequence
  Description of Artificial Sequence: Synthetic oligonucleotide
cagcgcaggccctcacgc

SEQ ID NO: 10159 - DNA, 18 bp, Artificial Sequence
  Description of Artificial Sequence: Synthetic oligonucleotide
ggctccagcgcaggccct

SEQ ID NO: 10160 - DNA, 18 bp, Artificial Sequence
  Description of Artificial Sequence: Synthetic oligonucleotide
aagccggctccagcgcag

SEQ ID NO: 10161 - DNA, 18 bp, Artificial Sequence
  Description of Artificial Sequence: Synthetic oligonucleotide
ctgtcaagccggctccag

SEQ ID NO: 10162 - DNA, 18 bp, Artificial Sequence
  Description of Artificial Sequence: Synthetic oligonucleotide
agaccctgtcaagccggc

SEQ ID NO: 10163 - DNA, 18 bp, Artificial Sequence
  Description of Artificial Sequence: Synthetic oligonucleotide
ccctcagaccctgtcaag

SEQ ID NO: 10164 - DNA, 18 bp, Artificial Sequence
  Description of Artificial Sequence: Synthetic oligonucleotide
actccccctcagaccctg

SEQ ID NO: 10165 - DNA, 18 bp, Artificial Sequence
  Description of Artificial Sequence: Synthetic oligonucleotide
tctccactccccctcaga

SEQ ID NO: 10166 - DNA, 18 bp, Artificial Sequence
  Description of Artificial Sequence: Synthetic oligonucleotide
ccagttctccactccccc

SEQ ID NO: 10167 - DNA, 18 bp, Artificial Sequence
  Description of Artificial Sequence: Synthetic oligonucleotide
ctcgcccagttctccact

SEQ ID NO: 10168 - DNA, 18 bp, Artificial Sequence
  Description of Artificial Sequence: Synthetic oligonucleotide
acctcctcgcccagttct

SEQ ID NO: 10169 - DNA, 18 bp, Artificial Sequence
  Description of Artificial Sequence: Synthetic oligonucleotide
cgggaacctcctcgccca

SEQ ID NO: 10170 - DNA, 18 bp, Artificial Sequence
  Description of Artificial Sequence: Synthetic oligonucleotide
acccacgggaacctcctc

SEQ ID NO: 10171 - DNA, 18 bp, Artificial Sequence
  Description of Artificial Sequence: Synthetic oligonucleotide
cgctcacccacgggaacc

SEQ ID NO: 10172 - DNA, 18 bp, Artificial Sequence
  Description of Artificial Sequence: Synthetic oligonucleotide
gtacgcgctcacccacgg

SEQ ID NO: 10173 - DNA, 18 bp, Artificial Sequence
  Description of Artificial Sequence: Synthetic oligonucleotide
atcccgtacgcgctcacc

SEQ ID NO: 10174 - DNA, 18 bp, Artificial Sequence
  Description of Artificial Sequence: Synthetic oligonucleotide
cagccatcccgtacgcgc

SEQ ID NO: 10175 - DNA, 18 bp, Artificial Sequence
  Description of Artificial Sequence: Synthetic oligonucleotide
cgagccagccatcccgta

SEQ ID NO: 10176 - DNA, 18 bp, Artificial Sequence
  Description of Artificial Sequence: Synthetic oligonucleotide
tcctgcgagccagccatc

SEQ ID NO: 10177 - DNA, 18 bp, Artificial Sequence
  Description of Artificial Sequence: Synthetic oligonucleotide
ggccgtcctgcgagccag

SEQ ID NO: 10178 - DNA, 18 bp, Artificial Sequence
  Description of Artificial Sequence: Synthetic oligonucleotide
ccttcggccgtcctgcga

SEQ ID NO: 10179 - DNA, 18 bp, Artificial Sequence
  Description of Artificial Sequence: Synthetic oligonucleotide
caccaccttcggccgtcc

SEQ ID NO: 10180 - DNA, 18 bp, Artificial Sequence
  Description of Artificial Sequence: Synthetic oligonucleotide
ccaaccaccaccttcggc

SEQ ID NO: 10181 - DNA, 18 bp, Artificial Sequence
  Description of Artificial Sequence: Synthetic oligonucleotide
tcccaccaaccaccacct

SEQ ID NO: 10182 - DNA, 18 bp, Artificial Sequence
  Description of Artificial Sequence: Synthetic oligonucleotide
gctgctcccaccaaccac

SEQ ID NO: 10183 - DNA, 18 bp, Artificial Sequence
  Description of Artificial Sequence: Synthetic oligonucleotide
cgctggctgctcccacca

SEQ ID NO: 10184 - DNA, 18 bp, Artificial Sequence
  Description of Artificial Sequence: Synthetic oligonucleotide
ctcgtcgctggctgctcc

SEQ ID NO: 10185 - DNA, 18 bp, Artificial Sequence
  Description of Artificial Sequence: Synthetic oligonucleotide
acgggctcgtcgctggct

SEQ ID NO: 10186 - DNA, 18 bp, Artificial Sequence
  Description of Artificial Sequence: Synthetic oligonucleotide
tgtctacgggctcgtcgc

SEQ ID NO: 10187 - DNA, 18 bp, Artificial Sequence
  Description of Artificial Sequence: Synthetic oligonucleotide
acgagtgtctacgggctc

SEQ ID NO: 10188 - DNA, 18 bp, Artificial Sequence
  Description of Artificial Sequence: Synthetic oligonucleotide
cgcgtacgagtgtctacg

SEQ ID NO: 10189 - DNA, 18 bp, Artificial Sequence
  Description of Artificial Sequence: Synthetic oligonucleotide
ccgcacgcgtacgagtgt

SEQ ID NO: 10190 - DNA, 18 bp, Artificial Sequence
  Description of Artificial Sequence: Synthetic oligonucleotide
tcagcccgcacgcgtacg

SEQ ID NO: 10191 - DNA, 18 bp, Artificial Sequence
  Description of Artificial Sequence: Synthetic oligonucleotide
gcacgtcagcccgcacgc

SEQ ID NO: 10192 - DNA, 18 bp, Artificial Sequence
  Description of Artificial Sequence: Synthetic oligonucleotide
agcgcgcacgtcagcccg

SEQ ID NO: 10193 - DNA, 18 bp, Artificial Sequence
  Description of Artificial Sequence: Synthetic oligonucleotide
catgtagcgcgcacgtca

SEQ ID NO: 10194 - DNA, 18 bp, Artificial Sequence
  Description of Artificial Sequence: Synthetic oligonucleotide
tgagatggggggatggta

SEQ ID NO: 10195 - DNA, 18 bp, Artificial Sequence
  Description of Artificial Sequence: Synthetic oligonucleotide
cagggtgagatgggggga

SEQ ID NO: 10196 - DNA, 18 bp, Artificial Sequence
  Description of Artificial Sequence: Synthetic oligonucleotide
acttgcagggtgagatgg

SEQ ID NO: 10197 - DNA, 18 bp, Artificial Sequence
  Description of Artificial Sequence: Synthetic oligonucleotide
tactcacttgcagggtga

SEQ ID NO: 10198 - DNA, 18 bp, Artificial Sequence
  Description of Artificial Sequence: Synthetic oligonucleotide
gatggtactcacttgcag

SEQ ID NO: 10199 - DNA, 18 bp, Artificial Sequence
  Description of Artificial Sequence: Synthetic oligonucleotide
ggggggatggtactcact

SEQ ID NO: 10200 - DNA, 18 bp, Artificial Sequence
  Description of Artificial Sequence: Synthetic oligonucleotide
gagatggggggatggtac

SEQ ID NO: 10201 - DNA, 18 bp, Artificial Sequence
  Description of Artificial Sequence: Synthetic oligonucleotide
agggtgagatggggggat

SEQ ID NO: 10202 - DNA, 18 bp, Artificial Sequence
  Description of Artificial Sequence: Synthetic oligonucleotide
cttgcagggtgagatggg

SEQ ID NO: 10203 - DNA, 18 bp, Artificial Sequence
  Description of Artificial Sequence: Synthetic oligonucleotide
tggtacttgcagggtgag

SEQ ID NO: 10204 - DNA, 18 bp, Artificial Sequence
  Description of Artificial Sequence: Synthetic oligonucleotide
ggggatggtacttgcagg

SEQ ID NO: 10205 - DNA, 18 bp, Artificial Sequence
  Description of Artificial Sequence: Synthetic oligonucleotide
agatgggggatggtactt

SEQ ID NO: 10206 - DNA, 18 bp, Artificial Sequence
  Description of Artificial Sequence: Synthetic oligonucleotide
aggtgagatgggggatgg

SEQ ID NO: 10207 - DNA, 18 bp, Artificial Sequence
  Description of Artificial Sequence: Synthetic oligonucleotide
ttgccaggtgagatgggg

SEQ ID NO: 10208 - DNA, 18 bp, Artificial Sequence
  Description of Artificial Sequence: Synthetic oligonucleotide
ggtacttgccaggtgaga

SEQ ID NO: 10209 - DNA, 18 bp, Artificial Sequence
  Description of Artificial Sequence: Synthetic oligonucleotide
gggatggtacttgccagg

SEQ ID NO: 10210 - DNA, 18 bp, Artificial Sequence
  Description of Artificial Sequence: Synthetic oligonucleotide
gagatgggatggtacttg

SEQ ID NO: 10211 - DNA, 18 bp, Artificial Sequence
  Description of Artificial Sequence: Synthetic oligonucleotide
tgggtgagatgggatggt

SEQ ID NO: 10212 - DNA, 18 bp, Artificial Sequence
  Description of Artificial Sequence: Synthetic oligonucleotide
cttgctgggtgagatggg

SEQ ID NO: 10213 - DNA, 18 bp, Artificial Sequence
  Description of Artificial Sequence: Synthetic oligonucleotide
tggtacttgctgggtgag

SEQ ID NO: 10214 - DNA, 18 bp, Artificial Sequence
  Description of Artificial Sequence: Synthetic oligonucleotide
ggggatggtacttgctgg

SEQ ID NO: 10215 - DNA, 18 bp, Artificial Sequence
  Description of Artificial Sequence: Synthetic oligonucleotide
atgtgggggatggtactt

SEQ ID NO: 10216 - DNA, 18 bp, Artificial Sequence
  Description of Artificial Sequence: Synthetic oligonucleotide
ttgagatgtgggggatgg

SEQ ID NO: 10217 - DNA, 18 bp, Artificial Sequence
  Description of Artificial Sequence: Synthetic oligonucleotide
gagggttgagatgtgggg

SEQ ID NO: 10218 - DNA, 18 bp, Artificial Sequence
  Description of Artificial Sequence: Synthetic oligonucleotide
cacttgagggttgagatg

SEQ ID NO: 10219 - DNA, 18 bp, Artificial Sequence
  Description of Artificial Sequence: Synthetic oligonucleotide
gtactcacttgagggttg

SEQ ID NO: 10220 - DNA, 18 bp, Artificial Sequence
  Description of Artificial Sequence: Synthetic oligonucleotide
ggatggtactcacttgag

SEQ ID NO: 10221 - DNA, 18 bp, Artificial Sequence
  Description of Artificial Sequence: Synthetic oligonucleotide
agatgggatggtactcac

SEQ ID NO: 10222 - DNA, 18 bp, Artificial Sequence
  Description of Artificial Sequence: Synthetic oligonucleotide
gggtgagatgggatggta

SEQ ID NO: 10223 - DNA, 18 bp, Artificial Sequence
  Description of Artificial Sequence: Synthetic oligonucleotide
ttgcagggtgagatggga

SEQ ID NO: 10224 - DNA, 18 bp, Artificial Sequence
  Description of Artificial Sequence: Synthetic oligonucleotide
ggtacttgcagggtgaga

SEQ ID NO: 10225 - DNA, 18 bp, Artificial Sequence
  Description of Artificial Sequence: Synthetic oligonucleotide
gggatggtacttgcaggg

SEQ ID NO: 10226 - DNA, 103 bp, Homo sapiens
caagtgaccctccatctctctcccatctctgtctctccctggtgtctgtttttcttctcctcctctccttgtctctctcccacacccctccatctctctccca

SEQ ID NO: 10227 - DNA, 114 bp, Homo sapiens
cacacccctccatctctctcccacgtgtctctcccctcaccttctctccccctccatttctctctccctaatctgtctgttccctctgccatggcccccttcttcaagcagcct

SEQ ID NO: 10228 - DNA, 129 bp, Homo sapiens
gccatggcccccttcttcaagcagcctcccatcttgctcctgcggtccctccttccctgtctctctcacccctgtttccacaccctcacctcctaccacccccctcagcatgttccctggaagctgagg

SEQ ID NO: 10229 - DNA, 8252 bp, Homo sapiens
acagatcccagctgggtcacccgcactgagtcaacagactgagcgcgtccaggcctgacagctctgcggctcgggccctgaggtttattcagaaaacatgtccactgcaattagggaggtaggagtttggagacagaccagaacacttctactgaagaattacttaattaaatgcagaaccaaaaagagtagtgttcaggaaattctttttccactattttttttattttggttaatattaattagcatgatgcatccaaataagaaatatgaagaagtgcctaatatagaactcaatcctatggacaagtttactctttctaatctaattcttggatatactccagtgactaatattacaagcagcatcatgcagaaagtgtctactgatcatctacctgatgtcataattactgaagaatatacaaatgaaaaagaaatgttaacatccagtctctctaagccgagcaactttgtaggtgtggttttcaaagactccatgtcctatgaacttcgtttttttcctgatatgattccagtatcttctatttatatggattcaagagctggctgttcaaaatcatgtgaggctgctcagtactggtcctcaggtttcacagttttacaagcatccatagatgctgccattatacagttgaagaccaatgtttctctttggaaggagctggagtcaactaaagctgttattatgggagaaactgctgttgtagaaatagatacctttccccgaggagtaattttaatatacctagttatagcattttcaccttttggatactttttggcaattcatatcgtagcagaaaaagaaaaaaaaataaaagaatttttaaagataatgggacttcatgatactgccttttggctttcctgggttcttctatatacaagtttaatttttcttatgtcccttcttatggcagtcattgcgacagcttctttgttatttcctcaaagtagcagcattgtgatatttctgctttttttcctttatggattatcatctgtattttttgctttaatgctgacacctctttttaaaaaatcaaaacatgtgggaatagttgaattttttgttactgtggcttttggatttattggccttatgataatcctcatagaaagttttcccaaatcgttagtgtggcttttcagtcctttctgtcactgtacttttgtgattggtattgcacaggtcatgcatttagaagattttaatgaaggtgcttcattttcaaatttgactgcaggcccatatcctctaattattacaattatcatgctcacacttaatagtatattctatgtcctcttggctgtctatcttgatcaagtcattccaggggaatttggcttacggagatcatctttatattttctgaagccttcatattggtcaaagagcaaaagaaattatgaggagttatcagagggcaatgttaatggaaatattagttttagtgaaattattgagccagtttcttcagaatttgtaggaaaagaagccataagaattagtggtattcagaagacatacagaaagaagggtgaaaatgtggaggctttgagaaatttgtcatttgacatatatgagggtcagattactgccttacttggccacagtggaacaggaaagagtacattgatgaatattctttgtggactctgcccaccttctgatgggtttgcatctatatatggacacagagtctcagaaatagatgaaatgtttgaagcaagaaaaatgattggcatttgtccacagttagatatacactttgatgttttgacagtagaagaaaatttatcaattttggcttcaatcaaagggataccagccaacaatataatacaagaagtgcagaaggttttactagatttagacatgcagactatcaaagataaccaagctaaaaaattaagtggtggtcaaaaaagaaagctgtcattaggaattgctgttcttgggaacccaaagatactgctgctagatgaaccaacagctggaatggacccctgttctcgacatattgtatggaatcttttaaaatacagaaaagccaatcgggtgacagtgttcagtactcatttcatggatgaagctgacattcttgcagataggaaagctgtgatatcacaaggaatgctgaaatgtgttggttcttcaatgttcctcaaaagtaaatgggggatcggctaccgcctgagcatgtacatagacaaatattgtgccacagaatctctttcttcactggttaaacaacatatacctggagctactttattacaacagaatgaccaacaacttgtgtatagcttgcctttcaaggacatggacaaattttcaggtttgttttctgccctagacagtcattcaaatttgggtgtcatttcttatggtgtttccatgacgactttggaagacgtatttttaaagctagaagttgaagcagaaattgaccaagcagattatagtgtatttactcagcagccactggaggaagaaatggattcaaaatcttttgatgaaatggaacagagcttacttattctttctgaaaccaaggctgctctagtgagcaccatgagcctttggaaacaacagatgtatacaatagcaaagtttcatttctttaccttgaaacgtgaaagtaaatcagtgagatcagtgttgcttctgcttttaatttttttcacagttcagatttttatgtttttggttcatcactcttttaaaaatgctgtggttcccatcaaacttgttccagacttatattttctaaaacctggagacaaaccacataaatacaaaacaagtctgcttcttcaaaattctgctgactcagatatcagtgatcttattagctttttcacaagccagaacataatggtgacgatgattaatgacagtgactatgtatccgtggctccccatagtgcggctttaaatgtgatgcattcagaaaaggactatgtttttgcagctgttttcaacagtactatggtttattctttacctatattagtgaatatcattagtaactactatctttatcatttaaatgtgactgaaaccatccagatctggagtaccccattctttcaagaaattactgatatagtttttaaaattgagctgtattttcaagcagctttgcttggaatcattgttactgcaatgccaccttactttgccatggaaaatgcagagaatcataagatcaaagcttatactcaacttaaactttcaggtcttttgccatctgcatattggattggacaagctgttgttgatatccccttattttttatcattcttattttgatgctaggaagcttattggcatttcattatggattatatttttatactgtaaagttccttgctgtggttttttgccttattggttatgttccatcagttattctgttcacttatattgcttctttcacctttaagaaaattttaaataccaaagaattttggtcatttatctattctgtggcagcgttggcttgtattgcaatcactgaaataactttctttatgggatacacaattgcaactattcttcattatgccttttgtatcatcattccaatctatccacttctaggttgcctgatttctttcataaagatttcttggaagaatgtacgaaaaaatgtggacacctataatccatgggataggctttcagtagctgttatatcgccttacctgcagtgtgtactgtggattttcctcttacaatactatgagaaaaaatatggaggcagatcaataagaaaagatccctttttcagaaacctttcaacgaagtctaaaaataggaagcttccagaaccaccagacaatgaggatgaagatgaagatgtcaaagctgaaagactaaaggtcaaagagctgatgggttgccagtgttgtgaggagaaaccatccattatggtcagcaatttgcataaagaatatgatgacaagaaagattttcttctttcaagaaaagtaaagaaagtggcaactaaatacatctctttctgtgtgaaaaaaggagagatcttaggactattgggtccaaatggtgctggcaaaagcacaattattaatattctggttggtgatattgaaccaacttcaggccaggtatttttaggagattattcttcagagacaagtgaagatgatgattcactgaagtgtatgggttactgtcctcagataaaccctttgtggccagatactacattgcaggaacattttgaaatttatggagctgtcaaaggaatgagtgcaagtgacatgaaagaagtcataagtcgaataacacatgcacttgatttaaaagaacatcttcagaagactgtaaagaaactacctgcaggaatcaaacgaaagttgtgttttgctctaagtatgctagggaatcctcagattactttgctagatgaaccatctacaggtatggatcccaaagccaaacagcacatgtggcgagcaattcgaactgcatttaaaaacagaaagcgggctgctattctgaccactcactatatggaggaggcagaggctgtctgtgatcgagtagctatcatggtgtctgggcagttaagatgtatcggaacagtacaacatctaaagagtaaatttggaaaaggctactttttggaaattaaattgaaggactggatagaaaacctagaagtagaccgccttcaaagagaaattcagtatattttcccaaatgcaagccgtcaggaaagtttttcttctattttggcttataaaattcctaaggaagatgttcagtccctttcacaatctttttttaagctggaagaagctaaacatgcttttgccattgaagaatatagcttttctcaagcaacattggaacaggtttttgtagaactcactaaagaacaagaggaggaagataatagttgtggaactttaaacagcacactttggtgggaacgaacacaagaagatagagtagtattttgaatttgtattgttcggtctgcttactgggacttctttctttttcacttaattttaactttggtttaaaaagttttttattggaatggtaactggagaaccaagaacgcacttgaaatttttctaagctccttaattgaaatgctgtggttgtgtgttttgcttttctttaaataaaacgtatgtataattaagtgaagctgcatgtttgtattgaagtatattgaactatatagtttgtatgtcatctttttcaccattcagaaacagtgcttctgaatttgtgatttaaaggaattgtaatagaatagttttatttttaagttatctttaagtttatgccatcttcttaaataagtacgtaatgttccaatctaaataaaaaactaattcataactaatgcatagaaaagatacataaagcaatgtgaaagtttcttgcttctcctttttaatttctaaaaaagccactttgaatggaagttgtcatccgtaaaagctgaagtgtaagcactaggaaatctcaatatagagatttgaggaaagttatatccactaggtggcagtcattgatcataataagtgaaatgagcccttgttctagtacatgattttaggcttaggtaattaggtatgtgaaattacatttctttaatttaaagtaaaattcagaaggttttagttattataattaaaggaagactgtgtgtagaatcttacgtaatagtctgattctttgactctgtggctagaatgacagttatctatggaggtggtagaattaagccataccttttccttcatcactcttggaacatataaattttttgtcatcttccttgcaaagggcacatttaattttgttcttgaataaaatattttattgggtatttgtttttattggtaaactttagtgaatctcttctataaaattgtaagtagatcagtgtgtagatttatttagtaacttacctcattgactttggaacatggtaggatatgaataaactctttcaagggttaaattaagaattgtaagtgcagtgcgcctatttctttttaataagaaccagaatttcatttttgatagagttaaaggcatggctaatattttcttagaaatacttccttgtacaacccatgtattggctcaaggtataaaatagtgtaaataatgctagttgacattacatttcaaccaaatgaaagtattaacttcataaaacaaatatattgagagtgtgattattgtattagacaacaacaacagcaatgacagaaggatttggtactgaattactttaaataagcaaaacctttcagtggcattattcattctttaatgtaggcaaaatttaatgaacttttagctttattgtgtaataagacatctgtgattttaggctctagcagtggatttaaaagtgttctttctcggtacaaagtacgtggctgatattttcccccattgctgggggcagttgctatacactttcctaaagtatatataatgttcacataaatacccagggacctcttttttgggatgtgcttttgtaattatgtgtaaccttgaatacttaagtttagtaaaagcaacaaaattatatctatagtttactaaggcagtcacgaaaaagcatagttttttttagaacctgaccatcctaagaaagttatgtcatctgaagatagagcatgactaatgaagaaaattacctgcttttgcacgtagatttggtaactttcactttacatttgtgaatgtgtaattggtgcaaagtaaattttttttcctgcaaagtgaaagttgagtagtcacaatcatgttatttattttgttcatttagttactttgcttttaatgtatatgaatacatgctcttgtaaacaattttaaaagacattcaaatttttttttagtttttatatactcagaatatattttggttgttaaattaaattatgttccctttttcacagtaacaaaatctgactcaggagaaatataacttaattcttaggaaaacaagggtaagtgagctggaaagcaaaggaggcaaaaagtgaaatatatttatttacagtgtacagttcatgtttatgaacatactaattttaaaatgtcttaaattactgatctcaaaacttttttctatgtcagtacagataaataaataaatatacatattaggcaaaagcaacatcaccaaccttatatttcccattcatggtcaaattttcaaaggaaagtaaaagctgagctttactgagtgagtgtttactgactaataaggcaagaaaaaacatgatgagtgtactttacatcttacttttgtgggctcttaatttttttttctagtttgttttcagtaaagacagtgggttttctttaaaataatttttttcttttaaatttgcacaaattatcttaggtcagtattttggttttaatcattaaaacatttttagagtaatgtaatttaacaaatattttaagtgattatgtttccagaaatggattctttggagagaactcggatgactatcagttttggccctgtaagatcgtggagatctgtaagatagatacttatataacttacataaaatatatataatatattacttatataacttatataactagctattattttatataactaactataatatgacaaatcctttgctagtagtactaacaacgttttataggagcacaattaattttacttaggataagtgttgttattattgtttttattgttgttctgttagttactcaaaacttcattctaattgtgccctgagtttgttaaaataccatactgtatttttgtgtaacatgtaaataggcattaatttttgagaaatagaaatgtttatccttaatgtatttttaatttgctaacattgattttttattttctttcctgaaatagcttatttcctaaaatgaaagaatttattctcagatgaataatttttatatcagctattcttatcaggtaaaagtttaattattttttatttataatatatgtaagcaattctcaatgctgctctttaagaaaaataaatatgattatattaataataagctttaagagttgaaaatttaagacaagtcattttgtatactgaagtgaattctttgttatttagtgctgataattgaataatgagtagctcatattaaaaatgatgcaaaaacctggcactaaaa

SEQ ID NO: 10230 - DNA, 1766 bp, Homo sapiens
atattcttgttgcagctatggattaatgggtttacttttgccaagaacactaattaattattttttggtctgtaatatatggcctgcatgatgttcattgtttattcatgtttattggccggcatggtggttcacacctataatctcagcactttgggaggctgaggcgggaggatcccttaagcccatggttcaagaccagcctgagcaacatagtgagactctgtttttacaaaatattttttaaaattacccgggtatagtggcatgtgcctgtagtcccagctaactcaggaggctgaggtgggaagattgtttgagcctgggaggtcgaggctgcagtgaaccatgattgtatacttgctgtgttgcccaggccactgtataccagcctgggcaacagagcaagaccttgtcttaaaaacaaaacaaaacaaaacaaaaggtttatggagataggaccaatatccagaatctagttcaagaagccagaataggctacagtggagttggagaatgggagataagagagcagggatcaaaagaagacatgaaaagaatcaccaggaaaaagataatggaggagaacttagaaaaagtgaaataagacaagtaacattcaacatacagtacttagggctatagaggaattataggtgtggggaagagaaaggaagtaagcgggaaaaataacatgttttggcagcttcaaatttaagtgggttgattacagagatattttaaaacattgttagccactttggtaggtattgccatttttttcagatattgataagtaaaatactatttttatattttaatagctaaacatgcttttgccattgaagaatatagcttttctcaagcaacattggaacaggtactataaagttaaatttttaaaaattattttatagaagaaagtatctgatatcgattgttttggtttatattagagagggagagatatcgtaaaccagtgacaaattggtacagaatgatcttaaacttggtataattttaatcaaccttaggttcttcacttactaattttttaaattttattttttaaattgatattattttaaattgacaaatcacactgtttattgggtacagtgatgttttgatacatgtgtgcaatatggaatgcttaaatcaagctaactttcatttgctgattttgaatatctgtttttttcattttgtaaagaaagtgagtcatgatggtggtgtttcacattagtgtatttgaaattacattgtttaagtagttatgaattattttttaaaaaacatatctattaatctaaaatagtattcatctttgcatgtaacttttgaaaataatctgtttgaataatgttaatgttaataaatctcttgatacttgttgatataactagatatagccttgtaccatttctgatttagttaaaagttctttgaggtacttgagatacagcatactgtattcatttatttcttttcacctaggtttttgtagaactcactaaagaacaagaggaggaagataatagttgtggaactttaaacagcacactttggtgggaacgaacacaagaagatagagtagtattttgaatttgtattgttcggtctgcttactgggacttctttctttttcacttaattttaactttggtttaaaaagttttttattggaatggtaactggagaaccaagaacgcacttgaaatttttctaagctccttaattgaaatgctgtggttgtgtgttttgct

SEQ ID NO: 10231 - DNA, 1149 bp, Homo sapiens
atattcttgttgcagctatggattaatgggtttacttttgccaagaacactaattaattattttttggtctgtaatatatggcctgcatgatgttcattgtttattcatgtttattggccggcatggtggttcacacctataatctcagcactttgggaggctgaggcgggaggatcccttaagcccatggttcaagaccagcctgagcaacatagtgagactctgtttttacaaaatattttttaaaattacccgggtatagtggcatgtgcctgtagtcccagctaactcaggaggctgaggtgggaagattgtttgagcctgggaggtcgaggctgcagtgaaccatgattgtatacttgctgtgttgcccaggccactgtataccagcctgggcaacagagcaagaccttgtcttaaaaacaaaacaaaacaaaacaaaaggtttatggagataggaccaatatccagaatctagttcaagaagccagaataggctacagtggagttggagaatgggagataagagagcagggatcaaaagaagacatgaaaagaatcaccaggaaaaagataatggaggagaacttagaaaaagtgaaataagacaagtaacattcaacatacagtacttagggctatagaggaattataggtgtggggaagagaaaggaagtaagcgggaaaaataacatgttttggcagcttcaaatttaagtgggttgattacagagatattttaaaacattgttagccactttggtaggtattgccatttttttcagatattgataagtaaaatactatttttatattttaatagctaaacatgcttttgccattgaagaatatagcttttctcaagcaacattggaacaggtttttgtagaactcactaaagaacaagaggaggaagataatagttgtggaactttaaacagcacactttggtgggaacgaacacaagaagatagagtagtattttgaatttgtattgttcggtctgcttactgggacttctttctttttcacttaattttaactttggtttaaaaagttttttattggaatggtaactggagaaccaagaacgcacttgaaatttttctaagctccttaattgaaatgctgtggttgtgtgttttgct

SEQ ID NO: 10232 - DNA, 20615 bp, Homo sapiens
aattgctaaataggaaaactcagaaggctaggtttcagcaagacagtgatgtactctgtctctatgtcatcccatggaggggtgtgccagtgcgagggtatctgctaggcactgcggattctattccagtgcagagtaccttctctgtcccacgggtctgtattcttatagaacaaggggaggaaactgaccttggtgagggtggctgataatatagtatccttggacttgggtaatctgcatttgaagtgctagctgtttattgattgtctgggaaagttagctgactgcacctggatccctggggaagctaacgacattggggcctgtgggagttaattcctcttctgcttgggagaagaagttctagttccataggaagctgagcttggatatagcttttcccaattaaaaagacaagagcaacaaatatcattcttagatatttattattatttcataggaccactatggtggacatactaactgcttttcaaatacatcattcatttttatgaaattgtgaagcgtaatttatatgcctgattattctgtgttgtagacaggaaaatgaaagtaaaatgatttgcttaggatcagatagttattaataagtggcagagttggtaatattgtccacaaccacctgttaatacatctgccactcattctttcatgtagactatgcctgggttagatattctaatacattctttctgaggttttgatttttttttgatataagatatatcctaagatatatcttaagatataaaatgattctcagttccatttgttactctgtggttgtctttcaggaaattactgatatagtttttaaaattgagctgtattttcaagcagctttgcttggaatcattgttactgcaatgccaccttactttgccatggaaaatgcagagaatcataaggtaatgactcagttaaaaatatataatttgctaataagaagtgtcatataaaaataacctatttgcttgattgcaaggcttagtataattgttatttcagaaataagtaaatggaatataaatacatttattatagtttcttattgtaataagtgataattaatatttattatttgagacttgctacatgctttaaaaattatattctctaattctcacaacattgtgaggtaagttttttgttactgatttcttatagatcaggaaatcaaagatgggattgttcatatgacttgctcaggttgactcaacttgtttaaattgtggatttgggaagtgactgtgatctttatgttcttaactggcaaactaacatgcccgtcccttttatcctttaacagaggtattaagtagtcaaggtgctaaattcttattaatggaaaaaaaatagatgaaagtgattgtcatcattagggccttggagaaattgctaagtatacagaggttctttggtattctttcactttctttttacgcctttcccttttgttttccttcaggcatatagcgatcttgtacagtctttggttgttcaaagcctcccactttttcactctgctgagattatatcttactgctctaataaaaattctgatcttcttcatggatgatcttaattcagtaaaaacaaatttgtctaaattaatttacagactgtgatgaataatgagctcattattttaataaattctaaaaaaataaattgtaggccaggcgtggtggaccacgcctgtaatcccagcactttgggaggccgaggtgggcggatcacctgaggttgggagttcgagactagcctgaccaacatggagaaaccccgtctctactaaaaatagaaaaaaaattagggcgtggtggtgcatgcctgtaatcccagctactcaggagggtgaggcaggagaatcacttgaacccgagaggcggagattgcagtgagccgagatcatgccattgcactccagcctgggcaacaagagcaaaaactccatctcaaaaataaataaataaataaataaataaaataaataaatacattctaataaaaattttgttatttgtttactataaaagtaacacatatctctatttttaaaataatattcaatttttgttaaatatactcattgtagtaatgtataaattatagaaaagtataaggaatatagaaatccataacccactgcacaataataaaatttactggacatttgcattttctttcttgtttcaactgaaacattttttttccaatataaattttttatttttatttatttattttttaatttttttatttatatatatatatatttttattatactttaagttttagggtacatgtgcacattgtgcaggttagttacatatgtatacatgtgccatgctggtgcactgcacccactaacttatttttaattaaagtttctattttgagatagttgtatattcatgtttgtttgttagaaatgacagagagatcctgtgtactctttacattttgtcccaataataacatctcgtaaaattatagtacaatgtaacagggtattggcattgacacagtcaagatacagaacatttctgtcaccaaaaagattcccattttttgctctttcctagcctctctgacctgtggcaaccactactctgttctctatttctgtaattttgatagttcaaaaatgtaaaatggcatcacaataagttttcttttgggattggcttttttcaaatagcattttttttgaagttcatcctatttgtatttatcaataatccattccttttcattgctgagtaatattccatggtatggatacatcacactttctctaaccatttgcctgttgaagaacatttggattgttttccgtttttggcttttgtaaagttgctgtggacatttgcatacaggttttgtgtaaacatcattttcatttctctgagataaatgcccaagagtgcaattgctgaattatacatgttaattttataagaaattgccaaattattttccaagatgagtgttccattttatgttatccctaccagcagtgtgtgaatgacaaaagtttgaattatccaaaataattgcatttgccttagcttatgtttttattcttgtattagaatttacatgtgtctcatgttctcataattcattgaacagaaaacttgccaattttgttcatttctcctcttcttaactaatctttatatttcatgcttcctttatctctgtggacagctctttcatataataccttcagttattaggagtagatatttttatagatgacaaaaatcaactaaataaaattgttaggtatttggatttatgaaatattttagaaatttcaaattaaatgagaacatgagataggaaaactatgatcatttgagtttaccattaacaaacttgtgacgtaaataacaccttagatttatatgctataccagtgtacacaaaaggctttgaacatttcaaaagctttcacttaagctgaaagccttatgtaaatccaaaggatacttggcaatttattagtgtttttatttatgaaaggttcatttttaaaactgagaattctttttctgtgtaaacatgtcttcccatctgtttccacagtatttcaaaagtagtaatgttttggctatttattatttgtatagctgtaaccccaaccgccatgacaccttttgctttattttaatctcagtttcttggcagcactactgtattctgattcttaaaaattttgttgaaattgttacatctcagaaataatgagccaaattaaaggctaaatggaatttgtatttagtgtgagggggacttttattacctataagcctggaatgtaacctttttggttttgctgatgtaaaattaagagatctacaataatttactaatttatttgtgtgtttctaaagtgtctaaaattataataaattgtttttcattttttttagatcaaagcttatactcaacttaaactttcaggtcttttgccatctgcatattggattggacaagctgttgttgatatccccttattttttatcattcttattttgatgctaggaagcttattggcatttcattatggattatatttttatactgtaaagttccttgctgtggtaagttaacgttagttgtactcatgctatttatagatagaatgttatttaaaatctgttataaacatgacagttgacttattgcataatttggttattaatttgttaaagaaaatagagcaagtgtgtctggtatttaatacatgtaatcattttatatgataagtgacttttaaaaacaataacttaccaccattttaaaataatttcttgaaactaaagtgatctttcatgtagaccacctacttgggtgtaatcaggaacgttttaatatattccttccttaaaatgccttccttcgtttttcttatgcctgaaaataatttcacaaaggataagctcttttattccatagtttaaaatatagcttaacatttctctatctcaataatgggcaggctgcgagccagatgaagaacacaactccatttacaatagccacaaaaaattaaaatacctaggaatacatctaacagaggagatgaaagatctctacagggagaactacaaaacattggtgaaggaattcagagatgatacaagcaaatggaaaaaaatttcatgctcatggattagaagactcaatatattaaagtggccatactgcccaaagcaatctacagattcaacactattcctatcaaactaccaacattattcatcacagaattttaaaaagctattctaaaattcatatggaaccccaaaagtacccagatggctaaaggaatcctacataagctgggcgcgggggctcatgcctataatcccagcactctgggagaccgagacgggtggatcacgaggtcaagagatcaagaccatcctggtcaacatagtgaaacaccatctctactagaaatacaaaaaaatagctggacgtggtggcatgcgcctgtagtcccagctactcaggaggctgaggcaggagaatcgcttgaaccggggaggtagaggttgtgttgagccaagatcgtgctactgcactcaagcctgggcaacagagagagactttttatcaaaaaaaaaaaaaaaaaggaatccatgtaaaaagaacaaagccagaggcatttcattacctgacttcaaactatactataaaggctccagtgaccaaaacagcatggtattggtacaaaaacagacatgtagaccgatgaaacagaatggaggacccagaaataaagccacacatctatagccatctgatcttcaacaaaattgataaaaataagcaataggaaaggactctgtgttcaataaatggtgctgggatagctggctagccatattcagaagaatgaaattggacctccacctttcaccgtatgtaaaaagtaactcaagatggattaaagatttaagggtaagacatcaactataagaattctacaagaaaacataggaaataccattctggaccttgggaaagaatttatgggtaaataagtcttcaaaagcaattgcaacagaaataaaaattgacaagtggcacctaattaaactaaagagcttctgcacagcaaaagaaactatcaacagagtaaatggataacatacagaatgggagaaaatacaaactatgcatccaacaaaggccaagtatccagaatctataaggcacttaaacaattcagcaatcaaaaaacaaaactccattaaaaagtgggcaaaagatatgaacagacacttctcaaaagaagacatgcaaatggacaacaaatgtatgaaaaaatgctctacatcactaatcatcagagaaatgtaaatcaaaaccacagtaagataccatctcatgtcagttagaatggctatgattaaaaagtcaaaaccaacagatgctggcgaggctgcagagaaaatgaaatgcttatatactcttatatactcttggtgggaatgtaaacttcagcagccatggaaagcagtttggagagttctcaaaaaacttaaaacagaactaccttataactcagaaaccccattactgggtatatatccaaaagaaaataaatcattctaccaaaaagacacatgagtatgttcattgcagcactattcacaatagcaaagacatggaatcaacctaggagcccattgaccagtgattgaataaagaaagtgtggtacatatacaccacggaatactgagcagccataaaaaagaatgaaattatgtctgttgcagcagcacaggtgcagttggaggccattattctaagtgaattaacaaaggaacagaaaaccaactattgcatgttcccacttataaatgggagctaaattgggtaaacatggacataaaaatggcaacagtagacactgggcactactagacgggggcaggaggaaggggagcaagggttgaaaaactaactgttaggtactgtgtccagtacctaggtgacagaatgaattataccccaaacctcagcatcatgcagtatacccatgtaacacacctgcacatgtatcccctgattctaaagtaaaactagaaattacttaaaataaaatatagcttaaaatatcaaagaagagactgatttgcattcatgttcacatgtaaatgactgacagcaggccctttcattgattactttattaggaaaaagggaaaacagagttacatgaggttgatgctgaaagtaaatttaccgattttgtcagagatcataatgaccttatatattagtttctgccatataaaataataatgtttttcttacacattaaaaaataaagtgctgtatattaaaatagtagctaatatttgagagagagaacgttgtagctagctatacttgctttttataataatgagagatagtattttacttggtacaaaaaactacaagtagtgttcagtttaaatgatttatttaggattatattaataatttcatattttaatatggctagtatttcatgtcatgtgtattgcaagctattcatatttttatagaaacatatttctgatttacaggttttttgccttattggttatgttccatcagttattctgttcacttatattgcttctttcacctttaagaaaattttaaataccaaagaattttggtcatttatctattctgtggtaagtcacattttacattatttcaactttccatagcagtttaattaacatgaattctttcctgattatactaaaaatgttacatgtcttttgtaagtgaataatttagataggtaattggcagcttctttttgtgtgtacatttgtcttctgaatcatcctttccacgtaggaacaatatggaagagatttagcaactagtgtatcaaggatactagctacaaacaagtggtattcttgttgcttgctggctaaatatcatctcttgttccatgttttattagaggattgaaaaaatagtttaatgcgtagacaccaatttgtaagaagtttctaaacactttgtcacttttatttatttatttttttctttaggcagcgttggcttgtattgcaatcactgaaataactttctttatgggatacacaattgcaactattcttcattatgccttttgtatcatcattccaatctatccacttctaggttgcctgatttctttcataaaggtaattctgctaaatattttaatatgttaaaaaacataaaataaatatggtctaatttggggatgttagttcttgtatagaaaacagtaaaatgcattgggctaatggctactacttgatttagatattattaatgcagcataaattattgtgagctcttgtcaaactgtaaattctcaaaggaaaagggctatgttcattacaggttctctcatgctcaaaatgatgtatataattagaagtgtgacatggtttcagtcagtatttgtttttaggagtttatcagtgattaaataacgtatttcactataaagggatgagaaagaataaagtgtaagagattttctccaagaaaaaatagagacaaaaaccagattgattttattaaggctggataattgaaagaaatttccatgtgattagaaaaaatattgttatgaattcttggtttggaattgctaattaattctacttactaatcctactacccctgcttccctttttaggtctcagttcaatgtgtttaatttatactgatcctcagaaatattttgggacagggaagattttaagtaaaaaacataacttactaatatgaacagctaacttattatagaaagtacacgtttgctaaacaaaatacattttttcattttaatccaaatatttctacatattgcagcgtatatattttcaaatctttttgtcttagatttcttggaagaatgtacgaaaaaatgtggacacctataatccatgggataggctttcagtagctgttatatcggtaagaaataaagtgtttttgtgaattagcatgtaccttaagaatggtttggtcctatggttttaactatgtttagttttttatcctgttgcatgaaaaagaaggtgcataaaaagttaagcatgttagttaacgctagctaatctgtatttcagtggggagtacctttcatttactgaatatgttcactttaatatacttagccttttacatgttattaattctgtttaattacagttctgtcttagaagcaaaaacaaagtttttgtgttcgattatattttatgaagctgacaataaatgaatgatacagaggcagaaaatatgtgaataatttgctaaaaataattctgctttggtttgtattaaaatttatttttaattatctttatcatgtaaaatataaaaaagttgtgattacttcttttggtaatggcaaggaacttgatgtatgtagtcttagttctgttggcaaaggaaaaaacaacaacaacaacaacaaatcttttagtcatgagctgctacatgttcttcttttagccttacctgcagtgtgtactgtggattttcctcttacaatactatgagaaaaaatatggaggcagatcaataagaaaagatccctttttcaggtcagttgattttttaaaaattttaaatgtttttagtatatttacagaactgtgtaaccattaccataacataattttggaacatttccagcactccaaaaagaaactttgtacccattaacagccactttcttatccctattcccatagctcccagtcttaggtaaccactaatctactttctgtttctgtcagatttgcctgttctgaacactttatataactggacaatggaaatatgctttggaaaacttgagtcaaaagaccaacaattctcttaaataccttgtatttaacttttatatctgtttgctttttaccatagttggttggcatgttattttaatgttggaaaatcatcagatttgccagataacatctttgaaaaattgctaggatttgggcactataattagtatctagcatatggttttacacttagtataatgtttggagggcttatcatgtagtcgtgtgtagcactttttatatatcttaatgagttgcttttacttttcaactattatgaacaatgctgctatgaattcagctattatgaacaatgttgctagtttgtatacaactgtttgtatggacatatattttcatttctcttgggtggatacctagaaatgggattgctgggtcatttgaggaattgccagactgtttctaaagtggtaataccattttacactcccgctaggaatgttttagggttctattttctccacatccttgccaatgcttgttattgtttgtcttttttacatattcttccaaatatattagctaatttgtttttactttttcttctatccagccttgcttacatgattcatcactttattatcatttcagcatcctcaacttttgtcttttcgaactgtccactaaaaattataattattggtgaatcgaattatatgctggaaaaaataacataaaagttccatttgataatactacatatttattccatataaattcagctggttttttaaaaaaaatattttagatttgggggtaaatgtgcatgtttgttagctgggtatattgcatactggtggggattgggcttctattgtaacattacccaaatggtgaacgttgtacctaataggtagtttttcaacccttatccccacccccttttggagtccacagtcctagtgtttccatgtttatgttcatgtgtatccactgataagtgagaacatgttgtatttgattgtctgtttataagtgagaacttataagtgagaacatgtggtatttgattgtctgttccaaattagttcacttaggataatggtctccagttccatccatgttgctgtaaagaacataatttcattctatttatggctgtggagtattccatggtgtatatgtaccatattttcttcacccagtcaactgttgatggactcttaggttggttctatgactttgctattgtgaatagtaccatgatgaacatatgagttcaggtgtcttttttatgtaatgattttttttttcctttggatatatatccagtagtaggattgctgggttgaatggtagttatattttaatactgtttggtaacgaataacattttcctagttagcaccttcttatctctttcttttcaatagttattcaaagctttctctttattccttgtattcctcaaatcaccttatcttacttcctacttctcagtaaataatcttgtcatttatctcagaaaatagaagcacttaattataagttataaatttctacaaacttactcacatcttccatcatttttgccttttcccagtcctagaggaagcagcagtccatcctattacccaaatcttcatttattctatatacttggaatattgctcaattttctttttctctttttctctttcctttctggatctcaaaagtgtattttttctctttttctctttcctttctagatctcaatagtgtatttttttctctttttctctttcctttctggatctcagtggtatatttttggggttggggagggtcacctttctttcatatatgaaagaacccatggatctcatttgaacatgaatccatccctaattcctattctatatctctctttcctttcatagccaaaattcttctatctccagttactcaccttccatccactcctataactccctgcaatctgggttttcccttacctttccattgatactattttcaataagataactaatgattttgtcttttcattgtctaataggctcaacttatttaactaatctgcaggctttaatatgattgacattgttctccttacacatttttctttttttttttttttttgagatggaatctcactctgtcacccaggctggagtgcagtggcatgatctcagctcactggttgaaacgattcttctgcctcagcctcccaagtagctgggattacaggcatgtgccaccacacctggttaatttttgtattttattttttagtagagacagggtttctccatggtggctaggctggtgttgaactgctgacctcaagtgatctgcatgcctcggcttcttaaagtgctaagattacaggcaggagccactgcgcctggccacatttttcttgttcctttgttttccattatgtcttctgtttgcctctgtacttcaaaattgcctttgcaagcacttcatcctctgtctatccctaaaaatggtgttactgtgggttctgatgtcaaccctctacatctactctttctgggcaatttcatttatactcaggttgtaaattttttgagggcaaggttcatgttttttcatctttctttctgtgtaataatacctgacacctactagtcataaataatattgttgaataaatgaatgaatttagataatatcgtccaaatgttatcagtcattgaaaaataatgcttgtggctgggcatggtggcttgaacctgtaatcccagtactttgggaggctgaggcaggtggatcttttgaggccaggagtttgagaccagcctgggcaacatggtgaaaccctgtctctactaaaaatacaaaaatgagccgggcatggtggcgcgtgcctgtaatcccagctactcaggaggctgaggcaggagaatcgcttgaacccaggaggcagaggttatagtgacctgagatcgtaccactgcactccagcctgggcaacagagtgtgagaccctgtcttaaaaaaaaaaaaaaagaaagaaagaaagaaaaaaaaagaaatatcgcttataattccacctttcagagataatcctagatcttatgttagtgtattttttcagtcttttctctacctagtatctgaatttcttactattttaattatttgaaaacctactgtcttttatatttattatatatatgtagaaacctttcaacgaagtctaaaaataggaagcttccagaaccaccagacaatgaggatgaagatgaagatgtcaaagctgaaagactaaaggtcaaagagctgatgggttgccagtgttgtgaggaggtaatttattctttatggctaagtcatagtaaatatgaaatgatcaattcccggtatatagaaattaatctgaaaaatatttttctttgcatatgaagcaatctgaaaaaaatctttcttggaaaaaaatacttcgtttacttacttttgaataagccagaatttcagtcataaatggatatttatttgtacagtatccccttattagccaatataatttttgtaatatggatatgaggtatgtgcagcctgtcatttcatgataagttttataactttctttttaaatacaatttttcttattagaaaccatccattatggtcagcaatttgcataaagaatatgatgacaagaaagattttcttctttcaagaaaagtaaagaaagtggcaactaaatacatctctttctgtgtgaaaaaaggctggtatttaatttttccttacataacttttctagaagagtaatttctacttttagtatgatttgattatgatttttttttctttcaattcctttaggagagatcttaggactattgggtccaaatggtgctggcaaaagcacaattattaatattctggttggtgatattgaaccaacttcaggccaggtatgatatataagagtataggatatgttgaatgtgatttatattgttaattaacataaacttttagtgacaaattcggattttatattcaatttttatgtatatttttagaattttttgtacagcctgatcaaattatgatcttttgggttatctgtaaaaataatgtgcatggtgaaattttcatagacacatgtagacacacgcatatacagtatttctgcttttgtaatgcttacatgcgtgagttatttgtctaccaacttaatggaagacagttttattagcttcaggagatatgggagcttgttttgacctgccatcagctagtcttttattataagcatgtcactgaccactttgtggatacttcacaaaactaccctgatcccatttcctgcttctctccccttgcttactttatgccagccacactaactcattgctttcctggaaaatgccaggcatactcttttctttgggtttttgcccaagatgttttctttgtttggctataccttataccctagaaatacatatactaaattcacttacctctttggctcaaatgtcaccttccagtgaagctccctgatcattagaattacatcttgctttttcatccaactctgtattaccctttctgaccaagtctctgaactctgacttagctttatatgtccttccatcatcaaacatcaaaaaggagtaaaacatctgggcgggtgcagtggctcattcctgtaatcccagcactttgggaggctgaggcaggaggatcacttgagctcaggaattcaagactagcctgggcaacgtagtgagacatcttccctcctaaaattcaaaaaagaaaaaagcaatagccaggcatggtggcacatgtttgtagtctcagttacttagtgataataataataatgacaataaaggagtacaaatctgacttgatattagtctggctgtaggaaggggttttaattaatgtacttgccacttccttcacagtgtaaattaagcaaaataataaaaattggtttgtgtttctataggtatttttaggagattattcttcagagacaagtgaagatgatgattcactgaagtgtatgggttactgtcctcagataaaccctttgtggccagatactacattgcaggaacattttgaaatttatggagctgtcaaaggaatgagtgcaagtgacatgaaagaagtcataagtcggtaaaataattgtctttagattccttttgttacttagaggaaaggtttgcatttcatatttttaaaatttcataacaagcatttctgtggacaatgatttttatagaaaatgtttattactttttcatatattctttatgatatatgaaaatatactgatagctgtaaattatgatagttataaaaaggtcattttttaatttctagttacaggataaatatacctatagatatcatgaaacttattttaattcaaagtgaaccattttatcaagatattaatttatttaaaatgatgtaaattggagacttttgcccttacctacttataataagcttcgactaagtaactattctagagaaaacaacatcagggatcacacccagttggtatttgtgtttatatatatcatggtattctcattttgtattgttcattttgcagaataacacatgcacttgatttaaaagaacatcttcagaagactgtaaagaaactacctgcaggaatcaaacgaaaggtactttcattaaacaccaaataatgcctgtatttttattgatagtttagtacctgatattgtcttgatagattccttatagtgaacctttgttaatttcccacccatctttttctttccatgtagttgtgttttgctctaagtatgctagggaatcctcagattactttgctagatgaaccatctacaggtatggatcccaaagccaaacagcacatgtggtgagtatggtacttgtgacacagtacatgatactttagaatagaacagtttcttttattataatagtttaatgttagttatatgtacatcttgattttaaatcctattcaaacgatacactagtaattaaaaattaaatagatttagagatttccttaagcttttaaaactttgcatatttttcatgaagtgttcataatattttacatattccgaaacagaaataagcatgagtcattattaagataaagagttctagtgttctgaatagtttttaagtttttttctagtcatttagcatacaaatgatcttttccataataatagtgtcttaaatttatgttgagactctttctaggacagtcatgcattgcctaatgacagagatacattctgagaaaggtgatgttgtcgttgtgcaaacataatagagtgtacttatataaatctctgggtggttatagcctactacacacctagactatatggtatagcctattactcctaggctataaatctgtagagcatgtcactgcactgaatactgtaggcagttgtaacacaatggtatttgtgtatctagatgtatctaaacacagaaaagatacattataaaagtattataatcttatggaatcactgttggaaatgtgtttcatcattgactgaaatgtcattatgcagtgcctgtaaagtactaattagttgaacaactctttttttttttttttttttgagtcagagtcttgttctgttgaccaagctggagtgcagtggtgccgtcttggcttactgcaacctctgcttcccaggctgaagcgattctcctgcctcagccttccaagtacctgggactacaggcaagagccaccaagcccggctaattttttgtatttttggtagagacagggtttcaccatgttggccaggctggtcccgaactccagacctcaggtgatccgcccccttcggcctcccaaactgctgggattacaggtgtgaggcacagtgcctggccttgaacaactctttaagcctcaacttccatgtctataaaatgtaaggtttggtttggatgcatgttacggttttcttatgattcaaagcctgttttggttataacatgaaaaggcatcaattttaaaatttatttgttgtcatacttttagcccatattaacatttgaaatcatagattttttttttccatttgacaagctttcaaaatgaagggaaaataaattagaatataaaagtcatggcctggcgcagtggctcacgcctgtaatcccagcactttgggaggctgaggcagcagaccacgaggtcaggagatcgagaccatcctggctaacacggtgaaaccccgtctctattaaaaatacaaaaaaaaattagccgggtgtggtggcaggcacctgtagtcccagctactcaggaggctgaggtaggagaatggtgtgaacctgggaggtggagcttgcagtgagccgagatcgggccacttctctccagcctgggggacagagcgagactccgtctcaaaaaaaaaaaaatcatagttgggcaggatgtaatagccatagcaattgatatttggtaagttttaattaacttaattaaccaaccggttggatttttaaaaacccatttttttttaacaaacagatgtgttcctctctttttgttttatttatgttttataggcgagcaattcgaactgcatttaaaaacagaaagcgggctgctattctgaccactcactatatggaggaggcagaggctgtctgtgatcgagtagctatcatggtgtctgggcagttaaggttgatgtctaaatagcgtgccattcaggggaagaggttgggggttggattttgaaagtcatcatttcaaaaacatggcaatagttagtaatttaaatgttaaatattttagtttttgagttagcttttgatagattgacttggaagtatgttgagttttttaaaaatatggctgtctactttgaatttgaattcacttaatatttcaataacttggaatattatttttaggcatagtacttgttatttcaaaaaattgttatatattggattaattatgtaacacaaatatgaaataaacatatgagtttctacttacataaataaataattgagtaaagaaatgtgtcagagaagaggtacatcttccttacagaacaattccaaataataatatatgtagataatacccacttcaagggaggaggcttaatctcctatcccccaagtttggacgggacttagccagtttcttgtaaaaaatgaacgacagaaggagaaaaatagtaactttacagttgagaaagctggcaaatactaccttaactaaacgatgttgtgcagatatcatgtattcactgatatgatatgatggaaaaagtactacagctgtgtaatattctctccaaaacccataacccaagtgtagtcatgagaaaaatatcagactaacccaaattgagggaccttctaacacacacctgaccagtacttctcaaaactgtcaaaatcatgaaaaagacagaaagagtaagaaactgtcacccacagttagagactaaggtgacgtgacagccaagaacactacggtatcctggatagaacctggaataaacaaaggacactaatagaaaattggtgaaatctaaataaagtatggagttcagtgacaaggaatgtaccaatgtcggtgtctcagttgtgaggaatttaccatggtaatataagatgataagattagggaaactgaaaccggataaagagtgtatggggatgctgtattttctttgtaatttttctctaaatataaaggtatatttttttaaaatgtagttatatgtgtgagagattattctttgaagctgtcattttatatctgagctttcttttaaaaaattacttcagatgtatcggaacagtacaacatctaaagagtaaatttggaaaaggctactttttggaaattaaattgaaggactggatagaaaacctagaagtagaccgccttcaaagagaaattcagtatattttcccaaatgcaagccgtcaggaaaggtaaaattttaaagaatgtggttatatttctttatagagcaaaggttataaaaagttattatattaaggattaagtgaaaaatcatcttttcattcatagaccatatatatatatatctctgtgtgtgaatatatatgtatattttttcatatatatgaaatatatgtatctgtagatagataatttatatatctctctctgtattatcaccaatactggactaatgaagtctgatggctggtgttttatatctgccttagtattagatttttcaatattcagtagtatttaaatttttttaacattcttagtagtaatgagagttgttttgcatgaaaatgttattattttaaacaattttcatccaactaaataccaaaataagttattgaatttaattttgaattttaaacatgttgaactttagctttagaacataatagtagtaatttttaatttttttccatattttatctttttttccagtttttcttctattttggcttataaaattcctaaggaagatgttcagtccctttcacaatctttttttaagctggaagaaggtaagtagtatcttctattttggcttataaaattcctaaggaagatgttcagtccctttcacaatctttttttaagctggaagaaggtaagtagttgaaaagcacttatgttgtagctctcaaattatgaaagaattttatttaaaaagtttaaaactggggactcggtttattttagaaactatggcagataagaagataaccttttattcatttaatctaagacacaggtaaacactaatgtcatagggattttgtagataaactctattgtaatgtaaaccttttacaatttttagagagcattgacacagtttatcacattgcatctatgagaagggtcagcttaattatcgagtctttgcagttagtccagcagcaagagctctgagtttcttgaatccttacttcatactggtccatagaagtagcaacactatcaagactccagtggcaaagagaattctgagtgtagcgaggggtgggcagtccccaaaattttaaggaagcttatagaatcttggcatttaaaaaataagtggtatgtaggataaatatatatatgctggtgacagttgagggagatcacctcctggaagaatcaggtattcatatgcagattattttatggcatttataaactgtgaaacaacctatatttatgtataaggtttattattaataattttcaaaataactacaggatttttatgattgttctttatgtgattactgaatacaaaaagatttcctgatactgtatatattcttgttgcagctatggattaatgggtttacttttgccaagaacactaattaattattttttggtctgtaatatatggcctgcatgatgttcattgtttattcatgtttattggccggcatggtggttcacacctataatctcagcactttgggaggctgaggcgggaggatcccttaagcccatggttcaagaccagcctgagcaacatagtgagactctgtttttacaaaatattttttaaaattacccgggtatagtggcatgtgcctgtagtcccagctaactcaggaggctgaggtgggaagattgtttgagcctgggaggtcgaggctgcagtgaaccatgattgtatacttgctgtgttgcccaggccactgtataccagcctgggcaacagagcaagaccttgtcttaaaaacaaaacaaaacaaaacaaaaggtttatggagataggaccaatatccagaatctagttcaagaagccagaataggctacagtggagttggagaatgggagataagagagcagggatcaaaagaagacatgaaaagaatcaccaggaaaaagataatggaggagaacttagaaaaagtgaaataagacaagtaacattcaacatacagtacttagggctatagaggaattataggtgtggggaagagaaaggaagtaagcgggaaaaataacatgttttggcagcttcaaatttaagtgggttgattacagagatattttaaaacattgttagccactttggtaggtattgccatttttttcagatattgataagtaaaatactatttttatattttaatagctaaacatgcttttgccattgaagaatatagcttttctcaagcaacattggaacaggt

SEQ ID NO: 10233 - DNA, 1948 bp, Homo sapiens
aattgctaaataggaaaactcagaaggctaggtttcagcaagacagtgatgtactctgtctctatgtcatcccatggaggggtgtgccagtgcgagggtatctgctaggcactgcggattctattccagtgcagagtaccttctctgtcccacgggaaattactgatatagtttttaaaattgagctgtattttcaagcagctttgcttggaatcattgttactgcaatgccaccttactttgccatggaaaatgcagagaatcataagatcaaagcttatactcaacttaaactttcaggtcttttgccatctgcatattggattggacaagctgttgttgatatccccttattttttatcattcttattttgatgctaggaagcttattggcatttcattatggattatatttttatactgtaaagttccttgctgtggttttttgccttattggttatgttccatcagttattctgttcacttatattgcttctttcacctttaagaaaattttaaataccaaagaattttggtcatttatctattctgtggcagcgttggcttgtattgcaatcactgaaataactttctttatgggatacacaattgcaactattcttcattatgccttttgtatcatcattccaatctatccacttctaggttgcctgatttctttcataaagatttcttggaagaatgtacgaaaaaatgtggacacctataatccatgggataggctttcagtagctgttatatcgccttacctgcagtgtgtactgtggattttcctcttacaatactatgagaaaaaatatggaggcagatcaataagaaaagatccctttttcagaaacctttcaacgaagtctaaaaataggaagcttccagaaccaccagacaatgaggatgaagatgaagatgtcaaagctgaaagactaaaggtcaaagagctgatgggttgccagtgttgtgaggagaaaccatccattatggtcagcaatttgcataaagaatatgatgacaagaaagattttcttctttcaagaaaagtaaagaaagtggcaactaaatacatctctttctgtgtgaaaaaaggagagatcttaggactattgggtccaaatggtgctggcaaaagcacaattattaatattctggttggtgatattgaaccaacttcaggccaggtatttttaggagattattcttcagagacaagtgaagatgatgattcactgaagtgtatgggttactgtcctcagataaaccctttgtggccagatactacattgcaggaacattttgaaatttatggagctgtcaaaggaatgagtgcaagtgacatgaaagaagtcataagtcgaataacacatgcacttgatttaaaagaacatcttcagaagactgtaaagaaactacctgcaggaatcaaacgaaagttgtgttttgctctaagtatgctagggaatcctcagattactttgctagatgaaccatctacaggtatggatcccaaagccaaacagcacatgtggcgagcaattcgaactgcatttaaaaacagaaagcgggctgctattctgaccactcactatatggaggaggcagaggctgtctgtgatcgagtagctatcatggtgtctgggcagttaagatgtatcggaacagtacaacatctaaagagtaaatttggaaaaggctactttttggaaattaaattgaaggactggatagaaaacctagaagtagaccgccttcaaagagaaattcagtatattttcccaaatgcaagccgtcaggaaagtttttcttctattttggcttataaaattcctaaggaagatgttcagtccctttcacaatctttttttaagctggaagaagctaaacatgcttttgccattgaagaatatagcttttctcaagcaacattggaacaggt

SEQ ID NO: 10234 - DNA, 4062 bp, Homo sapiens
gttgaattttttgttactgtggcttttggatttattggccttatgataatcctcatagaaagttttcccaaatcgttagtgtggcttttcagtcctttctgtcactgtacttttgtgattggtattgcacaggtcatgcatttagaagattttaatgaaggtgcttcattttcaaatttgactgcaggcccatatcctctaattattacaattatcatgctcacacttaatagtatattctatgtcctcttggctgtctatcttgatcaagtcattccaggggaatttggcttacggagatcatctttatattttctgaagccttcatattggtcaaagagcaaaagaaattatgaggagttatcagagggcaatgttaatggaaatattagttttagtgaaattattgagccagtttcttcagaatttgtaggaaaagaagccataagaattagtggtattcagaagacatacagaaagaagggtgaaaatgtggaggctttgagaaatttgtcatttgacatatatgagggtcagattactgccttacttggccacagtggaacaggaaagagtacattgatgaatattctttgtggactctgcccaccttctgatgggtttgcatctatatatggacacagagtctcagaaatagatgaaatgtttgaagcaagaaaaatgattggcatttgtccacagttagatatacactttgatgttttgacagtagaagaaaatttatcaattttggcttcaatcaaagggataccagccaacaatataatacaagaagtgcagaaggttttactagatttagacatgcagactatcaaagataaccaagctaaaaaattaagtggtggtcaaaaaagaaagctgtcattaggaattgctgttcttgggaacccaaagatactgctgctagatgaaccaacagctggaatggacccctgttctcgacatattgtatggaatcttttaaaatacagaaaagccaatcgggtgacagtgttcagtactcatttcatggatgaagctgacattcttgcagataggaaagctgtgatatcacaaggaatgctgaaatgtgttggttcttcaatgttcctcaaaagtaaatgggggatcggctaccgcctgagcatgtacatagacaaatattgtgccacagaatctctttcttcactggttaaacaacatatacctggagctactttattacaacagaatgaccaacaacttgtgtatagcttgcctttcaaggacatggacaaattttcaggaattgcttgatagacaaaaggatgttattgatgtttgttttctgccctagacagtcattcaaatttgggtgtcatttcttatggtgtttccatgacgactttggaagacgtatttttaaagctagaagttgaagcagaaattgaccaagcagattatagtgtatttactcagcagccactggaggaagaaatggattcaaaatcttttgatgaaatggaacagagcttacttattctttctgaaaccaaggctgctctagtgagcaccatgagcctttggaaacaacagatgtatacaatagcaaagtttcatttctttaccttgaaacgtgaaagtaaatcagtgagatcagtgttgcttctgcttttaatttttttcacagttcagatttttatgtttttggttcatcactcttttaaaaatgctgtggttcccatcaaacttgttccagacttatattttctaaaacctggagacaaaccacataaatacaaaacaagtctgcttcttcaaaattctgctggtgagagtgtgtgaagactcagatatcagtgatcttattagctttttcacaagccagaacataatggtgacgatgattaatgacagtgactatgtatccgtggctccccatagtgcggctttaaatgtgatgcattcagaaaaggactatgtttttgcagctgttttcaacagtactatggtttattctttacctatattagtgaatatcattagtaactactatctttatcatttaaatgtgactgaaaccatccagatctggagtaccccattctttcaagaaattactgatatagtttttaaaattgagctgtattttcaagcagctttgcttggaatcattgttactgcaatgccaccttactttgccatggaaaatgcagagaatcataagatcaaagcttatactcaacttaaactttcaggtcttttgccatctgcatattggattggacaagctgttgttgatatccccttattttttatcattcttattttgatgctaggaagcttattggcatttcattatggattatatttttatactgtaaagttccttgctgtggttttttgccttattggttatgttccatcagttattctgttcacttatattgcttctttcacctttaagaaaattttaaataccaaagaattttggtcatttatctattctgtggcagcgttggcttgtattgcaatcactgaaataactttctttatgggatacacaattgcaactattcttcattatgccttttgtatcatcattccaatctatccacttctaggttgcctgatttctttcataaagatttcttggaagaatgtacgaaaaaatgtggacacctataatccatgggataggctttcagtagctgttatatcgccttacctgcagtgtgtactgtggattttcctcttacaatactatgagaaaaaatatggaggcagatcaataagaaaagatccctttttcagaaacctttcaacgaagtctaaaaataggaagcttccagaaccaccagacaatgaggatgaagatgaagatgtcaaagctgaaagactaaaggtcaaagagctgatgggttgccagtgttgtgaggagaaaccatccattatggtcagcaatttgcataaagaatatgatgacaagaaagattttcttctttcaagaaaagtaaagaaagtggcaactaaatacatctctttctgtgtgaaaaaaggagagatcttaggactattgggtccaaatggtgctggcaaaagcacaattattaatattctggttggtgatattgaaccaacttcaggccaggtatttttaggagattattcttcagagacaagtgaagatgatgattcactgaagtgtatgggttactgtcctcagataaaccctttgtggccagatactacattgcaggaacattttgaaatttatggagctgtcaaaggaatgagtgcaagtgacatgaaagaagtcataagtcgaataacacatgcacttgatttaaaagaacatcttcagaagactgtaaagaaactacctgcaggaatcaaacgaaagttgtgttttgctctaagtatgctagggaatcctcagattactttgctagatgaaccatctacaggtatggatcccaaagccaaacagcacatgtgatgtatcggaacagtacaacatctaaagagtaaatttggaaaaggctactttttggaaattaaattgaaggactggatagaaaacctagaagtagaccgccttcaaagagaaattcagtatattttcccaaatgcaagccgtcaggaaagtttttcttctattttggcttataaaattcctaaggaagatgttcagtccctttcacaatctttttttaagctggaagaagctaaacatgcttttgccattgaagaatatagcttttctcaagcaacattggaacaggtttttgtagaactcactaaagaacaagaggaggaagataatagttgtggaactttaaacagcacactttggtgggaacgaacacaagaagatagagtagtattttgaatttgtattgttcggtctgcttactgggacttctttctttttcacttaattttaactttggtttaaaaagttttttattggaatggtaactggagaaccaagaacgcacttgaaatttttctaagctccttaattgaaatgctgtggttgtgtgttttgcttttctttaaataaaacgtatgtataattaa

SEQ ID NO: 10235 - DNA, 20328 bp, Homo sapiens
cgcgtccaggcctgacagctctgcggctcgggccctgaggtgaggcgggcgtcgcgggcggcggcggcgcttgaggctagcctgggacagccgtccctgggggagttgaggggacgaggaggggctggccagcgagggacggcggggagagaaggggagttcggcgtctgaggtgtggggtgaagcgggctcggaagcgggcagaggcggcgagctgagggaaacagacctccctcagctcccgggaagcgcgggttgccagcctcggggatgcggtgggagcgcccaggatgcggacgtgagggggtcggggccctgcggcgggggctccgcgaggctcccctgggaccgggtccggccgtgggacttcgggacactgcctttgcctggacgctgtcgttccaccctcagcaacctcagggaaagaaggaaaacaaatattgatgtaaatttccgtctgaacagctgggtaatgagcgcttgctcttccctgcgaggttacgcgcggatcattaccttgcgtgttaaaaggagtttcagtgagaagaaaatgcgcagatctcatgacacagtttgggagggaaattccctgatcctaaaacacgaataggagctccaggcatggaaatacttaattggatcggaaagctgggcaggctggagctattaagctgaaggaggttttcccctgggctcctcaggcttcgatttacgttttaaataaataagtccgaaaataatgaagataataaccacgtttactttctacaagggcgttctgaaggaatctaagggaagaggagtatttgctggactacagctttaagccaggctcggtattagctcttttcattctgacagcaaccctgtaggattggagggggttattccagttgggcaggtgtggagaatgggcctcaaagaggttaagtaacttattaaggtctcagctagtaaaaggatggagttgagattccaacccgggctgccagaccctaattctggtgctttatttagtatattttgtgtttgccgggagagcaatattgtatgtgttttagggaagactccatagtagggaacattattagggcagttagggctttgtgggtatttgtgttaaaatcaaactaaagaggcgttaatctttgcatatgtgctgtttgagtatatttcctttcaaacagatttagtgtagggaaatcttacattcactataagagcaaatttattagtacattccatgtgtattgcatgtcttttatttttaaagagacagcgtctcgggctagagtgcagtggtgcgatcaaagttcactgcagccttgaacgtctggactctagggaccctgctgaatagctggggctacaggcgtgtgtcactgcgcccaggtaattttttatttgtttttcagagacgaagtcttgctatattgcccaggctggtttgttgcatgtcttttacattccagataccatactatgtgccaagagtaccgatatgaatacaatttataatctctgtccttgagtttagttgagagggtgattgcataaaagaattttatgatattgtactaagtcataacttttctagtatgtaaattagttggattaaaaatagttttaagggcaagcttttaaggacctattatgcataagaaaatttattggatgacttgtcctctgtgtaccattgcattgttattttctccctcagcaagaaacactgtgataaaatttaggttaaattatattgacaactagcatttttttttttttgagacagggtctcattctgtcacccaggatgaagtgcagtggcaggatcttggctcactgcagccttgacttcgcaggctcaagtgatcctcccacctcagcctcccaagtagctgggaccacagttgtgtgcccctacgcctggctatttttttttttttttttttggtagagacagtgtctctctatgttgcccaggttgatcttgaactcttgggctcaagccttcctcccactgggattgccacgtgagccactgcacctgactgcattttgttttattattgcaccaccttacagtaaattttaaagcaataaagaagatgagagcatttataatttatccctttttaagctaaaaggcatattttgtagtgcttttatttcattgattgagaagcaaatgatgtagctaggcaggagtttgtttcatgtgccagatatgttcctaatttctcattccaaaaatatcttagtttaaaagtgtagctaataccagattgcatttaatttcttgtgtttcagagttgtaatgaaatcagtcttcagtttaggctgaaatggcacattgttgaaatgtataacattactttgtggtggattttggaaatctcttttaattgcttcagttttctcagtaaagtaggattcaaggtcataatctgagggtgatcctacagatggaagctttggagatttggggattgggaaagtgatggactagtggaatatgtgattgctaggaaattaaacatgactcacagttgtgaaaagtacagtagaggaaagatatgagtgcacaaattagggtgtctaattttggataccagaaacttcataatccattcccaatgcctgcctttaccgtgttatctagaacatacatctgcaccccttgctccggttcactttgccttatgcctctgccatatggcaggtatccctgttcttcacaaaagtcaagcccttttgtttgggagtctagctttaccattcttttctttctgcctggaaattccattccactcctttccaggctctttctctcttatcacattatattaaattttatctctctgcaaagttagtgacagtgtctaactttattttttttgcctcataatgttggatgcataaatccttcagtaaatgttaagtgaatatgccacttttctcacttcccctcttcttcctttttacaggagttgaccaacgttttttgtaaagtgccagatagtaaatattttaggtttgcagacagtatggtctctgtctcaataactttactgttgtagcacaaaagcagtcatagataatacataaatgaatgagcatggctgtgttccaataacactgtatttatagacactgaaatttgaatttcatataatttttgcatgtcacaagatattattattatttttcaaccttttaaaaatgcagaagcagtgttcctcatgggctgtgccaaacagactgagggttggatttagcccccacctctttcatcatagtttgcacatccttgatctttaaggactctcaggaagccttgataaaggaatctgtggtaagatgatactgggtttaatatttccattggtggtggagaaacaaagataaataagactgttgtttttttcatcaaggatctcatggtcaagttcaagatgaaaatatataaataaataatggtgacagggtatagttactgcagttacagttatgtttactgggtatagaggtaaaacaaaggagtgataatcagctccatgtcaatgttaataatgacatttaggcaatatgattaaaaattgagtttatttgagcataaaacttgaggatggtcacacaggaggacacagactcctgaaggatgaggtaaatgctccaaagtggagaggtttgagggtcctttacataggcaaggcctggggatgcttaacagggttacatcatttttcgtacgaggttagtgcatagttagagcaattcaattagttataggcagtgtttctttttgggggaagggtatatttaacatttcacattaaggatgtaatggtcaaagggtcttttatcacagtcagcggtcttttatccctggcatcatctggtgtgatctaggaacaagaaaataaggaaggaatttcatgtataacaaaaggtcagtaattaagaggtcaagcttcatgacccagtctccaaagtcaaccttcagtgccgaacaacgtttagaagccccaagtagacagactatccattttctgttacatctgcttaggtggatgagaagtaacctctaacagtcatttgttggaggtagggaatgtattttcagctagcctttctggaaatcttttaaggatgctaagaaggtgaccacgtttcttatcaggatggctctaaacatcaggatgactcaacttatttattttatagggtataatcttaatttgtttctcacagaaataaacatggatatgtttttaatcaggtctctatgaaaataatttaaaaaatttaaagttattttacctgctacataataaatggattgtttattccacaggtatttagtacctcctctgctgtgcagtgagttgttttactagctgaaaatatttgaaggagataatggtatcattagataagtgatggattttgcgggggaggtgggggaagagagaggctcttctaaggaaagcactgcttttaacaaaggcagtaggtataatagtagaactaccttagattttaaaaaatactttatagctttcaaatttcttattttaattaattaaattcatgcatcctaaataatttttctctaacaattatttctaaaggttatgtacatttttattacttttagtgatgtggaatatgtttcgtaggacttggaacgtagtaaccagcacttttttttttttttttttttttttgagacggaatcttgctctgttgccaggctggattggcacagtgtcagctgactgcaactttcacctcccgggttcgagtgattctcctgcctcagcctcctgagtagctgggattacaggtgcccgccaccacacccagctaatttttgtatttttagtagagacagggtttcaccatgttggccgggatagtttctgtctcctgacctcgtgatcttcccgcctcagcctcccaaagtgctgggattacaggcgtgaaccactgtgcctggccgtagtaaccagtactttaagataaattaagaagtgaatttttgatattgaactttggattatgcaactcctggtctttaagtcaattaatacattagaaaaggaagatgggctttagtaggctttccattttcttgcaacttattggatttagtataaattattttatctagtaaattatttatctaggaaagttaaatttgattaaatctttagagatgttaggtgtttaaaactcacctaattattatttaaagccctacaacaaacttagcacatttctcaggtatgctgtggaagtatggaaaataactttttttttttagattttgaacccgtatttctctttgtgccactgttttttaacagctaagaattggctttgttaaagagtgttttaaagtatttcattggtaagattttgagttggaaccatacaaattctgctttggtcttgtattaactcagctgctagtgagtgaactcctagatattgccatttagaggcaattaaacttaaacagttaaacttgaggcaggccatgcatctttttactgcgtttttctcttattcttccaaaaaccatcacataaagctataaaattttggaattctagtatagaaagaggaaatgtatagctccatgctaaatacggggtttcttgtatcccaagaaaaggcacctgataagtcaaacccttcatagatgtcccctttttggtcatgcctcatttgtaactttgcagccctgttttcagatatatgcttctgtcaggaacaccgctttcatgtcacctctgctgtgtggatctccacctttctttctggaaacctcattctttcatccacaagagttgttcccatctcaagatattaaccctttagttttgggtgttcgtcaatatagaaaagtactgccttcccacattcttccttcatcccagttttcccaccctaactccctgttaggctagtcagtattgtcctttgggattccagaccctgcaaaacagtggaggatgtggtgaagagaggggcctttgtgattaccatatcagtgagagttgtaatcacccctttttttattctatcttgtttctctgtcttctccccaaaggacaggtataatctctcgaccaattgtcgagagacaatgtggtctcgacacctgaaaaggaagccaaatattttccccagcacctcatcatttgcaaagaatttatagggtagagttagtgtttacattattatgcagaccagtccttgcttatttattcgccatatcccttttcaaattgggcctgcttagacactgtggactggcaggttggaggatgcagcaggcaaagaggagggtgaataggtacgttgttgggttagtttacaaagacctgactatagctttgaagtttctgttttagatcaacgttaaagtttaaaggtttatgaagaattaatgttaagaatgtttcattcttttcaatcaaacagctaaaccatgtatttcatactatgaagaaaaccagtgatcagatgggcttaagagattttttttttgtttcaataacttgaattgaagctcaagattattgaaagttaatattttcatatgattagactaaagcttttgagtataagaaaaatcagattgttgaggtcattcataatactgagtcattggtataatttgatgacagagttaatactttcatcatttttttctctctgtccttttgcaattcattctgtagggtttctttgactcacgcttcaatttagctcactaattcgtctttaaatgaagttcaccccatcttttagtgcttttttatttctatcagttttttatttcatttctaagttctgtaattgcttttttcttaattatctttctcttgttccaagaatatgatattctctattactcttttaaggatattagttatacttttatacacaatcgtgatcaatgtgtataattagttgccatgtacaagccaccattttcagcttttcatgtattaattcttttagtcattttaacaacccaaagaggtaggtactactattgttgtattttacagataataaaacttaggcgcaaaaacattaaataacttgcccaaggtcttgaagttagtatgtagcagaggcaggattcatgtttagttggtttggcttcagaggtcatactcttaacctatactactttgggcattattagttcttatgtttgttaattttggtgcctttgtaatattggttaagatgcttttttgcaagaaatagaatctgatactggttagcttaagtgaaaatgaaaatatattgggaagataataggacatttcacatactccaaggaagaaaaatcgagttgtgagcacagtaggtgtggtacattagaagaaagcttagagtaagaatgtgtaaactttctttcttaaatgttgccattcatgtaattcagtttccttgacttccatccagtctgtgggtctcttagttaattctgccaagagaaattttaactgacacagctcaagagtagtggtggtggtggtgatggtttgtgtgcgttgggatggtgtttggggagttggtttagttttgctttaaaaagctgtgatgagaggtggagtgggtgggcaggttttttagacaaggcccttagagactcaaccttgagttcaggaagcagttctcaaaaaaacaaaaaattctgtgaatccatctactctatgagtctgttatataaaaatgaagagttaagcatccaacattcaaagtggattaataatttagtagcattcacaaaatcaatgtgttttggcaagtaacttgagaatgttcatgctgcattaggttagtgtttctatgtttgtattgtagcaaataatgcttgaatgagtacagctttcttccttccttccctcctattatcaactctttgctaaatgtgatataacatagttgagactgttagaagaatttatttattgaccattacagaagtttatttaacagagtctaatatgaaaatatacatgacttaatttttacatcatagtaaaacaggcccttttgagagggagacatgggtttttctgctgaacagccattatttatacttgttccaaggcttctaacatgatgatgccattacatcgcattaccaccattccaatattgttctgttgcccactagttgccatctccacacattaatctatcacaagattcataaagggatcaaatccccacaatattccttggacatgtctgccaccatttaattttcaatgataactttttgtccatcaattttttcaactcgggagtgtaagctttgctcatggtgtctactccacaggttcacagatgccttggaatggaatgctggaagaatttattttaatgtatcttctattcttgactgcttttgttttgctgtttttaatttactcatttagtatttttacagtatgtctaattgtttaattgctttttttttactatgtaagtaatacatagaaaaaaagcatgaagaaaataaaagttgtctttaattccattgctaatttaaacagttctttccagtcttccttctgtgcatataaagaagatgctcatttaagccaaactttaattatatatatttactggaaaagacaaactgcctctcaaaaattatggaccaggcacggtggctcactcctgtaatcccagcactttgggaggcaaaggcagatggatcacctgaggtcagaagtttgagaccagtctgaccaacatggtgaaatcccatctctactaaaaatacaaaaattagctgagcatggtggcaggcgcctgtaatcccagttacttgggaggctgaggttggagaattgcttgaacccaggagccgagactgtgccattgcactccagcctggacaaaagagtgagactccatctcaaaaaaaaaaaaaaattgtgagttttctttatttaggtgtagacagtcttccagcttgcaacagatggtccttgttttggaggagagttatagcagtggcctcactagataggtttatttaaaacaagggcacagcaatttctctggaaggtttaacaggatttttttgttgttgttgttatttcccctgctatcttctcaatacttcttagtatgcagagatcctaggttactgggttgagtgtatttgaataggggcagtggacattgcagttgagactctgaccacttctattttgagttcagctggaatgaaacctctgaagaatcgagatagctccaatagaggtccacaggcagaaaggatttcaaggatcttcaaagggtaaatgtaccctggaagagggatactggacctgtgataggtacaatgatttagatcattcaatgttattttttgaagtaatttattaaggtaaaatttatttccaaggtaaaactccttaccttgtaagcagtttctcctcattctttactctccctggcctctgacaatcaccagttggcattctgtccctacatttatcttttctggaagtttcctataaagggaatcatataacatttgacatttttagtctgactttcacttgacataacgttttgtatgttcattttaattgtagcatatagcagtacttcattcctttttttttttttttttttttttgagacagagtcttgctctgatgcccaggctggaatgcagtggtgcaatctcagctcactgcaacctctgcctcccagatttaagcaattctgcctcggcttcctgagtagctggagttacaggaacgtaccaccatgcccagctaatttttgtatatttttttttagtagagacggggttttgccatgttggccaagctggtctcaaacccctgacctcaagtgatccacccgccttggcttcccaaagtgctgggaatacaggcatgagccactgcacctagccacttcattcctttctatggctgaataataattgtatgtatatgccacagtttgttcatttatctgtcggtaagtatttgggctgtttctacctttctgctattctgaatagcactactgtgaacgtgtgtgaacatgtactcaattgagtccttatgttcatttcttttgggtgtatacctaggagtggaattgtgaggtcatatagtaaaactgtttttctcagcatctgaaccatttgctttcccgccagtaatgtattccactttctccgcagtttcttatgagaagtctgctctcattcaaattgttactctctgtaggtaatacatcattgttctctgactgctttcaagattttttgttgtcttaattttcagcagtctaattataatgtgtataggcatggattttctttatgttttctgggcttcaccaactttcttgaaacttatgtgtttatatcccttgctaaattggaagttttcagccattaagtctttaattttttttttttttttttagcattaatactctttctcctctccttttataaatctgataatatgaaagttagactttttgttattgtcctatagttttcttttttcttctttttttttttctttgagacagggcctcactttgtcacccaggttggggtgcagtggaacaatctgggctcactgcaacctcctcctactgggttcaagcgattcttttgcctccccagtagctgggattacaggcgcccaccaccacacctggctaatttttgtatttttagtagagatggggttttaccatgttggccaggctggtcttgaactcctgacctcaggtgatctgtctgccttggcctcccaaagtgttgggattatgggcgtaagccagtgtgcccagactgtctcacagttttctgaagcactgttaattttttaaaaatcttttttctctctgttgttcagattggataatgcctattgataatcttcaagtttcctgactttttttctgttgtgttcattctgattttgagccactccatgagttttatttattattgtgtttttctgttctaaagtttccatttgtatttatttcttattgtgtttttgtgttctaaaatttccatttgattctgcttaatgtcttgtttctttgctaagattttctatttttcattgctttcaagagtactttcgattgtttgctgaagcccttaaatagctgctttaaaagttttatcagataatttcaaagtctgtgttatttcagcattggtatctttgattttattttcttagtagagttgctatttttttttttttttgaggcggatccttgctctgtcacccaggctggtgtgaagcggtgcaatcttggctcactgcaacctccgcctcccgggttcaagcagatctcctgcctcagcctcctgagtagctgggattacaggtgtgtgccaccacacccagctaatttttatatttttagtagagacagggtttcaccatgttggtcaggctggtctcaaactcctgacttcgtgatctgcccaccttggcctcccaaagtgctgggattacaggcgtgagccaccgcacccggtcagctattttctacatgcttcatttgcagtgtaatattggattgtatgagactttgggttttgtgttaatacctacagaaaatgttgatattttctcttagcaggctgtcaaccaggttaggttcaggtcataagtttctacccacattctttgaactgtagttgtcattttagtttatttttcaaaaacttttgcagtacctttttggtctgtcttgtgtgtgccttgcagtgaacagtctggatttggacagtggtctgtctgttagttcagtttctcaagcctttgtcacactaataggattggatttatgtatgtccagcttgggaattattacaggaattaaaaacaactttttagagtgctttcctgagctctctttctatttgttcccccttctactttttgcttccctgtggctgctgtttctatcctccagccagagagctagtgtttattttctccattgtgttacacacttgtgcagctgcaaccaccatatccagggcccaatggtaggaggtagagaagaaaagcaaaagggattggcctcatcctcttacaacgatagttccattgaatagagagaaaggttttcctgcctcagagtgttggctgcactaggcttttgttactgtagtctggccctgttaccatgggattgcttgcatgtggggatacaggagaattcagaaaagaaaaaaagatttgctatttctacattctccctgagcattaagacttcccttgcccattcctcaattcaaagctaaggcttcttctggagctgcctctgtgggcggttcgggagataccaaaggagaaaaagtaccactgttgatatggtggtatttcaaattctggtctaccctatttcacatgccttgtttacttttcagagctgacagattgctgctccatgcattctgtccagtttcctaagagagacagcttggagtatgcttaatccatcttacctgggactgaaacagctgcttattttgccgttaaaaattacatgcagtttactgcgtggctccgggtttgtttgtttgtttttcctctttaataggtttattcagaaaacatgtccactgcaattagggaggtaggagtttggagacagaccagaacacttctactgaagaattacttaattaaatgcagaaccaaaaagagtagtgttcaggtaagttaaataactctttcttatgcttttttgcagtttattttgcttgatatattctatcttgaagtgatgatttattttgctaaatatatttttattataattttatttttctttgcttgtaaagtaaaagcttgccatgttagccacagaaaaataactgaattacttaatgctttctaaatgttaaaaattttaataataatttctacatttagttaatttctaacatctgtgcttcattttcagcttttaggcatgtgtttcctaagtttcatgaactaacattccacaataactttgattccagagttttatatcccacaacctcgtattttatggactctagattgagttgcccatgagtattaatattatgacacagatttgtacccacagcatacattacttttgataagggtaaaagaaaggaagaacttgggtaaccagctagtaataatttcaaaggatgaaaacatattattcatcttccctgaaactggtaaaacaattaaacagcaagatgatataatagctcatttctactaaaactgaccgtagaatttaattcagtatggttttggtagtatacatttaggtataattaaagtatgatttctaattcagaattgaataaaggcatttttatggtgaatccatatagggatgttcggtaaattgctttagataaaattatatgagtaaatttattatgttttatgtcaataatctaagatgtttaaatattatcttttatgtcaccttaatttattttgtgacttgaattttaaaatatttcagtaaaactaaatacaaaggaaaaaataatatgcatgttgggttggatgaggtgttcaacacaaaattcttttgggatagaattgcttttattttattcataagaaaggacaaccaaatttcctgttttttcttagtattatattatttgccaagaaatcttgatgatttttgctgccattgttatactttgtaattactttgtttcttttattgtaggaaattctttttccactattttttttattttggttaatattaattagcatgatgcatccaaataagaaatatgaagaagtgcctaatatagaactcaatcctatggacaagtttactctttctaatctaattcttggatatactccagtgactaatattacaagcagcatcatgcagaaagtgtctactgatcatctacctgatggtattgtgagcttatatatatattctgtttataatattaagccttttcaatatttatcagcttgctttattgaatgaatagcagtcttaacacttagagatgtgttcctccaccaaagtcagttttataaaaatactaaaattatttaattctgttgccttatttttcttgtgaaacattaatttatattcttggtggtaggaagcatattttatgtacttttatatttaattcttagaccatttataaaatagtttaagtatacttgtataagatacaagctttgatgggctatttcattttgattctgactttcatataattatgaagctagcaatgtttagctgaatgtggtagcatgtgcctgtagtcccagctactcaagaagttgaggtggggggatcccgtgagcccaaaagtttggggctgcagtgaactatgatcatgccacttcattccagcactccttactctgggcaacagaatgggacccccatctataacaataaaaaatttaaaaaggaagctagaaatatgtgataaagactgtaaagcagtcaccttttcagcttaccatgcttgtttatagaagtgtatggtgtaaactgaagaagtacctaactttggagactacaactatgactatggctaagtccctaactctgttttatttatttatatatatattttttgtagagatgggatcttgctatgttgcccaggttggtctaaactcctgggatcaaatgatcttcctcccttggcctccacctaaagtgccacctaagtcttttttctcaatgtgcacttctcacaaagaaatgaactagaaaacagtgtaagcagtgaagtgccactgaacttaaagtggctgtgagagaacctaaagcaaaagctggagaaagtgacagaaattcttatgctattaatgattaaacaaggaagtgctaaattgtagaaaatgacagattagcatgttattttttgccatatgggatagttgtaattagcttatatgtcatcgcattattggattttatgtcattgaatggaaagtgttaattatacagtcagaagccaggtaacttttattccattggtttctttctctggctatttctatttaatattttgattaaatacacttcttgttatatggtagtgtatcatattaggtacaagtagtatagattaccatgagaatttagtgtacaagctcaaaaagctgattaaaaatgttgaaatgaaattcattggtaattctgagtaggaggaaagaatataaaccaaagaaatatgaggccaggcatggtgactcacgcctgtaatcccagcactttgggaggccgaggtgagcagatcacctgaggtcaggggtttgagaccagactggccaacatggtgaaaccctgtctctactaaaaatacaaaaaaattatccagccatggtggtgggtgcctgtagtcccagctacttgggaggttgaggcaggagaattgcttgaacccgggaggcggaggttgcagtgagctgagattgtaccactgcactcaagcctggcgacagagcaacactcaatatctcaaaaacaaaaaacaaaacaaaaaaagaacaaacaaacaaaaaacaactaagtcagtgtgtattagatgccaaaatagtgtatacatatacacaaatttttttagacttctgtatttttaacaacagaactatctgaaaatgggttatgcatacatacataacatgactggtaggatgttgaactaacaccctctttattcatgtaaatcctggagttccctgtccctcttaaaaggcctggaaaatctattaattaacatttaagtaatactttagaatctatgaagcattttttttttgtctttttcttcttttgtttgagatgggatctcactgtcaagctggtttgcagtgctgtgatctcagctcactgcagcctctgcctcctgggctcaagtgatactcccgcttcagcctcctgagtagctgggactacaggtgcacaccaccacacctggctaatttttgtattttttgtagagacagggtttcgccatgctacctaggctggtctcaagcaatctactcctggactcaagcaatctacctgcctccaccttccaaagtgctggcattataggtgtgaggcaccacatccagcctacaaagcgttttgatgtttgttacttcacttgttcttcacaacaacccagtgtcatcagctaggcattgtagatgaggacactaaagtctgaagagttcaaatcgcctgtctgtgctcacacagttaatacatgaagacgttaagtactaattctatattctttccatttcaccacatgtttgaagcttctgtagtgaaaattagttgcttgtaaacaaaactacaagaaaatatttaaaaattagtcttatctgatgagaaagaatgattacagtattttttccacttatcttctaagaaaggaacaagcaatattggatttgaatgacaatttttatttaaggaggagttgtgtcatagttactaaaatgcctatttagtttctgagaaggattgtggaattttctttataagaaatatttaaaaataaaaaattcatatatttactaaaaagttatttttgtgcaggtgcactggctcatgcctgtaatcccaactagtccggaggctcaggtgggaggatcacttgaggccaggagttcaagaccagcttgggtaatgtagtgacacctcatttctaccaaaattaaaaacaaaaaattagccaggcatggtgatgagtgactatcgaccaagctctactccagaagctgaggtgggaggatctcttgacccctgaagtttgagtgcaagatccagtgcactgcaggctgggtaacagaacaaagccctgtctctaaaaaaatataaaataaaataacgaagttattttttagtttaacttcgagatagataaatgaactgcattactaataatttttataattttattgctgcctgaaattagtataattaattgaggttttgagaaacagcaatttcttgaagaaatatgagttctgcatattgttttatactatatttcatatatttataacataagtataacactgacacatttctgtaatcaaatgacagctgagtagtgtctgcaacattgtaccattttattattattattttgttggaagaattgtcttctttttgtttgtttgttttttttgagacatggtctcactctgttgcctaagctggagtgcagttgctcagttatggctcactgcagcctcgacctcctagctcaaatgatcctcccacctccgcctcccaagtagctggaagtgcaggcacacatcactacacctggctaatttttttattttttggagacagaacctcaccatgttgcccaggttggacttgaacttctgagctcaagcaatcctcccatcttggtcttccaaaatgttgggattacaggtgtgagccactgtgcttggactgttttcattttttaagaagtaaatatagcaaaagtgtttataaaatattccattcatcaaaataattgtaaacttgatctactgtattgtggtattttaatttgtgagctaactatattgttatgatatcttacagtcataattactgaagaatatacaaatgaaaaagaaatgttaacatccagtctctctaagccgagcaactttgtaggtgtggttttcaaagactccatgtcctatgaacttcgtttttttcctgatatgattccagtatcttctatttatatggattcaagaggtaaatagccctacataatcattgaagatcaattaaatgcatatctttgctgcttgcagttcatagtcaaaattttatatagttcaatattggcattttcaactattcttacttgttccaataggaaaactgagaagtatagcataaaaatatttatttataaatacctatctacttctacacataaaacatttttatatatacccattttgatttaatacatttatatatattaaatacagtagcataaagcaaaattgcattttgggttatatgactttctaaatctctttttttcatgtaattgtttttacttgtggtatgtacaaatctttaaaatcttgaggtcttctactagtgaacttgattagttttatatttgaaacatgggaaacaacctttggttgtttaaatctatgaagaaatattatcaaccacaaacatttattgagcaatgttaaagtcactatgctaaatactgaatttgtgactttatttcaaaaagcccttctgaaaattcttttttcctgtttgcttaactttgacttttccttgcttctggaagtgctttagagctaagtcatgtagaatgatttactttaaaacaaaaaagtaacttgttttaaataactacaattaatttctttctttacatttttattcatttactatttagtattctaacacatataacttttatttcaaaatttcaagtaaatgatcagaaatcttgtaagtattgtttacctttgaaagtcagtagcttatttctttggtcctgtaaagattgattgattatattgttttggtaggtatctctccatataatatctttaaaacgatgcacttgcatgttgtacagaatcttagatctcatattcttccccccatagctggctgttcaaaatcatgtgaggctgctcagtactggtcctcaggtttcacagttttacaagcatccatagatgctgccattatacaggtaaatatgataaaggaagaaatacaaaaactatgccattttaaaataaatatttccttattctttacaatagtatttggtttgactactgtcaaatgtacaaaatatgtaacctactacaactcctttgagaaaaaagataaaaaagtcatattttctgatttggtactttttgttgtgtttcatattttagcagaaaaactggccatgaaatttatttttaaaaatcttacttttgtgtctgggctagataacagtagatgaagttaccttagaattcaaactattcaaattaaccatatttcattcttccatgttctgtatggatctgtggcttttttttccatttgccctttctaattgaatttactatgctacaaaatttactatgctacaaaatattgtaatttcaaaatgtatatcaaccatcttgtctgctaaacaatacgtttaaagtatgtatgaataatgatggagctggaatcaaaatctgaacaggagtcttgtctctgttgttacactgctatgtagtaaaatgactattataatagtactttacttgacagcattgtcgtaagaaccaaatgagatgatttatgtataattgtcttgtaaacttttgtagtacagtataaacatattagggacgtgtaatattgcacaaattcaataatacagaaatttaaggtaaagatagtgaaatacggatctattacattgatgatgttgtatcacctatttgtattttggccaaagtttttagccatccacagcacagaccacactggatgaataggcaggatagatttcaatttaggcattaattggaatgttagaagtattatgtggcataaatagttttattatttggtctatatgtgctaaatatatagactttaaagcagtagaagggcatggtatttagaagaacattttttaaacaatcataggaatgatggcactaataatcactcctaaattcctaaattttgaagatgtatatttttactaagatacatataattgtctgcttaagatgataattgtgcaattttattttatttgacaaattatttaatcaaaatttatacacttactgactttaaactttaaactttatggtatacttttagaataaattgaatgcaatattctactcagaattatgatattggggtcactcactttatttcaggtatggagctttttgaggattgtatttgtactaggttactgaccaaatttagggatatagctgtcccgttttactaggggctgctatcataactaaattaatttgatgtatttacattttctaattatagttgaagaccaatgtttctctttggaaggagctggagtcaactaaagctgttattatgggagaaactgctgttgtagaaatagatacctttccccgaggagtaattttaatatacctagttatagcattttcaccttttggatactttttggcaattcatatcgtagcagaaaaagaaaaaaaaataaaagaa

SEQ ID NO: 10236 - DNA, 804 bp, Homo sapiens
cgcgtccaggcctgacagctctgcggctcgggccctgaggtttattcagaaaacatgtccactgcaattagggaggtaggagtttggagacagaccagaacacttctactgaagaattacttaattaaatgcagaaccaaaaagagtagtgttcaggaaattctttttccactattttttttattttggttaatattaattagcatgatgcatccaaataagaaatatgaagaagtgcctaatatagaactcaatcctatggacaagtttactctttctaatctaattcttggatatactccagtgactaatattacaagcagcatcatgcagaaagtgtctactgatcatctacctgatgtcataattactgaagaatatacaaatgaaaaagaaatgttaacatccagtctctctaagccgagcaactttgtaggtgtggttttcaaagactccatgtcctatgaacttcgtttttttcctgatatgattccagtatcttctatttatatggattcaagagctggctgttcaaaatcatgtgaggctgctcagtactggtcctcaggtttcacagttttacaagcatccatagatgctgccattatacagttgaagaccaatgtttctctttggaaggagctggagtcaactaaagctgttattatgggagaaactgctgttgtagaaatagatacctttccccgaggagtaattttaatatacctagttatagcattttcaccttttggatactttttggcaattcatatcgtagcagaaaaagaaaaaaaaataaaagaa

SEQ ID NO: 10237 - DNA, 2341 bp, Homo sapiens
agttagcttttgatagattgacttggaagtatgttgagttttttaaaaatatggctgtctactttgaatttgaattcacttaatatttcaataacttggaatattatttttaggcatagtacttgttatttcaaaaaattgttatatattggattaattatgtaacacaaatatgaaataaacatatgagtttctacttacataaataaataattgagtaaagaaatgtgtcagagaagaggtacatcttccttacagaacaattccaaataataatatatgtagataatacccacttcaagggaggaggcttaatctcctatcccccaagtttggacgggacttagccagtttcttgtaaaaaatgaacgacagaaggagaaaaatagtaactttacagttgagaaagctggcaaatactaccttaactaaacgatgttgtgcagatatcatgtattcactgatatgatatgatggaaaaagtactacagctgtgtaatattctctccaaaacccataacccaagtgtagtcatgagaaaaatatcagactaacccaaattgagggaccttctaacacacacctgaccagtacttctcaaaactgtcaaaatcatgaaaaagacagaaagagtaagaaactgtcacccacagttagagactaaggtgacgtgacagccaagaacactacggtatcctggatagaacctggaataaacaaaggacactaatagaaaattggtgaaatctaaataaagtatggagttcagtgacaaggaatgtaccaatgtcggtgtctcagttgtgaggaatttaccatggtaatataagatgataagattagggaaactgaaaccggataaagagtgtatggggatgctgtattttctttgtaatttttctctaaatataaaggtatatttttttaaaatgtagttatatgtgtgagagattattctttgaagctgtcattttatatctgagctttcttttaaaaaattacttcagatgtatcggaacagtacaacatctaaagagtaaatttggaaaaggctactttttggaaattaaattgaaggactggatagaaaacctagaagtagaccgccttcaaagagaaattcagtatattttcccaaatgcaagccgtcaggaaaggtaaaattttaaagaatgtggttatatttctttatagagcaaaggttataaaaagttattatattaaggattaagtgaaaaatcatcttttcattcatagaccatatatatatatatctctgtgtgtgaatatatatgtatattttttcatatatatgaaatatatgtatctgtagatagataatttatatatctctctctgtattatcaccaatactggactaatgaagtctgatggctggtgttttatatctgccttagtattagatttttcaatattcagtagtatttaaatttttttaacattcttagtagtaatgagagttgttttgcatgaaaatgttattattttaaacaattttcatccaactaaataccaaaataagttattgaatttaattttgaattttaaacatgttgaactttagctttagaacataatagtagtaatttttaatttttttccatattttatctttttttccagtttttcttctattttggcttataaaattcctaaggaagatgttcagtccctttcacaatctttttttaagctggaagaaggtaagtagtatcttctattttggcttataaaattcctaaggaagatgttcagtccctttcacaatctttttttaagctggaagaaggtaagtagttgaaaagcacttatgttgtagctctcaaattatgaaagaattttatttaaaaagtttaaaactggggactcggtttattttagaaactatggcagataagaagataaccttttattcatttaatctaagacacaggtaaacactaatgtcatagggattttgtagataaactctattgtaatgtaaaccttttacaatttttagagagcattgacacagtttatcacattgcatctatgagaagggtcagcttaattatcgagtctttgcagttagtccagcagcaagagctctgagtttcttgaatccttacttcatactggtccatagaagtagcaacactatcaagactccagtggcaaagagaattctgagtgtagcgaggggtgggcagtccccaaaattttaaggaagcttatagaatcttggcatttaaaaaataagtggtatgtaggataaatatatatatgctggtgacagttgagggagatcacctcctggaagaatcaggtattcatatgc

SEQ ID NO: 10238 - DNA, 1854 bp, Homo sapiens
agttagcttttgatagattgacttggaagtatgttgagttttttaaaaatatggctgtctactttgaatttgaattcacttaatatttcaataacttggaatattatttttaggcatagtacttgttatttcaaaaaattgttatatattggattaattatgtaacacaaatatgaaataaacatatgagtttctacttacataaataaataattgagtaaagaaatgtgtcagagaagaggtacatcttccttacagaacaattccaaataataatatatgtagataatacccacttcaagggaggaggcttaatctcctatcccccaagtttggacgggacttagccagtttcttgtaaaaaatgaacgacagaaggagaaaaatagtaactttacagttgagaaagctggcaaatactaccttaactaaacgatgttgtgcagatatcatgtattcactgatatgatatgatggaaaaagtactacagctgtgtaatattctctccaaaacccataacccaagtgtagtcatgagaaaaatatcagactaacccaaattgagggaccttctaacacacacctgaccagtacttctcaaaactgtcaaaatcatgaaaaagacagaaagagtaagaaactgtcacccacagttagagactaaggtgacgtgacagccaagaacactacggtatcctggatagaacctggaataaacaaaggacactaatagaaaattggtgaaatctaaataaagtatggagttcagtgacaaggaatgtaccaatgtcggtgtctcagttgtgaggaatttaccatggtaatataagatgataagattagggaaactgaaaccggataaagagtgtatggggatgctgtattttctttgtaatttttctctaaatataaaggtatatttttttaaaatgtagttatatgtgtgagagattattctttgaagctgtcattttatatctgagctttcttttaaaaaattacttcagatgtatcggaacagtacaacatctaaagagtaaatttggaaaaggctactttttggaaattaaattgaaggactggatagaaaacctagaagtagaccgccttcaaagagaaattcagtatattttcccaaatgcaagccgtcaggaaagtttttcttctattttggcttataaaattcctaaggaagatgttcagtccctttcacaatctttttttaagctggaagaaggtaagtagtatcttctattttggcttataaaattcctaaggaagatgttcagtccctttcacaatctttttttaagctggaagaaggtaagtagttgaaaagcacttatgttgtagctctcaaattatgaaagaattttatttaaaaagtttaaaactggggactcggtttattttagaaactatggcagataagaagataaccttttattcatttaatctaagacacaggtaaacactaatgtcatagggattttgtagataaactctattgtaatgtaaaccttttacaatttttagagagcattgacacagtttatcacattgcatctatgagaagggtcagcttaattatcgagtctttgcagttagtccagcagcaagagctctgagtttcttgaatccttacttcatactggtccatagaagtagcaacactatcaagactccagtggcaaagagaattctgagtgtagcgaggggtgggcagtccccaaaattttaaggaagcttatagaatcttggcatttaaaaaataagtggtatgtaggataaatatatatatgctggtgacagttgagggagatcacctcctggaagaatcaggtattcatatgc

SEQ ID NO: 10239 - DNA, 13960 bp, Homo sapiens
tttctaggagccccgccctcaggtgcgctctgcaggaggcggggcgcgacttcggcgccgccagctctgcctgcgccaggagcgcgcgggtgcgcgcggccgcgccctcgcacagatcccagctgggtcacccgcactgagtcaacagactgagcgcgtccaggcctgacagctctgcggctcgggccctgaggtgaggcgggcgtcgcgggcggcggcggcgcttgaggctagcctgggacagccgtccctgggggagttgaggggacgaggaggggctggccagcgagggacggcggggagagaaggggagttcggcgtctgaggtgtggggtgaagcgggctcggaagcgggcagaggcggcgagctgagggaaacagacctccctcagctcccgggaagcgcgggttgccagcctcggggatgcggtgggagcgcccaggatgcggacgtgagggggtcggggccctgcggcgggggctccgcgaggctcccctgggaccgggtccggccgtgggacttcgggacactgcctttgcctggacgctgtcgttccaccctcagcaacctcagggaaagaaggaaaacaaatattgatgtaaatttccgtctgaacagctgggtaatgagcgcttgctcttccctgcgaggttacgcgcggatcattaccttgcgtgttaaaaggagtttcagtgagaagaaaatgcgcagatctcatgacacagtttgggagggaaattccctgatcctaaaacacgaataggagctccaggcatggaaatacttaattggatcggaaagctgggcaggctggagctattaagctgaaggaggttttcccctgggctcctcaggcttcgatttacgttttaaataaataagtccgaaaataatgaagataataaccacgtttactttctacaagggcgttctgaaggaatctaagggaagaggagtatttgctggactacagctttaagccaggctcggtattagctcttttcattctgacagcaaccctgtaggattggagggggttattccagttgggcaggtgtggagaatgggcctcaaagaggttaagtaacttattaaggtctcagctagtaaaaggatggagttgagattccaacccgggctgccagaccctaattctggtgctttatttagtatattttgtgtttgccgggagagcaatattgtatgtgttttagggaagactccatagtagggaacattattagggcagttagggctttgtgggtatttgtgttaaaatcaaactaaagaggcgttaatctttgcatatgtgctgtttgagtatatttcctttcaaacagatttagtgtagggaaatcttacattcactataagagcaaatttattagtacattccatgtgtattgcatgtcttttatttttaaagagacagcgtctcgggctagagtgcagtggtgcgatcaaagttcactgcagccttgaacgtctggactctagggaccctgctgaatagctggggctacaggcgtgtgtcactgcgcccaggtaattttttatttgtttttcagagacgaagtcttgctatattgcccaggctggtttgttgcatgtcttttacattccagataccatactatgtgccaagagtaccgatatgaatacaatttataatctctgtccttgagtttagttgagagggtgattgcataaaagaattttatgatattgtactaagtcataacttttctagtatgtaaattagttggattaaaaatagttttaagggcaagcttttaaggacctattatgcataagaaaatttattggatgacttgtcctctgtgtaccattgcattgttattttctccctcagcaagaaacactgtgataaaatttaggttaaattatattgacaactagcatttttttttttttgagacagggtctcattctgtcacccaggatgaagtgcagtggcaggatcttggctcactgcagccttgacttcgcaggctcaagtgatcctcccacctcagcctcccaagtagctgggaccacagttgtgtgcccctacgcctggctatttttttttttttttttttggtagagacagtgtctctctatgttgcccaggttgatcttgaactcttgggctcaagccttcctcccactgggattgccacgtgagccactgcacctgactgcattttgttttattattgcaccaccttacagtaaattttaaagcaataaagaagatgagagcatttataatttatccctttttaagctaaaaggcatattttgtagtgcttttatttcattgattgagaagcaaatgatgtagctaggcaggagtttgtttcatgtgccagatatgttcctaatttctcattccaaaaatatcttagtttaaaagtgtagctaataccagattgcatttaatttcttgtgtttcagagttgtaatgaaatcagtcttcagtttaggctgaaatggcacattgttgaaatgtataacattactttgtggtggattttggaaatctcttttaattgcttcagttttctcagtaaagtaggattcaaggtcataatctgagggtgatcctacagatggaagctttggagatttggggattgggaaagtgatggactagtggaatatgtgattgctaggaaattaaacatgactcacagttgtgaaaagtacagtagaggaaagatatgagtgcacaaattagggtgtctaattttggataccagaaacttcataatccattcccaatgcctgcctttaccgtgttatctagaacatacatctgcaccccttgctccggttcactttgccttatgcctctgccatatggcaggtatccctgttcttcacaaaagtcaagcccttttgtttgggagtctagctttaccattcttttctttctgcctggaaattccattccactcctttccaggctctttctctcttatcacattatattaaattttatctctctgcaaagttagtgacagtgtctaactttattttttttgcctcataatgttggatgcataaatccttcagtaaatgttaagtgaatatgccacttttctcacttcccctcttcttcctttttacaggagttgaccaacgttttttgtaaagtgccagatagtaaatattttaggtttgcagacagtatggtctctgtctcaataactttactgttgtagcacaaaagcagtcatagataatacataaatgaatgagcatggctgtgttccaataacactgtatttatagacactgaaatttgaatttcatataatttttgcatgtcacaagatattattattatttttcaaccttttaaaaatgcagaagcagtgttcctcatgggctgtgccaaacagactgagggttggatttagcccccacctctttcatcatagtttgcacatccttgatctttaaggactctcaggaagccttgataaaggaatctgtggtaagatgatactgggtttaatatttccattggtggtggagaaacaaagataaataagactgttgtttttttcatcaaggatctcatggtcaagttcaagatgaaaatatataaataaataatggtgacagggtatagttactgcagttacagttatgtttactgggtatagaggtaaaacaaaggagtgataatcagctccatgtcaatgttaataatgacatttaggcaatatgattaaaaattgagtttatttgagcataaaacttgaggatggtcacacaggaggacacagactcctgaaggatgaggtaaatgctccaaagtggagaggtttgagggtcctttacataggcaaggcctggggatgcttaacagggttacatcatttttcgtacgaggttagtgcatagttagagcaattcaattagttataggcagtgtttctttttgggggaagggtatatttaacatttcacattaaggatgtaatggtcaaagggtcttttatcacagtcagcggtcttttatccctggcatcatctggtgtgatctaggaacaagaaaataaggaaggaatttcatgtataacaaaaggtcagtaattaagaggtcaagcttcatgacccagtctccaaagtcaaccttcagtgccgaacaacgtttagaagccccaagtagacagactatccattttctgttacatctgcttaggtggatgagaagtaacctctaacagtcatttgttggaggtagggaatgtattttcagctagcctttctggaaatcttttaaggatgctaagaaggtgaccacgtttcttatcaggatggctctaaacatcaggatgactcaacttatttattttatagggtataatcttaatttgtttctcacagaaataaacatggatatgtttttaatcaggtctctatgaaaataatttaaaaaatttaaagttattttacctgctacataataaatggattgtttattccacaggtatttagtacctcctctgctgtgcagtgagttgttttactagctgaaaatatttgaaggagataatggtatcattagataagtgatggattttgcgggggaggtgggggaagagagaggctcttctaaggaaagcactgcttttaacaaaggcagtaggtataatagtagaactaccttagattttaaaaaatactttatagctttcaaatttcttattttaattaattaaattcatgcatcctaaataatttttctctaacaattatttctaaaggttatgtacatttttattacttttagtgatgtggaatatgtttcgtaggacttggaacgtagtaaccagcacttttttttttttttttttttttttgagacggaatcttgctctgttgccaggctggattggcacagtgtcagctgactgcaactttcacctcccgggttcgagtgattctcctgcctcagcctcctgagtagctgggattacaggtgcccgccaccacacccagctaatttttgtatttttagtagagacagggtttcaccatgttggccgggatagtttctgtctcctgacctcgtgatcttcccgcctcagcctcccaaagtgctgggattacaggcgtgaaccactgtgcctggccgtagtaaccagtactttaagataaattaagaagtgaatttttgatattgaactttggattatgcaactcctggtctttaagtcaattaatacattagaaaaggaagatgggctttagtaggctttccattttcttgcaacttattggatttagtataaattattttatctagtaaattatttatctaggaaagttaaatttgattaaatctttagagatgttaggtgtttaaaactcacctaattattatttaaagccctacaacaaacttagcacatttctcaggtatgctgtggaagtatggaaaataactttttttttttagattttgaacccgtatttctctttgtgccactgttttttaacagctaagaattggctttgttaaagagtgttttaaagtatttcattggtaagattttgagttggaaccatacaaattctgctttggtcttgtattaactcagctgctagtgagtgaactcctagatattgccatttagaggcaattaaacttaaacagttaaacttgaggcaggccatgcatctttttactgcgtttttctcttattcttccaaaaaccatcacataaagctataaaattttggaattctagtatagaaagaggaaatgtatagctccatgctaaatacggggtttcttgtatcccaagaaaaggcacctgataagtcaaacccttcatagatgtcccctttttggtcatgcctcatttgtaactttgcagccctgttttcagatatatgcttctgtcaggaacaccgctttcatgtcacctctgctgtgtggatctccacctttctttctggaaacctcattctttcatccacaagagttgttcccatctcaagatattaaccctttagttttgggtgttcgtcaatatagaaaagtactgccttcccacattcttccttcatcccagttttcccaccctaactccctgttaggctagtcagtattgtcctttgggattccagaccctgcaaaacagtggaggatgtggtgaagagaggggcctttgtgattaccatatcagtgagagttgtaatcacccctttttttattctatcttgtttctctgtcttctccccaaaggacaggtataatctctcgaccaattgtcgagagacaatgtggtctcgacacctgaaaaggaagccaaatattttccccagcacctcatcatttgcaaagaatttatagggtagagttagtgtttacattattatgcagaccagtccttgcttatttattcgccatatcccttttcaaattgggcctgcttagacactgtggactggcaggttggaggatgcagcaggcaaagaggagggtgaataggtacgttgttgggttagtttacaaagacctgactatagctttgaagtttctgttttagatcaacgttaaagtttaaaggtttatgaagaattaatgttaagaatgtttcattcttttcaatcaaacagctaaaccatgtatttcatactatgaagaaaaccagtgatcagatgggcttaagagattttttttttgtttcaataacttgaattgaagctcaagattattgaaagttaatattttcatatgattagactaaagcttttgagtataagaaaaatcagattgttgaggtcattcataatactgagtcattggtataatttgatgacagagttaatactttcatcatttttttctctctgtccttttgcaattcattctgtagggtttctttgactcacgcttcaatttagctcactaattcgtctttaaatgaagttcaccccatcttttagtgcttttttatttctatcagttttttatttcatttctaagttctgtaattgcttttttcttaattatctttctcttgttccaagaatatgatattctctattactcttttaaggatattagttatacttttatacacaatcgtgatcaatgtgtataattagttgccatgtacaagccaccattttcagcttttcatgtattaattcttttagtcattttaacaacccaaagaggtaggtactactattgttgtattttacagataataaaacttaggcgcaaaaacattaaataacttgcccaaggtcttgaagttagtatgtagcagaggcaggattcatgtttagttggtttggcttcagaggtcatactcttaacctatactactttgggcattattagttcttatgtttgttaattttggtgcctttgtaatattggttaagatgcttttttgcaagaaatagaatctgatactggttagcttaagtgaaaatgaaaatatattgggaagataataggacatttcacatactccaaggaagaaaaatcgagttgtgagcacagtaggtgtggtacattagaagaaagcttagagtaagaatgtgtaaactttctttcttaaatgttgccattcatgtaattcagtttccttgacttccatccagtctgtgggtctcttagttaattctgccaagagaaattttaactgacacagctcaagagtagtggtggtggtggtgatggtttgtgtgcgttgggatggtgtttggggagttggtttagttttgctttaaaaagctgtgatgagaggtggagtgggtgggcaggttttttagacaaggcccttagagactcaaccttgagttcaggaagcagttctcaaaaaaacaaaaaattctgtgaatccatctactctatgagtctgttatataaaaatgaagagttaagcatccaacattcaaagtggattaataatttagtagcattcacaaaatcaatgtgttttggcaagtaacttgagaatgttcatgctgcattaggttagtgtttctatgtttgtattgtagcaaataatgcttgaatgagtacagctttcttccttccttccctcctattatcaactctttgctaaatgtgatataacatagttgagactgttagaagaatttatttattgaccattacagaagtttatttaacagagtctaatatgaaaatatacatgacttaatttttacatcatagtaaaacaggcccttttgagagggagacatgggtttttctgctgaacagccattatttatacttgttccaaggcttctaacatgatgatgccattacatcgcattaccaccattccaatattgttctgttgcccactagttgccatctccacacattaatctatcacaagattcataaagggatcaaatccccacaatattccttggacatgtctgccaccatttaattttcaatgataactttttgtccatcaattttttcaactcgggagtgtaagctttgctcatggtgtctactccacaggttcacagatgccttggaatggaatgctggaagaatttattttaatgtatcttctattcttgactgcttttgttttgctgtttttaatttactcatttagtatttttacagtatgtctaattgtttaattgctttttttttactatgtaagtaatacatagaaaaaaagcatgaagaaaataaaagttgtctttaattccattgctaatttaaacagttctttccagtcttccttctgtgcatataaagaagatgctcatttaagccaaactttaattatatatatttactggaaaagacaaactgcctctcaaaaattatggaccaggcacggtggctcactcctgtaatcccagcactttgggaggcaaaggcagatggatcacctgaggtcagaagtttgagaccagtctgaccaacatggtgaaatcccatctctactaaaaatacaaaaattagctgagcatggtggcaggcgcctgtaatcccagttacttgggaggctgaggttggagaattgcttgaacccaggagccgagactgtgccattgcactccagcctggacaaaagagtgagactccatctcaaaaaaaaaaaaaaattgtgagttttctttatttaggtgtagacagtcttccagcttgcaacagatggtccttgttttggaggagagttatagcagtggcctcactagataggtttatttaaaacaagggcacagcaatttctctggaaggtttaacaggatttttttgttgttgttgttatttcccctgctatcttctcaatacttcttagtatgcagagatcctaggttactgggttgagtgtatttgaataggggcagtggacattgcagttgagactctgaccacttctattttgagttcagctggaatgaaacctctgaagaatcgagatagctccaatagaggtccacaggcagaaaggatttcaaggatcttcaaagggtaaatgtaccctggaagagggatactggacctgtgataggtacaatgatttagatcattcaatgttattttttgaagtaatttattaaggtaaaatttatttccaaggtaaaactccttaccttgtaagcagtttctcctcattctttactctccctggcctctgacaatcaccagttggcattctgtccctacatttatcttttctggaagtttcctataaagggaatcatataacatttgacatttttagtctgactttcacttgacataacgttttgtatgttcattttaattgtagcatatagcagtacttcattcctttttttttttttttttttttttgagacagagtcttgctctgatgcccaggctggaatgcagtggtgcaatctcagctcactgcaacctctgcctcccagatttaagcaattctgcctcggcttcctgagtagctggagttacaggaacgtaccaccatgcccagctaatttttgtatatttttttttagtagagacggggttttgccatgttggccaagctggtctcaaacccctgacctcaagtgatccacccgccttggcttcccaaagtgctgggaatacaggcatgagccactgcacctagccacttcattcctttctatggctgaataataattgtatgtatatgccacagtttgttcatttatctgtcggtaagtatttgggctgtttctacctttctgctattctgaatagcactactgtgaacgtgtgtgaacatgtactcaattgagtccttatgttcatttcttttgggtgtatacctaggagtggaattgtgaggtcatatagtaaaactgtttttctcagcatctgaaccatttgctttcccgccagtaatgtattccactttctccgcagtttcttatgagaagtctgctctcattcaaattgttactctctgtaggtaatacatcattgttctctgactgctttcaagattttttgttgtcttaattttcagcagtctaattataatgtgtataggcatggattttctttatgttttctgggcttcaccaactttcttgaaacttatgtgtttatatcccttgctaaattggaagttttcagccattaagtctttaattttttttttttttttttagcattaatactctttctcctctccttttataaatctgataatatgaaagttagactttttgttattgtcctatagttttcttttttcttctttttttttttctttgagacagggcctcactttgtcacccaggttggggtgcagtggaacaatctgggctcactgcaacctcctcctactgggttcaagcgattcttttgcctccccagtagctgggattacaggcgcccaccaccacacctggctaatttttgtatttttagtagagatggggttttaccatgttggccaggctggtcttgaactcctgacctcaggtgatctgtctgccttggcctcccaaagtgttgggattatgggcgtaagccagtgtgcccagactgtctcacagttttctgaagcactgttaattttttaaaaatcttttttctctctgttgttcagattggataatgcctattgataatcttcaagtttcctgactttttttctgttgtgttcattctgattttgagccactccatgagttttatttattattgtgtttttctgttctaaagtttccatttgtatttatttcttattgtgtttttgtgttctaaaatttccatttgattctgcttaatgtcttgtttctttgctaagattttctatttttcattgctttcaagagtactttcgattgtttgctgaagcccttaaatagctgctttaaaagttttatcagataatttcaaagtctgtgttatttcagcattggtatctttgattttattttcttagtagagttgctatttttttttttttttgaggcggatccttgctctgtcacccaggctggtgtgaagcggtgcaatcttggctcactgcaacctccgcctcccgggttcaagcagatctcctgcctcagcctcctgagtagctgggattacaggtgtgtgccaccacacccagctaatttttatatttttagtagagacagggtttcaccatgttggtcaggctggtctcaaactcctgacttcgtgatctgcccaccttggcctcccaaagtgctgggattacaggcgtgagccaccgcacccggtcagctattttctacatgcttcatttgcagtgtaatattggattgtatgagactttgggttttgtgttaatacctacagaaaatgttgatattttctcttagcaggctgtcaaccaggttaggttcaggtcataagtttctacccacattctttgaactgtagttgtcattttagtttatttttcaaaaacttttgcagtacctttttggtctgtcttgtgtgtgccttgcagtgaacagtctggatttggacagtggtctgtctgttagttcagtttctcaagcctttgtcacactaataggattggatttatgtatgtccagcttgggaattattacaggaattaaaaacaactttttagagtgctttcctgagctctctttctatttgttcccccttctactttttgcttccctgtggctgctgtttctatcctccagccagagagctagtgtttattttctccattgtgttacacacttgtgcagctgcaaccaccatatccagggcccaatggtaggaggtagagaagaaaagcaaaagggattggcctcatcctcttacaacgatagttccattgaatagagagaaaggttttcctgcctcagagtgttggctgcactaggcttttgttactgtagtctggccctgttaccatgggattgcttgcatgtggggatacaggagaattcagaaaagaaaaaaagatttgctatttctacattctccctgagcattaagacttcccttgcccattcctcaattcaaagctaaggcttcttctggagctgcctctgtgggcggttcgggagataccaaaggagaaaaagtaccactgttgatatggtggtatttcaaattctggtctaccctatttcacatgccttgtttacttttcagagctgacagattgctgctccatgcattctgtccagtttcctaagagagacagcttggagtatgcttaatccatcttacctgggactgaaacagctgcttattttgccgttaaaaattacatgcagtttactgcgtggctccgggtttgtttgtttgtttttcctctttaataggtttattcagaaaacatgtccactgcaattagggaggtaggagtttggagacagaccagaacacttctactgaagaattacttaattaaatgcagaaccaaaaagagtagtgttcaggtaagttaaataactctttcttatgcttttttgcagtttattttgcttgatatattctatcttgaagtgatgatttattttgctaaatatatttttattataattttatttttctttgcttgtaaagtaaaagcttgccatgttagccacagaaaaataactgaattacttaatgctttctaaatgttaaaaattttaataataatttctacatttagttaatttctaacatctgtgcttcattttcagcttttaggcatgtgtttcctaagtttcatgaactaacattccacaataactttgattccagagttttatatcccacaacctcgtattttatggactctagattgagttgcccatgagtattaatattatgacacagatttgtacccacagcatacattacttttgataagggtaaaagaaaggaagaacttgggtaaccagctagtaataatttcaaaggatgaaaacatattattcatcttccctgaaactggtaaaacaattaaacagcaagatgatataatagctcatttctactaaaactgaccgtagaatttaattcagtatggttttggtagtatacatttaggtataattaaagtatgatttctaattcagaattgaataaaggcatttttatggtgaatccatatagggatgttcggtaaattgctttagataaaattatatgagtaaatttattatgttttatgtcaataatctaagatgtttaaatattatcttttatgtcaccttaatttattttgtgacttgaattttaaaatatttcagtaaaactaaatacaaaggaaaaaataatatgcatgttgggttggatgaggtgttcaacacaaaattcttttgggatagaattgcttttattttattcataagaaaggacaaccaaatttcctgttttttcttagtattatattatttgccaagaaatcttgatgatttttgctgccattgttatactttgtaattactttgtttcttttattgtaggaaattcttttt

SEQ ID NO: 10240 - DNA, 560 bp, Homo sapiens
tttctaggagccccgccctcaggtgcgctctgcaggaggcggggcgcgacttcggcgccgccagctctgcctgcgccaggagcgcgcgggtgcgcgcggccgcgccctcgcacagatcccagctgggtcacccgcactgagtcaacagactgagcgcgtccaggcctgacagctctgcggctcgggccctgagagacagcgtctcgggctagagtgcagtggtgcgatcaaagttcactgcagccttgaacgtctggactctagggaccctgctgaatagctggggctacaggcgtgtgtcactgcgcccagctggaatgaaacctctgaagaatcgagatagctccaatagaggtccacaggcagaaaggatttcaaggatcttcaaagggtaaatgtaccctggaagagggatactggacctgtgataggtttattcagaaaacatgtccactgcaattagggaggtaggagtttggagacagaccagaacacttctactgaagaattacttaattaaatgcagaaccaaaaagagtagtgttcaggaaattcttttt

SEQ ID NO: 10241 - DNA, 6525 bp, Homo sapiens
aaaatgttgatattttctcttagcaggctgtcaaccaggttaggttcaggtcataagtttctacccacattctttgaactgtagttgtcattttagtttatttttcaaaaacttttgcagtacctttttggtctgtcttgtgtgtgccttgcagtgaacagtctggatttggacagtggtctgtctgttagttcagtttctcaagcctttgtcacactaataggattggatttatgtatgtccagcttgggaattattacaggaattaaaaacaactttttagagtgctttcctgagctctctttctatttgttcccccttctactttttgcttccctgtggctgctgtttctatcctccagccagagagctagtgtttattttctccattgtgttacacacttgtgcagctgcaaccaccatatccagggcccaatggtaggaggtagagaagaaaagcaaaagggattggcctcatcctcttacaacgatagttccattgaatagagagaaaggttttcctgcctcagagtgttggctgcactaggcttttgttactgtagtctggccctgttaccatgggattgcttgcatgtggggatacaggagaattcagaaaagaaaaaaagatttgctatttctacattctccctgagcattaagacttcccttgcccattcctcaattcaaagctaaggcttcttctggagctgcctctgtgggcggttcgggagataccaaaggagaaaaagtaccactgttgatatggtggtatttcaaattctggtctaccctatttcacatgccttgtttacttttcagagctgacagattgctgctccatgcattctgtccagtttcctaagagagacagcttggagtatgcttaatccatcttacctgggactgaaacagctgcttattttgccgttaaaaattacatgcagtttactgcgtggctccgggtttgtttgtttgtttttcctctttaataggtttattcagaaaacatgtccactgcaattagggaggtaggagtttggagacagaccagaacacttctactgaagaattacttaattaaatgcagaaccaaaaagagtagtgttcaggaaattctttttccactattttttttattttggttaatattaattagcatgatgcatccaaataagaaatatgaagaagtgcctaatatagaactcaatcctatggacaagtttactctttctaatctaattcttggatatactccagtgactaatattacaagcagcatcatgcagaaagtgtctactgatcatctacctgatgtcataattactgaagaatatacaaatgaaaaagaaatgttaacatccagtctctctaagccgagcaactttgtaggtgtggttttcaaagactccatgtcctatgaacttcgtttttttcctgatatgattccagtatcttctatttatatggattcaagagctggctgttcaaaatcatgtgaggctgctcagtactggtcctcaggtttcacagttttacaagcatccatagatgctgccattatacagttgaagaccaatgtttctctttggaaggagctggagtcaactaaagctgttattatgggagaaactgctgttgtagaaatagatacctttccccgaggagtaattttaatatacctagttatagcattttcaccttttggatactttttggcaattcatatcgtagcagaaaaagaaaaaaaaataaaagaatttttaaagataatgggacttcatgatactgccttttggctttcctgggttcttctatatacaagtttaatttttcttatgtcccttcttatggcagtcattgcgacagcttctttgttatttcctcaaagtagcagcattgtgatatttctgctttttttcctttatggattatcatctgtattttttgctttaatgctgacacctctttttaaaaaatcaaaacatgtgggaatagttgaattttttgttactgtggcttttggatttattggccttatgataatcctcatagaaagttttcccaaatcgttagtgtggcttttcagtcctttctgtcactgtacttttgtgattggtattgcacaggtcatgcatttagaagattttaatgaaggtgcttcattttcaaatttgactgcaggcccatatcctctaattattacaattatcatgctcacacttaatagtatattctatgtcctcttggctgtctatcttgatcaagtcattccaggggaatttggcttacggagatcatctttatattttctgaagccttcatattggtcaaagagcaaaagaaattatgaggagttatcagagggcaatgttaatggaaatattagttttagtgaaattattgagccagtttcttcagaatttgtaggaaaagaagccataagaattagtggtattcagaagacatacagaaagaagggtgaaaatgtggaggctttgagaaatttgtcatttgacatatatgagggtcagattactgccttacttggccacagtggaacaggaaagagtacattgatgaatattctttgtggactctgcccaccttctgatgggtttgcatctatatatggacacagagtctcagaaatagatgaaatgtttgaagcaagaaaaatgattggcatttgtccacagttagatatacactttgatgttttgacagtagaagaaaatttatcaattttggcttcaatcaaagggataccagccaacaatataatacaagaagtgcagaaggttttactagatttagacatgcagactatcaaagataaccaagctaaaaaattaagtggtggtcaaaaaagaaagctgtcattaggaattgctgttcttgggaacccaaagatactgctgctagatgaaccaacagctggaatggacccctgttctcgacatattgtatggaatcttttaaaatacagaaaagccaatcgggtgacagtgttcagtactcatttcatggatgaagctgacattcttgcagataggaaagctgtgatatcacaaggaatgctgaaatgtgttggttcttcaatgttcctcaaaagtaaatgggggatcggctaccgcctgagcatgtacatagacaaatattgtgccacagaatctctttcttcactggttaaacaacatatacctggagctactttattacaacagaatgaccaacaacttgtgtatagcttgcctttcaaggacatggacaaattttcaggtttgttttctgccctagacagtcattcaaatttgggtgtcatttcttatggtgtttccatgacgactttggaagacgtatttttaaagctagaagttgaagcagaaattgaccaagcagattatagtgtatttactcagcagccactggaggaagaaatggattcaaaatcttttgatgaaatggaacagagcttacttattctttctgaaaccaaggctgctctagtgagcaccatgagcctttggaaacaacagatgtatacaatagcaaagtttcatttctttaccttgaaacgtgaaagtaaatcagtgagatcagtgttgcttctgcttttaatttttttcacagttcagatttttatgtttttggttcatcactcttttaaaaatgctgtggttcccatcaaacttgttccagacttatattttctaaaacctggagacaaaccacataaatacaaaacaagtctgcttcttcaaaattctgctgactcagatatcagtgatcttattagctttttcacaagccagaacataatggtgacgatgattaatgacagtgactatgtatccgtggctccccatagtgcggctttaaatgtgatgcattcagaaaaggactatgtttttgcagctgttttcaacagtactatggtttattctttacctatattagtgaatatcattagtaactactatctttatcatttaaatgtgactgaaaccatccagatctggagtaccccattctttcaagaaattactgatatagtttttaaaattgagctgtattttcaagcagctttgcttggaatcattgttactgcaatgccaccttactttgccatggaaaatgcagagaatcataagatcaaagcttatactcaacttaaactttcaggtcttttgccatctgcatattggattggacaagctgttgttgatatccccttattttttatcattcttattttgatgctaggaagcttattggcatttcattatggattatatttttatactgtaaagttccttgctgtggttttttgccttattggttatgttccatcagttattctgttcacttatattgcttctttcacctttaagaaaattttaaataccaaagaattttggtcatttatctattctgtggcagcgttggcttgtattgcaatcactgaaataactttctttatgggatacacaattgcaactattcttcattatgccttttgtatcatcattccaatctatccacttctaggttgcctgatttctttcataaagatttcttggaagaatgtacgaaaaaatgtggacacctataatccatgggataggctttcagtagctgttatatcgccttacctgcagtgtgtactgtggattttcctcttacaatactatgagaaaaaatatggaggcagatcaataagaaaagatccctttttcagaaacctttcaacgaagtctaaaaataggaagcttccagaaccaccagacaatgaggatgaagatgaagatgtcaaagctgaaagactaaaggtcaaagagctgatgggttgccagtgttgtgaggagaaaccatccattatggtcagcaatttgcataaagaatatgatgacaagaaagattttcttctttcaagaaaagtaaagaaagtggcaactaaatacatctctttctgtgtgaaaaaaggagagatcttaggactattgggtccaaatggtgctggcaaaagcacaattattaatattctggttggtgatattgaaccaacttcaggccaggtatttttaggagattattcttcagagacaagtgaagatgatgattcactgaagtgtatgggttactgtcctcagataaaccctttgtggccagatactacattgcaggaacattttgaaatttatggagctgtcaaaggaatgagtgcaagtgacatgaaagaagtcataagtcgaataacacatgcacttgatttaaaagaacatcttcagaagactgtaaagaaactacctgcaggaatcaaacgaaagttgtgttttgctctaagtatgctagggaatcctcagattactttgctagatgaaccatctacaggtatggatcccaaagccaaacagcacatgtggcgagcaattcgaactgcatttaaaaacagaaagcgggctgctattctgaccactcactatatggaggaggcagaggctgtctgtgatcgagtagctatcatggtgtctgggcagttaagatgtatcggaacagtacaacatctaaagagtaaatttggaaaaggctactttttggaaattaaattgaaggactggatagaaaacctagaagtagaccgccttcaaagagaaattcagtatattttcccaaatgcaagccgtcaggaaagtttttcttctattttggcttataaaattcctaaggaagatgttcagtccctttcacaatctttttttaagctggaagaagctaaacatgcttttgccattgaagaatatagcttttctcaagcaacattggaacaggtttttgtagaactcactaaagaacaagaggaggaagataatagttgtggaactttaaacagcacactttggtgggaacgaacacaagaagatagagtagtattttgaatttgtattgttcggtctgcttactgggacttctttctttttcacttaattttaactttggtttaaaaagttttttattggaatggtaactggagaaccaagaacgcacttgaaatttttctaagctccttaattgaaatgctgtggttgtgtgttttgcttttctttaaataaaacgtatgtataattaagtgaagctgcatgtttgtattgaagtatattgaactatatagtttgtatgtcatctttttcaccattcagaaacagtgcttctgaatttgtgatttaaaggaattgtaatagaatagttttatttttaagttatctttaagtttatgccatcttcttaaataagtacgtaatgttccaatctaaataaaaaactaattcataactaatgcatagaaaagatacataaagcaatgtgaaagtttcttgcttctcctttttaatttctaaaaaagccactttgaatggaagttgtcatccgtaaaagctgaagtgtaagcactaggaaatctcaatatagagatttgaggaaagttatatccactaggtggcagtcattgatcataataagtgaaat

SEQ ID NO: 10242 - DNA, 10212 bp, Homo sapiens
gcactgagtcaacagactgagcgcgtccaggcctgacagctctgcggctcgggccctgaggtgaggcgggcgtcgcgggcggcggcggcgcttgaggctagcctgggacagccgtccctgggggagttgaggggacgaggaggggctggccagcgagggacggcggggagagaaggggagttcggcgtctgaggtgtggggtgaagcgggctcggaagcgggcagaggcggcgagctgagggaaacagacctccctcagctcccgggaagcgcgggttgccagcctcggggatgcggtgggagcgcccaggatgcggacgtgagggggtcggggccctgcggcgggggctccgcgaggctcccctgggaccgggtccggccgtgggacttcgggacactgcctttgcctggacgctgtcgttccaccctcagcaacctcagggaaagaaggaaaacaaatattgatgtaaatttccgtctgaacagctgggtaatgagcgcttgctcttccctgcgaggttacgcgcggatcattaccttgcgtgttaaaaggagtttcagtgagaagaaaatgcgcagatctcatgacacagtttgggagggaaattccctgatcctaaaacacgaataggagctccaggcatggaaatacttaattggatcggaaagctgggcaggctggagctattaagctgaaggaggttttcccctgggctcctcaggcttcgatttacgttttaaataaataagtccgaaaataatgaagataataaccacgtttactttctacaagggcgttctgaaggaatctaagggaagaggagtatttgctggactacagctttaagccaggctcggtattagctcttttcattctgacagcaaccctgtaggattggagggggttattccagttgggcaggtgtggagaatgggcctcaaagaggttaagtaacttattaaggtctcagctagtaaaaggatggagttgagattccaacccgggctgccagaccctaattctggtgctttatttagtatattttgtgtttgccgggagagcaatattgtatgtgttttagggaagactccatagtagggaacattattagggcagttagggctttgtgggtatttgtgttaaaatcaaactaaagaggcgttaatctttgcatatgtgctgtttgagtatatttcctttcaaacagatttagtgtagggaaatcttacattcactataagagcaaatttattagtacattccatgtgtattgcatgtcttttatttttaaagagacagcgtctcgggctagagtgcagtggtgcgatcaaagttcactgcagccttgaacgtctggactctagggaccctgctgaatagctggggctacaggcgtgtgtcactgcgcccaggtaattttttatttgtttttcagagacgaagtcttgctatattgcccaggctggtttgttgcatgtcttttacattccagataccatactatgtgccaagagtaccgatatgaatacaatttataatctctgtccttgagtttagttgagagggtgattgcataaaagaattttatgatattgtactaagtcataacttttctagtatgtaaattagttggattaaaaatagttttaagggcaagcttttaaggacctattatgcataagaaaatttattggatgacttgtcctctgtgtaccattgcattgttattttctccctcagcaagaaacactgtgataaaatttaggttaaattatattgacaactagcatttttttttttttgagacagggtctcattctgtcacccaggatgaagtgcagtggcaggatcttggctcactgcagccttgacttcgcaggctcaagtgatcctcccacctcagcctcccaagtagctgggaccacagttgtgtgcccctacgcctggctatttttttttttttttttttggtagagacagtgtctctctatgttgcccaggttgatcttgaactcttgggctcaagccttcctcccactgggattgccacgtgagccactgcacctgactgcattttgttttattattgcaccaccttacagtaaattttaaagcaataaagaagatgagagcatttataatttatccctttttaagctaaaaggcatattttgtagtgcttttatttcattgattgagaagcaaatgatgtagctaggcaggagtttgtttcatgtgccagatatgttcctaatttctcattccaaaaatatcttagtttaaaagtgtagctaataccagattgcatttaatttcttgtgtttcagagttgtaatgaaatcagtcttcagtttaggctgaaatggcacattgttgaaatgtataacattactttgtggtggattttggaaatctcttttaattgcttcagttttctcagtaaagtaggattcaaggtcataatctgagggtgatcctacagatggaagctttggagatttggggattgggaaagtgatggactagtggaatatgtgattgctaggaaattaaacatgactcacagttgtgaaaagtacagtagaggaaagatatgagtgcacaaattagggtgtctaattttggataccagaaacttcataatccattcccaatgcctgcctttaccgtgttatctagaacatacatctgcaccccttgctccggttcactttgccttatgcctctgccatatggcaggtatccctgttcttcacaaaagtcaagcccttttgtttgggagtctagctttaccattcttttctttctgcctggaaattccattccactcctttccaggctctttctctcttatcacattatattaaattttatctctctgcaaagttagtgacagtgtctaactttattttttttgcctcataatgttggatgcataaatccttcagtaaatgttaagtgaatatgccacttttctcacttcccctcttcttcctttttacaggagttgaccaacgttttttgtaaagtgccagatagtaaatattttaggtttgcagacagtatggtctctgtctcaataactttactgttgtagcacaaaagcagtcatagataatacataaatgaatgagcatggctgtgttccaataacactgtatttatagacactgaaatttgaatttcatataatttttgcatgtcacaagatattattattatttttcaaccttttaaaaatgcagaagcagtgttcctcatgggctgtgccaaacagactgagggttggatttagcccccacctctttcatcatagtttgcacatccttgatctttaaggactctcaggaagccttgataaaggaatctgtggtaagatgatactgggtttaatatttccattggtggtggagaaacaaagataaataagactgttgtttttttcatcaaggatctcatggtcaagttcaagatgaaaatatataaataaataatggtgacagggtatagttactgcagttacagttatgtttactgggtatagaggtaaaacaaaggagtgataatcagctccatgtcaatgttaataatgacatttaggcaatatgattaaaaattgagtttatttgagcataaaacttgaggatggtcacacaggaggacacagactcctgaaggatgaggtaaatgctccaaagtggagaggtttgagggtcctttacataggcaaggcctggggatgcttaacagggttacatcatttttcgtacgaggttagtgcatagttagagcaattcaattagttataggcagtgtttctttttgggggaagggtatatttaacatttcacattaaggatgtaatggtcaaagggtcttttatcacagtcagcggtcttttatccctggcatcatctggtgtgatctaggaacaagaaaataaggaaggaatttcatgtataacaaaaggtcagtaattaagaggtcaagcttcatgacccagtctccaaagtcaaccttcagtgccgaacaacgtttagaagccccaagtagacagactatccattttctgttacatctgcttaggtggatgagaagtaacctctaacagtcatttgttggaggtagggaatgtattttcagctagcctttctggaaatcttttaaggatgctaagaaggtgaccacgtttcttatcaggatggctctaaacatcaggatgactcaacttatttattttatagggtataatcttaatttgtttctcacagaaataaacatggatatgtttttaatcaggtctctatgaaaataatttaaaaaatttaaagttattttacctgctacataataaatggattgtttattccacaggtatttagtacctcctctgctgtgcagtgagttgttttactagctgaaaatatttgaaggagataatggtatcattagataagtgatggattttgcgggggaggtgggggaagagagaggctcttctaaggaaagcactgcttttaacaaaggcagtaggtataatagtagaactaccttagattttaaaaaatactttatagctttcaaatttcttattttaattaattaaattcatgcatcctaaataatttttctctaacaattatttctaaaggttatgtacatttttattacttttagtgatgtggaatatgtttcgtaggacttggaacgtagtaaccagcacttttttttttttttttttttttttgagacggaatcttgctctgttgccaggctggattggcacagtgtcagctgactgcaactttcacctcccgggttcgagtgattctcctgcctcagcctcctgagtagctgggattacaggtgcccgccaccacacccagctaatttttgtatttttagtagagacagggtttcaccatgttggccgggatagtttctgtctcctgacctcgtgatcttcccgcctcagcctcccaaagtgctgggattacaggcgtgaaccactgtgcctggccgtagtaaccagtactttaagataaattaagaagtgaatttttgatattgaactttggattatgcaactcctggtctttaagtcaattaatacattagaaaaggaagatgggctttagtaggctttccattttcttgcaacttattggatttagtataaattattttatctagtaaattatttatctaggaaagttaaatttgattaaatctttagagatgttaggtgtttaaaactcacctaattattatttaaagccctacaacaaacttagcacatttctcaggtatgctgtggaagtatggaaaataactttttttttttagattttgaacccgtatttctctttgtgccactgttttttaacagctaagaattggctttgttaaagagtgttttaaagtatttcattggtaagattttgagttggaaccatacaaattctgctttggtcttgtattaactcagctgctagtgagtgaactcctagatattgccatttagaggcaattaaacttaaacagttaaacttgaggcaggccatgcatctttttactgcgtttttctcttattcttccaaaaaccatcacataaagctataaaattttggaattctagtatagaaagaggaaatgtatagctccatgctaaatacggggtttcttgtatcccaagaaaaggcacctgataagtcaaacccttcatagatgtcccctttttggtcatgcctcatttgtaactttgcagccctgttttcagatatatgcttctgtcaggaacaccgctttcatgtcacctctgctgtgtggatctccacctttctttctggaaacctcattctttcatccacaagagttgttcccatctcaagatattaaccctttagttttgggtgttcgtcaatatagaaaagtactgccttcccacattcttccttcatcccagttttcccaccctaactccctgttaggctagtcagtattgtcctttgggattccagaccctgcaaaacagtggaggatgtggtgaagagaggggcctttgtgattaccatatcagtgagagttgtaatcacccctttttttattctatcttgtttctctgtcttctccccaaaggacaggtataatctctcgaccaattgtcgagagacaatgtggtctcgacacctgaaaaggaagccaaatattttccccagcacctcatcatttgcaaagaatttatagggtagagttagtgtttacattattatgcagaccagtccttgcttatttattcgccatatcccttttcaaattgggcctgcttagacactgtggactggcaggttggaggatgcagcaggcaaagaggagggtgaataggtacgttgttgggttagtttacaaagacctgactatagctttgaagtttctgttttagatcaacgttaaagtttaaaggtttatgaagaattaatgttaagaatgtttcattcttttcaatcaaacagctaaaccatgtatttcatactatgaagaaaaccagtgatcagatgggcttaagagattttttttttgtttcaataacttgaattgaagctcaagattattgaaagttaatattttcatatgattagactaaagcttttgagtataagaaaaatcagattgttgaggtcattcataatactgagtcattggtataatttgatgacagagttaatactttcatcatttttttctctctgtccttttgcaattcattctgtagggtttctttgactcacgcttcaatttagctcactaattcgtctttaaatgaagttcaccccatcttttagtgcttttttatttctatcagttttttatttcatttctaagttctgtaattgcttttttcttaattatctttctcttgttccaagaatatgatattctctattactcttttaaggatattagttatacttttatacacaatcgtgatcaatgtgtataattagttgccatgtacaagccaccattttcagcttttcatgtattaattcttttagtcattttaacaacccaaagaggtaggtactactattgttgtattttacagataataaaacttaggcgcaaaaacattaaataacttgcccaaggtcttgaagttagtatgtagcagaggcaggattcatgtttagttggtttggcttcagaggtcatactcttaacctatactactttgggcattattagttcttatgtttgttaattttggtgcctttgtaatattggttaagatgcttttttgcaagaaatagaatctgatactggttagcttaagtgaaaatgaaaatatattgggaagataataggacatttcacatactccaaggaagaaaaatcgagttgtgagcacagtaggtgtggtacattagaagaaagcttagagtaagaatgtgtaaactttctttcttaaatgttgccattcatgtaattcagtttccttgacttccatccagtctgtgggtctcttagttaattctgccaagagaaattttaactgacacagctcaagagtagtggtggtggtggtgatggtttgtgtgcgttgggatggtgtttggggagttggtttagttttgctttaaaaagctgtgatgagaggtggagtgggtgggcaggttttttagacaaggcccttagagactcaaccttgagttcaggaagcagttctcaaaaaaacaaaaaattctgtgaatccatctactctatgagtctgttatataaaaatgaagagttaagcatccaacattcaaagtggattaataatttagtagcattcacaaaatcaatgtgttttggcaagtaacttgagaatgttcatgctgcattaggttagtgtttctatgtttgtattgtagcaaataatgcttgaatgagtacagctttcttccttccttccctcctattatcaactctttgctaaatgtgatataacatagttgagactgttagaagaatttatttattgaccattacagaagtttatttaacagagtctaatatgaaaatatacatgacttaatttttacatcatagtaaaacaggcccttttgagagggagacatgggtttttctgctgaacagccattatttatacttgttccaaggcttctaacatgatgatgccattacatcgcattaccaccattccaatattgttctgttgcccactagttgccatctccacacattaatctatcacaagattcataaagggatcaaatccccacaatattccttggacatgtctgccaccatttaattttcaatgataactttttgtccatcaattttttcaactcgggagtgtaagctttgctcatggtgtctactccacaggttcacagatgccttggaatggaatgctggaagaatttattttaatgtatcttctattcttgactgcttttgttttgctgtttttaatttactcatttagtatttttacagtatgtctaattgtttaattgctttttttttactatgtaagtaatacatagaaaaaaagcatgaagaaaataaaagttgtctttaattccattgctaatttaaacagttctttccagtcttccttctgtgcatataaagaagatgctcatttaagccaaactttaattatatatatttactggaaaagacaaactgcctctcaaaaattatggaccaggcacggtggctcactcctgtaatcccagcactttgggaggcaaaggcagatggatcacctgaggtcagaagtttgagaccagtctgaccaacatggtgaaatcccatctctactaaaaatacaaaaattagctgagcatggtggcaggcgcctgtaatcccagttacttgggaggctgaggttggagaattgcttgaacccaggagccgagactgtgccattgcactccagcctggacaaaagagtgagactccatctcaaaaaaaaaaaaaaattgtgagttttctttatttaggtgtagacagtcttccagcttgcaacagatggtccttgttttggaggagagttatagcagtggcctcactagataggtttatttaaaacaagggcacagcaatttctctggaaggtttaacaggatttttttgttgttgttgttatttcccctgctatcttctcaatacttcttagtatgcagagatcctaggttactgggttgagtgtatttgaataggggcagtggacattgcagttgagactctgaccacttctattttgagttcagctggaatgaaacctctgaagaatcgagatagctccaatagaggtccacaggcagaaaggatttcaaggatcttcaaagggtaaatgtaccctggaagagggatactggacctgtgataggtacaatgatttagatcattcaatgttattttttgaagtaatttattaaggtaaaatttatttccaaggtaaaactccttaccttgtaagcagtttctcctcattctttactctccctggcctctgacaatcaccagttggcattctgtccctacatttatcttttctggaagtttcctataaagggaatcatataacatttgacatttttagtctgactttcacttgacataacgttttgtatgttcattttaattgtagcatatagcagtacttcattcctttttttttttttttttttttttgagacagagtcttgctctgatgcccaggctggaatgcagtggtgcaatctcagctcactgcaacctctgcctcccagatttaagcaattctgcctcggcttcctgagtagctggagttacaggaacgtaccaccatgcccagctaatttttgtatatttttttttagtagagacggggttttgccatgttggccaagctggtctcaaacccctgacctcaagtgatccacccgccttggcttcccaaagtgctgggaatacaggcatgagccactgcacctagccacttcattcctttctatggctgaataataattgtatgtatatgccacagtttgttcatttatctgtcggtaagtatttgggctgtttctacctttctgctattctgaatagcactactgtgaacgtgtgtgaacatgtactcaattgagtccttatgttcatttcttttgggtgtatacctaggagtggaattgtgaggtcatatagtaaaactg

SEQ ID NO: 10243 - DNA, 631 bp, Homo sapiens
gcactgagtcaacagactgagcgcgtccaggcctgacagctctgcggctcgggccctgagagacagcgtctcgggctagagtgcagtggtgcgatcaaagttcactgcagccttgaacgtctggactctagggaccctgctgaatagctggggctacaggcgtgtgtcactgcgcccagctggaatgaaacctctgaagaatcgagatagctccaatagaggtccacaggcagaaaggatttcaaggatcttcaaagggtaaatgtaccctggaagagggatactggacctgtgatagtagagacggggttttgccatgttggccaagctggtctcaaacccctgacctcaagtgatccacccgccttggcttcccaaagtgctgggaatacaggcatgagccactgcacctagccacttcattcctttctatggctgaataataattgtatgtatatgccacagtttgttcatttatctgtcggtaagtatttgggctgtttctacctttctgctattctgaatagcactactgtgaacgtgtgtgaacatgtactcaattgagtccttatgttcatttcttttgggtgtatacctaggagtggaattgtgaggtcatatagtaaaactg

SEQ ID NO: 10244 - DNA, 5227 bp, Homo sapiens
tgaacttcgtttttttcctgatatgattccagtatcttctatttatatggattcaagaggtaaatagccctacataatcattgaagatcaattaaatgcatatctttgctgcttgcagttcatagtcaaaattttatatagttcaatattggcattttcaactattcttacttgttccaataggaaaactgagaagtatagcataaaaatatttatttataaatacctatctacttctacacataaaacatttttatatatacccattttgatttaatacatttatatatattaaatacagtagcataaagcaaaattgcattttgggttatatgactttctaaatctctttttttcatgtaattgtttttacttgtggtatgtacaaatctttaaaatcttgaggtcttctactagtgaacttgattagttttatatttgaaacatgggaaacaacctttggttgtttaaatctatgaagaaatattatcaaccacaaacatttattgagcaatgttaaagtcactatgctaaatactgaatttgtgactttatttcaaaaagcccttctgaaaattcttttttcctgtttgcttaactttgacttttccttgcttctggaagtgctttagagctaagtcatgtagaatgatttactttaaaacaaaaaagtaacttgttttaaataactacaattaatttctttctttacatttttattcatttactatttagtattctaacacatataacttttatttcaaaatttcaagtaaatgatcagaaatcttgtaagtattgtttacctttgaaagtcagtagcttatttctttggtcctgtaaagattgattgattatattgttttggtaggtatctctccatataatatctttaaaacgatgcacttgcatgttgtacagaatcttagatctcatattcttccccccatagctggctgttcaaaatcatgtgaggctgctcagtactggtcctcaggtttcacagttttacaagcatccatagatgctgccattatacaggtaaatatgataaaggaagaaatacaaaaactatgccattttaaaataaatatttccttattctttacaatagtatttggtttgactactgtcaaatgtacaaaatatgtaacctactacaactcctttgagaaaaaagataaaaaagtcatattttctgatttggtactttttgttgtgtttcatattttagcagaaaaactggccatgaaatttatttttaaaaatcttacttttgtgtctgggctagataacagtagatgaagttaccttagaattcaaactattcaaattaaccatatttcattcttccatgttctgtatggatctgtggcttttttttccatttgccctttctaattgaatttactatgctacaaaatttactatgctacaaaatattgtaatttcaaaatgtatatcaaccatcttgtctgctaaacaatacgtttaaagtatgtatgaataatgatggagctggaatcaaaatctgaacaggagtcttgtctctgttgttacactgctatgtagtaaaatgactattataatagtactttacttgacagcattgtcgtaagaaccaaatgagatgatttatgtataattgtcttgtaaacttttgtagtacagtataaacatattagggacgtgtaatattgcacaaattcaataatacagaaatttaaggtaaagatagtgaaatacggatctattacattgatgatgttgtatcacctatttgtattttggccaaagtttttagccatccacagcacagaccacactggatgaataggcaggatagatttcaatttaggcattaattggaatgttagaagtattatgtggcataaatagttttattatttggtctatatgtgctaaatatatagactttaaagcagtagaagggcatggtatttagaagaacattttttaaacaatcataggaatgatggcactaataatcactcctaaattcctaaattttgaagatgtatatttttactaagatacatataattgtctgcttaagatgataattgtgcaattttattttatttgacaaattatttaatcaaaatttatacacttactgactttaaactttaaactttatggtatacttttagaataaattgaatgcaatattctactcagaattatgatattggggtcactcactttatttcaggtatggagctttttgaggattgtatttgtactaggttactgaccaaatttagggatatagctgtcccgttttactaggggctgctatcataactaaattaatttgatgtatttacattttctaattatagttgaagaccaatgtttctctttggaaggagctggagtcaactaaagctgttattatgggagaaactgctgttgtagaaatagatacctttccccgaggagtaattttaatatacctagttatagcattttcaccttttggatactttttggcaattcatatcgtagcagaaaaagaaaaaaaaataaaagaatttttaaagataatgggacttcatgatactgccttttggtatgttattaaaaatttattacttaatataattaaaaattgtattaaatatacagattttcaaaattgtaattttgatatttacctaacttgatgatgtgcttatcctgttttcttacaatgattgccttagtcttggaatttgagattagtcaagaagtttcaacaactaattggcttcatttaacataagggatgaagaatgtcaaagcttgtgttgacaatacgtgtttaaattttatttcacattttatttgaatcatgggcacactccgtgtatatttcagtgtatttcaatatactccacgtatatttctgtgtatttcagagttcaggaaatgtgaaatcttggaacattagaaattaattgcttgttacagttcttccataatatagcatatatataatattaaaaatttagttatagtgattaaagtctgtatatgtggtatatggactttttttccctcgaaagttttagttatttgggtgaattaagatgaatatggaaataattttagagaaagaaatgagaaaaccatgttttcactagtgacctttaatgtatcagcatttttgtacagtgataattttacaaaggcatgcatttttataaatctaagtgtagtttccttactcttttcactatgtaatgaagttcattctggggggaaggttaatactgtgcatgtgagctgttatagtctgttttacaaaattttattccaattagcccaatgtaacaattaatcattaacactttacataatggaattattgtatataacatatttcctttgcttgtttttctttcatttgttattttagaaattattggttttggattattttttgagacagggtcttgctctgtcacctaggctggagtatagtggcatgatcatgggtcactgtggcctcaaactcccaggctcaagagattctcccatctcagtctctcaagtagttgggactacaggtgcatgctgtcatgcccaactaattttcaatttttttgtagggacgggggtctcgccatgttgtgcaggctggtctcaaagtcttggcctcaagtgatcctctcatcttggcctcccaaagtgctgggattacaggcatgagccactgtgcctggccaaaggattggtttttaaaatttattgggttattaaagtattttatggagaaccggtagctggaagaatttaggcaaatcattctctcagggtctcagttttgcctcagtaaaatgatggattcaattttgataatttcgctacctttttagccttaactcagtgatttcatgacatcattaaatcctgagctaacttggaaaaatatgtaaaataaaacttaatactgcagcaattccattgagctctgatttgtaaagaagtcttgagcaaaaatagtgaattcattactgatcttgttgatttcacattgtgtaattgtagtaattatgtcattgattagtgaggtaaggtagcctttattgtttatagttacagaagccatcagaggtttaattgtagcacatgccataaagaaaattgttatcttgactcattaaactcctacattttaagaaaatcagagacattgtgtgctattgaacttttgagaatattagatttaaattaattatgaattactattcattttgaaagcttttttaactctggaagatagtattttttatcagattacacttttacctatcacttaaccaatactatttttaattacttacaagactattaatttttagtacataagcatacacagaaatgaacagtgacttaattttaagaataaaatggctaaaatctaaaaattttgtttaaaatgattttttaactggttaagcctatgcatttgaccataactatatctgtattctcattttaggctttcctgggttcttctatatacaagtttaatttttcttatgtcccttcttatggcagtcattgcgacagcttctttgttatttcctcaaagtagcagcattgtgatatttctgctttttttcctttatggattatcatctgtaagtattttaacttgtgataggaataaagaactgtcaaaatgtttgataacatagcaaagtctttttcttcagtttacttatagtcaatttgccatgaaagacagattttactaattgataagtgacttaataaataaatgatgtggcatcactgtattcctgtatttttagtaatgttacaaaatagttttagatttagatttagcttttgtcatatgatgtatttcacatacaactcctctatctgttgtctttatataatgatgtatataattaagactgtcaagtattggactatttttgtttgtcttcatggaatccttactctttcaagttaatttatgctccaggatgatgatttttaaagatacatctttgcaaatgtaactctttagcagtcttgatattcatttgatatattggctgaatgagaggttttaatgaccagcctttgttttaagtggttccatcttccattctgattggtttatgtgcccaccctgtatcagttgttaaatgttttggctatcatttctgctctttaaaataataaattgcaaataactaacata

SEQ ID NO: 10245 - DNA, 1095 bp, Homo sapiens
tgaacttcgtttttttcctgatatgattccagtatcttctatttatatggattcaagagctggctgttcaaaatcatgtgaggctgctcagtactggtcctcaggtttcacagttttacaagcatccatagatgctgccattatacagttgaagaccaatgtttctctttggaaggagctggagtcaactaaagctgttattatgggagaaactgctgttgtagaaatagatacctttccccgaggagtaattttaatatacctagttatagcattttcaccttttggatactttttggcaattcatatcgtagcagaaaaagaaaaaaaaataaaagaatttttaaagataatgggacttcatgatactgccttttggctttcctgggttcttctatatacaagtttaatttttcttatgtcccttcttatggcagtcattgcgacagcttctttgttatttcctcaaagtagcagcattgtgatatttctgctttttttcctttatggattatcatctgtaagtattttaacttgtgataggaataaagaactgtcaaaatgtttgataacatagcaaagtctttttcttcagtttacttatagtcaatttgccatgaaagacagattttactaattgataagtgacttaataaataaatgatgtggcatcactgtattcctgtatttttagtaatgttacaaaatagttttagatttagatttagcttttgtcatatgatgtatttcacatacaactcctctatctgttgtctttatataatgatgtatataattaagactgtcaagtattggactatttttgtttgtcttcatggaatccttactctttcaagttaatttatgctccaggatgatgatttttaaagatacatctttgcaaatgtaactctttagcagtcttgatattcatttgatatattggctgaatgagaggttttaatgaccagcctttgttttaagtggttccatcttccattctgattggtttatgtgcccaccctgtatcagttgttaaatgttttggctatcatttctgctctttaaaataataaattgcaaataactaacata

SEQ ID NO: 10246 - DNA, 3263 bp, Homo sapiens
atgttcctcaaaagtaaatgggggatcggctaccgcctgagcatgtacatagacaaatattgtgccacagaatctctttcttcactggttaaacaacatatacctggagctactttattacaacagaatgaccaacaacttgtgtatagcttgcctttcaaggacatggacaaattttcaggaattgcttgatagacaaaaggatgttattgatgtttgttttctgccctagacagtcattcaaatttgggtgtcatttcttatggtgtttccatgacgactttggaagacgtatttttaaagctagaagttgaagcagaaattgaccaagcagattatagtgtatttactcagcagccactggaggaagaaatggattcaaaatcttttgatgaaatggaacagagcttacttattctttctgaaaccaaggctgctctagtgagcaccatgagcctttggaaacaacagatgtatacaatagcaaagtttcatttctttaccttgaaacgtgaaagtaaatcagtgagatcagtgttgcttctgcttttaatttttttcacagttcagatttttatgtttttggttcatcactcttttaaaaatgctgtggttcccatcaaacttgttccagacttatattttctaaaacctggagacaaaccacataaatacaaaacaagtctgcttcttcaaaattctgctgactcagatatcagtgatcttattagctttttcacaagccagaacataatggtgacgatgattaatgacagtgactatgtatccgtggctccccatagtgcggctttaaatgtgatgcattcagaaaaggactatgtttttgcagctgttttcaacagtactatggtttattctttacctatattagtgaatatcattagtaactactatctttatcatttaaatgtgactgaaaccatccagatctggagtaccccattctttcaagaaattactgatatagtttttaaaattgagctgtattttcaagcagctttgcttggaatcattgttactgcaatgccaccttactttgccatggaaaatgcagagaatcataagatcaaagcttatactcaacttaaactttcaggtcttttgccatctgcatattggattggacaagctgttgttgatatccccttattttttatcattcttattttgatgctaggaagcttattggcatttcattatggattatatttttatactgtaaagttccttgctgtggttttttgccttattggttatgttccatcagttattctgttcacttatattgcttctttcacctttaagaaaattttaaataccaaagaattttggtcatttatctattctgtggcagcgttggcttgtattgcaatcactgaaataactttctttatgggatacacaattgcaactattcttcattatgccttttgtatcatcattccaatctatccacttctaggttgcctgatttctttcataaagatttcttggaagaatgtacgaaaaaatgtggacacctataatccatgggataggctttcagtagctgttatatcgccttacctgcagtgtgtactgtggattttcctcttacaatactatgagaaaaaatatggaggcagatcaataagaaaagatccctttttcagaaacctttcaacgaagtctaaaaataggaagcttccagaaccaccagacaatgaggatgaagatgaagatgtcaaagctgaaagactaaaggtcaaagagctgatgggttgccagtgttgtgaggagaaaccatccattatggtcagcaatttgcataaagaatatgatgacaagaaagattttcttctttcaagaaaagtaaagaaagtggcaactaaatacatctctttctgtgtgaaaaaaggagagatcttaggactattgggtccaaatggtgctggcaaaagcacaattattaatattctggttggtgatattgaaccaacttcaggccaggtatttttaggagattattcttcagagacaagtgaagatgatgattcactgaagtgtatgggttactgtcctcagataaaccctttgtggccagatactacattgcaggaacattttgaaatttatggagctgtcaaaggaatgagtgcaagtgacatgaaagaagtcataagtcgaataacacatgcacttgatttaaaagaacatcttcagaagactgtaaagaaactacctgcaggaatcaaacgaaagttgtgttttgctctaagtatgctagggaatcctcagattactttgctagatgaaccatctacaggtatggatcccaaagccaaacagcacatgtggcgagcaattcgaactgcatttaaaaacagaaagcgggctgctattctgaccactcactatatggaggaggcagaggctgtctgtgatcgagtagctatcatggtgtctgggcagttaagatgtatcggaacagtacaacatctaaagagtaaatttggaaaaggctactttttggaaattaaattgaaggactggatagaaaacctagaagtagaccgccttcaaagagaaattcagtatattttcccaaatgcaagccgtcaggaaagtttttcttctattttggcttataaaattcctaaggaagatgttcagtccctttcacaatctttttttaagctggaagaagctaaacatgcttttgccattgaagaatatagcttttctcaagcaacattggaacaggtttttgtagaactcactaaagaacaagaggaggaagataatagttgtggaactttaaacagcacactttggtgggaacgaacacaagaagatagagtagtattttgaatttgtattgttcggtctgcttactgggacttctttctttttcacttaattttaactttggtttaaaaagttttttattggaatggtaactggagaaccaagaacgcacttgaaatttttctaagctccttaattgaaatgctgtggttgtgtgttttgcttttctttaaataaaacgtatgtataattaagtgaagctgcatgtttgtattgaagtatattgaactatatagtttgtatgtcatctttttcaccattcagaaacagtgcttctgaatttgtgatttaaaggaattgtaatagaatagttttatttttaagttatctttaagtttatgccatcttcttaaataagtacgtaatgttccaatctaaataaaaaactaattcat

SEQ ID NO: 10247 - DNA, 17749 bp, Homo sapiens
gactgagcgcgtccaggcctgacagctctgcggctcgggccctgaggtgaggcgggcgtcgcgggcggcggcggcgcttgaggctagcctgggacagccgtccctgggggagttgaggggacgaggaggggctggccagcgagggacggcggggagagaaggggagttcggcgtctgaggtgtggggtgaagcgggctcggaagcgggcagaggcggcgagctgagggaaacagacctccctcagctcccgggaagcgcgggttgccagcctcggggatgcggtgggagcgcccaggatgcggacgtgagggggtcggggccctgcggcgggggctccgcgaggctcccctgggaccgggtccggccgtgggacttcgggacactgcctttgcctggacgctgtcgttccaccctcagcaacctcagggaaagaaggaaaacaaatattgatgtaaatttccgtctgaacagctgggtaatgagcgcttgctcttccctgcgaggttacgcgcggatcattaccttgcgtgttaaaaggagtttcagtgagaagaaaatgcgcagatctcatgacacagtttgggagggaaattccctgatcctaaaacacgaataggagctccaggcatggaaatacttaattggatcggaaagctgggcaggctggagctattaagctgaaggaggttttcccctgggctcctcaggcttcgatttacgttttaaataaataagtccgaaaataatgaagataataaccacgtttactttctacaagggcgttctgaaggaatctaagggaagaggagtatttgctggactacagctttaagccaggctcggtattagctcttttcattctgacagcaaccctgtaggattggagggggttattccagttgggcaggtgtggagaatgggcctcaaagaggttaagtaacttattaaggtctcagctagtaaaaggatggagttgagattccaacccgggctgccagaccctaattctggtgctttatttagtatattttgtgtttgccgggagagcaatattgtatgtgttttagggaagactccatagtagggaacattattagggcagttagggctttgtgggtatttgtgttaaaatcaaactaaagaggcgttaatctttgcatatgtgctgtttgagtatatttcctttcaaacagatttagtgtagggaaatcttacattcactataagagcaaatttattagtacattccatgtgtattgcatgtcttttatttttaaagagacagcgtctcgggctagagtgcagtggtgcgatcaaagttcactgcagccttgaacgtctggactctagggaccctgctgaatagctggggctacaggcgtgtgtcactgcgcccaggtaattttttatttgtttttcagagacgaagtcttgctatattgcccaggctggtttgttgcatgtcttttacattccagataccatactatgtgccaagagtaccgatatgaatacaatttataatctctgtccttgagtttagttgagagggtgattgcataaaagaattttatgatattgtactaagtcataacttttctagtatgtaaattagttggattaaaaatagttttaagggcaagcttttaaggacctattatgcataagaaaatttattggatgacttgtcctctgtgtaccattgcattgttattttctccctcagcaagaaacactgtgataaaatttaggttaaattatattgacaactagcatttttttttttttgagacagggtctcattctgtcacccaggatgaagtgcagtggcaggatcttggctcactgcagccttgacttcgcaggctcaagtgatcctcccacctcagcctcccaagtagctgggaccacagttgtgtgcccctacgcctggctatttttttttttttttttttggtagagacagtgtctctctatgttgcccaggttgatcttgaactcttgggctcaagccttcctcccactgggattgccacgtgagccactgcacctgactgcattttgttttattattgcaccaccttacagtaaattttaaagcaataaagaagatgagagcatttataatttatccctttttaagctaaaaggcatattttgtagtgcttttatttcattgattgagaagcaaatgatgtagctaggcaggagtttgtttcatgtgccagatatgttcctaatttctcattccaaaaatatcttagtttaaaagtgtagctaataccagattgcatttaatttcttgtgtttcagagttgtaatgaaatcagtcttcagtttaggctgaaatggcacattgttgaaatgtataacattactttgtggtggattttggaaatctcttttaattgcttcagttttctcagtaaagtaggattcaaggtcataatctgagggtgatcctacagatggaagctttggagatttggggattgggaaagtgatggactagtggaatatgtgattgctaggaaattaaacatgactcacagttgtgaaaagtacagtagaggaaagatatgagtgcacaaattagggtgtctaattttggataccagaaacttcataatccattcccaatgcctgcctttaccgtgttatctagaacatacatctgcaccccttgctccggttcactttgccttatgcctctgccatatggcaggtatccctgttcttcacaaaagtcaagcccttttgtttgggagtctagctttaccattcttttctttctgcctggaaattccattccactcctttccaggctctttctctcttatcacattatattaaattttatctctctgcaaagttagtgacagtgtctaactttattttttttgcctcataatgttggatgcataaatccttcagtaaatgttaagtgaatatgccacttttctcacttcccctcttcttcctttttacaggagttgaccaacgttttttgtaaagtgccagatagtaaatattttaggtttgcagacagtatggtctctgtctcaataactttactgttgtagcacaaaagcagtcatagataatacataaatgaatgagcatggctgtgttccaataacactgtatttatagacactgaaatttgaatttcatataatttttgcatgtcacaagatattattattatttttcaaccttttaaaaatgcagaagcagtgttcctcatgggctgtgccaaacagactgagggttggatttagcccccacctctttcatcatagtttgcacatccttgatctttaaggactctcaggaagccttgataaaggaatctgtggtaagatgatactgggtttaatatttccattggtggtggagaaacaaagataaataagactgttgtttttttcatcaaggatctcatggtcaagttcaagatgaaaatatataaataaataatggtgacagggtatagttactgcagttacagttatgtttactgggtatagaggtaaaacaaaggagtgataatcagctccatgtcaatgttaataatgacatttaggcaatatgattaaaaattgagtttatttgagcataaaacttgaggatggtcacacaggaggacacagactcctgaaggatgaggtaaatgctccaaagtggagaggtttgagggtcctttacataggcaaggcctggggatgcttaacagggttacatcatttttcgtacgaggttagtgcatagttagagcaattcaattagttataggcagtgtttctttttgggggaagggtatatttaacatttcacattaaggatgtaatggtcaaagggtcttttatcacagtcagcggtcttttatccctggcatcatctggtgtgatctaggaacaagaaaataaggaaggaatttcatgtataacaaaaggtcagtaattaagaggtcaagcttcatgacccagtctccaaagtcaaccttcagtgccgaacaacgtttagaagccccaagtagacagactatccattttctgttacatctgcttaggtggatgagaagtaacctctaacagtcatttgttggaggtagggaatgtattttcagctagcctttctggaaatcttttaaggatgctaagaaggtgaccacgtttcttatcaggatggctctaaacatcaggatgactcaacttatttattttatagggtataatcttaatttgtttctcacagaaataaacatggatatgtttttaatcaggtctctatgaaaataatttaaaaaatttaaagttattttacctgctacataataaatggattgtttattccacaggtatttagtacctcctctgctgtgcagtgagttgttttactagctgaaaatatttgaaggagataatggtatcattagataagtgatggattttgcgggggaggtgggggaagagagaggctcttctaaggaaagcactgcttttaacaaaggcagtaggtataatagtagaactaccttagattttaaaaaatactttatagctttcaaatttcttattttaattaattaaattcatgcatcctaaataatttttctctaacaattatttctaaaggttatgtacatttttattacttttagtgatgtggaatatgtttcgtaggacttggaacgtagtaaccagcacttttttttttttttttttttttttgagacggaatcttgctctgttgccaggctggattggcacagtgtcagctgactgcaactttcacctcccgggttcgagtgattctcctgcctcagcctcctgagtagctgggattacaggtgcccgccaccacacccagctaatttttgtatttttagtagagacagggtttcaccatgttggccgggatagtttctgtctcctgacctcgtgatcttcccgcctcagcctcccaaagtgctgggattacaggcgtgaaccactgtgcctggccgtagtaaccagtactttaagataaattaagaagtgaatttttgatattgaactttggattatgcaactcctggtctttaagtcaattaatacattagaaaaggaagatgggctttagtaggctttccattttcttgcaacttattggatttagtataaattattttatctagtaaattatttatctaggaaagttaaatttgattaaatctttagagatgttaggtgtttaaaactcacctaattattatttaaagccctacaacaaacttagcacatttctcaggtatgctgtggaagtatggaaaataactttttttttttagattttgaacccgtatttctctttgtgccactgttttttaacagctaagaattggctttgttaaagagtgttttaaagtatttcattggtaagattttgagttggaaccatacaaattctgctttggtcttgtattaactcagctgctagtgagtgaactcctagatattgccatttagaggcaattaaacttaaacagttaaacttgaggcaggccatgcatctttttactgcgtttttctcttattcttccaaaaaccatcacataaagctataaaattttggaattctagtatagaaagaggaaatgtatagctccatgctaaatacggggtttcttgtatcccaagaaaaggcacctgataagtcaaacccttcatagatgtcccctttttggtcatgcctcatttgtaactttgcagccctgttttcagatatatgcttctgtcaggaacaccgctttcatgtcacctctgctgtgtggatctccacctttctttctggaaacctcattctttcatccacaagagttgttcccatctcaagatattaaccctttagttttgggtgttcgtcaatatagaaaagtactgccttcccacattcttccttcatcccagttttcccaccctaactccctgttaggctagtcagtattgtcctttgggattccagaccctgcaaaacagtggaggatgtggtgaagagaggggcctttgtgattaccatatcagtgagagttgtaatcacccctttttttattctatcttgtttctctgtcttctccccaaaggacaggtataatctctcgaccaattgtcgagagacaatgtggtctcgacacctgaaaaggaagccaaatattttccccagcacctcatcatttgcaaagaatttatagggtagagttagtgtttacattattatgcagaccagtccttgcttatttattcgccatatcccttttcaaattgggcctgcttagacactgtggactggcaggttggaggatgcagcaggcaaagaggagggtgaataggtacgttgttgggttagtttacaaagacctgactatagctttgaagtttctgttttagatcaacgttaaagtttaaaggtttatgaagaattaatgttaagaatgtttcattcttttcaatcaaacagctaaaccatgtatttcatactatgaagaaaaccagtgatcagatgggcttaagagattttttttttgtttcaataacttgaattgaagctcaagattattgaaagttaatattttcatatgattagactaaagcttttgagtataagaaaaatcagattgttgaggtcattcataatactgagtcattggtataatttgatgacagagttaatactttcatcatttttttctctctgtccttttgcaattcattctgtagggtttctttgactcacgcttcaatttagctcactaattcgtctttaaatgaagttcaccccatcttttagtgcttttttatttctatcagttttttatttcatttctaagttctgtaattgcttttttcttaattatctttctcttgttccaagaatatgatattctctattactcttttaaggatattagttatacttttatacacaatcgtgatcaatgtgtataattagttgccatgtacaagccaccattttcagcttttcatgtattaattcttttagtcattttaacaacccaaagaggtaggtactactattgttgtattttacagataataaaacttaggcgcaaaaacattaaataacttgcccaaggtcttgaagttagtatgtagcagaggcaggattcatgtttagttggtttggcttcagaggtcatactcttaacctatactactttgggcattattagttcttatgtttgttaattttggtgcctttgtaatattggttaagatgcttttttgcaagaaatagaatctgatactggttagcttaagtgaaaatgaaaatatattgggaagataataggacatttcacatactccaaggaagaaaaatcgagttgtgagcacagtaggtgtggtacattagaagaaagcttagagtaagaatgtgtaaactttctttcttaaatgttgccattcatgtaattcagtttccttgacttccatccagtctgtgggtctcttagttaattctgccaagagaaattttaactgacacagctcaagagtagtggtggtggtggtgatggtttgtgtgcgttgggatggtgtttggggagttggtttagttttgctttaaaaagctgtgatgagaggtggagtgggtgggcaggttttttagacaaggcccttagagactcaaccttgagttcaggaagcagttctcaaaaaaacaaaaaattctgtgaatccatctactctatgagtctgttatataaaaatgaagagttaagcatccaacattcaaagtggattaataatttagtagcattcacaaaatcaatgtgttttggcaagtaacttgagaatgttcatgctgcattaggttagtgtttctatgtttgtattgtagcaaataatgcttgaatgagtacagctttcttccttccttccctcctattatcaactctttgctaaatgtgatataacatagttgagactgttagaagaatttatttattgaccattacagaagtttatttaacagagtctaatatgaaaatatacatgacttaatttttacatcatagtaaaacaggcccttttgagagggagacatgggtttttctgctgaacagccattatttatacttgttccaaggcttctaacatgatgatgccattacatcgcattaccaccattccaatattgttctgttgcccactagttgccatctccacacattaatctatcacaagattcataaagggatcaaatccccacaatattccttggacatgtctgccaccatttaattttcaatgataactttttgtccatcaattttttcaactcgggagtgtaagctttgctcatggtgtctactccacaggttcacagatgccttggaatggaatgctggaagaatttattttaatgtatcttctattcttgactgcttttgttttgctgtttttaatttactcatttagtatttttacagtatgtctaattgtttaattgctttttttttactatgtaagtaatacatagaaaaaaagcatgaagaaaataaaagttgtctttaattccattgctaatttaaacagttctttccagtcttccttctgtgcatataaagaagatgctcatttaagccaaactttaattatatatatttactggaaaagacaaactgcctctcaaaaattatggaccaggcacggtggctcactcctgtaatcccagcactttgggaggcaaaggcagatggatcacctgaggtcagaagtttgagaccagtctgaccaacatggtgaaatcccatctctactaaaaatacaaaaattagctgagcatggtggcaggcgcctgtaatcccagttacttgggaggctgaggttggagaattgcttgaacccaggagccgagactgtgccattgcactccagcctggacaaaagagtgagactccatctcaaaaaaaaaaaaaaattgtgagttttctttatttaggtgtagacagtcttccagcttgcaacagatggtccttgttttggaggagagttatagcagtggcctcactagataggtttatttaaaacaagggcacagcaatttctctggaaggtttaacaggatttttttgttgttgttgttatttcccctgctatcttctcaatacttcttagtatgcagagatcctaggttactgggttgagtgtatttgaataggggcagtggacattgcagttgagactctgaccacttctattttgagttcagctggaatgaaacctctgaagaatcgagatagctccaatagaggtccacaggcagaaaggatttcaaggatcttcaaagggtaaatgtaccctggaagagggatactggacctgtgataggtacaatgatttagatcattcaatgttattttttgaagtaatttattaaggtaaaatttatttccaaggtaaaactccttaccttgtaagcagtttctcctcattctttactctccctggcctctgacaatcaccagttggcattctgtccctacatttatcttttctggaagtttcctataaagggaatcatataacatttgacatttttagtctgactttcacttgacataacgttttgtatgttcattttaattgtagcatatagcagtacttcattcctttttttttttttttttttttttgagacagagtcttgctctgatgcccaggctggaatgcagtggtgcaatctcagctcactgcaacctctgcctcccagatttaagcaattctgcctcggcttcctgagtagctggagttacaggaacgtaccaccatgcccagctaatttttgtatatttttttttagtagagacggggttttgccatgttggccaagctggtctcaaacccctgacctcaagtgatccacccgccttggcttcccaaagtgctgggaatacaggcatgagccactgcacctagccacttcattcctttctatggctgaataataattgtatgtatatgccacagtttgttcatttatctgtcggtaagtatttgggctgtttctacctttctgctattctgaatagcactactgtgaacgtgtgtgaacatgtactcaattgagtccttatgttcatttcttttgggtgtatacctaggagtggaattgtgaggtcatatagtaaaactgtttttctcagcatctgaaccatttgctttcccgccagtaatgtattccactttctccgcagtttcttatgagaagtctgctctcattcaaattgttactctctgtaggtaatacatcattgttctctgactgctttcaagattttttgttgtcttaattttcagcagtctaattataatgtgtataggcatggattttctttatgttttctgggcttcaccaactttcttgaaacttatgtgtttatatcccttgctaaattggaagttttcagccattaagtctttaattttttttttttttttttagcattaatactctttctcctctccttttataaatctgataatatgaaagttagactttttgttattgtcctatagttttcttttttcttctttttttttttctttgagacagggcctcactttgtcacccaggttggggtgcagtggaacaatctgggctcactgcaacctcctcctactgggttcaagcgattcttttgcctccccagtagctgggattacaggcgcccaccaccacacctggctaatttttgtatttttagtagagatggggttttaccatgttggccaggctggtcttgaactcctgacctcaggtgatctgtctgccttggcctcccaaagtgttgggattatgggcgtaagccagtgtgcccagactgtctcacagttttctgaagcactgttaattttttaaaaatcttttttctctctgttgttcagattggataatgcctattgataatcttcaagtttcctgactttttttctgttgtgttcattctgattttgagccactccatgagttttatttattattgtgtttttctgttctaaagtttccatttgtatttatttcttattgtgtttttgtgttctaaaatttccatttgattctgcttaatgtcttgtttctttgctaagattttctatttttcattgctttcaagagtactttcgattgtttgctgaagcccttaaatagctgctttaaaagttttatcagataatttcaaagtctgtgttatttcagcattggtatctttgattttattttcttagtagagttgctatttttttttttttttgaggcggatccttgctctgtcacccaggctggtgtgaagcggtgcaatcttggctcactgcaacctccgcctcccgggttcaagcagatctcctgcctcagcctcctgagtagctgggattacaggtgtgtgccaccacacccagctaatttttatatttttagtagagacagggtttcaccatgttggtcaggctggtctcaaactcctgacttcgtgatctgcccaccttggcctcccaaagtgctgggattacaggcgtgagccaccgcacccggtcagctattttctacatgcttcatttgcagtgtaatattggattgtatgagactttgggttttgtgttaatacctacagaaaatgttgatattttctcttagcaggctgtcaaccaggttaggttcaggtcataagtttctacccacattctttgaactgtagttgtcattttagtttatttttcaaaaacttttgcagtacctttttggtctgtcttgtgtgtgccttgcagtgaacagtctggatttggacagtggtctgtctgttagttcagtttctcaagcctttgtcacactaataggattggatttatgtatgtccagcttgggaattattacaggaattaaaaacaactttttagagtgctttcctgagctctctttctatttgttcccccttctactttttgcttccctgtggctgctgtttctatcctccagccagagagctagtgtttattttctccattgtgttacacacttgtgcagctgcaaccaccatatccagggcccaatggtaggaggtagagaagaaaagcaaaagggattggcctcatcctcttacaacgatagttccattgaatagagagaaaggttttcctgcctcagagtgttggctgcactaggcttttgttactgtagtctggccctgttaccatgggattgcttgcatgtggggatacaggagaattcagaaaagaaaaaaagatttgctatttctacattctccctgagcattaagacttcccttgcccattcctcaattcaaagctaaggcttcttctggagctgcctctgtgggcggttcgggagataccaaaggagaaaaagtaccactgttgatatggtggtatttcaaattctggtctaccctatttcacatgccttgtttacttttcagagctgacagattgctgctccatgcattctgtccagtttcctaagagagacagcttggagtatgcttaatccatcttacctgggactgaaacagctgcttattttgccgttaaaaattacatgcagtttactgcgtggctccgggtttgtttgtttgtttttcctctttaataggtttattcagaaaacatgtccactgcaattagggaggtaggagtttggagacagaccagaacacttctactgaagaattacttaattaaatgcagaaccaaaaagagtagtgttcaggtaagttaaataactctttcttatgcttttttgcagtttattttgcttgatatattctatcttgaagtgatgatttattttgctaaatatatttttattataattttatttttctttgcttgtaaagtaaaagcttgccatgttagccacagaaaaataactgaattacttaatgctttctaaatgttaaaaattttaataataatttctacatttagttaatttctaacatctgtgcttcattttcagcttttaggcatgtgtttcctaagtttcatgaactaacattccacaataactttgattccagagttttatatcccacaacctcgtattttatggactctagattgagttgcccatgagtattaatattatgacacagatttgtacccacagcatacattacttttgataagggtaaaagaaaggaagaacttgggtaaccagctagtaataatttcaaaggatgaaaacatattattcatcttccctgaaactggtaaaacaattaaacagcaagatgatataatagctcatttctactaaaactgaccgtagaatttaattcagtatggttttggtagtatacatttaggtataattaaagtatgatttctaattcagaattgaataaaggcatttttatggtgaatccatatagggatgttcggtaaattgctttagataaaattatatgagtaaatttattatgttttatgtcaataatctaagatgtttaaatattatcttttatgtcaccttaatttattttgtgacttgaattttaaaatatttcagtaaaactaaatacaaaggaaaaaataatatgcatgttgggttggatgaggtgttcaacacaaaattcttttgggatagaattgcttttattttattcataagaaaggacaaccaaatttcctgttttttcttagtattatattatttgccaagaaatcttgatgatttttgctgccattgttatactttgtaattactttgtttcttttattgtaggaaattctttttccactattttttttattttggttaatattaattagcatgatgcatccaaataagaaatatgaagaagtgcctaatatagaactcaatcctatggacaagtttactctttctaatctaattcttggatatactccagtgactaatattacaagcagcatcatgcagaaagtgtctactgatcatctacctgatggtattgtgagcttatatatatattctgtttataatattaagccttttcaatatttatcagcttgctttattgaatgaatagcagtcttaacacttagagatgtgttcctccaccaaagtcagttttataaaaatactaaaattatttaattctgttgccttatttttcttgtgaaacattaatttatattcttggtggtaggaagcatattttatgtacttttatatttaattcttagaccatttataaaatagtttaagtatacttgtataagatacaagctttgatgggctatttcattttgattctgactttcatataattatgaagctagcaatgtttagctgaatgtggtagcatgtgcctgtagtcccagctactcaagaagttgaggtggggggatcccgtgagcccaaaagtttggggctgcagtgaactatgatcatgccacttcattccagcactccttactctgggcaacagaatgggacccccatctataacaataaaaaatttaaaaaggaagctagaaatatgtgataaagactgtaaagcagtcaccttttcagcttaccatgcttgtttatagaagtgtatggtgtaaactgaagaagtacctaactttggagactacaactatgactatggctaagtccctaactctgttttatttatttatatatatattttttgtagagatgggatcttgctatgttgcccaggttggtctaaactcctgggatcaaatgatcttcctcccttggcctccacctaaagtgccacctaagtcttttttctcaatgtgcacttctcacaaagaaatgaactagaaaacagtgtaagcagtgaagtgccactgaacttaaagtggctgtgagagaacctaaagcaaaagctggagaaagtgacagaaattcttatgctattaatgattaaacaaggaagtgctaaattgtagaaaatgacagattagcatgttattttttgccatatgggatagttgtaattagcttatatgtcatcgcattattggattttatgtcattgaatggaaagtgttaattatacagtcagaagccaggtaacttttattccattggtttctttctctggctatttctatttaatattttgattaaatacacttcttgttatatggtagtgtatcatattaggtacaagtagtatagattaccatgagaatttagtgtacaagctcaaaaagctgattaaaaatgttgaaatgaaattcattggtaattctgagtaggaggaaagaatataaaccaaagaaatatgaggccaggcatggtgactcacgcctgtaatcccagcactttgggaggccgaggtgagcagatcacctgaggtcaggggtttgagaccagactggccaacatggtgaaaccctgtctctactaaaaatacaaaaaaattatccagccatggtggtgggtgcctgtagtcccagctacttgggaggttgaggcaggagaattgcttgaacccgggaggcggaggttgcagtgagctgagattgtaccactgcactcaagcctggcgacagagcaacactcaatatctcaaaaacaaaaaacaaaacaaaaaaagaacaaacaaacaaaaaacaactaagtcagtgtgtattagatgccaaaatagtgtatacatatacacaaatttttttagacttctgtatttttaacaacagaactatctgaaaatgggttatgcatacatacataacatgactggtaggatgttgaactaacaccctctttattcatgtaaatcctggagttccctgtccctcttaaaaggcctggaaaatctattaattaacatttaagtaatactttagaatctatgaagcattttttttttgtctttttcttcttttgtttgagatgggatctcactgtcaagctggtttgcagtgctgtgatctcagctcactgcagcctctgcctcctgggctcaagtgatactcccgcttcagcctcctgagtagctgggactacaggtgcacaccaccacacctggctaatttttgtattttttgtagagacagggtttcgccatgctacctaggctggtctcaagcaatctactcctggactcaagcaatctacctgcctccaccttccaaagtgctggcattataggtgtgaggcaccacatccagcctacaaagcgttttgatgtttgttacttcacttgttcttcacaacaacccagtgtcatcagctaggcattgtagatgaggacactaaagtctgaagagttcaaatcgcctgtctgtgctcacacagttaatacatgaagacgttaagtactaattctatattctttccatttcaccacatgtttgaagcttctgtagtgaaaattagttgcttgtaaacaaaactacaagaaaatatttaaaaattagtcttatctgatgagaaagaatgattacagtattttttccacttatcttctaagaaaggaacaagcaatattggatttgaatgacaatttttatttaaggaggagttgtgtcatagttactaaaatgcctatttagtttctgagaaggattgtggaattttctttataagaaatatttaaaaataaaaaattcatatatttactaaaaagttatttttgtgcaggtgcactggctcatgcctgtaatcccaactagtccggaggctcaggtgggaggatcacttgaggccaggagttcaagaccagcttgggtaatgtagtgacacctcatttctaccaaaattaaaaacaaaaaattagccaggcatggtgatgagtgactatcgaccaagctctactccagaagctgaggtgggaggatctcttgacccctgaagtttgagtgcaagatccagtgcactgcaggctgggtaacagaacaaagccctgtctctaaaaaaatataaaataaaataacgaagttattttttagtttaacttcgagatagataaatgaactgcattactaataatttttataattttattgctgcctgaaattagtataattaattgaggttttgagaaacagcaatttcttgaagaaatatgagttctgcatattgttttatactatatttcatatatttataacataagtataacactgacacatttctgtaatcaaatgacagctgagtagtgtctgcaacattgtaccattttattattattattttgttggaagaattgtcttctttttgtttgtttgttttttttgagacatggtctcactctgttgcctaagctggagtgcagttgctcagttatggctcactgcagcctcgacctcctagctcaaatgatcctcccacctccgcctcccaagtagctggaagtgcaggcacacatcactacacctggctaatttttttattttttggagacagaacctcaccatgttgcccaggttggacttgaacttctgagctcaagcaatcctcccatcttggtcttccaaaatgttgggattacaggtgtgagccactgtgcttggactgttttcattttttaagaagtaaatatagcaaaagtgtttataaaatattccattcatcaaaataattgtaaacttgatctactgtattgtggtattttaatttgtgagctaactatattgttatgatatcttacagtcataattactgaagaatatacaaatgaaaaagaaatgttaacatccagtctctctaagccgagcaactttgtag

SEQ ID NO: 10248 - DNA, 616 bp, Homo sapiens
gactgagcgcgtccaggcctgacagctctgcggctcgggccctgagagctgacagattgctgctccatgcattctgtccagtttcctaagagagacagcttggagtatgcttaatccatcttacctgggactgaaacagctgcttattttgccgttaaaaattacatgcagtttactgcgtggctccgggtttgtttgtttgtttttcctctttaataggtttattcagaaaacatgtccactgcaattagggaggtaggagtttggagacagaccagaacacttctactgaagaattacttaattaaatgcagaaccaaaaagagtagtgttcaggaaattctttttccactattttttttattttggttaatattaattagcatgatgcatccaaataagaaatatgaagaagtgcctaatatagaactcaatcctatggacaagtttactctttctaatctaattcttggatatactccagtgactaatattacaagcagcatcatgcagaaagtgtctactgatcatctacctgatgtcataattactgaagaatatacaaatgaaaaagaaatgttaacatccagtctctctaagccgagcaactttgtag

SEQ ID NO: 10249 - DNA, 3017 bp, Homo sapiens
agctctgcctgcgccaggagcgcgcgggtgcgcgcggccgcgccctcgcacagatcccagctgggtcacccgcactgagtcaacagactgagcgcgtccaggcctgacagctctgcggctcgggccctgagagacagcgtctcgggctagagtgcagtggtgcgatcaaagttcactgcagccttgaacgtctggactctagggaccctgctgaatagctggggctacaggcgtgtgtcactgcgcccaggtttattcagaaaacatgtccactgcaattagggaggtaggagtttggagacagaccagaacacttctactgaagaattacttaattaaatgcagaaccaaaaagagtagtgttcaggaaattctttttccactattttttttattttggttaatattaattagcatgatgcatccaaataagaaatatgaagaagtgcctaatatagaactcaatcctatggacaagtttactctttctaatctaattcttggatatactccagtgactaatattacaagcagcatcatgcagaaagtgtctactgatcatctacctgatgtcataattactgaagaatatacaaatgaaaaagaaatgttaacatccagtctctctaagccgagcaactttgtaggtgtggttttcaaagactccatgtcctatgaacttcgtttttttcctgatatgattccagtatcttctatttatatggattcaagagctggctgttcaaaatcatgtgaggctgctcagtactggtcctcaggtttcacagttttacaagcatccatagatgctgccattatacagttgaagaccaatgtttctctttggaaggagctggagtcaactaaagctgttattatgggagaaactgctgttgtagaaatagatacctttccccgaggagtaattttaatatacctagttatagcattttcaccttttggatactttttggcaattcatatcgtagcagaaaaagaaaaaaaaataaaagaatttttaaagataatgggacttcatgatactgccttttggctttcctgggttcttctatatacaagtttaatttttcttatgtcccttcttatggcagtcattgcgacagcttctttgttatttcctcaaagtagcagcattgtgatatttctgctttttttcctttatggattatcatctgtattttttgctttaatgctgacacctctttttaaaaaatcaaaacatgtgggaatagttgaattttttgttactgtggcttttggatttattggccttatgataatcctcatagaaagttttcccaaatcgttagtgtggcttttcagtcctttctgtcactgtacttttgtgattggtattgcacaggtcatgcatttagaagattttaatgaaggtgcttcattttcaaatttgactgcaggcccatatcctctaattattacaattatcatgctcacacttaatagtatattctatgtcctcttggctgtctatcttgatcaagtcattccaggggaatttggcttacggagatcatctttatattttctgaagccttcatattggtcaaagagcaaaagaaattatgaggagttatcagagggcaatgttaatggaaatattagttttagtgaaattattgagccagtttcttcagaatttgtaggaaaagaagccataagaattagtggtattcagaagacatacagaaagaagggtgaaaatgtggaggctttgagaaatttgtcatttgacatatatgagggtcagattactgccttacttggccacagtggaacaggaaagagtacattgatgaatattctttgtggactctgcccaccttctgatgggtttgcatctatatatggacacagagtctcagaaatagatgaaatgtttgaagcaagaaaaatgattggcatttgtccacagttagatatacactttgatgttttgacagtagaagaaaatttatcaattttggcttcaatcaaagggataccagccaacaatataatacaagaagtgcagaaggttttactagatttagacatgcagactatcaaagataaccaagctaaaaaattaagtggtggtcaaaaaagaaagctgtcattaggaattgctgttcttgggaacccaaagatactgctgctagatgaaccaacagctggaatggacccctgttctcgacatattgtatggaatcttttaaaatacagaaaagccaatcgggtgacagtgttcagtactcatttcatggatgaagctgacattcttgcagataggaaagctgtgatatcacaaggaatgctgaaatgtgttggttcttcaatgttcctcaaaagtaaatgggggatcggctaccgcctgagcatgtacatagacaaatattgtgccacagaatctctttcttcactggttaaacaacatatacctggagctactttattacaacagaatgaccaacaacttgtgtatagcttgcctttcaaggacatggacaaattttcaggtttgttttctgccctagacagtcattcaaatttgggtgtcatttcttatggtgtttccatgacgactttggaagacgtatttttaaagctagaagttgaagcagaaattgaccaagcagattatagtgtatttactcagcagccactggaggaagaaatggattcaaaatcttttgatgaaatggaacagagcttacttattctttctgaaaccaaggctgctctagtgagcaccatgagcctttggaaacaacagatgtatacaatagcaaagtttcatttctttaccttgaaacgtgaaagtaaatcagtgagatcagtgttgcttctgcttttaatttttttcacagttcagatttttatgtttttggttcatcactcttttaaaaatgctgtggttcccatcaaacttgttccagacttatattttctaaaacctggagacaaaccacataaatacaaaacaagtctgcttcttc

SEQ ID NO: 10250 - DNA, 8598 bp, Homo sapiens
cacattctttgaactgtagttgtcattttagtttatttttcaaaaacttttgcagtacctttttggtctgtcttgtgtgtgccttgcagtgaacagtctggatttggacagtggtctgtctgttagttcagtttctcaagcctttgtcacactaataggattggatttatgtatgtccagcttgggaattattacaggaattaaaaacaactttttagagtgctttcctgagctctctttctatttgttcccccttctactttttgcttccctgtggctgctgtttctatcctccagccagagagctagtgtttattttctccattgtgttacacacttgtgcagctgcaaccaccatatccagggcccaatggtaggaggtagagaagaaaagcaaaagggattggcctcatcctcttacaacgatagttccattgaatagagagaaaggttttcctgcctcagagtgttggctgcactaggcttttgttactgtagtctggccctgttaccatgggattgcttgcatgtggggatacaggagaattcagaaaagaaaaaaagatttgctatttctacattctccctgagcattaagacttcccttgcccattcctcaattcaaagctaaggcttcttctggagctgcctctgtgggcggttcgggagataccaaaggagaaaaagtaccactgttgatatggtggtatttcaaattctggtctaccctatttcacatgccttgtttacttttcagagctgacagattgctgctccatgcattctgtccagtttcctaagagagacagcttggagtatgcttaatccatcttacctgggactgaaacagctgcttattttgccgttaaaaattacatgcagtttactgcgtggctccgggtttgtttgtttgtttttcctctttaataggtttattcagaaaacatgtccactgcaattagggaggtaggagtttggagacagaccagaacacttctactgaagaattacttaattaaatgcagaaccaaaaagagtagtgttcaggtaagttaaataactctttcttatgcttttttgcagtttattttgcttgatatattctatcttgaagtgatgatttattttgctaaatatatttttattataattttatttttctttgcttgtaaagtaaaagcttgccatgttagccacagaaaaataactgaattacttaatgctttctaaatgttaaaaattttaataataatttctacatttagttaatttctaacatctgtgcttcattttcagcttttaggcatgtgtttcctaagtttcatgaactaacattccacaataactttgattccagagttttatatcccacaacctcgtattttatggactctagattgagttgcccatgagtattaatattatgacacagatttgtacccacagcatacattacttttgataagggtaaaagaaaggaagaacttgggtaaccagctagtaataatttcaaaggatgaaaacatattattcatcttccctgaaactggtaaaacaattaaacagcaagatgatataatagctcatttctactaaaactgaccgtagaatttaattcagtatggttttggtagtatacatttaggtataattaaagtatgatttctaattcagaattgaataaaggcatttttatggtgaatccatatagggatgttcggtaaattgctttagataaaattatatgagtaaatttattatgttttatgtcaataatctaagatgtttaaatattatcttttatgtcaccttaatttattttgtgacttgaattttaaaatatttcagtaaaactaaatacaaaggaaaaaataatatgcatgttgggttggatgaggtgttcaacacaaaattcttttgggatagaattgcttttattttattcataagaaaggacaaccaaatttcctgttttttcttagtattatattatttgccaagaaatcttgatgatttttgctgccattgttatactttgtaattactttgtttcttttattgtaggaaattctttttccactattttttttattttggttaatattaattagcatgatgcatccaaataagaaatatgaagaagtgcctaatatagaactcaatcctatggacaagtttactctttctaatctaattcttggatatactccagtgactaatattacaagcagcatcatgcagaaagtgtctactgatcatctacctgatggtattgtgagcttatatatatattctgtttataatattaagccttttcaatatttatcagcttgctttattgaatgaatagcagtcttaacacttagagatgtgttcctccaccaaagtcagttttataaaaatactaaaattatttaattctgttgccttatttttcttgtgaaacattaatttatattcttggtggtaggaagcatattttatgtacttttatatttaattcttagaccatttataaaatagtttaagtatacttgtataagatacaagctttgatgggctatttcattttgattctgactttcatataattatgaagctagcaatgtttagctgaatgtggtagcatgtgcctgtagtcccagctactcaagaagttgaggtggggggatcccgtgagcccaaaagtttggggctgcagtgaactatgatcatgccacttcattccagcactccttactctgggcaacagaatgggacccccatctataacaataaaaaatttaaaaaggaagctagaaatatgtgataaagactgtaaagcagtcaccttttcagcttaccatgcttgtttatagaagtgtatggtgtaaactgaagaagtacctaactttggagactacaactatgactatggctaagtccctaactctgttttatttatttatatatatattttttgtagagatgggatcttgctatgttgcccaggttggtctaaactcctgggatcaaatgatcttcctcccttggcctccacctaaagtgccacctaagtcttttttctcaatgtgcacttctcacaaagaaatgaactagaaaacagtgtaagcagtgaagtgccactgaacttaaagtggctgtgagagaacctaaagcaaaagctggagaaagtgacagaaattcttatgctattaatgattaaacaaggaagtgctaaattgtagaaaatgacagattagcatgttattttttgccatatgggatagttgtaattagcttatatgtcatcgcattattggattttatgtcattgaatggaaagtgttaattatacagtcagaagccaggtaacttttattccattggtttctttctctggctatttctatttaatattttgattaaatacacttcttgttatatggtagtgtatcatattaggtacaagtagtatagattaccatgagaatttagtgtacaagctcaaaaagctgattaaaaatgttgaaatgaaattcattggtaattctgagtaggaggaaagaatataaaccaaagaaatatgaggccaggcatggtgactcacgcctgtaatcccagcactttgggaggccgaggtgagcagatcacctgaggtcaggggtttgagaccagactggccaacatggtgaaaccctgtctctactaaaaatacaaaaaaattatccagccatggtggtgggtgcctgtagtcccagctacttgggaggttgaggcaggagaattgcttgaacccgggaggcggaggttgcagtgagctgagattgtaccactgcactcaagcctggcgacagagcaacactcaatatctcaaaaacaaaaaacaaaacaaaaaaagaacaaacaaacaaaaaacaactaagtcagtgtgtattagatgccaaaatagtgtatacatatacacaaatttttttagacttctgtatttttaacaacagaactatctgaaaatgggttatgcatacatacataacatgactggtaggatgttgaactaacaccctctttattcatgtaaatcctggagttccctgtccctcttaaaaggcctggaaaatctattaattaacatttaagtaatactttagaatctatgaagcattttttttttgtctttttcttcttttgtttgagatgggatctcactgtcaagctggtttgcagtgctgtgatctcagctcactgcagcctctgcctcctgggctcaagtgatactcccgcttcagcctcctgagtagctgggactacaggtgcacaccaccacacctggctaatttttgtattttttgtagagacagggtttcgccatgctacctaggctggtctcaagcaatctactcctggactcaagcaatctacctgcctccaccttccaaagtgctggcattataggtgtgaggcaccacatccagcctacaaagcgttttgatgtttgttacttcacttgttcttcacaacaacccagtgtcatcagctaggcattgtagatgaggacactaaagtctgaagagttcaaatcgcctgtctgtgctcacacagttaatacatgaagacgttaagtactaattctatattctttccatttcaccacatgtttgaagcttctgtagtgaaaattagttgcttgtaaacaaaactacaagaaaatatttaaaaattagtcttatctgatgagaaagaatgattacagtattttttccacttatcttctaagaaaggaacaagcaatattggatttgaatgacaatttttatttaaggaggagttgtgtcatagttactaaaatgcctatttagtttctgagaaggattgtggaattttctttataagaaatatttaaaaataaaaaattcatatatttactaaaaagttatttttgtgcaggtgcactggctcatgcctgtaatcccaactagtccggaggctcaggtgggaggatcacttgaggccaggagttcaagaccagcttgggtaatgtagtgacacctcatttctaccaaaattaaaaacaaaaaattagccaggcatggtgatgagtgactatcgaccaagctctactccagaagctgaggtgggaggatctcttgacccctgaagtttgagtgcaagatccagtgcactgcaggctgggtaacagaacaaagccctgtctctaaaaaaatataaaataaaataacgaagttattttttagtttaacttcgagatagataaatgaactgcattactaataatttttataattttattgctgcctgaaattagtataattaattgaggttttgagaaacagcaatttcttgaagaaatatgagttctgcatattgttttatactatatttcatatatttataacataagtataacactgacacatttctgtaatcaaatgacagctgagtagtgtctgcaacattgtaccattttattattattattttgttggaagaattgtcttctttttgtttgtttgttttttttgagacatggtctcactctgttgcctaagctggagtgcagttgctcagttatggctcactgcagcctcgacctcctagctcaaatgatcctcccacctccgcctcccaagtagctggaagtgcaggcacacatcactacacctggctaatttttttattttttggagacagaacctcaccatgttgcccaggttggacttgaacttctgagctcaagcaatcctcccatcttggtcttccaaaatgttgggattacaggtgtgagccactgtgcttggactgttttcattttttaagaagtaaatatagcaaaagtgtttataaaatattccattcatcaaaataattgtaaacttgatctactgtattgtggtattttaatttgtgagctaactatattgttatgatatcttacagtcataattactgaagaatatacaaatgaaaaagaaatgttaacatccagtctctctaagccgagcaactttgtaggtgtggttttcaaagactccatgtcctatgaacttcgtttttttcctgatatgattccagtatcttctatttatatggattcaagaggtaaatagccctacataatcattgaagatcaattaaatgcatatctttgctgcttgcagttcatagtcaaaattttatatagttcaatattggcattttcaactattcttacttgttccaataggaaaactgagaagtatagcataaaaatatttatttataaatacctatctacttctacacataaaacatttttatatatacccattttgatttaatacatttatatatattaaatacagtagcataaagcaaaattgcattttgggttatatgactttctaaatctctttttttcatgtaattgtttttacttgtggtatgtacaaatctttaaaatcttgaggtcttctactagtgaacttgattagttttatatttgaaacatgggaaacaacctttggttgtttaaatctatgaagaaatattatcaaccacaaacatttattgagcaatgttaaagtcactatgctaaatactgaatttgtgactttatttcaaaaagcccttctgaaaattcttttttcctgtttgcttaactttgacttttccttgcttctggaagtgctttagagctaagtcatgtagaatgatttactttaaaacaaaaaagtaacttgttttaaataactacaattaatttctttctttacatttttattcatttactatttagtattctaacacatataacttttatttcaaaatttcaagtaaatgatcagaaatcttgtaagtattgtttacctttgaaagtcagtagcttatttctttggtcctgtaaagattgattgattatattgttttggtaggtatctctccatataatatctttaaaacgatgcacttgcatgttgtacagaatcttagatctcatattcttccccccatagctggctgttcaaaatcatgtgaggctgctcagtactggtcctcaggtttcacagttttacaagcatccatagatgctgccattatacaggtaaatatgataaaggaagaaatacaaaaactatgccattttaaaataaatatttccttattctttacaatagtatttggtttgactactgtcaaatgtacaaaatatgtaacctactacaactcctttgagaaaaaagataaaaaagtcatattttctgatttggtactttttgttgtgtttcatattttagcagaaaaactggccatgaaatttatttttaaaaatcttacttttgtgtctgggctagataacagtagatgaagttaccttagaattcaaactattcaaattaaccatatttcattcttccatgttctgtatggatctgtggcttttttttccatttgccctttctaattgaatttactatgctacaaaatttactatgctacaaaatattgtaatttcaaaatgtatatcaaccatcttgtctgctaaacaatacgtttaaagtatgtatgaataatgatggagctggaatcaaaatctgaacaggagtcttgtctctgttgttacactgctatgtagtaaaatgactattataatagtactttacttgacagcattgtcgtaagaaccaaatgagatgatttatgtataattgtcttgtaaacttttgtagtacagtataaacatattagggacgtgtaatattgcacaaattcaataatacagaaatttaaggtaaagatagtgaaatacggatctattacattgatgatgttgtatcacctatttgtattttggccaaagtttttagccatccacagcacagaccacactggatgaataggcaggatagatttcaatttaggcattaattggaatgttagaagtattatgtggcataaatagttttattatttggtctatatgtgctaaatatatagactttaaagcagtagaagggcatggtatttagaagaacattttttaaacaatcataggaatgatggcactaataatcactcctaaattcctaaattttgaagatgtatatttttactaagatacatataattgtctgcttaagatgataattgtgcaattttattttatttgacaaattatttaatcaaaatttatacacttactgactttaaactttaaactttatggtatacttttagaataaattgaatgcaatattctactcagaattatgatattggggtcactcactttatttcaggtatggagctttttgaggattgtatttgtactaggttactgaccaaatttagggatatagctgtcccgttttactaggggctgctatcataactaaattaatttgatgtatttacattttctaattatagttgaagaccaatgtttctctttggaaggagctggagtcaactaaagctgttattatgggagaaactgctgttgtagaaatagatacctttccccgaggagtaattttaatatacctagttatagcattttcaccttttggatactttttggcaattcatatcgtagcagaaaaagaaaaaaaaataaaagaa

SEQ ID NO: 10251 - DNA, 1695 bp, Homo sapiens
cacattctttgaactgtagttgtcattttagtttatttttcaaaaacttttgcagtacctttttggtctgtcttgtgtgtgccttgcagtgaacagtctggatttggacagtggtctgtctgttagttcagtttctcaagcctttgtcacactaataggattggatttatgtatgtccagcttgggaattattacaggaattaaaaacaactttttagagtgctttcctgagctctctttctatttgttcccccttctactttttgcttccctgtggctgctgtttctatcctccagccagagagctagtgtttattttctccattgtgttacacacttgtgcagctgcaaccaccatatccagggcccaatggtaggaggtagagaagaaaagcaaaagggattggcctcatcctcttacaacgatagttccattgaatagagagaaaggttttcctgcctcagagtgttggctgcactaggcttttgttactgtagtctggccctgttaccatgggattgcttgcatgtggggatacaggagaattcagaaaagaaaaaaagatttgctatttctacattctccctgagcattaagacttcccttgcccattcctcaattcaaagctaaggcttcttctggagctgcctctgtgggcggttcgggagataccaaaggagaaaaagtaccactgttgatatggtggtatttcaaattctggtctaccctatttcacatgccttgtttacttttcagagctgacagattgctgctccatgcattctgtccagtttcctaagagagacagcttggagtatgcttaatccatcttacctgggactgaaacagctgcttattttgccgttaaaaattacatgcagtttactgcgtggctccgggtttgtttgtttgtttttcctctttaataggtttattcagaaaacatgtccactgcaattagggaggtaggagtttggagacagaccagaacacttctactgaagaattacttaattaaatgcagaaccaaaaagagtagtgttcaggaaattctttttccactattttttttattttggttaatattaattagcatgatgcatccaaataagaaatatgaagaagtgcctaatatagaactcaatcctatggacaagtttactctttctaatctaattcttggatatactccagtgactaatattacaagcagcatcatgcagaaagtgtctactgatcatctacctgatgtcataattactgaagaatatacaaatgaaaaagaaatgttaacatccagtctctctaagccgagcaactttgtaggtgtggttttcaaagactccatgtcctatgaacttcgtttttttcctgatatgattccagtatcttctatttatatggattcaagagctggctgttcaaaatcatgtgaggctgctcagtactggtcctcaggtttcacagttttacaagcatccatagatgctgccattatacagttgaagaccaatgtttctctttggaaggagctggagtcaactaaagctgttattatgggagaaactgctgttgtagaaatagatacctttccccgaggagtaattttaatatacctagttatagcattttcaccttttggatactttttggcaattcatatcgtagcagaaaaagaaaaaaaaataaaagaa

SEQ ID NO: 10252 - DNA, 25466 bp, Homo sapiens
aagctcagcgcacttggcttaaggggcggcgcgctccctgcctgctgctgggcggagggaaggcggcaagagctgcggagcccctggaaggtgagaaggactcggagagggaagaaggcccgagactcgagaatgcggggttggggccgggagggatgcaagttccctgggaattagggggtccagcctctgacctccttccggtgaatgttgacgacggctgaattgatcactgattctcaaggggggcatcggacatctgggacccttaagagggcctttgccgatcacacacctgcagccccctgcccgttagaactcctgcactcccccttgccccgtcttacaaatggagaaactgagcccactcccccagatcctaagtcccgcttgatgtaaaggaaagaaccctggcgtaagggtctgggtctgaggtcccagttccggcctggtcacctttagcaacttcctgcccctctgtcagcgtcagattctccatctgtgtcagaggtggaccggcccaaggaaaatagatcaggaatcgctgactccaggagtctctatcccagccccttcgcctgactctttctctggctcccgcggtccctctgagcgattaatgctacataaggtgtgggcagagctggggtcgtgcctccagctgggcaactgcctgtctctctgggtgcctgggtttgctttcttgggcctcggtttccacttctgtagagtggggtgatagtccagcacttcccctgggcgtgtgaaatgtccagcactgccaatattcgttgctgttatcttcggagaacagtgaggggaaaggaatccttgcctgggctgggccaggcaggaggctgggggtcaggacctggaagaggcttccaggtgaggcttggggtggagcctggtgacgaaagcgttaagcccaaactcggtccctggaggattagaggatgatctttaagtccccagctgtcagccctgctcagagcgacagtcctggcagccaatcagatgcgaggacggctgcgggttgcgctcccattggtttactccacccctggggtagcggagcctctttatcgagtgactactgtttgcctcgctctaatcagagcttccaggaaccctgcgctgtgggataaaggaatgaggttcagaaaggggcagggagttgcccgcagccgcaccgcacgtcttcagcccgaccgttgtcctgacctctctgtcccgtcccctgcccagtctcaccatggccttctggacacagctgatgctgctgctctggaagaatttcatgtatcgccggagacagccggtaacgccccagtgtgagaccagggccgggtgggcaggcagcccccactgtcccccaccgtctcccacctattctcccccaggtccagctcctggtcgaattgctgtggcctctcttcctcttcttcatcctggtggctgttcgccactcccacccgcccctggagcaccatgaatgtgagcccccccagggaccaggcactttgtgtgtgtaggggaaggcagatggctcacccgtgcacaggaatcccccgtgcatgtcagggagccttcaccaggccgccaatacatggcatgggagtgagctctccatcgctggaggcatgcaagcggtgccgggcgacccgatgggggtggagtcaggcagagtccacagggcctcagcaccaggcgtctccccgcaggccacttcccaaacaagccactgccatcggcgggcaccgtgccctggctccagggtctcatctgtaatgtgaacaacacctgctttccgcagctgacaccgggcgaggagcccgggcgcctgagcaacttcaacgactccctgtgagccagaggcagtgggtgcggccggcctgcaaactcggggctgcagtgccggccggaaccccgcctcctgccctctctctgtccccagggtctcccggctgctagccgatgcccgcactgtgctgggaggggccagtgcccacaggacgctggctggcctagggaagctgatcgccacgctgagggctgcacgcagcacgggtgaggaggccggggggcctctggcagggctgagctctgagcctcaacttgccgggccgtgaaatgggcacagggtgggggtgggtgcctcagaccaacgtccccccagccccatgctcccgtgcgctcctcccccagcccagcctcaaccaaccaagcagtctccactggaaccacccatgctggatgtcgcggagctgctgacgtcactgctgcgcacggtagggtgtcggggcgggaccgcgctgacttcctgggacactgcactggggatgtcctggcactgccccaccccgggccaaggacctcccgttccaggcatccaggctgtccctggtctctgcggtgatgctgcttgtccgtctgggcccccagacagagtgtgtctgacccagtgaggaagactcgtctgtgagatctccaatgagtccctttgcctctcagagcctcagtttccctatttgtaaagtgggggctatgatagtatggtctgcctgggaactggccagagcgctggacccctagtgagtgttcaaaatcattgtcccccttgtggtctttctccccaggaatccctggggttggcactgggccaagcccaggagcccttgcacagcttgttggaggccgctgaggacctggcccaggaggtacgaggccccactcatcctcaacccccatggaggcaacgttggcaggcagcctgcgccgggagggtctggggcagcccgggcacttcccttgggtgggttttcaggaggattagacagcgagagggagaggctgcccctggcccagtgccctgccctggttagggcttggaggtgggatcattgccagctccgtctggtaacctctctctagctcctggcgctgcgcagcctggtggagcttcgggcactgctgcagagaccccgagggaccagcggccccctggagttgctgtcagaggccctctgcagtgtcaggggacctagcagcacagtgggcccctccctcaactggtacgaggctagtgacctgatggagctggtggggcaggagccagaatccgccctgccagacagcagcctgagtgagtgactgacctcggtttcccctcttgggaagtggaactctgggcaggggggcagggcctcatggcacccccatcccaggccccgcctgctcggagctgattggagccctggacagccacccgctgtcccgcctgctctggagacgcctgaagcctctgatcctcgggaagctactctttgcaccagatacaccttttacccggaagctcatggcccaggtgggggcagcctggatgctggggtgggagggtggtggccagagcccatccagtaccctcagtccaggtgggccagggccaggccggagggtcacggaaactatttgaagaagtaggagttagccgatggagggggatcagcttgtgcggaggatcagaggcacacgcaggagcaaggcagagggggcagggggtgggcaggggtcctcagaggaggagagggtcatcagtggagggggtgctgtccacaggtgaaccggaccttcgaggagctcaccctgctgagggatgtccgggaggtgtgggagatgctgggaccccggatcttcaccttcatgaacgacagttccaatgtggccatgctgcaggtgtgcgggggtgctggggaggtgggatgtggctccccggtgaggagggtagacaggcccggtggatgggaaggtgggctccgtgcagacccccacttttttttttttttttttgagatggagtctcgctctgtcgcccaagctggaatgcagtggcgtgatctcgactcactgcaacctccacctcccgggttcaagcgattctcctgtctcaccctctgagtagctgggactacaggcgcccaccaccacgcccggatgattttttttttttatttttagtagagacggggtttaaccatgttagccaggatggtctcgatctcctgacctcgtgatccacccgcctcggcctcccaaagtgctgggattacaggcgtgaactaccacgtcctgctttttttttttttttttttttttttaagagatggagtctcactctgttgcccaggctggactgcagtggcgagatcttggctcactgcaacctccgcctcctggattcaagcaattctcctgcttcagcctcacaagtaactgggattacaggcatgcgccaccactcccggctactttttgtatttttagtagagatgggctttcaccatgttggccaggctggtctcgaactcctgacctcaggtgatccacccgcctcgcctcccaaagtgctgggattacaggcatgagccactgtgcccgacccagactctcactttcacctgcgccccccagcggctcctgcagatgcaggatgaaggaagaaggcagcccagacctggaggccgggaccacatggaggccctgcgatcctttctggaccctgggagcggtggctacagctggcaggacgcacacgctgatgtggggcacctggtgggcacgctgggccgagtgacggaggtgagggcctgtccacctgcggggtctgtttcagtggggagggcaggtcccatcctagtgttcccaccctggtgttcccagggggaggcgggcccggccctagtaagagcctgggatttgtagagatctcaggagggagccggccgtgggcctacgaggggaaaacatggcccagccccgaggtccagggggaggagcggagtggtctaggaggcaggcggaccccagcgcctaggactcacccccgcatcccacagtgcctgtccttggacaagctggaggcggcaccctcagaggcagccctggtgtcgcgggccctgcaactgctcgcggaacatcgattctgggccggcgtcgtcttcttgggacctgaggactcttcagaccccacagagcacccaaccccagacctgggccccggccacgtgcgcatcaaaatccgcatggacattgacgtggtcacgaggaccaataagatcagggacaggtcaggcgagggagggggcggggggatgagggactgggcggggccaagagcgtggtgggtggggccaggcagcattcagcctattggagaccatgatagacaggatctgggctgtatcaacagtggtatggtagccagagcccggggctccttagaccaataggggcccgtgatgggcggggcctaggtgcatgaggggcgtggccatgggcctgagataagatgagagcaggtataggttgagggcaatggtgggcggagccaggtgtattattaggtccctggaataagggtggagctaaaattgcaccgggtgctgagcgcagtagatcttgcctgttatctcagaactttgggaggccaaagtgggagaatctcttgaggacaggtattcgagactagcctgggcaacatagtgagaccgcctcccccccgcccccctcccccaccaacctcacgaaaatatctttaaaaattagccaggtgaggccgggcacagtggctcacgcctgtaatcccagcactttgggaggctgaggcgggcggatcacgaggtcaggagatcaagaccatcctgactaactcggtgaaaccctgcctctactaaaaaaaaaaagtacaaaaaattagccgggcgtggtagcacgcgcctgtaggcccagctacccaggaggctgaggcaggagaatcgcttgaacccaggaggcggaggttgcagtgagccgagatggcgccactgcactccagcctgggcgatagagcgagactccgtctcaaacaaatgaataaatgaataaaattagccaggcgacttgggaggccgagctggggggatcgtttgatcccgggaggtcaaggctgcagtgagctatgattgcagctcttcactccagcctgggcgacagagcaagaccctgtctaagaaaaaggttattcagggtggggccccgggagtttctagcccttccctacaaccggccaccatgcccctctcgcaggttttgggaccctggcccagccgcggaccccctgaccgacctgcgctacgtgtggggcggcttcgtgtacctgcaagacctggtggagcgtgcagccgtccgcgtgctcagcggcgccaacccccgggccggcctctacctgcagcagatgccctatccgtgctatgtggacgacgtgtgagctctggcacccctccccgctcttccccgcggcgggaaggtcccgggtgtgggggtgggcccaggctctgttgggaaccttcctgcggtccaggctgcgaactttgcacctttacaccactccacgtgacctgctgcagcgggaggagcaggggactctgagggtctggtggggggggggactctgagggtctgggggcccccggcgcagggacagcctgggctgcactgatgcctgagagccaaaggctggctggatcaggttccaaggaacagggaggcaaatcttcccgccttgagatcccgggacacgaaccagtcgtgccagatggtgggcggagggggggtctgcggagggtctccagcctccaccccagccgtccccaccccaggttcctgcgtgtgctgagccggtcgctgccgctcttcctgacgctggcctggatctactccgtgacactgacagtgaaggccgtggtgcgggagaaggagacgcggctgcgggacaccatgcgcgccatggggctcagccgcgcggtgctctggctaggctggttcctcagctgcctcgggcccttcctgctcagcgccgcactgctggttctggtgctcaaggtgggcgcgcctcggcctgcccggctgcagaatgggtgcgctggagggtgacagacaggggcggccccacgtgggtgcgcgcccccaggccaatccaggagctgcaccctaagctcccgttgcctctcacagctgggagacatcctcccctacagccacccgggcgtggtcttcctgttcttggcagccttcgcggtggccacggtgacccagagcttcctgctcagcgccttcttctcccgcgccaacctggctgcggcctgcggcggcctggcctacttctccctctacctgccctacgtgctgtgtgtggcttggcgggaccggctgcccgcgggtggccgcgtggccgcggtgagagccgggtcgggcgtggatgggggacgccccccgcttcggccgctcactgaccgcccgcttttccgcagagcctgctgtcgcccgtggccttcggcttcggctgcgagagcctggctctgctggaggagcagggcgagggcgcgcagtggcacaacgtgggcacccggcctacggcagacgtcttcagcctggcccaggtctctggccttctgctgctggacgcggcgctctacggcctcgccacctggtacctggaagctgtgtgcccaggtgggccgtagggggcggggctccgggccgggtcgcacctgctttgcgggaggctgagctaggggtgtggcctccaggccgtttgggggtggggggtggcttattcccttggagagaaggcggggcttcttggcacacgcatgcaggtggctgcattggaggggcggggcctgaggcaggtgggcggggtttctgggccgcctcatacctggacgccctgattccaggtgtatggccagaagctggcacagtcgccgggcgctgtggctcacgcttgtaatcccagcactttgggaggccaaggcaggagaatcgcttgagcccaggagtttgagaccaggctgggcaatatagtgagacctcatcaatacaaaaagttagctgggcgtggtggcacgctgggcgtggtggcacgctcctgtagtcccagctactcgggaggatggggtgggaggatcactcgagcccaggaggttgaggctgctgtgagccgtgatcccaccagcctgggcaacagagtgagacctccatctctttaaaaaaaaaaaaaaaaaaaaagctggctgggtgcggtggctcacgcctgtaatcccagcactttgggaggccgaggcgggcgggtcatctgaggtcgggatttcgagaccagcctgaccaacatggagaaaccccgtctctactaaaaatacaaaattagctgggtgtggtggcgggtgcctgtttcctagctacttggaaggcagaggcaggagaaatgcttgaatcccggaggcggaggttgcggtgagtcgagatcgcgccactgcactccagcctgggcaacaagagtgaaactcagtctcaaaaaaaaaaaaacaaaaaaaaaaaaaacaaggccgggcacggtggctcacgcctgctttcccagcactttgggaggccgaggtgggcagatcacgaggtcaggagatggagaccatcctggctaacacggtgaaaccccgtctctcccaaaaatacaaaaaattatccaggcatggtggcgggcgcctgtagtcccagctactcaggaggctgaggcaggagaatgacgtgaactggggaggcggagcttgcagcgagtcaaaatcgtgccactgcactccagcctgggcaacagagcaagactccgtctcaaaaaaaaaaaaaaacaaaaccccaaaaaaagcctggtacactcctggggggtgggctaagcaataacccgcgcccctccccgcaggccagtacgggatccctgaaccatggaattttccttttcggaggagctactggtgcggacctcggccccccaagagtccagccccttgccccaccccgctggacccaaagggtgaggcactacgaggcttaatagctggttgtccacatatgcccagttcccccccaaaacgagattccacagatgccaatgacaatgacctggacaccccaaccctcacacctgccctgaagacactgcggtccccaagctcccgcagcttttataggccccggcccagcaggtcccggattccacagcccagctctgagggacttgcaggccccaggacccccatgacctccatggctgagtccaccccatctctgcagtgctggtagaagaggcaccgcccggcctgagtcctggcgtctccgttcgcagcctggagaagcgctttcctggaagcccgcagccagccctgcgggggctcagcctggacttctaccagggccacatcaccgccttcctgggccacaacggggccggcaagaccaccaccctgtgagcccccaaccactccctccccgtgagcccccccactcccaccccgtgagcccccccaccactccctccccgtgagccccccaccactccctccccgtgaaccccccaccactccctccccgtgagcccccccaccactccctccccgtgagccccccaccactccctccccgtgaaccccccaccactccctccccgtgagcccccccaccactccctccccgtgaaccccccaccactccctccccgtgagcccccccaccactccctccccgtgaggccccccaccactccctccccgtgaaccccccaccactccctccccgtgagcccccccaccactccctccccgtgaaccccccaccactccctccccgtgagcccccccaccactccctccctgtgagccccccgaccgctccctccccgtgagcccccccaccactccctccctgtgagcccccccaccactccctccctgtgagttcccccaccactccctccctgtgagtcccccaccactccctccctgtgagccgcccaaaccactccctccctgtgagccccccaccacttcctccctgtgagctccctgtgaggcccccgaccagtccctccctgtgagcagtaatggcgccactgcactccagcttgggcaacggagtaagaccctgtctcaaaataaatagggcgggagtggtggctcacgcctgtaatcccagcacttgggcaagccgaggtgggaggattgcctgaggtcagagtttgagacacagcctggccaatatggcaaaaccatctctactaaaaatacaaaaattagccgggtgtgatggtggcgtgcacctgtaatcccagctactcaggaggctgaggcaggagaactgcttgaaccctggaggcggaggttgcagtgagccgagactgtgccgttgcactccagcctgggcaacagagtgagactctgtcacaaaaaaataaaaataaacaaataaataaaaataaggctatcacagggttttggatgtagcatttaataggtgctctgtggccaggcgtggtggctcaggcctgcaatcccagcactttggggggccgaggcgggtggatcacgaggtcaggagattgagatcatcctggctaacatggtgaaacagtgaaaccccgtctctactaaaaatgcaaaaaaattagccggacatggtggcgggcgcctgtagtcccagctactcgggaggctgaggcaggagaatggcgtgaacccgggaggtggagcttgcagtgagccgagatcgtgccgctgcactccagcctgggcaacagagtgaaactccgtctcaaaaataataataataataataataataataataataataaataattaaaaattttttaaaaacagaaattaaaaatagaagctctgtaactgccagtgcactctgtgaagggggctactctgagacccctctatccacaggtccatcttgagtggcctcttcccacccagtggtggctctgccttcatcctgggccacgacgtccgctccagcatggccgccatccggccccacctgggcgtctgtcctcagtacaacgtgctgtttgacatgtgcgtctcggcaggcccagagtgcagcggtgggaagggactggacgccctctgggactctgcctgccatgtgggtcactctgctctgtgcactggccgcaggctgaccgtggacgagcacgtctggttctatgggcggctgaagggtctgagtgccgctgtagtgggccccgagcaggaccgtctgctgcaggatgtggggctggtctccaagcagagtgtgcagactcgccacctctctggtgagcccatccccaagggaggtcacctcacagggaggggcctggggattcatcctgaaggcagggggaagccgggtactgaggtccacgtgggtaggcaaccttgcccaaggctgggtgtgacacactgaggtcccttccccatctctaccaggtgggatgcaacggaagctgtccgtggccattgcctttgtgggcggctcccaagttgttatcctggacgagcctacggctggcgtggatcctgcttcccgccgcggtatttgggagctgctgctcaaataccgagaaggtaagagctggggattctgctcgaggggccagaaaaggcttctgacaaggaagtgctggggatggggttttgaggaatgagtaggagtttgctacatgtggaccccacttgttgctatggcatttaggggctactgctcaaataccgagacagtaagagttggggatagacagaggttcccctggattctgcctgaagggccagaaaaggtttccaacaaggaggttctggggatgaggttttgagggatgaataggagtttgcttcatggggcagacaactcctggcagaggccccagctcgggcaaagacgcggcggcctgatggtagttgtgggttggtcccccgtgcctaggtcgcacgctgatcctctccacccaccacctggatgaggcagagctgctgggagaccgtgtggccgtggtggcaggtggccgcttgtgctgctgtggctccccactcttcctgcgccgtcacctgggctccggctactacctgacgctggtgaaggcccgcctgcccctgaccaccaatgagaaggtggggaccggccttctcctgacccctgacccccgggactctgttcagccctgaaggccaagccacttggtgcctctctgcccgcaggctgacactgacatggagggcagtgtggacaccaggcaggaaaagaagaatggcagccagggcagcagagtcggtgagggccggggtgggagacccaaggcgggtgggcagtggggtggctgtgccttaacttgaggaggaggagggggagggggaagaggaggaggagggggaggaagcggcagaggaggttgaggcggaggaggagggggaggaggagggggaggagtaagaggtggaaggggaggcgaaggggaggagtaggagggagaggaggagggggagggagaggaggagggggaggagaaggggggaggaggaggggaagggagaggaggagggggagaagaaggggaggagtaggaggggagcagaaggggaggaataggagggggaggaggagggggagggaaagggggaggagaagggggagaagtaggaggaagaggagggggaggagaagggggaggagtaggagggagaggaggaggagggagaggagggggaggagaaggagaggaggaggagagcacttgagaacctgagatgatgcccccatccctgggctgagccggaaccatgagactaacttgaacactgaccccacctttaacccaaccagggctgagcccagagacaaacctacccctgacctccaacactaggtccagcactgccctcaagatctctttttgtttgtttctgagtcttgctctgtcgcccaggctgtagtgcagtggtgtgatctcagctcactgcaacctctgcctcctgggttcaagcatttctcctccctcagcctctcgagtaactgggattacaggtgggttccaccatgcctggctaatttttgcatttttggtagaaatggggtttcaccatgttggtcaggctggtctcaaactcctgacctcaggtgatctgcctgcttcaaccctcaaagtgctgggattacaggcgtgagccactgcgcccggccgcacctggcctacgttcttaaccctgatctctgtctgccgggacagtcccctcacaggtcaccaatgcctcttccccagggagactggggtggggcgtgagccggggctccctgaagcacccctttgtccacacaggcactcctcagctgctggccctggtacagcactgggtgcccggggcacggctggtggaggagctgccacacgagctggtgctggtgctgccctacacgggtgcccatgacggcagcttcgccacactcttccgagagctagacacgcggctggcggagctgaggctcactggctacgggatctccgacaccagcctcgaggaggtgtgaggcctgggtggtggtgaggtggggccaggaggagggcttcctggaggaggtggtgttttgaaggatgaatagcgtgtttatgagcagcaaggacattcagggaggaggcatggcacatgaggagctctggtggctcagatgtcccttgggaaggcctgggggacccatggtgtaggaggggtggggggctcacaagcccccagttctccctgtcggtgtccagtctctgagcccctgcttgtctccccagatcttcctgaaggtggtggaggagtgtgctgcggacacagatatggagggtgcggccacagctccctgacccctgaccccagtccagagtgggaccagaggccaggtccccatccctggcttagtgtggcccaaggcatagcctttaccctatacctgattcctgatcccccaatccgtgaccctcaactttgaccctgacccctgatggccctgcagatggcagctgcgggcagcacctatgcacaggcattgctggcctagacgtaaccctacggctcaagatgccgccacaggagacagcgctggagaacggggaaccaggtaagtccttcccagtggccctggggtcctcccagccacccccccacagcagcgtgagcactgaccctctcatccctcacagctgggtcagccccagagactgaccagggctctgggccagacgccgtgggccgggtacagggctgggcactgacccgccagcagctccaggccctgcttctcaagcgctttctgcttgcccgccgcagccgccgcggcctgttcgcccaggtgaggagggctagcaccagggagtcgcatgggagtccctgagttccctaccctggccgtccactcagtggcctaatccaaacccttacccccgtgtgtattcccaacccaaagcacatttattgagggcactggggagccatgggtggttgtagagcaggagcagggacaggtgcaagcaagcctggagggtggatggaagcagcagctgatgggctggtcccccagatcgtgctgcctgccctctttgtgggcctggccctcgtgttcagcctcatcgtgcctcctttcgggcactacccggctctgcggctcagtcccaccatgtacggtgctcaggtgtccttcttcaggtgggtgcagaaggaaggggctggtggcaggaagactagggacctgggggtacagccctgaccctacatctcccctcacacacagtgaggacgccccaggggaccctggacgtgcccggctgctcgaggcgctgctgcaggaggcaggactggaggagcccccagtgcagcatagctcccacaggtgaggcgtcttgttggcctggacctttcccctctctggcctcagttttcccatctggtccctggccagggagcctcagggggcacctggagcatcccctgtgcccacctgggagctgggagcctctgtggctccaggaacccccagaagctgggtgcccacagaccttcaccttgaccctgcagcgcccttgagtgtgcacagcccattgtctgcaggttctcggcaccagaagttcctgctgaagtggccaaggtcttggccagtggcaactggaccccagagtctccatccccagcctgccagtgtagccggcccggtgcccggcgcctgctgcccgactgcccggctgcagctggtggtccccctccgccccaggcagtgaccggctctggggaagtggttcagaacctgacaggccggaacctgtctgacttcctggtcaagacctacccgcgcctggtgcgccaggggtgagccatgccctgggactcagtttccctggctatagcatgggtccttgggttgctggggctggtgtggtcctggaggaggaagtggaggggttggatgcccagcttggggctacgggctgggagtctcgcgtaccttcctttcctctttttttttttttttttttttgagatggagtctccctctgttgcccaggctggagtgcagaggtgtgatctcagctcattgcaacctccacctcccagtttcaagcgattctcctccctcagcctcccgagtagctgggattacaggcacgcaccaccactcccgactaatttttgtatttttagtagagatggggtttcaccgtgttgccaggctggtctcgaactcctgacctcaggtgatccacccgccttggcctcccaaagtgttgggattacaggcaggagccaccgcgcccggctttctttcctgtttttgtccacccttgactctgtgctcccctctcaccatctctctctctgtcccacatccctgtctgcctgtgtctctgtccatctctcccacagcctgaagactaagaagtgggtgaatgaggtcaggtgaggaggggtctagcttggggtcccctgccccagttccactcccatgccctctgcctgccccctgggagctctcccggcccccccggccctcagctccccttccctgcctgcatggccccacagatacggaggcttctcgctggggggccgagacccaggcctgccctcgggccaagagttgggccgctcagtggaggagttgtgggcgctgctgagtcccctgcctggcggggccctcgaccgtgtcctgaaaaacctcacagcctgggctcacagcctggatgctcaggacagtctcaaggtgggaactgggggggcaggtgggcgtcctgtcacagcaaggtccaaccccattgctctgaccctatgaccttgacccccacccagatctggttcaacaacaaaggctggcactccatggtggcctttgtcaaccgagccagcaacgcaatcctccgtgctcacctgcccccaggcccggcccgccacgcccacagcatcaccacactcaaccaccccttgaacctcaccaaggagcagctgtctgagggtgcactgtgagtccctccaccctgcatgtcctaccctgcacgtcctaccctgcctccatttctctgtcgtttggggtggtgggagctggatttgaaccctgacacactcttgctttataaatgggggatagaaactgttcctctgctccctaagccagggaaatgggacctcctcagactcagcgggccccagcctcccccacacatcctcatcccaccaacctttatcctgcctgagacctgtacaacctctgctgccaaatcccaggcaccctcatccctaaattgcccctgccatctctgccactgctgactgccccatagacctttgtcccatcaatggcgtgttcagctctgctctgagcaacccatgcaccctcaccctacaacagctctcatgtcttcacctccaggatggcctcctcggtggacgtcctcgtctccatctgtgtggtctttgccatgtcctttgtcccggccagcttcactcttgtcctcattgaggagcgagtcacccgagccaagcacctgcagctcatggggggcctgtcccccaccctctactggcttggcaactttctctgggacatggtgcgggggctgcttggacgggtgggggcccagccactgcttgccactgccctgtctggccccttgtaggcaggggcttgtccaagatggcctgggtaaagtcttgaggattgtgggagactttgtgccttcctactcaaaaagcaaggaggtcagggtgggaacagggctgagggtggcagtgcccacctctttaggctgataaaggtaactgccatctccaatgcagtgtaactacttggtgccagcatgcatcgtggtgctcatctttctggccttccagcagagggcatatgtggcccctgccaacctgcctgctctcctgctgttgctactactgtatgggtgaggcccccagtccctcagggcctattcttactgaccccttactgccttccacattaatgctgctgagatagaactctgcagtgactcccaaggagaggatatggaggtctgaggtgatgccgtgtgtgatccaattcagtggtgtgccaaggtggccttaaaagctcatcttatcctgactcatattagtagagttctaaggcagcccatgcctgtaattccagtactttgggaggccgaggcaggaggactgcttgtggccaggagtttgagaccagcctgggaaacatagagagacccacctctaaaaaagaaagaaagagagagaaagagaaagagagaaagaaaaaaaaaaaaacagaaatgtgctttgggtgaaaatgtcaaggtctaaggcagagaagatgggaatggagatttttattcctctcagggcttctcagtctgagtggttactccagtgactcctattgtcccttcagctggtcgatcacaccgctcatgtacccagcctccttcttcttctccgtgcccagcacagcctatgtggtgctcacctgcataaacctctttattggcatcaatggaagcatggccacctttgtgcttgagctcttctctgatcaggtggggcaccacgaggctggggcttgggctgggttgggtcgttggactcagcccctgaccaacatccgtctcccacccttgagcagaagctgcaggaggtgagccggatcttgaaacaggtcttccttatcttcccccacttctgcttgggccgggggctcattgacatggtgcggaaccaggccatggctgatgcctttgagcgcttgggtgagaacttcctgtcaggtggggccatggctacagatagctagcacccttggagacctagagttaattatacagagtggagaaaaacagccccccagggagacagccagggttcttaggtggccctaaggttgggccaagttggaggtacaagaaagcagccataaaaagctaattcttagattacatcacaagaggcctcttctgttttctatgccaattagactccagctgagtggcctatccaatttgtgttcctttcccttaagaatccagagtgacatggatggagaaagggccagaaaccaagactctcatggacccagtccctcctttctatatccacaggagacaggcagttccagtcacccctgcgctgggaggtggtcggcaagaacctcttggccatggtgatacaggggcccctcttccttctcttcacactactgctgcagcaccgaagccaactcctgccacagttagtgaggtctatggagagggtggcaggggccaaggacctactttaagcccacagatattctgtccccaggcccagggtgaggtctctgccactcctgggagaggaggacgaggatgtagcccgtgaacgggagcgggtggtccaaggagccacccagggggatgtgttggtgctgaggaacttgaccaaggtaggtgtggtcaggtcgactgctgggtggggggtgctcccactggcccactcacctttctgaaagacctgcactctcccaggtataccgtgggcagaggatgccagctgttgaccgcttgtgcctggggattccccctggtgaggtgagtccaggggtggaggccaggtgcagggacagtgagtggctgccctactgcatgccctgcccatcatcctttactgaacacctactgtgtatccaccaccttttattgggcacctactgtatgccaatatttgtgctcctatttttattttattatattattatttatttatttatttatttatttatttatttgagatggagtctcactctgtctcccaggctggagtgcagtggtgggatctcagctcactgcaagctccacctcccgggttcatgccattctcctgcctcagcctcccgagtagctgggactgcaggcgcccaccaccacgcccggctaatttttttgtatttttagcagagacggggtttcaccgtgttagccaggatggtctccatctcctgacctcgtgatccacccgcctcagcctcccagagtgctgggattacaagcgtgagccaccacacctgccctattttatctttttttagagacggagtctcactctgtcgcccaggctggagtgcagtggtgagatctcggctcactacaagctccacctcccgggttcacaccattttcctgcctcagcctcccaggtagctgggactgcaggcgcctgccatcacgcctggctaatttttgtatttttagtagagacagggcttcaccatattagccaggatggtctcgatctcctgacctcatgatccacccgcctcagcctcccaaagtgctgggattacaggcgtgagccactgcgtctggcctgtgcatttatcttgagccaacaaaacctcattaagcacctactgcatgcttacctctgttaaacacacactgtgctcactaaagaggtgtactgaatacttttgtgtccatcaacgtttatcaaataccaatagaatttattggacccctattgtatacacatctacatcaagcacttgctcacagccagcatttatcaggcacctgctttgtaccagttcacattcaagcacctactatatacaaatgtatttgctgtgtgccacttattggccacctactagggctggtacacatctgcaaacaagtgctgtttgttagcacacattgcagtatatatatatatttttttttctttttttttcttttgagatggagtctcactgtcacccagcttggtgtgcaatggtgtaatcttggctcacggtaacctccgcctcccaggttcaagcgattctccagcctcagcctcccgagtagctgggaccacaggcacatgccgccatgcccagctgattttgtatttttagtagagacggggtttcaccatgttggccaggctggtcttgcactcctgacctcaaatgatccacccaccttggcctccgaaagttctgggatcacatgtgtgagccaccatgcccggcctttgtttttttctttttttttttttttgagacaaagtctcgctctgccacccaggctggagtgcagtgtcacgatctcggctcactgcaacctctgcctcccaggttcaggcgattctcctgcctcagcctcctgagtagctgggattacaggcgcccgccaccacaaccggctaatttttgtatttttagtagagatggggtttcacaatgttggtcaggctgatcttgaactcttgacctcaggtgatctgcccacctcggcttcccaaagtgctggggttacaggtgtgagccactgggcctggcccacagtatatctttactaagcacctactgtgtgctggccaacctctctaccttgggctgactgtgcacctagcctaagtacacacagtgtgccaggaaacatatggagagctcatgccctgatatttgttgagcactgctgcacacgacctttatagggtacccactgtgtgccaaaagccattccctgctaagtgacagctttatgcctcgctacataccccaatatctgcctagctcccccggggccccacccacggccttccatgtggacactcagaaatcagaggtgctgaggccaggcgtggtggctcacagctgtaaccccagcactttgggaggccaaggcaggaggatcacttgaggtcaggagttcgagaccagcctggccaacatgccaaaaccccgtctctactaaaaatacaaaaattagccgggcttggtggcacacgcctgtagtcccagctactccggagcctgagacaggagaattgcttgaacccaggaggtggaggttgcagtgggccaagatcgtgccattgcgccggggtgacacagcaaggctccgtctcaaaaaaaaaaaaaaaaaaaaaagaggctgggtgccgtggctcacgcctgtaatcccagcactttaggagttcaaggcaggcggatcacaaggtcaagagatcgagaccatcctggccaacacggtgaaaccccatctctactaaaaaaaaatacaaaaattagctgggcatggtggcaggcgtctgtagccccagctacttgggaggctaaggcaggagaattgcttgaacccgggaggcagaggttgcagtgagccaagatcgcaccactgcagtccagcctgggaaacaagagcaaaacttggtctcaaaaaaaaaaaaaaaagaaatcagagatgccggaaccagggcctggggcctcactgagcaccatctgtgggcatccctgtagtgttttgggctgctgggtgtgaatggagcagggaagacgtccacgtttcgcatggtgacgggggacacattggccagcaggggcgaggctgtgctggcaggccacaggtgaggggtgccaggtagggtcagggtggggcagggttggccctgacgtccttgtgcttccccacccctccacctccagtgaatggactgggctcactgccccacacctgcatggtctctgagacccctgcacctctacctcccacacgcggaccaggccctgagacacccctgtcccttatcagcgtggccctggatgggtgggccctgagacccctgtgttagccaccagtatggtcagggactagccagctctctgagcccccggcgcccccatccccagcgtggcccgggaacccagtgctgcgcacctcagcatgggatactgccctcaatccgatgccatctttgagctgctgacgggccgcgagcacctggagctgcttgcgcgcctgcgcggtgtcccggaggcccaggttgcccaggtgagcccactttgtccccaccgctctcacctcccagggcccacccgacccaggccgtgcctctaaagcctggcccaatcccgcactctctcgccttggctccatccctgtccctgcccccagaccgtgcttccttcccctatacctctgtcccccatcctggtccaatagggatgtggctagcccgcctctttgccccgcaacaccaagttccaccattctcattggtccacccacccttccttccgctgcacgttgcccctctctccttgactctgccttctgtggccctgcccacttgctcctcttctgcctaccccctagggcttcgcgcctttctcgctggggtcacggtcacattctcactctggccgttcccagtttgcagccgtttcactgcctcttccatctgcttgggggtcttgtctttgccctggcccgccccaccctcacactgtcccaccccatgccctttctggccctgcctcatacccatgttggctccacccacaccatggccctgctccatacccatcccagctccacccataccaaggccccaccccatactcatgctggctccacccacaccatggccccgccccatactcatgctggctccacccacaccatggccccgccccatactcatgctggctccacccacaccatggccccgccccatactcatgctggctccacccacaccatggccccaccccatactcatgctgtctccacccacaccatggccctgccccatactcatgctggctctacccacaccatggccccgccgcatactcatgctggctccaccagtgtggccccgccccatactcatgctggctccacccacaccatggccccgccccatactcatgctggctccaccagtgtggccccgccccatactcatgctgtctccacccacaccatggccccgccccatactcatgctggctccacccacactatggccctgccccacacccatcccagctccacccacaccatggccccgccccatactcatgctggctccacccacaccatggccccgccccatactcatgctgcccccaccacactatgtcccattctcacatttgccctgccccatgcccattatgcccctgctccacactcaatgctggccccgccacactgtggccctgccccatactcatcaatatgagtccccatgcctactctggccccaccccacagaccgctggctcgggcctggcgcgtctgggactctcatggtacgcagaccggcctgcaggcacctacagcggagggaacaaacgcaagctggcgacggccctggcgctggttggggacccagccgtggtgtttctggtgcgtgggagcggtgcctgggtggggtggggcctgcgacggaggcggggccttgcttatgggatcttccgtgctccccaggacgagccgaccacaggcatggaccccagcgcgcggcgcttcctttggaacagccttttggccgtggtgcgggagggccgttcagtgatgctcacctcccataggtgggccgggctctgatgccctgggctgtggttaaggtgatccaggcctggagagagagccccaaagcacaaggccacaggggatggggggtcctggccctagtggggcgagggcgccaggccccggggtgtaaggacacacagaggtgggacgcggcgccgggatcagaacggtctggggaagagtggggagatgtccacaccagaagggtggcccaggccgggggaagcaggcagtgtggcgccaggcacaggtggccccggcctcacggagctcgtggtgccgggtcccgacagcatggaggagtgtgaagcgctctgctcgcgcctggccatcatggtgaatgggcggttccgctgcctgggcagcccgcaacatctcaagggcaggtgagccggcgcggcctccaggcaggtgtggggtgagggtgggcacgtaggtaggctcaggggagaggccagacgtagagccgggtgaggaaagtttggctccaactggagagatggccaaggctttagattgtcctgcaggggtgactgagggggcgagacaggctggggtgtgctgggggcgcaggaccaggaggcgtgagccgggggctctgggtggatttagaagacacaatcaggtgtgcgttggagtaggtgcagcctggagaggtgagggtggattgatgggtggagttaggggagggcctggttagtgggcggggccataggaaagtggggcgggggtatttattgtgtgggcgggggtagagtgcaagggcgaaagaggagtgtccgaaaaaggagtcaagtggggtgatagcttcgagagcaacctgggcaacctagggagaccccatctctataaaaaatttaaaaattagctggacatggtggtgtgtgcctgtggtctcagctacgcgggcggggggtggcgggggactgagacgggaggaccacttgatcgctagggtagtacaagtatggggcggggccagagagtattaggggctggagggtgagctgaggtgggacctgggaaaggcccgatccggtagccctggccccactcactgcagattcgcggcgggtcacacactgaccctgcgggtgcccgccgcaaggtcccagccggcagcggccttcgtggcggccgagttccctggggcggagctgcgcgaggcacatggaggccgcctgcgcttccagctgccgccgggagggcgctgcgccctggcgcgcgtctttggagagctggcggtgcacggcgcagagcacggcgtggaggacttttccgtgagccagacgatgctggaggaggtgatcacggcgccggggtcgggctgggggaggcaggctgggggccaggcccgtgggctgaccgtccctcttgtcccctctgggctgcccaccgctaggtattcttgtacttctccaaggaccaggggaaggacgaggacaccgaagagcagaaggaggcaggagtgggagtggaccccgcgccaggcctgcagcaccccaaacgcgtcagccagttcctcgatgaccctagcactgccgagactgtgctctgagcctccctcccctgcggggccgcggggaggccctgggaatggcaagggcaaggtagagtgcctaggagccctggactcaggctggcagaggggctggtgccctggagaaaataaagagaaggctggagagaagccgtggtggtgaaa

SEQ ID NO: 10253 - DNA, 6815 bp, Homo sapiens
aagctcagcgcacttggcttaaggggcggcgcgctccctgcctgctgctgggcggagggaaggcggcaagagctgcggagcccctggaagagcttccaggaaccctgcgctgtgggataaaggaatgaggttcagaaaggggcagggagttgcccgcagccgcaccgcacgtcttcagcccgaccgttgtcctgacctctctgtcccgtcccctgcccagtctcaccatggccttctggacacagctgatgctgctgctctggaagaatttcatgtatcgccggagacagccggtccagctcctggtcgaattgctgtggcctctcttcctcttcttcatcctggtggctgttcgccactcccacccgcccctggagcaccatgaatgccacttcccaaacaagccactgccatcggcgggcaccgtgccctggctccagggtctcatctgtaatgtgaacaacacctgctttccgcagctgacaccgggcgaggagcccgggcgcctgagcaacttcaacgactccctggtctcccggctgctagccgatgcccgcactgtgctgggaggggccagtgcccacaggacgctggctggcctagggaagctgatcgccacgctgagggctgcacgcagcacggcccagcctcaaccaaccaagcagtctccactggaaccacccatgctggatgtcgcggagctgctgacgtcactgctgcgcacggaatccctggggttggcactgggccaagcccaggagcccttgcacagcttgttggaggccgctgaggacctggcccaggagctcctggcgctgcgcagcctggtggagcttcgggcactgctgcagagaccccgagggaccagcggccccctggagttgctgtcagaggccctctgcagtgtcaggggacctagcagcacagtgggcccctccctcaactggtacgaggctagtgacctgatggagctggtggggcaggagccagaatccgccctgccagacagcagcctgagccccgcctgctcggagctgattggagccctggacagccacccgctgtcccgcctgctctggagacgcctgaagcctctgatcctcgggaagctactctttgcaccagatacaccttttacccggaagctcatggcccaggtgaaccggaccttcgaggagctcaccctgctgagggatgtccgggaggtgtgggagatgctgggaccccggatcttcaccttcatgaacgacagttccaatgtggccatgctgcagcggctcctgcagatgcaggatgaaggaagaaggcagcccagacctggaggccgggaccacatggaggccctgcgatcctttctggaccctgggagcggtggctacagctggcaggacgcacacgctgatgtggggcacctggtgggcacgctgggccgagtgacggagtgcctgtccttggacaagctggaggcggcaccctcagaggcagccctggtgtcgcgggccctgcaactgctcgcggaacatcgattctgggccggcgtcgtcttcttgggacctgaggactcttcagaccccacagagcacccaaccccagacctgggccccggccacgtgcgcatcaaaatccgcatggacattgacgtggtcacgaggaccaataagatcagggacaggttttgggaccctggcccagccgcggaccccctgaccgacctgcgctacgtgtggggcggcttcgtgtacctgcaagacctggtggagcgtgcagccgtccgcgtgctcagcggcgccaacccccgggccggcctctacctgcagcagatgccctatccgtgctatgtggacgacgtgttcctgcgtgtgctgagccggtcgctgccgctcttcctgacgctggcctggatctactccgtgacactgacagtgaaggccgtggtgcgggagaaggagacgcggctgcgggacaccatgcgcgccatggggctcagccgcgcggtgctctggctaggctggttcctcagctgcctcgggcccttcctgctcagcgccgcactgctggttctggtgctcaagctgggagacatcctcccctacagccacccgggcgtggtcttcctgttcttggcagccttcgcggtggccacggtgacccagagcttcctgctcagcgccttcttctcccgcgccaacctggctgcggcctgcggcggcctggcctacttctccctctacctgccctacgtgctgtgtgtggcttggcgggaccggctgcccgcgggtggccgcgtggccgcgagcctgctgtcgcccgtggccttcggcttcggctgcgagagcctggctctgctggaggagcagggcgagggcgcgcagtggcacaacgtgggcacccggcctacggcagacgtcttcagcctggcccaggtctctggccttctgctgctggacgcggcgctctacggcctcgccacctggtacctggaagctgtgtgcccaggccagtacgggatccctgaaccatggaattttccttttcggaggagctactggtgcggacctcggccccccaagagtccagccccttgccccaccccgctggacccaaaggtgctggtagaagaggcaccgcccggcctgagtcctggcgtctccgttcgcagcctggagaagcgctttcctggaagcccgcagccagccctgcgggggctcagcctggacttctaccagggccacatcaccgccttcctgggccacaacggggccggcaagaccaccaccctgtccatcttgagtggcctcttcccacccagtggtggctctgccttcatcctgggccacgacgtccgctccagcatggccgccatccggccccacctgggcgtctgtcctcagtacaacgtgctgtttgacatgctgaccgtggacgagcacgtctggttctatgggcggctgaagggtctgagtgccgctgtagtgggccccgagcaggaccgtctgctgcaggatgtggggctggtctccaagcagagtgtgcagactcgccacctctctggtgggatgcaacggaagctgtccgtggccattgcctttgtgggcggctcccaagttgttatcctggacgagcctacggctggcgtggatcctgcttcccgccgcggtatttgggagctgctgctcaaataccgagaaggtcgcacgctgatcctctccacccaccacctggatgaggcagagctgctgggagaccgtgtggccgtggtggcaggtggccgcttgtgctgctgtggctccccactcttcctgcgccgtcacctgggctccggctactacctgacgctggtgaaggcccgcctgcccctgaccaccaatgagaaggctgacactgacatggagggcagtgtggacaccaggcaggaaaagaagaatggcagccagggcagcagagtcggcactcctcagctgctggccctggtacagcactgggtgcccggggcacggctggtggaggagctgccacacgagctggtgctggtgctgccctacacgggtgcccatgacggcagcttcgccacactcttccgagagctagacacgcggctggcggagctgaggctcactggctacgggatctccgacaccagcctcgaggagatcttcctgaaggtggtggaggagtgtgctgcggacacagatatggaggatggcagctgcgggcagcacctatgcacaggcattgctggcctagacgtaaccctacggctcaagatgccgccacaggagacagcgctggagaacggggaaccagctgggtcagccccagagactgaccagggctctgggccagacgccgtgggccgggtacagggctgggcactgacccgccagcagctccaggccctgcttctcaagcgctttctgcttgcccgccgcagccgccgcggcctgttcgcccagatcgtgctgcctgccctctttgtgggcctggccctcgtgttcagcctcatcgtgcctcctttcgggcactacccggctctgcggctcagtcccaccatgtacggtgctcaggtgtccttcttcagtgaggacgccccaggggaccctggacgtgcccggctgctcgaggcgctgctgcaggaggcaggactggaggagcccccagtgcagcatagctcccacaggttctcggcaccagaagttcctgctgaagtggccaaggtcttggccagtggcaactggaccccagagtctccatccccagcctgccagtgtagccggcccggtgcccggcgcctgctgcccgactgcccggctgcagctggtggtccccctccgccccaggcagtgaccggctctggggaagtggttcagaacctgacaggccggaacctgtctgacttcctggtcaagacctacccgcgcctggtgcgccagggcctgaagactaagaagtgggtgaatgaggtcagatacggaggcttctcgctggggggccgagacccaggcctgccctcgggccaagagttgggccgctcagtggaggagttgtgggcgctgctgagtcccctgcctggcggggccctcgaccgtgtcctgaaaaacctcacagcctgggctcacagcctggatgctcaggacagtctcaagatctggttcaacaacaaaggctggcactccatggtggcctttgtcaaccgagccagcaacgcaatcctccgtgctcacctgcccccaggcccggcccgccacgcccacagcatcaccacactcaaccaccccttgaacctcaccaaggagcagctgtctgagggtgcactgatggcctcctcggtggacgtcctcgtctccatctgtgtggtctttgccatgtcctttgtcccggccagcttcactcttgtcctcattgaggagcgagtcacccgagccaagcacctgcagctcatggggggcctgtcccccaccctctactggcttggcaactttctctgggacatgtgtaactacttggtgccagcatgcatcgtggtgctcatctttctggccttccagcagagggcatatgtggcccctgccaacctgcctgctctcctgctgttgctactactgtatggctggtcgatcacaccgctcatgtacccagcctccttcttcttctccgtgcccagcacagcctatgtggtgctcacctgcataaacctctttattggcatcaatggaagcatggccacctttgtgcttgagctcttctctgatcagaagctgcaggaggtgagccggatcttgaaacaggtcttccttatcttcccccacttctgcttgggccgggggctcattgacatggtgcggaaccaggccatggctgatgcctttgagcgcttgggagacaggcagttccagtcacccctgcgctgggaggtggtcggcaagaacctcttggccatggtgatacaggggcccctcttccttctcttcacactactgctgcagcaccgaagccaactcctgccacagcccagggtgaggtctctgccactcctgggagaggaggacgaggatgtagcccgtgaacgggagcgggtggtccaaggagccacccagggggatgtgttggtgctgaggaacttgaccaaggtataccgtgggcagaggatgccagctgttgaccgcttgtgcctggggattccccctggtgagtgttttgggctgctgggtgtgaatggagcagggaagacgtccacgtttcgcatggtgacgggggacacattggccagcaggggcgaggctgtgctggcaggccacagcgtggcccgggaacccagtgctgcgcacctcagcatgggatactgccctcaatccgatgccatctttgagctgctgacgggccgcgagcacctggagctgcttgcgcgcctgcgcggtgtcccggaggcccaggttgcccagaccgctggctcgggcctggcgcgtctgggactctcatggtacgcagaccggcctgcaggcacctacagcggagggaacaaacgcaagctggcgacggccctggcgctggttggggacccagccgtggtgtttctggacgagccgaccacaggcatggaccccagcgcgcggcgcttcctttggaacagccttttggccgtggtgcgggagggccgttcagtgatgctcacctcccatagcatggaggagtgtgaagcgctctgctcgcgcctggccatcatggtgaatgggcggttccgctgcctgggcagcccgcaacatctcaagggcagattcgcggcgggtcacacactgaccctgcgggtgcccgccgcaaggtcccagccggcagcggccttcgtggcggccgagttccctggggcggagctgcgcgaggcacatggaggccgcctgcgcttccagctgccgccgggagggcgctgcgccctggcgcgcgtctttggagagctggcggtgcacggcgcagagcacggcgtggaggacttttccgtgagccagacgatgctggaggaggtattcttgtacttctccaaggaccaggggaaggacgaggacaccgaagagcagaaggaggcaggagtgggagtggaccccgcgccaggcctgcagcaccccaaacgcgtcagccagttcctcgatgaccctagcactgccgagactgtgctctgagcctccctcccctgcggggccgcggggaggccctgggaatggcaagggcaaggtagagtgcctaggagccctggactcaggctggcagaggggctggtgccctggagaaaataaagagaaggctggagagaagccgtggtggtgaaa

SEQ ID NO: 10254 - DNA, 25571 bp, Homo sapiens
tcccttggcccgcgcagctccgacggagcaggccagtgagtgacgggcaggtcgcccaatagcagcgtgcagaggcaggggcgtgccccggcgctgctacctgcgcgggcaagctcagcgcacttggcttaaggggcggcgcgctccctgcctgctgctgggcggagggaaggcggcaagagctgcggagcccctggaaggtgagaaggactcggagagggaagaaggcccgagactcgagaatgcggggttggggccgggagggatgcaagttccctgggaattagggggtccagcctctgacctccttccggtgaatgttgacgacggctgaattgatcactgattctcaaggggggcatcggacatctgggacccttaagagggcctttgccgatcacacacctgcagccccctgcccgttagaactcctgcactcccccttgccccgtcttacaaatggagaaactgagcccactcccccagatcctaagtcccgcttgatgtaaaggaaagaaccctggcgtaagggtctgggtctgaggtcccagttccggcctggtcacctttagcaacttcctgcccctctgtcagcgtcagattctccatctgtgtcagaggtggaccggcccaaggaaaatagatcaggaatcgctgactccaggagtctctatcccagccccttcgcctgactctttctctggctcccgcggtccctctgagcgattaatgctacataaggtgtgggcagagctggggtcgtgcctccagctgggcaactgcctgtctctctgggtgcctgggtttgctttcttgggcctcggtttccacttctgtagagtggggtgatagtccagcacttcccctgggcgtgtgaaatgtccagcactgccaatattcgttgctgttatcttcggagaacagtgaggggaaaggaatccttgcctgggctgggccaggcaggaggctgggggtcaggacctggaagaggcttccaggtgaggcttggggtggagcctggtgacgaaagcgttaagcccaaactcggtccctggaggattagaggatgatctttaagtccccagctgtcagccctgctcagagcgacagtcctggcagccaatcagatgcgaggacggctgcgggttgcgctcccattggtttactccacccctggggtagcggagcctctttatcgagtgactactgtttgcctcgctctaatcagagcttccaggaaccctgcgctgtgggataaaggaatgaggttcagaaaggggcagggagttgcccgcagccgcaccgcacgtcttcagcccgaccgttgtcctgacctctctgtcccgtcccctgcccagtctcaccatggccttctggacacagctgatgctgctgctctggaagaatttcatgtatcgccggagacagccggtaacgccccagtgtgagaccagggccgggtgggcaggcagcccccactgtcccccaccgtctcccacctattctcccccaggtccagctcctggtcgaattgctgtggcctctcttcctcttcttcatcctggtggctgttcgccactcccacccgcccctggagcaccatgaatgtgagcccccccagggaccaggcactttgtgtgtgtaggggaaggcagatggctcacccgtgcacaggaatcccccgtgcatgtcagggagccttcaccaggccgccaatacatggcatgggagtgagctctccatcgctggaggcatgcaagcggtgccgggcgacccgatgggggtggagtcaggcagagtccacagggcctcagcaccaggcgtctccccgcaggccacttcccaaacaagccactgccatcggcgggcaccgtgccctggctccagggtctcatctgtaatgtgaacaacacctgctttccgcagctgacaccgggcgaggagcccgggcgcctgagcaacttcaacgactccctgtgagccagaggcagtgggtgcggccggcctgcaaactcggggctgcagtgccggccggaaccccgcctcctgccctctctctgtccccagggtctcccggctgctagccgatgcccgcactgtgctgggaggggccagtgcccacaggacgctggctggcctagggaagctgatcgccacgctgagggctgcacgcagcacgggtgaggaggccggggggcctctggcagggctgagctctgagcctcaacttgccgggccgtgaaatgggcacagggtgggggtgggtgcctcagaccaacgtccccccagccccatgctcccgtgcgctcctcccccagcccagcctcaaccaaccaagcagtctccactggaaccacccatgctggatgtcgcggagctgctgacgtcactgctgcgcacggtagggtgtcggggcgggaccgcgctgacttcctgggacactgcactggggatgtcctggcactgccccaccccgggccaaggacctcccgttccaggcatccaggctgtccctggtctctgcggtgatgctgcttgtccgtctgggcccccagacagagtgtgtctgacccagtgaggaagactcgtctgtgagatctccaatgagtccctttgcctctcagagcctcagtttccctatttgtaaagtgggggctatgatagtatggtctgcctgggaactggccagagcgctggacccctagtgagtgttcaaaatcattgtcccccttgtggtctttctccccaggaatccctggggttggcactgggccaagcccaggagcccttgcacagcttgttggaggccgctgaggacctggcccaggaggtacgaggccccactcatcctcaacccccatggaggcaacgttggcaggcagcctgcgccgggagggtctggggcagcccgggcacttcccttgggtgggttttcaggaggattagacagcgagagggagaggctgcccctggcccagtgccctgccctggttagggcttggaggtgggatcattgccagctccgtctggtaacctctctctagctcctggcgctgcgcagcctggtggagcttcgggcactgctgcagagaccccgagggaccagcggccccctggagttgctgtcagaggccctctgcagtgtcaggggacctagcagcacagtgggcccctccctcaactggtacgaggctagtgacctgatggagctggtggggcaggagccagaatccgccctgccagacagcagcctgagtgagtgactgacctcggtttcccctcttgggaagtggaactctgggcaggggggcagggcctcatggcacccccatcccaggccccgcctgctcggagctgattggagccctggacagccacccgctgtcccgcctgctctggagacgcctgaagcctctgatcctcgggaagctactctttgcaccagatacaccttttacccggaagctcatggcccaggtgggggcagcctggatgctggggtgggagggtggtggccagagcccatccagtaccctcagtccaggtgggccagggccaggccggagggtcacggaaactatttgaagaagtaggagttagccgatggagggggatcagcttgtgcggaggatcagaggcacacgcaggagcaaggcagagggggcagggggtgggcaggggtcctcagaggaggagagggtcatcagtggagggggtgctgtccacaggtgaaccggaccttcgaggagctcaccctgctgagggatgtccgggaggtgtgggagatgctgggaccccggatcttcaccttcatgaacgacagttccaatgtggccatgctgcaggtgtgcgggggtgctggggaggtgggatgtggctccccggtgaggagggtagacaggcccggtggatgggaaggtgggctccgtgcagacccccacttttttttttttttttttgagatggagtctcgctctgtcgcccaagctggaatgcagtggcgtgatctcgactcactgcaacctccacctcccgggttcaagcgattctcctgtctcaccctctgagtagctgggactacaggcgcccaccaccacgcccggatgattttttttttttatttttagtagagacggggtttaaccatgttagccaggatggtctcgatctcctgacctcgtgatccacccgcctcggcctcccaaagtgctgggattacaggcgtgaactaccacgtcctgctttttttttttttttttttttttttaagagatggagtctcactctgttgcccaggctggactgcagtggcgagatcttggctcactgcaacctccgcctcctggattcaagcaattctcctgcttcagcctcacaagtaactgggattacaggcatgcgccaccactcccggctactttttgtatttttagtagagatgggctttcaccatgttggccaggctggtctcgaactcctgacctcaggtgatccacccgcctcgcctcccaaagtgctgggattacaggcatgagccactgtgcccgacccagactctcactttcacctgcgccccccagcggctcctgcagatgcaggatgaaggaagaaggcagcccagacctggaggccgggaccacatggaggccctgcgatcctttctggaccctgggagcggtggctacagctggcaggacgcacacgctgatgtggggcacctggtgggcacgctgggccgagtgacggaggtgagggcctgtccacctgcggggtctgtttcagtggggagggcaggtcccatcctagtgttcccaccctggtgttcccagggggaggcgggcccggccctagtaagagcctgggatttgtagagatctcaggagggagccggccgtgggcctacgaggggaaaacatggcccagccccgaggtccagggggaggagcggagtggtctaggaggcaggcggaccccagcgcctaggactcacccccgcatcccacagtgcctgtccttggacaagctggaggcggcaccctcagaggcagccctggtgtcgcgggccctgcaactgctcgcggaacatcgattctgggccggcgtcgtcttcttgggacctgaggactcttcagaccccacagagcacccaaccccagacctgggccccggccacgtgcgcatcaaaatccgcatggacattgacgtggtcacgaggaccaataagatcagggacaggtcaggcgagggagggggcggggggatgagggactgggcggggccaagagcgtggtgggtggggccaggcagcattcagcctattggagaccatgatagacaggatctgggctgtatcaacagtggtatggtagccagagcccggggctccttagaccaataggggcccgtgatgggcggggcctaggtgcatgaggggcgtggccatgggcctgagataagatgagagcaggtataggttgagggcaatggtgggcggagccaggtgtattattaggtccctggaataagggtggagctaaaattgcaccgggtgctgagcgcagtagatcttgcctgttatctcagaactttgggaggccaaagtgggagaatctcttgaggacaggtattcgagactagcctgggcaacatagtgagaccgcctcccccccgcccccctcccccaccaacctcacgaaaatatctttaaaaattagccaggtgaggccgggcacagtggctcacgcctgtaatcccagcactttgggaggctgaggcgggcggatcacgaggtcaggagatcaagaccatcctgactaactcggtgaaaccctgcctctactaaaaaaaaaaagtacaaaaaattagccgggcgtggtagcacgcgcctgtaggcccagctacccaggaggctgaggcaggagaatcgcttgaacccaggaggcggaggttgcagtgagccgagatggcgccactgcactccagcctgggcgatagagcgagactccgtctcaaacaaatgaataaatgaataaaattagccaggcgacttgggaggccgagctggggggatcgtttgatcccgggaggtcaaggctgcagtgagctatgattgcagctcttcactccagcctgggcgacagagcaagaccctgtctaagaaaaaggttattcagggtggggccccgggagtttctagcccttccctacaaccggccaccatgcccctctcgcaggttttgggaccctggcccagccgcggaccccctgaccgacctgcgctacgtgtggggcggcttcgtgtacctgcaagacctggtggagcgtgcagccgtccgcgtgctcagcggcgccaacccccgggccggcctctacctgcagcagatgccctatccgtgctatgtggacgacgtgtgagctctggcacccctccccgctcttccccgcggcgggaaggtcccgggtgtgggggtgggcccaggctctgttgggaaccttcctgcggtccaggctgcgaactttgcacctttacaccactccacgtgacctgctgcagcgggaggagcaggggactctgagggtctggtggggggggggactctgagggtctgggggcccccggcgcagggacagcctgggctgcactgatgcctgagagccaaaggctggctggatcaggttccaaggaacagggaggcaaatcttcccgccttgagatcccgggacacgaaccagtcgtgccagatggtgggcggagggggggtctgcggagggtctccagcctccaccccagccgtccccaccccaggttcctgcgtgtgctgagccggtcgctgccgctcttcctgacgctggcctggatctactccgtgacactgacagtgaaggccgtggtgcgggagaaggagacgcggctgcgggacaccatgcgcgccatggggctcagccgcgcggtgctctggctaggctggttcctcagctgcctcgggcccttcctgctcagcgccgcactgctggttctggtgctcaaggtgggcgcgcctcggcctgcccggctgcagaatgggtgcgctggagggtgacagacaggggcggccccacgtgggtgcgcgcccccaggccaatccaggagctgcaccctaagctcccgttgcctctcacagctgggagacatcctcccctacagccacccgggcgtggtcttcctgttcttggcagccttcgcggtggccacggtgacccagagcttcctgctcagcgccttcttctcccgcgccaacctggctgcggcctgcggcggcctggcctacttctccctctacctgccctacgtgctgtgtgtggcttggcgggaccggctgcccgcgggtggccgcgtggccgcggtgagagccgggtcgggcgtggatgggggacgccccccgcttcggccgctcactgaccgcccgcttttccgcagagcctgctgtcgcccgtggccttcggcttcggctgcgagagcctggctctgctggaggagcagggcgagggcgcgcagtggcacaacgtgggcacccggcctacggcagacgtcttcagcctggcccaggtctctggccttctgctgctggacgcggcgctctacggcctcgccacctggtacctggaagctgtgtgcccaggtgggccgtagggggcggggctccgggccgggtcgcacctgctttgcgggaggctgagctaggggtgtggcctccaggccgtttgggggtggggggtggcttattcccttggagagaaggcggggcttcttggcacacgcatgcaggtggctgcattggaggggcggggcctgaggcaggtgggcggggtttctgggccgcctcatacctggacgccctgattccaggtgtatggccagaagctggcacagtcgccgggcgctgtggctcacgcttgtaatcccagcactttgggaggccaaggcaggagaatcgcttgagcccaggagtttgagaccaggctgggcaatatagtgagacctcatcaatacaaaaagttagctgggcgtggtggcacgctgggcgtggtggcacgctcctgtagtcccagctactcgggaggatggggtgggaggatcactcgagcccaggaggttgaggctgctgtgagccgtgatcccaccagcctgggcaacagagtgagacctccatctctttaaaaaaaaaaaaaaaaaaaaagctggctgggtgcggtggctcacgcctgtaatcccagcactttgggaggccgaggcgggcgggtcatctgaggtcgggatttcgagaccagcctgaccaacatggagaaaccccgtctctactaaaaatacaaaattagctgggtgtggtggcgggtgcctgtttcctagctacttggaaggcagaggcaggagaaatgcttgaatcccggaggcggaggttgcggtgagtcgagatcgcgccactgcactccagcctgggcaacaagagtgaaactcagtctcaaaaaaaaaaaaacaaaaaaaaaaaaaacaaggccgggcacggtggctcacgcctgctttcccagcactttgggaggccgaggtgggcagatcacgaggtcaggagatggagaccatcctggctaacacggtgaaaccccgtctctcccaaaaatacaaaaaattatccaggcatggtggcgggcgcctgtagtcccagctactcaggaggctgaggcaggagaatgacgtgaactggggaggcggagcttgcagcgagtcaaaatcgtgccactgcactccagcctgggcaacagagcaagactccgtctcaaaaaaaaaaaaaaacaaaaccccaaaaaaagcctggtacactcctggggggtgggctaagcaataacccgcgcccctccccgcaggccagtacgggatccctgaaccatggaattttccttttcggaggagctactggtgcggacctcggccccccaagagtccagccccttgccccaccccgctggacccaaagggtgaggcactacgaggcttaatagctggttgtccacatatgcccagttcccccccaaaacgagattccacagatgccaatgacaatgacctggacaccccaaccctcacacctgccctgaagacactgcggtccccaagctcccgcagcttttataggccccggcccagcaggtcccggattccacagcccagctctgagggacttgcaggccccaggacccccatgacctccatggctgagtccaccccatctctgcagtgctggtagaagaggcaccgcccggcctgagtcctggcgtctccgttcgcagcctggagaagcgctttcctggaagcccgcagccagccctgcgggggctcagcctggacttctaccagggccacatcaccgccttcctgggccacaacggggccggcaagaccaccaccctgtgagcccccaaccactccctccccgtgagcccccccactcccaccccgtgagcccccccaccactccctccccgtgagccccccaccactccctccccgtgaaccccccaccactccctccccgtgagcccccccaccactccctccccgtgagccccccaccactccctccccgtgaaccccccaccactccctccccgtgagcccccccaccactccctccccgtgaaccccccaccactccctccccgtgagcccccccaccactccctccccgtgaggccccccaccactccctccccgtgaaccccccaccactccctccccgtgagcccccccaccactccctccccgtgaaccccccaccactccctccccgtgagcccccccaccactccctccctgtgagccccccgaccgctccctccccgtgagcccccccaccactccctccctgtgagcccccccaccactccctccctgtgagttcccccaccactccctccctgtgagtcccccaccactccctccctgtgagccgcccaaaccactccctccctgtgagccccccaccacttcctccctgtgagctccctgtgaggcccccgaccagtccctccctgtgagcagtaatggcgccactgcactccagcttgggcaacggagtaagaccctgtctcaaaataaatagggcgggagtggtggctcacgcctgtaatcccagcacttgggcaagccgaggtgggaggattgcctgaggtcagagtttgagacacagcctggccaatatggcaaaaccatctctactaaaaatacaaaaattagccgggtgtgatggtggcgtgcacctgtaatcccagctactcaggaggctgaggcaggagaactgcttgaaccctggaggcggaggttgcagtgagccgagactgtgccgttgcactccagcctgggcaacagagtgagactctgtcacaaaaaaataaaaataaacaaataaataaaaataaggctatcacagggttttggatgtagcatttaataggtgctctgtggccaggcgtggtggctcaggcctgcaatcccagcactttggggggccgaggcgggtggatcacgaggtcaggagattgagatcatcctggctaacatggtgaaacagtgaaaccccgtctctactaaaaatgcaaaaaaattagccggacatggtggcgggcgcctgtagtcccagctactcgggaggctgaggcaggagaatggcgtgaacccgggaggtggagcttgcagtgagccgagatcgtgccgctgcactccagcctgggcaacagagtgaaactccgtctcaaaaataataataataataataataataataataataataaataattaaaaattttttaaaaacagaaattaaaaatagaagctctgtaactgccagtgcactctgtgaagggggctactctgagacccctctatccacaggtccatcttgagtggcctcttcccacccagtggtggctctgccttcatcctgggccacgacgtccgctccagcatggccgccatccggccccacctgggcgtctgtcctcagtacaacgtgctgtttgacatgtgcgtctcggcaggcccagagtgcagcggtgggaagggactggacgccctctgggactctgcctgccatgtgggtcactctgctctgtgcactggccgcaggctgaccgtggacgagcacgtctggttctatgggcggctgaagggtctgagtgccgctgtagtgggccccgagcaggaccgtctgctgcaggatgtggggctggtctccaagcagagtgtgcagactcgccacctctctggtgagcccatccccaagggaggtcacctcacagggaggggcctggggattcatcctgaaggcagggggaagccgggtactgaggtccacgtgggtaggcaaccttgcccaaggctgggtgtgacacactgaggtcccttccccatctctaccaggtgggatgcaacggaagctgtccgtggccattgcctttgtgggcggctcccaagttgttatcctggacgagcctacggctggcgtggatcctgcttcccgccgcggtatttgggagctgctgctcaaataccgagaaggtaagagctggggattctgctcgaggggccagaaaaggcttctgacaaggaagtgctggggatggggttttgaggaatgagtaggagtttgctacatgtggaccccacttgttgctatggcatttaggggctactgctcaaataccgagacagtaagagttggggatagacagaggttcccctggattctgcctgaagggccagaaaaggtttccaacaaggaggttctggggatgaggttttgagggatgaataggagtttgcttcatggggcagacaactcctggcagaggccccagctcgggcaaagacgcggcggcctgatggtagttgtgggttggtcccccgtgcctaggtcgcacgctgatcctctccacccaccacctggatgaggcagagctgctgggagaccgtgtggccgtggtggcaggtggccgcttgtgctgctgtggctccccactcttcctgcgccgtcacctgggctccggctactacctgacgctggtgaaggcccgcctgcccctgaccaccaatgagaaggtggggaccggccttctcctgacccctgacccccgggactctgttcagccctgaaggccaagccacttggtgcctctctgcccgcaggctgacactgacatggagggcagtgtggacaccaggcaggaaaagaagaatggcagccagggcagcagagtcggtgagggccggggtgggagacccaaggcgggtgggcagtggggtggctgtgccttaacttgaggaggaggagggggagggggaagaggaggaggagggggaggaagcggcagaggaggttgaggcggaggaggagggggaggaggagggggaggagtaagaggtggaaggggaggcgaaggggaggagtaggagggagaggaggagggggagggagaggaggagggggaggagaaggggggaggaggaggggaagggagaggaggagggggagaagaaggggaggagtaggaggggagcagaaggggaggaataggagggggaggaggagggggagggaaagggggaggagaagggggagaagtaggaggaagaggagggggaggagaagggggaggagtaggagggagaggaggaggagggagaggagggggaggagaaggagaggaggaggagagcacttgagaacctgagatgatgcccccatccctgggctgagccggaaccatgagactaacttgaacactgaccccacctttaacccaaccagggctgagcccagagacaaacctacccctgacctccaacactaggtccagcactgccctcaagatctctttttgtttgtttctgagtcttgctctgtcgcccaggctgtagtgcagtggtgtgatctcagctcactgcaacctctgcctcctgggttcaagcatttctcctccctcagcctctcgagtaactgggattacaggtgggttccaccatgcctggctaatttttgcatttttggtagaaatggggtttcaccatgttggtcaggctggtctcaaactcctgacctcaggtgatctgcctgcttcaaccctcaaagtgctgggattacaggcgtgagccactgcgcccggccgcacctggcctacgttcttaaccctgatctctgtctgccgggacagtcccctcacaggtcaccaatgcctcttccccagggagactggggtggggcgtgagccggggctccctgaagcacccctttgtccacacaggcactcctcagctgctggccctggtacagcactgggtgcccggggcacggctggtggaggagctgccacacgagctggtgctggtgctgccctacacgggtgcccatgacggcagcttcgccacactcttccgagagctagacacgcggctggcggagctgaggctcactggctacgggatctccgacaccagcctcgaggaggtgtgaggcctgggtggtggtgaggtggggccaggaggagggcttcctggaggaggtggtgttttgaaggatgaatagcgtgtttatgagcagcaaggacattcagggaggaggcatggcacatgaggagctctggtggctcagatgtcccttgggaaggcctgggggacccatggtgtaggaggggtggggggctcacaagcccccagttctccctgtcggtgtccagtctctgagcccctgcttgtctccccagatcttcctgaaggtggtggaggagtgtgctgcggacacagatatggagggtgcggccacagctccctgacccctgaccccagtccagagtgggaccagaggccaggtccccatccctggcttagtgtggcccaaggcatagcctttaccctatacctgattcctgatcccccaatccgtgaccctcaactttgaccctgacccctgatggccctgcagatggcagctgcgggcagcacctatgcacaggcattgctggcctagacgtaaccctacggctcaagatgccgccacaggagacagcgctggagaacggggaaccaggtaagtccttcccagtggccctggggtcctcccagccacccccccacagcagcgtgagcactgaccctctcatccctcacagctgggtcagccccagagactgaccagggctctgggccagacgccgtgggccgggtacagggctgggcactgacccgccagcagctccaggccctgcttctcaagcgctttctgcttgcccgccgcagccgccgcggcctgttcgcccaggtgaggagggctagcaccagggagtcgcatgggagtccctgagttccctaccctggccgtccactcagtggcctaatccaaacccttacccccgtgtgtattcccaacccaaagcacatttattgagggcactggggagccatgggtggttgtagagcaggagcagggacaggtgcaagcaagcctggagggtggatggaagcagcagctgatgggctggtcccccagatcgtgctgcctgccctctttgtgggcctggccctcgtgttcagcctcatcgtgcctcctttcgggcactacccggctctgcggctcagtcccaccatgtacggtgctcaggtgtccttcttcaggtgggtgcagaaggaaggggctggtggcaggaagactagggacctgggggtacagccctgaccctacatctcccctcacacacagtgaggacgccccaggggaccctggacgtgcccggctgctcgaggcgctgctgcaggaggcaggactggaggagcccccagtgcagcatagctcccacaggtgaggcgtcttgttggcctggacctttcccctctctggcctcagttttcccatctggtccctggccagggagcctcagggggcacctggagcatcccctgtgcccacctgggagctgggagcctctgtggctccaggaacccccagaagctgggtgcccacagaccttcaccttgaccctgcagcgcccttgagtgtgcacagcccattgtctgcaggttctcggcaccagaagttcctgctgaagtggccaaggtcttggccagtggcaactggaccccagagtctccatccccagcctgccagtgtagccggcccggtgcccggcgcctgctgcccgactgcccggctgcagctggtggtccccctccgccccaggcagtgaccggctctggggaagtggttcagaacctgacaggccggaacctgtctgacttcctggtcaagacctacccgcgcctggtgcgccaggggtgagccatgccctgggactcagtttccctggctatagcatgggtccttgggttgctggggctggtgtggtcctggaggaggaagtggaggggttggatgcccagcttggggctacgggctgggagtctcgcgtaccttcctttcctctttttttttttttttttttttgagatggagtctccctctgttgcccaggctggagtgcagaggtgtgatctcagctcattgcaacctccacctcccagtttcaagcgattctcctccctcagcctcccgagtagctgggattacaggcacgcaccaccactcccgactaatttttgtatttttagtagagatggggtttcaccgtgttgccaggctggtctcgaactcctgacctcaggtgatccacccgccttggcctcccaaagtgttgggattacaggcaggagccaccgcgcccggctttctttcctgtttttgtccacccttgactctgtgctcccctctcaccatctctctctctgtcccacatccctgtctgcctgtgtctctgtccatctctcccacagcctgaagactaagaagtgggtgaatgaggtcaggtgaggaggggtctagcttggggtcccctgccccagttccactcccatgccctctgcctgccccctgggagctctcccggcccccccggccctcagctccccttccctgcctgcatggccccacagatacggaggcttctcgctggggggccgagacccaggcctgccctcgggccaagagttgggccgctcagtggaggagttgtgggcgctgctgagtcccctgcctggcggggccctcgaccgtgtcctgaaaaacctcacagcctgggctcacagcctggatgctcaggacagtctcaaggtgggaactgggggggcaggtgggcgtcctgtcacagcaaggtccaaccccattgctctgaccctatgaccttgacccccacccagatctggttcaacaacaaaggctggcactccatggtggcctttgtcaaccgagccagcaacgcaatcctccgtgctcacctgcccccaggcccggcccgccacgcccacagcatcaccacactcaaccaccccttgaacctcaccaaggagcagctgtctgagggtgcactgtgagtccctccaccctgcatgtcctaccctgcacgtcctaccctgcctccatttctctgtcgtttggggtggtgggagctggatttgaaccctgacacactcttgctttataaatgggggatagaaactgttcctctgctccctaagccagggaaatgggacctcctcagactcagcgggccccagcctcccccacacatcctcatcccaccaacctttatcctgcctgagacctgtacaacctctgctgccaaatcccaggcaccctcatccctaaattgcccctgccatctctgccactgctgactgccccatagacctttgtcccatcaatggcgtgttcagctctgctctgagcaacccatgcaccctcaccctacaacagctctcatgtcttcacctccaggatggcctcctcggtggacgtcctcgtctccatctgtgtggtctttgccatgtcctttgtcccggccagcttcactcttgtcctcattgaggagcgagtcacccgagccaagcacctgcagctcatggggggcctgtcccccaccctctactggcttggcaactttctctgggacatggtgcgggggctgcttggacgggtgggggcccagccactgcttgccactgccctgtctggccccttgtaggcaggggcttgtccaagatggcctgggtaaagtcttgaggattgtgggagactttgtgccttcctactcaaaaagcaaggaggtcagggtgggaacagggctgagggtggcagtgcccacctctttaggctgataaaggtaactgccatctccaatgcagtgtaactacttggtgccagcatgcatcgtggtgctcatctttctggccttccagcagagggcatatgtggcccctgccaacctgcctgctctcctgctgttgctactactgtatgggtgaggcccccagtccctcagggcctattcttactgaccccttactgccttccacattaatgctgctgagatagaactctgcagtgactcccaaggagaggatatggaggtctgaggtgatgccgtgtgtgatccaattcagtggtgtgccaaggtggccttaaaagctcatcttatcctgactcatattagtagagttctaaggcagcccatgcctgtaattccagtactttgggaggccgaggcaggaggactgcttgtggccaggagtttgagaccagcctgggaaacatagagagacccacctctaaaaaagaaagaaagagagagaaagagaaagagagaaagaaaaaaaaaaaaacagaaatgtgctttgggtgaaaatgtcaaggtctaaggcagagaagatgggaatggagatttttattcctctcagggcttctcagtctgagtggttactccagtgactcctattgtcccttcagctggtcgatcacaccgctcatgtacccagcctccttcttcttctccgtgcccagcacagcctatgtggtgctcacctgcataaacctctttattggcatcaatggaagcatggccacctttgtgcttgagctcttctctgatcaggtggggcaccacgaggctggggcttgggctgggttgggtcgttggactcagcccctgaccaacatccgtctcccacccttgagcagaagctgcaggaggtgagccggatcttgaaacaggtcttccttatcttcccccacttctgcttgggccgggggctcattgacatggtgcggaaccaggccatggctgatgcctttgagcgcttgggtgagaacttcctgtcaggtggggccatggctacagatagctagcacccttggagacctagagttaattatacagagtggagaaaaacagccccccagggagacagccagggttcttaggtggccctaaggttgggccaagttggaggtacaagaaagcagccataaaaagctaattcttagattacatcacaagaggcctcttctgttttctatgccaattagactccagctgagtggcctatccaatttgtgttcctttcccttaagaatccagagtgacatggatggagaaagggccagaaaccaagactctcatggacccagtccctcctttctatatccacaggagacaggcagttccagtcacccctgcgctgggaggtggtcggcaagaacctcttggccatggtgatacaggggcccctcttccttctcttcacactactgctgcagcaccgaagccaactcctgccacagttagtgaggtctatggagagggtggcaggggccaaggacctactttaagcccacagatattctgtccccaggcccagggtgaggtctctgccactcctgggagaggaggacgaggatgtagcccgtgaacgggagcgggtggtccaaggagccacccagggggatgtgttggtgctgaggaacttgaccaaggtaggtgtggtcaggtcgactgctgggtggggggtgctcccactggcccactcacctttctgaaagacctgcactctcccaggtataccgtgggcagaggatgccagctgttgaccgcttgtgcctggggattccccctggtgaggtgagtccaggggtggaggccaggtgcagggacagtgagtggctgccctactgcatgccctgcccatcatcctttactgaacacctactgtgtatccaccaccttttattgggcacctactgtatgccaatatttgtgctcctatttttattttattatattattatttatttatttatttatttatttatttatttgagatggagtctcactctgtctcccaggctggagtgcagtggtgggatctcagctcactgcaagctccacctcccgggttcatgccattctcctgcctcagcctcccgagtagctgggactgcaggcgcccaccaccacgcccggctaatttttttgtatttttagcagagacggggtttcaccgtgttagccaggatggtctccatctcctgacctcgtgatccacccgcctcagcctcccagagtgctgggattacaagcgtgagccaccacacctgccctattttatctttttttagagacggagtctcactctgtcgcccaggctggagtgcagtggtgagatctcggctcactacaagctccacctcccgggttcacaccattttcctgcctcagcctcccaggtagctgggactgcaggcgcctgccatcacgcctggctaatttttgtatttttagtagagacagggcttcaccatattagccaggatggtctcgatctcctgacctcatgatccacccgcctcagcctcccaaagtgctgggattacaggcgtgagccactgcgtctggcctgtgcatttatcttgagccaacaaaacctcattaagcacctactgcatgcttacctctgttaaacacacactgtgctcactaaagaggtgtactgaatacttttgtgtccatcaacgtttatcaaataccaatagaatttattggacccctattgtatacacatctacatcaagcacttgctcacagccagcatttatcaggcacctgctttgtaccagttcacattcaagcacctactatatacaaatgtatttgctgtgtgccacttattggccacctactagggctggtacacatctgcaaacaagtgctgtttgttagcacacattgcagtatatatatatatttttttttctttttttttcttttgagatggagtctcactgtcacccagcttggtgtgcaatggtgtaatcttggctcacggtaacctccgcctcccaggttcaagcgattctccagcctcagcctcccgagtagctgggaccacaggcacatgccgccatgcccagctgattttgtatttttagtagagacggggtttcaccatgttggccaggctggtcttgcactcctgacctcaaatgatccacccaccttggcctccgaaagttctgggatcacatgtgtgagccaccatgcccggcctttgtttttttctttttttttttttttgagacaaagtctcgctctgccacccaggctggagtgcagtgtcacgatctcggctcactgcaacctctgcctcccaggttcaggcgattctcctgcctcagcctcctgagtagctgggattacaggcgcccgccaccacaaccggctaatttttgtatttttagtagagatggggtttcacaatgttggtcaggctgatcttgaactcttgacctcaggtgatctgcccacctcggcttcccaaagtgctggggttacaggtgtgagccactgggcctggcccacagtatatctttactaagcacctactgtgtgctggccaacctctctaccttgggctgactgtgcacctagcctaagtacacacagtgtgccaggaaacatatggagagctcatgccctgatatttgttgagcactgctgcacacgacctttatagggtacccactgtgtgccaaaagccattccctgctaagtgacagctttatgcctcgctacataccccaatatctgcctagctcccccggggccccacccacggccttccatgtggacactcagaaatcagaggtgctgaggccaggcgtggtggctcacagctgtaaccccagcactttgggaggccaaggcaggaggatcacttgaggtcaggagttcgagaccagcctggccaacatgccaaaaccccgtctctactaaaaatacaaaaattagccgggcttggtggcacacgcctgtagtcccagctactccggagcctgagacaggagaattgcttgaacccaggaggtggaggttgcagtgggccaagatcgtgccattgcgccggggtgacacagcaaggctccgtctcaaaaaaaaaaaaaaaaaaaaaagaggctgggtgccgtggctcacgcctgtaatcccagcactttaggagttcaaggcaggcggatcacaaggtcaagagatcgagaccatcctggccaacacggtgaaaccccatctctactaaaaaaaaatacaaaaattagctgggcatggtggcaggcgtctgtagccccagctacttgggaggctaaggcaggagaattgcttgaacccgggaggcagaggttgcagtgagccaagatcgcaccactgcagtccagcctgggaaacaagagcaaaacttggtctcaaaaaaaaaaaaaaaagaaatcagagatgccggaaccagggcctggggcctcactgagcaccatctgtgggcatccctgtagtgttttgggctgctgggtgtgaatggagcagggaagacgtccacgtttcgcatggtgacgggggacacattggccagcaggggcgaggctgtgctggcaggccacaggtgaggggtgccaggtagggtcagggtggggcagggttggccctgacgtccttgtgcttccccacccctccacctccagtgaatggactgggctcactgccccacacctgcatggtctctgagacccctgcacctctacctcccacacgcggaccaggccctgagacacccctgtcccttatcagcgtggccctggatgggtgggccctgagacccctgtgttagccaccagtatggtcagggactagccagctctctgagcccccggcgcccccatccccagcgtggcccgggaacccagtgctgcgcacctcagcatgggatactgccctcaatccgatgccatctttgagctgctgacgggccgcgagcacctggagctgcttgcgcgcctgcgcggtgtcccggaggcccaggttgcccaggtgagcccactttgtccccaccgctctcacctcccagggcccacccgacccaggccgtgcctctaaagcctggcccaatcccgcactctctcgccttggctccatccctgtccctgcccccagaccgtgcttccttcccctatacctctgtcccccatcctggtccaatagggatgtggctagcccgcctctttgccccgcaacaccaagttccaccattctcattggtccacccacccttccttccgctgcacgttgcccctctctccttgactctgccttctgtggccctgcccacttgctcctcttctgcctaccccctagggcttcgcgcctttctcgctggggtcacggtcacattctcactctggccgttcccagtttgcagccgtttcactgcctcttccatctgcttgggggtcttgtctttgccctggcccgccccaccctcacactgtcccaccccatgccctttctggccctgcctcatacccatgttggctccacccacaccatggccctgctccatacccatcccagctccacccataccaaggccccaccccatactcatgctggctccacccacaccatggccccgccccatactcatgctggctccacccacaccatggccccgccccatactcatgctggctccacccacaccatggccccgccccatactcatgctggctccacccacaccatggccccaccccatactcatgctgtctccacccacaccatggccctgccccatactcatgctggctctacccacaccatggccccgccgcatactcatgctggctccaccagtgtggccccgccccatactcatgctggctccacccacaccatggccccgccccatactcatgctggctccaccagtgtggccccgccccatactcatgctgtctccacccacaccatggccccgccccatactcatgctggctccacccacactatggccctgccccacacccatcccagctccacccacaccatggccccgccccatactcatgctggctccacccacaccatggccccgccccatactcatgctgcccccaccacactatgtcccattctcacatttgccctgccccatgcccattatgcccctgctccacactcaatgctggccccgccacactgtggccctgccccatactcatcaatatgagtccccatgcctactctggccccaccccacagaccgctggctcgggcctggcgcgtctgggactctcatggtacgcagaccggcctgcaggcacctacagcggagggaacaaacgcaagctggcgacggccctggcgctggttggggacccagccgtggtgtttctggtgcgtgggagcggtgcctgggtggggtggggcctgcgacggaggcggggccttgcttatgggatcttccgtgctccccaggacgagccgaccacaggcatggaccccagcgcgcggcgcttcctttggaacagccttttggccgtggtgcgggagggccgttcagtgatgctcacctcccataggtgggccgggctctgatgccctgggctgtggttaaggtgatccaggcctggagagagagccccaaagcacaaggccacaggggatggggggtcctggccctagtggggcgagggcgccaggccccggggtgtaaggacacacagaggtgggacgcggcgccgggatcagaacggtctggggaagagtggggagatgtccacaccagaagggtggcccaggccgggggaagcaggcagtgtggcgccaggcacaggtggccccggcctcacggagctcgtggtgccgggtcccgacagcatggaggagtgtgaagcgctctgctcgcgcctggccatcatggtgaatgggcggttccgctgcctgggcagcccgcaacatctcaagggcaggtgagccggcgcggcctccaggcaggtgtggggtgagggtgggcacgtaggtaggctcaggggagaggccagacgtagagccgggtgaggaaagtttggctccaactggagagatggccaaggctttagattgtcctgcaggggtgactgagggggcgagacaggctggggtgtgctgggggcgcaggaccaggaggcgtgagccgggggctctgggtggatttagaagacacaatcaggtgtgcgttggagtaggtgcagcctggagaggtgagggtggattgatgggtggagttaggggagggcctggttagtgggcggggccataggaaagtggggcgggggtatttattgtgtgggcgggggtagagtgcaagggcgaaagaggagtgtccgaaaaaggagtcaagtggggtgatagcttcgagagcaacctgggcaacctagggagaccccatctctataaaaaatttaaaaattagctggacatggtggtgtgtgcctgtggtctcagctacgcgggcggggggtggcgggggactgagacgggaggaccacttgatcgctagggtagtacaagtatggggcggggccagagagtattaggggctggagggtgagctgaggtgggacctgggaaaggcccgatccggtagccctggccccactcactgcagattcgcggcgggtcacacactgaccctgcgggtgcccgccgcaaggtcccagccggcagcggccttcgtggcggccgagttccctggggcggagctgcgcgaggcacatggaggccgcctgcgcttccagctgccgccgggagggcgctgcgccctggcgcgcgtctttggagagctggcggtgcacggcgcagagcacggcgtggaggacttttccgtgagccagacgatgctggaggaggtgatcacggcgccggggtcgggctgggggaggcaggctgggggccaggcccgtgggctgaccgtccctcttgtcccctctgggctgcccaccgctaggtattcttgtacttctccaaggaccaggggaaggacgaggacaccgaagagcagaaggaggcaggagtgggagtggaccccgcgccaggcctgcagcaccccaaacgcgtcagccagttcctcgatgaccctagcactgccgagactgtgctctgagcctccctcccctgcggggccgcggggaggccctgggaatggcaagggcaaggtagagtgcctaggagccctggactcaggctggcagaggggctggtgccctggagaaaataaagagaaggctggagagaagccgtggtgg

SEQ ID NO: 10255 - DNA, 6883 bp, Homo sapiens
tcccttggcccgcgcagctccgacggagcaggccagtgagtgacgggcaggtcgcccaatagcagcgtgcagaggcaggggcgtgccccggcgctgctacctgcgcgggcaagctcagcgcacttggcttaaggggcggcgcgctccctgcctgctgctgggcggagggaaggcggcaagagctgcggagcccctggaagagcttccaggaaccctgcgctgtgggataaaggaatgaggttcagaaaggggcagggagttgcccgcagccgcaccgcacgtcttcagcccgaccgttgtcctgacctctctgtcccgtcccctgcccagtctcaccatggccttctggacacagctgatgctgctgctctggaagaatttcatgtatcgccggagacagccggtccagctcctggtcgaattgctgtggcctctcttcctcttcttcatcctggtggctgttcgccactcccacccgcccctggagcaccatgaatgccacttcccaaacaagccactgccatcggcgggcaccgtgccctggctccagggtctcatctgtaatgtgaacaacacctgctttccgcagctgacaccgggcgaggagcccgggcgcctgagcaacttcaacgactccctggtctcccggctgctagccgatgcccgcactgtgctgggaggggccagtgcccacaggacgctggctggcctagggaagctgatcgccacgctgagggctgcacgcagcacggcctcaaccaaccaagcagtctccactggaaccacccatgctggatgtcgcggagctgctgacgtcactgctgcgcacggtagggtgtcggggcgggaccgcgctgacttcctgggacactgcactggggatgtcctggcactgccccaccccgggccaaggacctcccgttccaggcatccaggctgtccctggtctctgcggtgatgctgcttgtccgtctgggcccccagacagagtgtgtctgacccagtgaggaagactcgtctgtgagatctccaatgagtccctttgcctctcagagcctcagtttccctatttgtaaagtgggggctatgatagtatggtctgcctgggaactggccagagcgctggacccctagtgagtgttcaaaatcattgtcccccttgtggtctttctccccaggaatccctggggttggcactgggccaagcccaggagcccttgcacagcttgttggaggccgctgaggacctggcccaggagctcctggcgctgcgcagcctggtggagcttcgggcactgctgcagagaccccgagggaccagcggccccctggagttgctgtcagaggccctctgcagtgtcaggggacctagcagcacagtgggcccctccctcaactggtacgaggctagtgacctgatggagctggtggggcaggagccagaatccgccctgccagacagcagcctgagccccgcctgctcggagctgattggagccctggacagccacccgctgtcccgcctgctctggagacgcctgaagcctctgatcctcgggaagctactctttgcaccagatacaccttttacccggaagctcatggcccaggtgaaccggaccttcgaggagctcaccctgctgagggatgtccgggaggtgtgggagatgctgggaccccggatcttcaccttcatgaacgacagttccaatgtggccatgctgcagcggctcctgcagatgcaggatgaaggaagaaggcagcccagacctggaggccgggaccacatggaggccctgcgatcctttctggaccctgggagcggtggctacagctggcaggacgcacacgctgatgtggggcacctggtgggcacgctgggccgagtgacggagtgcctgtccttggacaagctggaggcggcaccctcagaggcagccctggtgtcgcgggccctgcaactgctcgcggaacatcgattctgggccggcgtcgtcttcttgggacctgaggactcttcagaccccacagagcacccaaccccagacctgggccccggccacgtgcgcatcaaaatccgcatggacattgacgtggtcacgaggaccaataagatcagggacaggttttgggaccctggcccagccgcggaccccctgaccgacctgcgctacgtgtggggcggcttcgtgtacctgcaagacctggtggagcgtgcagccgtccgcgtgctcagcggcgccaacccccgggccggcctctacctgcagcagatgccctatccgtgctatgtggacgacgtgttcctgcgtgtgctgagccggtcgctgccgctcttcctgacgctggcctggatctactccgtgacactgacagtgaaggccgtggtgcgggagaaggagacgcggctgcgggacaccatgcgcgccatggggctcagccgcgcggtgctctggctaggctggttcctcagctgcctcgggcccttcctgctcagcgccgcactgctggttctggtgctcaagctgggagacatcctcccctacagccacccgggcgtggtcttcctgttcttggcagccttcgcggtggccacggtgacccagagcttcctgctcagcgccttcttctcccgcgccaacctggctgcggcctgcggcggcctggcctacttctccctctacctgccctacgtgctgtgtgtggcttggcgggaccggctgcccgcgggtggccgcgtggccgcgagcctgctgtcgcccgtggccttcggcttcggctgcgagagcctggctctgctggaggagcagggcgagggcgcgcagtggcacaacgtgggcacccggcctacggcagacgtcttcagcctggcccaggtctctggccttctgctgctggacgcggcgctctacggcctcgccacctggtacctggaagctgtgtgcccaggccagtacgggatccctgaaccatggaattttccttttcggaggagctactggtgcggacctcggccccccaagagtccagccccttgccccaccccgctggacccaaaggtgctggtagaagaggcaccgcccggcctgagtcctggcgtctccgttcgcagcctggagaagcgctttcctggaagcccgcagccagccctgcgggggctcagcctggacttctaccagggccacatcaccgccttcctgggccacaacggggccggcaagaccaccaccctgtccatcttgagtggcctcttcccacccagtggtggctctgccttcatcctgggccacgacgtccgctccagcatggccgccatccggccccacctgggcgtctgtcctcagtacaacgtgctgtttgacatgctgaccgtggacgagcacgtctggttctatgggcggctgaagggtctgagtgccgctgtagtgggccccgagcaggaccgtctgctgcaggatgtggggctggtctccaagcagagtgtgcagactcgccacctctctggtgggatgcaacggaagctgtccgtggccattgcctttgtgggcggctcccaagttgttatcctggacgagcctacggctggcgtggatcctgcttcccgccgcggtatttgggagctgctgctcaaataccgagaaggtcgcacgctgatcctctccacccaccacctggatgaggcagagctgctgggagaccgtgtggccgtggtggcaggtggccgcttgtgctgctgtggctccccactcttcctgcgccgtcacctgggctccggctactacctgacgctggtgaaggcccgcctgcccctgaccaccaatgagaaggctgacactgacatggagggcagtgtggacaccaggcaggaaaagaagaatggcagccagggcagcagagtcggcactcctcagctgctggccctggtacagcactgggtgcccggggcacggctggtggaggagctgccacacgagctggtgctggtgctgccctacacgggtgcccatgacggcagcttcgccacactcttccgagagctagacacgcggctggcggagctgaggctcactggctacgggatctccgacaccagcctcgaggagatcttcctgaaggtggtggaggagtgtgctgcggacacagatatggaggatggcagctgcgggcagcacctatgcacaggcattgctggcctagacgtaaccctacggctcaagatgccgccacaggagacagcgctggagaacggggaaccagctgggtcagccccagagactgaccagggctctgggccagacgccgtgggccgggtacagggctgggcactgacccgccagcagctccaggccctgcttctcaagcgctttctgcttgcccgccgcagccgccgcggcctgttcgcccagtgaggacgccccaggggaccctggacgtgcccggctgctcgaggcgctgctgcaggaggcaggactggaggagcccccagtgcagcatagctcccacagcctgaagactaagaagtgggtgaatgaggtcagatacggaggcttctcgctggggggccgagacccaggcctgccctcgggccaagagttgggccgctcagtggaggagttgtgggcgctgctgagtcccctgcctggcggggccctcgaccgtgtcctgaaaaacctcacagcctgggctcacagcctggatgctcaggacagtctcaagatctggttcaacaacaaaggctggcactccatggtggcctttgtcaaccgagccagcaacgcaatcctccgtgctcacctgcccccaggcccggcccgccacgcccacagcatcaccacactcaaccaccccttgaacctcaccaaggagcagctgtctgagggtgcactgatggcctcctcggtggacgtcctcgtctccatctgtgtggtctttgccatgtcctttgtcccggccagcttcactcttgtcctcattgaggagcgagtcacccgagccaagcacctgcagctcatggggggcctgtcccccaccctctactggcttggcaactttctctgggacatgtgtaactacttggtgccagcatgcatcgtggtgctcatctttctggccttccagcagagggcatatgtggcccctgccaacctgcctgctctcctgctgttgctactactgtatggctggtcgatcacaccgctcatgtacccagcctccttcttcttctccgtgcccagcacagcctatgtggtgctcacctgcataaacctctttattggcatcaatggaagcatggccacctttgtgcttgagctcttctctgatcagaagctgcaggaggtgagccggatcttgaaacaggtcttccttatcttcccccacttctgcttgggccgggggctcattgacatggtgcggaaccaggccatggctgatgcctttgagcgcttgggagacaggcagttccagtcacccctgcgctgggaggtggtcggcaagaacctcttggccatggtgatacaggggcccctcttccttctcttcacactactgctgcagcaccgaagccaactcctgccacagcccagggtgaggtctctgccactcctgggagaggaggacgaggatgtagcccgtgaacgggagcgggtggtccaaggagccacccagggggatgtgttggtgctgaggaacttgaccaaggtataccgtgggcagaggatgccagctgttgaccgcttgtgcctggggattccccctggtgagtgttttgggctgctgggtgtgaatggagcagggaagacgtccacgtttcgcatggtgacgggggacacattggccagcaggggcgaggctgtgctggcaggccacagcgtggcccgggaacccagtgctgcgcacctcagcatgggatactgccctcaatccgatgccatctttgagctgctgacgggccgcgagcacctggagctgcttgcgcgcctgcgcggtgtcccggaggcccaggttgcccagaccgctggctcgggcctggcgcgtctgggactctcatggtacgcagaccggcctgcaggcacctacagcggagggaacaaacgcaagctggcgacggccctggcgctggttggggacccagccgtggtgtttctggacgagccgaccacaggcatggaccccagcgcgcggcgcttcctttggaacagccttttggccgtggtgcgggagggccgttcagtgatgctcacctcccatagcatggaggagtgtgaagcgctctgctcgcgcctggccatcatggtgaatgggcggttccgctgcctgggcagcccgcaacatctcaagggcagattcgcggcgggtcacacactgaccctgcgggtgcccgccgcaaggtcccagccggcagcggccttcgtggcggccgagttccctggggcggagctgcgcgaggcacatggaggccgcctgcgcttccagctgccgccgggagggcgctgcgccctggcgcgcgtctttggagagctggcggtgcacggcgcagagcacggcgtggaggacttttccgtgagccagacgatgctggaggaggtattcttgtacttctccaaggaccaggggaaggacgaggacaccgaagagcagaaggaggcaggagtgggagtggaccccgcgccaggcctgcagcaccccaaacgcgtcagccagttcctcgatgaccctagcactgccgagactgtgctctgagcctccctcccctgcggggccgcggggaggccctgggaatggcaagggcaaggtagagtgcctaggagccctggactcaggctggcagaggggctggtgccctggagaaaataaagagaaggctggagagaagccgtggtgg

SEQ ID NO: 10256 - DNA, 16077 bp, Homo sapiens
ggggccggcaagaccaccaccctgtgagcccccaaccactccctccccgtgagcccccccactcccaccccgtgagcccccccaccactccctccccgtgagccccccaccactccctccccgtgaaccccccaccactccctccccgtgagcccccccaccactccctccccgtgagccccccaccactccctccccgtgaaccccccaccactccctccccgtgagcccccccaccactccctccccgtgaaccccccaccactccctccccgtgagcccccccaccactccctccccgtgaggccccccaccactccctccccgtgaaccccccaccactccctccccgtgagcccccccaccactccctccccgtgaaccccccaccactccctccccgtgagcccccccaccactccctccctgtgagccccccgaccgctccctccccgtgagcccccccaccactccctccctgtgagcccccccaccactccctccctgtgagttcccccaccactccctccctgtgagtcccccaccactccctccctgtgagccgcccaaaccactccctccctgtgagccccccaccacttcctccctgtgagctccctgtgaggcccccgaccagtccctccctgtgagcagtaatggcgccactgcactccagcttgggcaacggagtaagaccctgtctcaaaataaatagggcgggagtggtggctcacgcctgtaatcccagcacttgggcaagccgaggtgggaggattgcctgaggtcagagtttgagacacagcctggccaatatggcaaaaccatctctactaaaaatacaaaaattagccgggtgtgatggtggcgtgcacctgtaatcccagctactcaggaggctgaggcaggagaactgcttgaaccctggaggcggaggttgcagtgagccgagactgtgccgttgcactccagcctgggcaacagagtgagactctgtcacaaaaaaataaaaataaacaaataaataaaaataaggctatcacagggttttggatgtagcatttaataggtgctctgtggccaggcgtggtggctcaggcctgcaatcccagcactttggggggccgaggcgggtggatcacgaggtcaggagattgagatcatcctggctaacatggtgaaacagtgaaaccccgtctctactaaaaatgcaaaaaaattagccggacatggtggcgggcgcctgtagtcccagctactcgggaggctgaggcaggagaatggcgtgaacccgggaggtggagcttgcagtgagccgagatcgtgccgctgcactccagcctgggcaacagagtgaaactccgtctcaaaaataataataataataataataataataataataataaataattaaaaattttttaaaaacagaaattaaaaatagaagctctgtaactgccagtgcactctgtgaagggggctactctgagacccctctatccacaggtccatcttgagtggcctcttcccacccagtggtggctctgccttcatcctgggccacgacgtccgctccagcatggccgccatccggccccacctgggcgtctgtcctcagtacaacgtgctgtttgacatgtgcgtctcggcaggcccagagtgcagcggtgggaagggactggacgccctctgggactctgcctgccatgtgggtcactctgctctgtgcactggccgcaggctgaccgtggacgagcacgtctggttctatgggcggctgaagggtctgagtgccgctgtagtgggccccgagcaggaccgtctgctgcaggatgtggggctggtctccaagcagagtgtgcagactcgccacctctctggtgagcccatccccaagggaggtcacctcacagggaggggcctggggattcatcctgaaggcagggggaagccgggtactgaggtccacgtgggtaggcaaccttgcccaaggctgggtgtgacacactgaggtcccttccccatctctaccaggtgggatgcaacggaagctgtccgtggccattgcctttgtgggcggctcccaagttgttatcctggacgagcctacggctggcgtggatcctgcttcccgccgcggtatttgggagctgctgctcaaataccgagaaggtaagagctggggattctgctcgaggggccagaaaaggcttctgacaaggaagtgctggggatggggttttgaggaatgagtaggagtttgctacatgtggaccccacttgttgctatggcatttaggggctactgctcaaataccgagacagtaagagttggggatagacagaggttcccctggattctgcctgaagggccagaaaaggtttccaacaaggaggttctggggatgaggttttgagggatgaataggagtttgcttcatggggcagacaactcctggcagaggccccagctcgggcaaagacgcggcggcctgatggtagttgtgggttggtcccccgtgcctaggtcgcacgctgatcctctccacccaccacctggatgaggcagagctgctgggagaccgtgtggccgtggtggcaggtggccgcttgtgctgctgtggctccccactcttcctgcgccgtcacctgggctccggctactacctgacgctggtgaaggcccgcctgcccctgaccaccaatgagaaggtggggaccggccttctcctgacccctgacccccgggactctgttcagccctgaaggccaagccacttggtgcctctctgcccgcaggctgacactgacatggagggcagtgtggacaccaggcaggaaaagaagaatggcagccagggcagcagagtcggtgagggccggggtgggagacccaaggcgggtgggcagtggggtggctgtgccttaacttgaggaggaggagggggagggggaagaggaggaggagggggaggaagcggcagaggaggttgaggcggaggaggagggggaggaggagggggaggagtaagaggtggaaggggaggcgaaggggaggagtaggagggagaggaggagggggagggagaggaggagggggaggagaaggggggaggaggaggggaagggagaggaggagggggagaagaaggggaggagtaggaggggagcagaaggggaggaataggagggggaggaggagggggagggaaagggggaggagaagggggagaagtaggaggaagaggagggggaggagaagggggaggagtaggagggagaggaggaggagggagaggagggggaggagaaggagaggaggaggagagcacttgagaacctgagatgatgcccccatccctgggctgagccggaaccatgagactaacttgaacactgaccccacctttaacccaaccagggctgagcccagagacaaacctacccctgacctccaacactaggtccagcactgccctcaagatctctttttgtttgtttctgagtcttgctctgtcgcccaggctgtagtgcagtggtgtgatctcagctcactgcaacctctgcctcctgggttcaagcatttctcctccctcagcctctcgagtaactgggattacaggtgggttccaccatgcctggctaatttttgcatttttggtagaaatggggtttcaccatgttggtcaggctggtctcaaactcctgacctcaggtgatctgcctgcttcaaccctcaaagtgctgggattacaggcgtgagccactgcgcccggccgcacctggcctacgttcttaaccctgatctctgtctgccgggacagtcccctcacaggtcaccaatgcctcttccccagggagactggggtggggcgtgagccggggctccctgaagcacccctttgtccacacaggcactcctcagctgctggccctggtacagcactgggtgcccggggcacggctggtggaggagctgccacacgagctggtgctggtgctgccctacacgggtgcccatgacggcagcttcgccacactcttccgagagctagacacgcggctggcggagctgaggctcactggctacgggatctccgacaccagcctcgaggaggtgtgaggcctgggtggtggtgaggtggggccaggaggagggcttcctggaggaggtggtgttttgaaggatgaatagcgtgtttatgagcagcaaggacattcagggaggaggcatggcacatgaggagctctggtggctcagatgtcccttgggaaggcctgggggacccatggtgtaggaggggtggggggctcacaagcccccagttctccctgtcggtgtccagtctctgagcccctgcttgtctccccagatcttcctgaaggtggtggaggagtgtgctgcggacacagatatggagggtgcggccacagctccctgacccctgaccccagtccagagtgggaccagaggccaggtccccatccctggcttagtgtggcccaaggcatagcctttaccctatacctgattcctgatcccccaatccgtgaccctcaactttgaccctgacccctgatggccctgcagatggcagctgcgggcagcacctatgcacaggcattgctggcctagacgtaaccctacggctcaagatgccgccacaggagacagcgctggagaacggggaaccaggtaagtccttcccagtggccctggggtcctcccagccacccccccacagcagcgtgagcactgaccctctcatccctcacagctgggtcagccccagagactgaccagggctctgggccagacgccgtgggccgggtacagggctgggcactgacccgccagcagctccaggccctgcttctcaagcgctttctgcttgcccgccgcagccgccgcggcctgttcgcccaggtgaggagggctagcaccagggagtcgcatgggagtccctgagttccctaccctggccgtccactcagtggcctaatccaaacccttacccccgtgtgtattcccaacccaaagcacatttattgagggcactggggagccatgggtggttgtagagcaggagcagggacaggtgcaagcaagcctggagggtggatggaagcagcagctgatgggctggtcccccagatcgtgctgcctgccctctttgtgggcctggccctcgtgttcagcctcatcgtgcctcctttcgggcactacccggctctgcggctcagtcccaccatgtacggtgctcaggtgtccttcttcaggtgggtgcagaaggaaggggctggtggcaggaagactagggacctgggggtacagccctgaccctacatctcccctcacacacagtgaggacgccccaggggaccctggacgtgcccggctgctcgaggcgctgctgcaggaggcaggactggaggagcccccagtgcagcatagctcccacaggtgaggcgtcttgttggcctggacctttcccctctctggcctcagttttcccatctggtccctggccagggagcctcagggggcacctggagcatcccctgtgcccacctgggagctgggagcctctgtggctccaggaacccccagaagctgggtgcccacagaccttcaccttgaccctgcagcgcccttgagtgtgcacagcccattgtctgcaggttctcggcaccagaagttcctgctgaagtggccaaggtcttggccagtggcaactggaccccagagtctccatccccagcctgccagtgtagccggcccggtgcccggcgcctgctgcccgactgcccggctgcagctggtggtccccctccgccccaggcagtgaccggctctggggaagtggttcagaacctgacaggccggaacctgtctgacttcctggtcaagacctacccgcgcctggtgcgccaggggtgagccatgccctgggactcagtttccctggctatagcatgggtccttgggttgctggggctggtgtggtcctggaggaggaagtggaggggttggatgcccagcttggggctacgggctgggagtctcgcgtaccttcctttcctctttttttttttttttttttttgagatggagtctccctctgttgcccaggctggagtgcagaggtgtgatctcagctcattgcaacctccacctcccagtttcaagcgattctcctccctcagcctcccgagtagctgggattacaggcacgcaccaccactcccgactaatttttgtatttttagtagagatggggtttcaccgtgttgccaggctggtctcgaactcctgacctcaggtgatccacccgccttggcctcccaaagtgttgggattacaggcaggagccaccgcgcccggctttctttcctgtttttgtccacccttgactctgtgctcccctctcaccatctctctctctgtcccacatccctgtctgcctgtgtctctgtccatctctcccacagcctgaagactaagaagtgggtgaatgaggtcaggtgaggaggggtctagcttggggtcccctgccccagttccactcccatgccctctgcctgccccctgggagctctcccggcccccccggccctcagctccccttccctgcctgcatggccccacagatacggaggcttctcgctggggggccgagacccaggcctgccctcgggccaagagttgggccgctcagtggaggagttgtgggcgctgctgagtcccctgcctggcggggccctcgaccgtgtcctgaaaaacctcacagcctgggctcacagcctggatgctcaggacagtctcaaggtgggaactgggggggcaggtgggcgtcctgtcacagcaaggtccaaccccattgctctgaccctatgaccttgacccccacccagatctggttcaacaacaaaggctggcactccatggtggcctttgtcaaccgagccagcaacgcaatcctccgtgctcacctgcccccaggcccggcccgccacgcccacagcatcaccacactcaaccaccccttgaacctcaccaaggagcagctgtctgagggtgcactgtgagtccctccaccctgcatgtcctaccctgcacgtcctaccctgcctccatttctctgtcgtttggggtggtgggagctggatttgaaccctgacacactcttgctttataaatgggggatagaaactgttcctctgctccctaagccagggaaatgggacctcctcagactcagcgggccccagcctcccccacacatcctcatcccaccaacctttatcctgcctgagacctgtacaacctctgctgccaaatcccaggcaccctcatccctaaattgcccctgccatctctgccactgctgactgccccatagacctttgtcccatcaatggcgtgttcagctctgctctgagcaacccatgcaccctcaccctacaacagctctcatgtcttcacctccaggatggcctcctcggtggacgtcctcgtctccatctgtgtggtctttgccatgtcctttgtcccggccagcttcactcttgtcctcattgaggagcgagtcacccgagccaagcacctgcagctcatggggggcctgtcccccaccctctactggcttggcaactttctctgggacatggtgcgggggctgcttggacgggtgggggcccagccactgcttgccactgccctgtctggccccttgtaggcaggggcttgtccaagatggcctgggtaaagtcttgaggattgtgggagactttgtgccttcctactcaaaaagcaaggaggtcagggtgggaacagggctgagggtggcagtgcccacctctttaggctgataaaggtaactgccatctccaatgcagtgtaactacttggtgccagcatgcatcgtggtgctcatctttctggccttccagcagagggcatatgtggcccctgccaacctgcctgctctcctgctgttgctactactgtatgggtgaggcccccagtccctcagggcctattcttactgaccccttactgccttccacattaatgctgctgagatagaactctgcagtgactcccaaggagaggatatggaggtctgaggtgatgccgtgtgtgatccaattcagtggtgtgccaaggtggccttaaaagctcatcttatcctgactcatattagtagagttctaaggcagcccatgcctgtaattccagtactttgggaggccgaggcaggaggactgcttgtggccaggagtttgagaccagcctgggaaacatagagagacccacctctaaaaaagaaagaaagagagagaaagagaaagagagaaagaaaaaaaaaaaaacagaaatgtgctttgggtgaaaatgtcaaggtctaaggcagagaagatgggaatggagatttttattcctctcagggcttctcagtctgagtggttactccagtgactcctattgtcccttcagctggtcgatcacaccgctcatgtacccagcctccttcttcttctccgtgcccagcacagcctatgtggtgctcacctgcataaacctctttattggcatcaatggaagcatggccacctttgtgcttgagctcttctctgatcaggtggggcaccacgaggctggggcttgggctgggttgggtcgttggactcagcccctgaccaacatccgtctcccacccttgagcagaagctgcaggaggtgagccggatcttgaaacaggtcttccttatcttcccccacttctgcttgggccgggggctcattgacatggtgcggaaccaggccatggctgatgcctttgagcgcttgggtgagaacttcctgtcaggtggggccatggctacagatagctagcacccttggagacctagagttaattatacagagtggagaaaaacagccccccagggagacagccagggttcttaggtggccctaaggttgggccaagttggaggtacaagaaagcagccataaaaagctaattcttagattacatcacaagaggcctcttctgttttctatgccaattagactccagctgagtggcctatccaatttgtgttcctttcccttaagaatccagagtgacatggatggagaaagggccagaaaccaagactctcatggacccagtccctcctttctatatccacaggagacaggcagttccagtcacccctgcgctgggaggtggtcggcaagaacctcttggccatggtgatacaggggcccctcttccttctcttcacactactgctgcagcaccgaagccaactcctgccacagttagtgaggtctatggagagggtggcaggggccaaggacctactttaagcccacagatattctgtccccaggcccagggtgaggtctctgccactcctgggagaggaggacgaggatgtagcccgtgaacgggagcgggtggtccaaggagccacccagggggatgtgttggtgctgaggaacttgaccaaggtaggtgtggtcaggtcgactgctgggtggggggtgctcccactggcccactcacctttctgaaagacctgcactctcccaggtataccgtgggcagaggatgccagctgttgaccgcttgtgcctggggattccccctggtgaggtgagtccaggggtggaggccaggtgcagggacagtgagtggctgccctactgcatgccctgcccatcatcctttactgaacacctactgtgtatccaccaccttttattgggcacctactgtatgccaatatttgtgctcctatttttattttattatattattatttatttatttatttatttatttatttatttgagatggagtctcactctgtctcccaggctggagtgcagtggtgggatctcagctcactgcaagctccacctcccgggttcatgccattctcctgcctcagcctcccgagtagctgggactgcaggcgcccaccaccacgcccggctaatttttttgtatttttagcagagacggggtttcaccgtgttagccaggatggtctccatctcctgacctcgtgatccacccgcctcagcctcccagagtgctgggattacaagcgtgagccaccacacctgccctattttatctttttttagagacggagtctcactctgtcgcccaggctggagtgcagtggtgagatctcggctcactacaagctccacctcccgggttcacaccattttcctgcctcagcctcccaggtagctgggactgcaggcgcctgccatcacgcctggctaatttttgtatttttagtagagacagggcttcaccatattagccaggatggtctcgatctcctgacctcatgatccacccgcctcagcctcccaaagtgctgggattacaggcgtgagccactgcgtctggcctgtgcatttatcttgagccaacaaaacctcattaagcacctactgcatgcttacctctgttaaacacacactgtgctcactaaagaggtgtactgaatacttttgtgtccatcaacgtttatcaaataccaatagaatttattggacccctattgtatacacatctacatcaagcacttgctcacagccagcatttatcaggcacctgctttgtaccagttcacattcaagcacctactatatacaaatgtatttgctgtgtgccacttattggccacctactagggctggtacacatctgcaaacaagtgctgtttgttagcacacattgcagtatatatatatatttttttttctttttttttcttttgagatggagtctcactgtcacccagcttggtgtgcaatggtgtaatcttggctcacggtaacctccgcctcccaggttcaagcgattctccagcctcagcctcccgagtagctgggaccacaggcacatgccgccatgcccagctgattttgtatttttagtagagacggggtttcaccatgttggccaggctggtcttgcactcctgacctcaaatgatccacccaccttggcctccgaaagttctgggatcacatgtgtgagccaccatgcccggcctttgtttttttctttttttttttttttgagacaaagtctcgctctgccacccaggctggagtgcagtgtcacgatctcggctcactgcaacctctgcctcccaggttcaggcgattctcctgcctcagcctcctgagtagctgggattacaggcgcccgccaccacaaccggctaatttttgtatttttagtagagatggggtttcacaatgttggtcaggctgatcttgaactcttgacctcaggtgatctgcccacctcggcttcccaaagtgctggggttacaggtgtgagccactgggcctggcccacagtatatctttactaagcacctactgtgtgctggccaacctctctaccttgggctgactgtgcacctagcctaagtacacacagtgtgccaggaaacatatggagagctcatgccctgatatttgttgagcactgctgcacacgacctttatagggtacccactgtgtgccaaaagccattccctgctaagtgacagctttatgcctcgctacataccccaatatctgcctagctcccccggggccccacccacggccttccatgtggacactcagaaatcagaggtgctgaggccaggcgtggtggctcacagctgtaaccccagcactttgggaggccaaggcaggaggatcacttgaggtcaggagttcgagaccagcctggccaacatgccaaaaccccgtctctactaaaaatacaaaaattagccgggcttggtggcacacgcctgtagtcccagctactccggagcctgagacaggagaattgcttgaacccaggaggtggaggttgcagtgggccaagatcgtgccattgcgccggggtgacacagcaaggctccgtctcaaaaaaaaaaaaaaaaaaaaaagaggctgggtgccgtggctcacgcctgtaatcccagcactttaggagttcaaggcaggcggatcacaaggtcaagagatcgagaccatcctggccaacacggtgaaaccccatctctactaaaaaaaaatacaaaaattagctgggcatggtggcaggcgtctgtagccccagctacttgggaggctaaggcaggagaattgcttgaacccgggaggcagaggttgcagtgagccaagatcgcaccactgcagtccagcctgggaaacaagagcaaaacttggtctcaaaaaaaaaaaaaaaagaaatcagagatgccggaaccagggcctggggcctcactgagcaccatctgtgggcatccctgtagtgttttgggctgctgggtgtgaatggagcagggaagacgtccacgtttcgcatggtgacgggggacacattggccagcaggggcgaggctgtgctggcaggccacaggtgaggggtgccaggtagggtcagggtggggcagggttggccctgacgtccttgtgcttccccacccctccacctccagtgaatggactgggctcactgccccacacctgcatggtctctgagacccctgcacctctacctcccacacgcggaccaggccctgagacacccctgtcccttatcagcgtggccctggatgggtgggccctgagacccctgtgttagccaccagtatggtcagggactagccagctctctgagcccccggcgcccccatccccagcgtggcccgggaacccagtgctgcgcacctcagcatgggatactgccctcaatccgatgccatctttgagctgctgacgggccgcgagcacctggagctgcttgcgcgcctgcgcggtgtcccggaggcccaggttgcccaggtgagcccactttgtccccaccgctctcacctcccagggcccacccgacccaggccgtgcctctaaagcctggcccaatcccgcactctctcgccttggctccatccctgtccctgcccccagaccgtgcttccttcccctatacctctgtcccccatcctggtccaatagggatgtggctagcccgcctctttgccccgcaacaccaagttccaccattctcattggtccacccacccttccttccgctgcacgttgcccctctctccttgactctgccttctgtggccctgcccacttgctcctcttctgcctaccccctagggcttcgcgcctttctcgctggggtcacggtcacattctcactctggccgttcccagtttgcagccgtttcactgcctcttccatctgcttgggggtcttgtctttgccctggcccgccccaccctcacactgtcccaccccatgccctttctggccctgcctcatacccatgttggctccacccacaccatggccctgctccatacccatcccagctccacccataccaaggccccaccccatactcatgctggctccacccacaccatggccccgccccatactcatgctggctccacccacaccatggccccgccccatactcatgctggctccacccacaccatggccccgccccatactcatgctggctccacccacaccatggccccaccccatactcatgctgtctccacccacaccatggccctgccccatactcatgctggctctacccacaccatggccccgccgcatactcatgctggctccaccagtgtggccccgccccatactcatgctggctccacccacaccatggccccgccccatactcatgctggctccaccagtgtggccccgccccatactcatgctgtctccacccacaccatggccccgccccatactcatgctggctccacccacactatggccctgccccacacccatcccagctccacccacaccatggccccgccccatactcatgctggctccacccacaccatggccccgccccatactcatgctgcccccaccacactatgtcccattctcacatttgccctgccccatgcccattatgcccctgctccacactcaatgctggccccgccacactgtggccctgccccatactcatcaatatgagtccccatgcctactctggccccaccccacagaccgctggctcgggcctggcgcgtctgggactctcatggtacgcagaccggcctgcaggcacctacagcggagggaacaaacgcaagctggcgacggccctggcgctggttggggacccagccgtggtgtttctggtgcgtgggagcggtgcctgggtggggtggggcctgcgacggaggcggggccttgcttatgggatcttccgtgctccccaggacgagccgaccacaggcatggaccccagcgcgcggcgcttcctttggaacagccttttggccgtggtgcgggagggccgttcagtgatgctcacctcccataggtgggccgggctctgatgccctgggctgtggttaaggtgatccaggcctggagagagagccccaaagcacaaggccacaggggatggggggtcctggccctagtggggcgagggcgccaggccccggggtgtaaggacacacagaggtgggacgcggcgccgggatcagaacggtctggggaagagtggggagatgtccacaccagaagggtggcccaggccgggggaagcaggcagtgtggcgccaggcacaggtggccccggcctcacggagctcgtggtgccgggtcccgacagcatggaggagtgtgaagcgctctgctcgcgcctggccatcatggtgaatgggcggttccgctgcctgggcagcccgcaacatctcaagggcaggtgagccggcgcggcctccaggcaggtgtggggtgagggtgggcacgtaggtaggctcaggggagaggccagacgtagagccgggtgaggaaagtttggctccaactggagagatggccaaggctttagattgtcctgcaggggtgactgagggggcgagacaggctggggtgtgctgggggcgcaggaccaggaggcgtgagccgggggctctgggtggatttagaagacacaatcaggtgtgcgttggagtaggtgcagcctggagaggtgagggtggattgatgggtggagttaggggagggcctggttagtgggcggggccataggaaagtggggcgggggtatttattgtgtgggcgggggtagagtgcaagggcgaaagaggagtgtccgaaaaaggagtcaagtggggtgatagcttcgagagcaacctgggcaacctagggagaccccatctctataaaaaatttaaaaattagctggacatggtggtgtgtgcctgtggtctcagctacgcgggcggggggtggcgggggactgagacgggaggaccacttgatcgctagggtagtacaagtatggggcggggccagagagtattaggggctggagggtgagctgaggtgggacctgggaaaggcccgatccggtagccctggccccactcactgcagattcgcggcgggtcacacactgaccctgcgggtgcccgccgcaaggtcccagccggcagcggccttcgtggcggccgagttccctggggcggagctgcgcgaggcacatggaggccgcctgcgcttccagctgccgccgggagggcgctgcgccctggcgcgcgtctttggagagctggcggtgcacggcgcagagcacggcgtggaggacttttccgtgagccagacgatgctggaggaggtgatcacggcgccggggtcgggctgggggaggcaggctgggggccaggcccgtgggctgaccgtccctcttgtcccctctgggctgcccaccgctaggtattcttgtacttctccaaggaccaggggaaggacgaggacaccgaagagcagaaggaggcaggagtgggagtggaccccgcgccaggcctgcagcaccccaaacgcgtcagccagttcctcgatgaccctagcactgccgagactgtgctctgagcctccctcccctgcggggccgcggggaggccctgggaatggcaagggcaaggtagagtgcctagg

SEQ ID NO: 10257 - DNA, 4221 bp, Homo sapiens
ggggccggcaagaccaccaccctgtccatcttgagtggcctcttcccacccagtggtggctctgccttcatcctgggccacgacgtccgctccagcatggccgccatccggccccacctgggcgtctgtcctcagtacaacgtgctgtttgacatgctgaccgtggacgagcacgtctggttctatgggcggctgaagggtctgagtgccgctgtagtgggccccgagcaggaccgtctgctgcaggatgtggggctggtctccaagcagagtgtgcagactcgccacctctctggtgggatgcaacggaagctgtccgtggccattgcctttgtgggcggctcccaagttgttatcctggacgagcctacggctggcgtggatcctgcttcccgccgcggtatttgggagctgctgctcaaataccgagaaggtcgcacgctgatcctctccacccaccacctggatgaggcagagctgctgggagaccgtgtggccgtggtggcaggtggccgcttgtgctgctgtggctccccactcttcctgcgccgtcacctgggctccggctactacctgacgctggtgaaggcccgcctgcccctgaccaccaatgagaaggctgacactgacatggagggcagtgtggacaccaggcaggaaaagaagaatggcagccagggcagcagagtcggcactcctcagctgctggccctggtacagcactgggtgcccggggcacggctggtggaggagctgccacacgagctggtgctggtgctgccctacacgggtgcccatgacggcagcttcgccacactcttccgagagctagacacgcggctggcggagctgaggctcactggctacgggatctccgacaccagcctcgaggagatcttcctgaaggtggtggaggagtgtgctgcggacacagatatggaggatggcagctgcgggcagcacctatgcacaggcattgctggcctagacgtaaccctacggctcaagatgccgccacaggagacagcgctggagaacggggaaccagctgggtcagccccagagactgaccagggctctgggccagacgccgtgggccgggtacagggctgggcactgacccgccagcagctccaggccctgcttctcaagcgctttctgcttgcccgccgcagccgccgcggcctgttcgcccagatcgtgctgcctgccctctttgtgggcctggccctcgtgttcagcctcatcgtgcctcctttcgggcactacccggctctgcggctcagtcccaccatgtacggtgctcaggtgtccttcttcagtgaggacgccccaggggaccctggacgtgcccggctgctcgaggcgctgctgcaggaggcaggactggaggagcccccagtgcagcatagctcccacagcccattgtctgcaggttctcggcaccagaagttcctgctgaagtggccaaggtcttggccagtggcaactggaccccagagtctccatccccagcctgccagtgtagccggcccggtgcccggcgcctgctgcccgactgcccggctgcagctggtggtccccctccgccccaggcagtgaccggctctggggaagtggttcagaacctgacaggccggaacctgtctgacttcctggtcaagacctacccgcgcctggtgcgccagggcctgaagactaagaagtgggtgaatgaggtcagatacggaggcttctcgctggggggccgagacccaggcctgccctcgggccaagagttgggccgctcagtggaggagttgtgggcgctgctgagtcccctgcctggcggggccctcgaccgtgtcctgaaaaacctcacagcctgggctcacagcctggatgctcaggacagtctcaagatctggttcaacaacaaaggctggcactccatggtggcctttgtcaaccgagccagcaacgcaatcctccgtgctcacctgcccccaggcccggcccgccacgcccacagcatcaccacactcaaccaccccttgaacctcaccaaggagcagctgtctgagggtgcactgatggcctcctcggtggacgtcctcgtctccatctgtgtggtctttgccatgtcctttgtcccggccagcttcactcttgtcctcattgaggagcgagtcacccgagccaagcacctgcagctcatggggggcctgtcccccaccctctactggcttggcaactttctctgggacatggtgcgggggctgcttggacgggtgggggcccagccactgcttgccactgccctgtctggccccttgtaggcaggggcttgtccaagatggcctgggtaaagtcttgaggattgtgggagactttgtgccttcctactcaaaaagcaaggaggtcagggtgggaacagggctgagggtggcagtgcccacctctttaggctgataaaggtaactgccatctccaatgcagtgtaactacttggtgccagcatgcatcgtggtgctcatctttctggccttccagcagagggcatatgtggcccctgccaacctgcctgctctcctgctgttgctactactgtatggctggtcgatcacaccgctcatgtacccagcctccttcttcttctccgtgcccagcacagcctatgtggtgctcacctgcataaacctctttattggcatcaatggaagcatggccacctttgtgcttgagctcttctctgatcagaagctgcaggaggtgagccggatcttgaaacaggtcttccttatcttcccccacttctgcttgggccgggggctcattgacatggtgcggaaccaggccatggctgatgcctttgagcgcttgggagacaggcagttccagtcacccctgcgctgggaggtggtcggcaagaacctcttggccatggtgatacaggggcccctcttccttctcttcacactactgctgcagcaccgaagccaactcctgccacagcccagggtgaggtctctgccactcctgggagaggaggacgaggatgtagcccgtgaacgggagcgggtggtccaaggagccacccagggggatgtgttggtgctgaggaacttgaccaaggtataccgtgggcagaggatgccagctgttgaccgcttgtgcctggggattccccctggtgagtgttttgggctgctgggtgtgaatggagcagggaagacgtccacgtttcgcatggtgacgggggacacattggccagcaggggcgaggctgtgctggcaggccacagcgtggcccgggaacccagtgctgcgcacctcagcatgggatactgccctcaatccgatgccatctttgagctgctgacgggccgcgagcacctggagctgcttgcgcgcctgcgcggtgtcccggaggcccaggttgcccagaccgctggctcgggcctggcgcgtctgggactctcatggtacgcagaccggcctgcaggcacctacagcggagggaacaaacgcaagctggcgacggccctggcgctggttggggacccagccgtggtgtttctggacgagccgaccacaggcatggaccccagcgcgcggcgcttcctttggaacagccttttggccgtggtgcgggagggccgttcagtgatgctcacctcccatagcatggaggagtgtgaagcgctctgctcgcgcctggccatcatggtgaatgggcggttccgctgcctgggcagcccgcaacatctcaagggcagattcgcggcgggtcacacactgaccctgcgggtgcccgccgcaaggtcccagccggcagcggccttcgtggcggccgagttccctggggcggagctgcgcgaggcacatggaggccgcctgcgcttccagctgccgccgggagggcgctgcgccctggcgcgcgtctttggagagctggcggtgcacggcgcagagcacggcgtggaggacttttccgtgagccagacgatgctggaggaggtattcttgtacttctccaaggaccaggggaaggacgaggacaccgaagagcagaaggaggcaggagtgggagtggaccccgcgccaggcctgcagcaccccaaacgcgtcagccagttcctcgatgaccctagcactgccgagactgtgctctgagcctccctcccctgcggggccgcggggaggccctgggaatggcaagggcaaggtagagtgcctagg

SEQ ID NO: 10258 - DNA, 670 bp, Homo sapiens
tcaagtggggtgatagcttcgagagcaacctgggcaacctagggagaccccatctctataaaaaatttaaaaattagctggacatggtggtgtgtgcctgtggtctcagctacgcgggcggggggtggcgggggactgagacgggaggaccacttgatcgctagggtagtacaagtatggggcggggccagagagtattaggggctggagggtgagctgaggtgggacctgggaaaggcccgatccggtagccctggccccactcactgcagattcgcggcgggtcacacactgaccctgcgggtgcccgccgcaaggtcccagccggcagcggccttcgtggcggccgagttccctggggcggagctgcgcgaggcacatggaggccgcctgcgcttccagctgccgccgggagggcgctgcgccctggcgcgcgtctttggagagctggcggtgcacggcgcagagcacggcgtggaggacttttccgtgagccagacgatgctggaggaggtgatcacggcgccggggtcgggctgggggaggcaggctgggggccaggcccgtgggctgaccgtccctcttgtcccctctgggctgcccaccgctaggtattcttgtacttctccaaggaccaggggaaggacgaggacaccgaagagcagaagga

SEQ ID NO: 10259 - DNA, 389 bp, Homo sapiens
tcaagtggggtgatagcttcgagagcaacctgggcaacctagggagaccccatctctataaaaaatttaaaaattagctggacatggtgattcgcggcgggtcacacactgaccctgcgggtgcccgccgcaaggtcccagccggcagcggccttcgtggcggccgagttccctggggcggagctgcgcgaggcacatggaggccgcctgcgcttccagctgccgccgggagggcgctgcgccctggcgcgcgtctttggagagctggcggtgcacggcgcagagcacggcgtggaggacttttccgtgagccagacgatgctggaggaggtattcttgtacttctccaaggaccaggggaaggacgaggacaccgaagagcagaagga

SEQ ID NO: 10260 - DNA, 2272 bp, Homo sapiens
ttggcttaaggggcggcgcgctccctgcctgctgctgggcggagggaaggcggcaagagctgcggagcccctggaaggtgagaaggactcggagagggaagaaggcccgagactcgagaatgcggggttggggccgggagggatgcaagttccctgggaattagggggtccagcctctgacctccttccggtgaatgttgacgacggctgaattgatcactgattctcaaggggggcatcggacatctgggacccttaagagggcctttgccgatcacacacctgcagccccctgcccgttagaactcctgcactcccccttgccccgtcttacaaatggagaaactgagcccactcccccagatcctaagtcccgcttgatgtaaaggaaagaaccctggcgtaagggtctgggtctgaggtcccagttccggcctggtcacctttagcaacttcctgcccctctgtcagcgtcagattctccatctgtgtcagaggtggaccggcccaaggaaaatagatcaggaatcgctgactccaggagtctctatcccagccccttcgcctgactctttctctggctcccgcggtccctctgagcgattaatgctacataaggtgtgggcagagctggggtcgtgcctccagctgggcaactgcctgtctctctgggtgcctgggtttgctttcttgggcctcggtttccacttctgtagagtggggtgatagtccagcacttcccctgggcgtgtgaaatgtccagcactgccaatattcgttgctgttatcttcggagaacagtgaggggaaaggaatccttgcctgggctgggccaggcaggaggctgggggtcaggacctggaagaggcttccaggtgaggcttggggtggagcctggtgacgaaagcgttaagcccaaactcggtccctggaggattagaggatgatctttaagtccccagctgtcagccctgctcagagcgacagtcctggcagccaatcagatgcgaggacggctgcgggttgcgctcccattggtttactccacccctggggtagcggagcctctttatcgagtgactactgtttgcctcgctctaatcagagcttccaggaaccctgcgctgtgggataaaggaatgaggttcagaaaggggcagggagttgcccgcagccgcaccgcacgtcttcagcccgaccgttgtcctgacctctctgtcccgtcccctgcccagtctcaccatggccttctggacacagctgatgctgctgctctggaagaatttcatgtatcgccggagacagccggtaacgccccagtgtgagaccagggccgggtgggcaggcagcccccactgtcccccaccgtctcccacctattctcccccaggtccagctcctggtcgaattgctgtggcctctcttcctcttcttcatcctggtggctgttcgccactcccacccgcccctggagcaccatgaatgtgagcccccccagggaccaggcactttgtgtgtgtaggggaaggcagatggctcacccgtgcacaggaatcccccgtgcatgtcagggagccttcaccaggccgccaatacatggcatgggagtgagctctccatcgctggaggcatgcaagcggtgccgggcgacccgatgggggtggagtcaggcagagtccacagggcctcagcaccaggcgtctccccgcaggccacttcccaaacaagccactgccatcggcgggcaccgtgccctggctccagggtctcatctgtaatgtgaacaacacctgctttccgcagctgacaccgggcgaggagcccgggcgcctgagcaacttcaacgactccctgtgagccagaggcagtgggtgcggccggcctgcaaactcggggctgcagtgccggccggaaccccgcctcctgccctctctctgtccccagggtctcccggctgctagccgatgcccgcactgtgctgggaggggccagtgcccacaggacgctggctggcctagggaagctgatcgccacgctgagggctgcacgcagcacgggtgaggaggccggggggcctctggcagggctgagctctgagcctcaacttgccgggccgtgaaatgggcacagggtgggggtgggtgcctcagaccaacgtccccccagccccatgctcccgtgcgctcctcccccagcccagcctcaaccaaccaagcagtctccactggaaccacccatgctggatgtcgcggagctgctgacgtcactgctg

SEQ ID NO: 10261 - DNA, 576 bp, Homo sapiens
ttggcttaaggggcggcgcgctccctgcctgctgctgggcggagggaaggcggcaagagctgcggagcccctggaagtctcaccatggccttctggacacagctgatgctgctgctctggaagaatttcatgtatcgccggagacagccggtccagctcctggtcgaattgctgtggcctctcttcctcttcttcatcctggtggctgttcgccactcccacccgcccctggagcaccatgaatgccacttcccaaacaagccactgccatcggcgggcaccgtgccctggctccagggtctcatctgtaatgtgaacaacacctgctttccgcagctgacaccgggcgaggagcccgggcgcctgagcaacttcaacgactccctggtctcccggctgctagccgatgcccgcactgtgctgggaggggccagtgcccacaggacgctggctggcctagggaagctgatcgccacgctgagggctgcacgcagcacggcccagcctcaaccaaccaagcagtctccactggaaccacccatgctggatgtcgcggagctgctgacgtcactgctg

SEQ ID NO: 10262 - DNA, 8636 bp, Homo sapiens
ctccatctgtgtggtctttgccatgtcctttgtcccggccagcttcactcttgtcctcattgaggagcgagtcacccgagccaagcacctgcagctcatggggggcctgtcccccaccctctactggcttggcaactttctctgggacatggtgcgggggctgcttggacgggtgggggcccagccactgcttgccactgccctgtctggccccttgtaggcaggggcttgtccaagatggcctgggtaaagtcttgaggattgtgggagactttgtgccttcctactcaaaaagcaaggaggtcagggtgggaacagggctgagggtggcagtgcccacctctttaggctgataaaggtaactgccatctccaatgcagtgtaactacttggtgccagcatgcatcgtggtgctcatctttctggccttccagcagagggcatatgtggcccctgccaacctgcctgctctcctgctgttgctactactgtatgggtgaggcccccagtccctcagggcctattcttactgaccccttactgccttccacattaatgctgctgagatagaactctgcagtgactcccaaggagaggatatggaggtctgaggtgatgccgtgtgtgatccaattcagtggtgtgccaaggtggccttaaaagctcatcttatcctgactcatattagtagagttctaaggcagcccatgcctgtaattccagtactttgggaggccgaggcaggaggactgcttgtggccaggagtttgagaccagcctgggaaacatagagagacccacctctaaaaaagaaagaaagagagagaaagagaaagagagaaagaaaaaaaaaaaaacagaaatgtgctttgggtgaaaatgtcaaggtctaaggcagagaagatgggaatggagatttttattcctctcagggcttctcagtctgagtggttactccagtgactcctattgtcccttcagctggtcgatcacaccgctcatgtacccagcctccttcttcttctccgtgcccagcacagcctatgtggtgctcacctgcataaacctctttattggcatcaatggaagcatggccacctttgtgcttgagctcttctctgatcaggtggggcaccacgaggctggggcttgggctgggttgggtcgttggactcagcccctgaccaacatccgtctcccacccttgagcagaagctgcaggaggtgagccggatcttgaaacaggtcttccttatcttcccccacttctgcttgggccgggggctcattgacatggtgcggaaccaggccatggctgatgcctttgagcgcttgggtgagaacttcctgtcaggtggggccatggctacagatagctagcacccttggagacctagagttaattatacagagtggagaaaaacagccccccagggagacagccagggttcttaggtggccctaaggttgggccaagttggaggtacaagaaagcagccataaaaagctaattcttagattacatcacaagaggcctcttctgttttctatgccaattagactccagctgagtggcctatccaatttgtgttcctttcccttaagaatccagagtgacatggatggagaaagggccagaaaccaagactctcatggacccagtccctcctttctatatccacaggagacaggcagttccagtcacccctgcgctgggaggtggtcggcaagaacctcttggccatggtgatacaggggcccctcttccttctcttcacactactgctgcagcaccgaagccaactcctgccacagttagtgaggtctatggagagggtggcaggggccaaggacctactttaagcccacagatattctgtccccaggcccagggtgaggtctctgccactcctgggagaggaggacgaggatgtagcccgtgaacgggagcgggtggtccaaggagccacccagggggatgtgttggtgctgaggaacttgaccaaggtaggtgtggtcaggtcgactgctgggtggggggtgctcccactggcccactcacctttctgaaagacctgcactctcccaggtataccgtgggcagaggatgccagctgttgaccgcttgtgcctggggattccccctggtgaggtgagtccaggggtggaggccaggtgcagggacagtgagtggctgccctactgcatgccctgcccatcatcctttactgaacacctactgtgtatccaccaccttttattgggcacctactgtatgccaatatttgtgctcctatttttattttattatattattatttatttatttatttatttatttatttatttgagatggagtctcactctgtctcccaggctggagtgcagtggtgggatctcagctcactgcaagctccacctcccgggttcatgccattctcctgcctcagcctcccgagtagctgggactgcaggcgcccaccaccacgcccggctaatttttttgtatttttagcagagacggggtttcaccgtgttagccaggatggtctccatctcctgacctcgtgatccacccgcctcagcctcccagagtgctgggattacaagcgtgagccaccacacctgccctattttatctttttttagagacggagtctcactctgtcgcccaggctggagtgcagtggtgagatctcggctcactacaagctccacctcccgggttcacaccattttcctgcctcagcctcccaggtagctgggactgcaggcgcctgccatcacgcctggctaatttttgtatttttagtagagacagggcttcaccatattagccaggatggtctcgatctcctgacctcatgatccacccgcctcagcctcccaaagtgctgggattacaggcgtgagccactgcgtctggcctgtgcatttatcttgagccaacaaaacctcattaagcacctactgcatgcttacctctgttaaacacacactgtgctcactaaagaggtgtactgaatacttttgtgtccatcaacgtttatcaaataccaatagaatttattggacccctattgtatacacatctacatcaagcacttgctcacagccagcatttatcaggcacctgctttgtaccagttcacattcaagcacctactatatacaaatgtatttgctgtgtgccacttattggccacctactagggctggtacacatctgcaaacaagtgctgtttgttagcacacattgcagtatatatatatatttttttttctttttttttcttttgagatggagtctcactgtcacccagcttggtgtgcaatggtgtaatcttggctcacggtaacctccgcctcccaggttcaagcgattctccagcctcagcctcccgagtagctgggaccacaggcacatgccgccatgcccagctgattttgtatttttagtagagacggggtttcaccatgttggccaggctggtcttgcactcctgacctcaaatgatccacccaccttggcctccgaaagttctgggatcacatgtgtgagccaccatgcccggcctttgtttttttctttttttttttttttgagacaaagtctcgctctgccacccaggctggagtgcagtgtcacgatctcggctcactgcaacctctgcctcccaggttcaggcgattctcctgcctcagcctcctgagtagctgggattacaggcgcccgccaccacaaccggctaatttttgtatttttagtagagatggggtttcacaatgttggtcaggctgatcttgaactcttgacctcaggtgatctgcccacctcggcttcccaaagtgctggggttacaggtgtgagccactgggcctggcccacagtatatctttactaagcacctactgtgtgctggccaacctctctaccttgggctgactgtgcacctagcctaagtacacacagtgtgccaggaaacatatggagagctcatgccctgatatttgttgagcactgctgcacacgacctttatagggtacccactgtgtgccaaaagccattccctgctaagtgacagctttatgcctcgctacataccccaatatctgcctagctcccccggggccccacccacggccttccatgtggacactcagaaatcagaggtgctgaggccaggcgtggtggctcacagctgtaaccccagcactttgggaggccaaggcaggaggatcacttgaggtcaggagttcgagaccagcctggccaacatgccaaaaccccgtctctactaaaaatacaaaaattagccgggcttggtggcacacgcctgtagtcccagctactccggagcctgagacaggagaattgcttgaacccaggaggtggaggttgcagtgggccaagatcgtgccattgcgccggggtgacacagcaaggctccgtctcaaaaaaaaaaaaaaaaaaaaaagaggctgggtgccgtggctcacgcctgtaatcccagcactttaggagttcaaggcaggcggatcacaaggtcaagagatcgagaccatcctggccaacacggtgaaaccccatctctactaaaaaaaaatacaaaaattagctgggcatggtggcaggcgtctgtagccccagctacttgggaggctaaggcaggagaattgcttgaacccgggaggcagaggttgcagtgagccaagatcgcaccactgcagtccagcctgggaaacaagagcaaaacttggtctcaaaaaaaaaaaaaaaagaaatcagagatgccggaaccagggcctggggcctcactgagcaccatctgtgggcatccctgtagtgttttgggctgctgggtgtgaatggagcagggaagacgtccacgtttcgcatggtgacgggggacacattggccagcaggggcgaggctgtgctggcaggccacaggtgaggggtgccaggtagggtcagggtggggcagggttggccctgacgtccttgtgcttccccacccctccacctccagtgaatggactgggctcactgccccacacctgcatggtctctgagacccctgcacctctacctcccacacgcggaccaggccctgagacacccctgtcccttatcagcgtggccctggatgggtgggccctgagacccctgtgttagccaccagtatggtcagggactagccagctctctgagcccccggcgcccccatccccagcgtggcccgggaacccagtgctgcgcacctcagcatgggatactgccctcaatccgatgccatctttgagctgctgacgggccgcgagcacctggagctgcttgcgcgcctgcgcggtgtcccggaggcccaggttgcccaggtgagcccactttgtccccaccgctctcacctcccagggcccacccgacccaggccgtgcctctaaagcctggcccaatcccgcactctctcgccttggctccatccctgtccctgcccccagaccgtgcttccttcccctatacctctgtcccccatcctggtccaatagggatgtggctagcccgcctctttgccccgcaacaccaagttccaccattctcattggtccacccacccttccttccgctgcacgttgcccctctctccttgactctgccttctgtggccctgcccacttgctcctcttctgcctaccccctagggcttcgcgcctttctcgctggggtcacggtcacattctcactctggccgttcccagtttgcagccgtttcactgcctcttccatctgcttgggggtcttgtctttgccctggcccgccccaccctcacactgtcccaccccatgccctttctggccctgcctcatacccatgttggctccacccacaccatggccctgctccatacccatcccagctccacccataccaaggccccaccccatactcatgctggctccacccacaccatggccccgccccatactcatgctggctccacccacaccatggccccgccccatactcatgctggctccacccacaccatggccccgccccatactcatgctggctccacccacaccatggccccaccccatactcatgctgtctccacccacaccatggccctgccccatactcatgctggctctacccacaccatggccccgccgcatactcatgctggctccaccagtgtggccccgccccatactcatgctggctccacccacaccatggccccgccccatactcatgctggctccaccagtgtggccccgccccatactcatgctgtctccacccacaccatggccccgccccatactcatgctggctccacccacactatggccctgccccacacccatcccagctccacccacaccatggccccgccccatactcatgctggctccacccacaccatggccccgccccatactcatgctgcccccaccacactatgtcccattctcacatttgccctgccccatgcccattatgcccctgctccacactcaatgctggccccgccacactgtggccctgccccatactcatcaatatgagtccccatgcctactctggccccaccccacagaccgctggctcgggcctggcgcgtctgggactctcatggtacgcagaccggcctgcaggcacctacagcggagggaacaaacgcaagctggcgacggccctggcgctggttggggacccagccgtggtgtttctggtgcgtgggagcggtgcctgggtggggtggggcctgcgacggaggcggggccttgcttatgggatcttccgtgctccccaggacgagccgaccacaggcatggaccccagcgcgcggcgcttcctttggaacagccttttggccgtggtgcgggagggccgttcagtgatgctcacctcccataggtgggccgggctctgatgccctgggctgtggttaaggtgatccaggcctggagagagagccccaaagcacaaggccacaggggatggggggtcctggccctagtggggcgagggcgccaggccccggggtgtaaggacacacagaggtgggacgcggcgccgggatcagaacggtctggggaagagtggggagatgtccacaccagaagggtggcccaggccgggggaagcaggcagtgtggcgccaggcacaggtggccccggcctcacggagctcgtggtgccgggtcccgacagcatggaggagtgtgaagcgctctgctcgcgcctggccatcatggtgaatgggcggttccgctgcctgggcagcccgcaacatctcaagggcaggtgagccggcgcggcctccaggcaggtgtggggtgagggtgggcacgtaggtaggctcaggggagaggccagacgtagagccgggtgaggaaagtttggctccaactggagagatggccaaggctttagattgtcctgcaggggtgactgagggggcgagacaggctggggtgtgctgggggcgcaggaccaggaggcgtgagccgggggctctgggtggatttagaagacacaatcaggtgtgcgttggagtaggtgcagcctggagaggtgagggtggattgatgggtggagttaggggagggcctggttagtgggcggggccataggaaagtggggcgggggtatttattgtgtgggcgggggtagagtgcaagggcgaaagaggagtgtccgaaaaaggagtcaagtggggtgatagcttcgagagcaacctgggcaacctagggagaccccatctctataaaaaatttaaaaattagctggacatggtggtgtgtgcctgtggtctcagctacgcgggcggggggtggcgggggactgagacgggaggaccacttgatcgctagggtagtacaagtatggggcggggccagagagtattaggggctggagggtgagctgaggtgggacctgggaaaggcccgatccggtagccctggccccactcactgcagattcgcggcgggtcacacactgaccctgcgggtgcccgccgcaaggtcccagccggcagcggccttcgtggcggccgagttccctggggcggagctgcgcgaggcacatggaggccgcctgcgcttccagctgccgccgggagggcgctgcgccctggcgcgcgtctttggagagctggcggtgcacggcgcagagcacggcgtggaggacttttccgtgagccagacgatgctggaggaggtgatcacggcgccggggtcgggctgggggaggcaggctgggggccaggcccgtgggctgaccgtccctcttgtcccctctgggctgcccaccgctaggtattcttgtacttctccaaggaccaggggaaggacgaggacaccgaagagcagaaggaggcaggagtgggagtggaccccgcgccaggcctgcagcaccccaaacgcgtcagccagttcctcgatgaccctagcactgccgagactgtgctctgagcctccctcccctgcggggccgcggggaggccctgggaatggcaagggcaaggtagagtgcctaggagccctggactcaggctggcagaggggctggtgccctggagaaaataaagagaaggctggagagaagccgtggtggtg

SEQ ID NO: 10263 - DNA, 1918 bp, Homo sapiens
ctccatctgtgtggtctttgccatgtcctttgtcccggccagcttcactcttgtcctcattgaggagcgagtcacccgagccaagcacctgcagctcatggggggcctgtcccccaccctctactggcttggcaactttctctgggacatgtgtaactacttggtgccagcatgcatcgtggtgctcatctttctggccttccagcagagggcatatgtggcccctgccaacctgcctgctctcctgctgttgctactactgtatggcacagcctatgtggtgctcacctgcataaacctctttattggcatcaatggaagcatggccacctttgtgcttgagctcttctctgatcagaagctgcaggaggtgagccggatcttgaaacaggtcttccttatcttcccccacttctgcttgggccgggggctcattgacatggtgcggaaccaggccatggctgatgcctttgagcgcttgggagacaggcagttccagtcacccctgcgctgggaggtggtcggcaagaacctcttggccatggtgatacaggggcccctcttccttctcttcacactactgctgcagcaccgaagccaactcctgccacagcccagggtgaggtctctgccactcctgggagaggaggacgaggatgtagcccgtgaacgggagcgggtggtccaaggagccacccagggggatgtgttggtgctgaggaacttgaccaaggtataccgtgggcagaggatgccagctgttgaccgcttgtgcctggggattccccctggtgagtgttttgggctgctgggtgtgaatggagcagggaagacgtccacgtttcgcatggtgacgggggacacattggccagcaggggcgaggctgtgctggcaggccacagcgtggcccgggaacccagtgctgcgcacctcagcatgggatactgccctcaatccgatgccatctttgagctgctgacgggccgcgagcacctggagctgcttgcgcgcctgcgcggtgtcccggaggcccaggttgcccagaccgctggctcgggcctggcgcgtctgggactctcatggtacgcagaccggcctgcaggcacctacagcggagggaacaaacgcaagctggcgacggccctggcgctggttggggacccagccgtggtgtttctggacgagccgaccacaggcatggaccccagcgcgcggcgcttcctttggaacagccttttggccgtggtgcgggagggccgttcagtgatgctcacctcccatagcatggaggagtgtgaagcgctctgctcgcgcctggccatcatggtgaatgggcggttccgctgcctgggcagcccgcaacatctcaagggcagattcgcggcgggtcacacactgaccctgcgggtgcccgccgcaaggtcccagccggcagcggccttcgtggcggccgagttccctggggcggagctgcgcgaggcacatggaggccgcctgcgcttccagctgccgccgggagggcgctgcgccctggcgcgcgtctttggagagctggcggtgcacggcgcagagcacggcgtggaggacttttccgtgagccagacgatgctggaggaggtattcttgtacttctccaaggaccaggggaaggacgaggacaccgaagagcagaaggaggcaggagtgggagtggaccccgcgccaggcctgcagcaccccaaacgcgtcagccagttcctcgatgaccctagcactgccgagactgtgctctgagcctccctcccctgcggggccgcggggaggccctgggaatggcaagggcaaggtagagtgcctaggagccctggactcaggctggcagaggggctggtgccctggagaaaataaagagaaggctggagagaagccgtggtggtg

SEQ ID NO: 10264 - DNA, 2348 bp, Homo sapiens
acttggcttaaggggcggcgcgctccctgcctgctgctgggcggagggaaggcggcaagagctgcggagcccctggaaggtgagaaggactcggagagggaagaaggcccgagactcgagaatgcggggttggggccgggagggatgcaagttccctgggaattagggggtccagcctctgacctccttccggtgaatgttgacgacggctgaattgatcactgattctcaaggggggcatcggacatctgggacccttaagagggcctttgccgatcacacacctgcagccccctgcccgttagaactcctgcactcccccttgccccgtcttacaaatggagaaactgagcccactcccccagatcctaagtcccgcttgatgtaaaggaaagaaccctggcgtaagggtctgggtctgaggtcccagttccggcctggtcacctttagcaacttcctgcccctctgtcagcgtcagattctccatctgtgtcagaggtggaccggcccaaggaaaatagatcaggaatcgctgactccaggagtctctatcccagccccttcgcctgactctttctctggctcccgcggtccctctgagcgattaatgctacataaggtgtgggcagagctggggtcgtgcctccagctgggcaactgcctgtctctctgggtgcctgggtttgctttcttgggcctcggtttccacttctgtagagtggggtgatagtccagcacttcccctgggcgtgtgaaatgtccagcactgccaatattcgttgctgttatcttcggagaacagtgaggggaaaggaatccttgcctgggctgggccaggcaggaggctgggggtcaggacctggaagaggcttccaggtgaggcttggggtggagcctggtgacgaaagcgttaagcccaaactcggtccctggaggattagaggatgatctttaagtccccagctgtcagccctgctcagagcgacagtcctggcagccaatcagatgcgaggacggctgcgggttgcgctcccattggtttactccacccctggggtagcggagcctctttatcgagtgactactgtttgcctcgctctaatcagagcttccaggaaccctgcgctgtgggataaaggaatgaggttcagaaaggggcagggagttgcccgcagccgcaccgcacgtcttcagcccgaccgttgtcctgacctctctgtcccgtcccctgcccagtctcaccatggccttctggacacagctgatgctgctgctctggaagaatttcatgtatcgccggagacagccggtaacgccccagtgtgagaccagggccgggtgggcaggcagcccccactgtcccccaccgtctcccacctattctcccccaggtccagctcctggtcgaattgctgtggcctctcttcctcttcttcatcctggtggctgttcgccactcccacccgcccctggagcaccatgaatgtgagcccccccagggaccaggcactttgtgtgtgtaggggaaggcagatggctcacccgtgcacaggaatcccccgtgcatgtcagggagccttcaccaggccgccaatacatggcatgggagtgagctctccatcgctggaggcatgcaagcggtgccgggcgacccgatgggggtggagtcaggcagagtccacagggcctcagcaccaggcgtctccccgcaggccacttcccaaacaagccactgccatcggcgggcaccgtgccctggctccagggtctcatctgtaatgtgaacaacacctgctttccgcagctgacaccgggcgaggagcccgggcgcctgagcaacttcaacgactccctgtgagccagaggcagtgggtgcggccggcctgcaaactcggggctgcagtgccggccggaaccccgcctcctgccctctctctgtccccagggtctcccggctgctagccgatgcccgcactgtgctgggaggggccagtgcccacaggacgctggctggcctagggaagctgatcgccacgctgagggctgcacgcagcacgggtgaggaggccggggggcctctggcagggctgagctctgagcctcaacttgccgggccgtgaaatgggcacagggtgggggtgggtgcctcagaccaacgtccccccagccccatgctcccgtgcgctcctcccccagcccagcctcaaccaaccaagcagtctccactggaaccacccatgctggatgtcgcggagctgctgacgtcactgctgcgcacggtagggtgtcggggcgggaccgcgctgacttcctgggacactgcactggggatgtcctggcactgccc

SEQ ID NO: 10265 - DNA, 1100 bp, Homo sapiens
acttggcttaaggggcggcgcgctccctgcctgctgctgggcggagggaaggcggcaagagctgcggagcccctggaagagcttccaggaaccctgcgctgtgggataaaggaatgaggttcagaaaggggcagggagttgcccgcagccgcaccgcacgtcttcagcccgaccgttgtcctgacctctctgtcccgtcccctgcccagtctcaccatggccttctggacacagctgatgctgctgctctggaagaatttcatgtatcgccggagacagccggtccagctcctggtcgaattgctgtggcctctcttcctcttcttcatcctggtggctgttcgccactcccacccgcccctggagcaccatgaatgtgagcccccccagggaccaggcactttgtgtgtgtaggggaaggcagatggctcacccgtgcacaggaatcccccgtgcatgtcagggagccttcaccaggccgccaatacatggcatgggagtgagctctccatcgctggaggcatgcaagcggtgccgggcgacccgatgggggtggagtcaggcagagtccacagggcctcagcaccaggcgtctccccgcaggccacttcccaaacaagccactgccatcggcgggcaccgtgccctggctccagggtctcatctgtaatgtgaacaacacctgctttccgcagctgacaccgggcgaggagcccgggcgcctgagcaacttcaacgactccctgtgagccagaggcagtgggtgcggccggcctgcaaactcggggctgcagtgccggccggaaccccgcctcctgccctctctctgtccccagggtctcccggctgctagccgatgcccgcactgtgctgggaggggccagtgcccacaggacgctggctggcctagggaagctgatcgccacgctgagggctgcacgcagcacggcccagcctcaaccaaccaagcagtctccactggaaccacccatgctggatgtcgcggagctgctgacgtcactgctgcgcacggtagggtgtcggggcgggaccgcgctgacttcctgggacactgcactggggatgtcctggcactgccc

SEQ ID NO: 10266 - DNA, 2642 bp, Homo sapiens
gggcaagctcagcgcacttggcttaaggggcggcgcgctccctgcctgctgctgggcggagggaaggcggcaagagctgcggagcccctggaaggtgagaaggactcggagagggaagaaggcccgagactcgagaatgcggggttggggccgggagggatgcaagttccctgggaattagggggtccagcctctgacctccttccggtgaatgttgacgacggctgaattgatcactgattctcaaggggggcatcggacatctgggacccttaagagggcctttgccgatcacacacctgcagccccctgcccgttagaactcctgcactcccccttgccccgtcttacaaatggagaaactgagcccactcccccagatcctaagtcccgcttgatgtaaaggaaagaaccctggcgtaagggtctgggtctgaggtcccagttccggcctggtcacctttagcaacttcctgcccctctgtcagcgtcagattctccatctgtgtcagaggtggaccggcccaaggaaaatagatcaggaatcgctgactccaggagtctctatcccagccccttcgcctgactctttctctggctcccgcggtccctctgagcgattaatgctacataaggtgtgggcagagctggggtcgtgcctccagctgggcaactgcctgtctctctgggtgcctgggtttgctttcttgggcctcggtttccacttctgtagagtggggtgatagtccagcacttcccctgggcgtgtgaaatgtccagcactgccaatattcgttgctgttatcttcggagaacagtgaggggaaaggaatccttgcctgggctgggccaggcaggaggctgggggtcaggacctggaagaggcttccaggtgaggcttggggtggagcctggtgacgaaagcgttaagcccaaactcggtccctggaggattagaggatgatctttaagtccccagctgtcagccctgctcagagcgacagtcctggcagccaatcagatgcgaggacggctgcgggttgcgctcccattggtttactccacccctggggtagcggagcctctttatcgagtgactactgtttgcctcgctctaatcagagcttccaggaaccctgcgctgtgggataaaggaatgaggttcagaaaggggcagggagttgcccgcagccgcaccgcacgtcttcagcccgaccgttgtcctgacctctctgtcccgtcccctgcccagtctcaccatggccttctggacacagctgatgctgctgctctggaagaatttcatgtatcgccggagacagccggtaacgccccagtgtgagaccagggccgggtgggcaggcagcccccactgtcccccaccgtctcccacctattctcccccaggtccagctcctggtcgaattgctgtggcctctcttcctcttcttcatcctggtggctgttcgccactcccacccgcccctggagcaccatgaatgtgagcccccccagggaccaggcactttgtgtgtgtaggggaaggcagatggctcacccgtgcacaggaatcccccgtgcatgtcagggagccttcaccaggccgccaatacatggcatgggagtgagctctccatcgctggaggcatgcaagcggtgccgggcgacccgatgggggtggagtcaggcagagtccacagggcctcagcaccaggcgtctccccgcaggccacttcccaaacaagccactgccatcggcgggcaccgtgccctggctccagggtctcatctgtaatgtgaacaacacctgctttccgcagctgacaccgggcgaggagcccgggcgcctgagcaacttcaacgactccctgtgagccagaggcagtgggtgcggccggcctgcaaactcggggctgcagtgccggccggaaccccgcctcctgccctctctctgtccccagggtctcccggctgctagccgatgcccgcactgtgctgggaggggccagtgcccacaggacgctggctggcctagggaagctgatcgccacgctgagggctgcacgcagcacgggtgaggaggccggggggcctctggcagggctgagctctgagcctcaacttgccgggccgtgaaatgggcacagggtgggggtgggtgcctcagaccaacgtccccccagccccatgctcccgtgcgctcctcccccagcccagcctcaaccaaccaagcagtctccactggaaccacccatgctggatgtcgcggagctgctgacgtcactgctgcgcacggtagggtgtcggggcgggaccgcgctgacttcctgggacactgcactggggatgtcctggcactgccccaccccgggccaaggacctcccgttccaggcatccaggctgtccctggtctctgcggtgatgctgcttgtccgtctgggcccccagacagagtgtgtctgacccagtgaggaagactcgtctgtgagatctccaatgagtccctttgcctctcagagcctcagtttccctatttgtaaagtgggggctatgatagtatggtctgcctgggaactggccagagcgctggacccctagtgagtgttcaaaatcattgtcccccttgtggtctttctcccca

SEQ ID NO: 10267 - DNA, 1076 bp, Homo sapiens
gggcaagctcagcgcacttggcttaaggggcggcgcgctccctgcctgctgctgggcggagggaaggcggcaagagctgcggagcccctggaagagcttccaggaaccctgcgctgtgggataaaggaatgaggttcagaaaggggcagggagttgcccgcagccgcaccgcacgtcttcagcccgaccgttgtcctgacctctctgtcccgtcccctgcccagtctcaccatggccttctggacacagctgatgctgctgctctggaagaatttcatgtatcgccggagacagccggtccagctcctggtcgaattgctgtggcctctcttcctcttcttcatcctggtggctgttcgccactcccacccgcccctggagcaccatgaatgccacttcccaaacaagccactgccatcggcgggcaccgtgccctggctccagggtctcatctgtaatgtgaacaacacctgctttccgcagctgacaccgggcgaggagcccgggcgcctgagcaacttcaacgactccctggtctcccggctgctagccgatgcccgcactgtgctgggaggggccagtgcccacaggacgctggctggcctagggaagctgatcgccacgctgagggctgcacgcagcacggcccagcctcaaccaaccaagcagtctccactggaaccacccatgctggatgtcgcggagctgctgacgtcactgctgcgcacggtagggtgtcggggcgggaccgcgctgacttcctgggacactgcactggggatgtcctggcactgccccaccccgggccaaggacctcccgttccaggcatccaggctgtccctggtctctgcggtgatgctgcttgtccgtctgggcccccagacagagtgtgtctgacccagtgaggaagactcgtctgtgagatctccaatgagtccctttgcctctcagagcctcagtttccctatttgtaaagtgggggctatgatagtatggtctgcctgggaactggccagagcgctggacccctagtgagtgttcaaaatcattgtcccccttgtggtctttctcccca

SEQ ID NO: 10268 - DNA, 900 bp, Homo sapiens
gtttgcctcgctctaatcagagcttccaggaaccctgcgctgtgggataaaggaatgaggttcagaaaggggcagggagttgcccgcagccgcaccgcacgtcttcagcccgaccgttgtcctgacctctctgtcccgtcccctgcccagtctcaccatggccttctggacacagctgatgctgctgctctggaagaatttcatgtatcgccggagacagccggtaacgccccagtgtgagaccagggccgggtgggcaggcagcccccactgtcccccaccgtctcccacctattctcccccaggtccagctcctggtcgaattgctgtggcctctcttcctcttcttcatcctggtggctgttcgccactcccacccgcccctggagcaccatgaatgtgagcccccccagggaccaggcactttgtgtgtgtaggggaaggcagatggctcacccgtgcacaggaatcccccgtgcatgtcagggagccttcaccaggccgccaatacatggcatgggagtgagctctccatcgctggaggcatgcaagcggtgccgggcgacccgatgggggtggagtcaggcagagtccacagggcctcagcaccaggcgtctccccgcaggccacttcccaaacaagccactgccatcggcgggcaccgtgccctggctccagggtctcatctgtaatgtgaacaacacctgctttccgcagctgacaccgggcgaggagcccgggcgcctgagcaacttcaacgactccctgtgagccagaggcagtgggtgcggccggcctgcaaactcggggctgcagtgccggccggaaccccgcctcctgccctctctctgtccccagggtctcccggctgctagccgatgcccgcactgtgctgggag

SEQ ID NO: 10269 - DNA, 591 bp, Homo sapiens
gtttgcctcgctctaatcagagcttccaggaaccctgcgctgtgggataaaggaatgaggttcagaaaggggcagggagttgcccgcagccgcaccgcacgtcttcagcccgaccgttgtcctgacctctctgtcccgtcccctgcccagtctcaccatggccttctggacacagctgatgctgctgctctggaagaatttcatgtatcgccggagacagccggtccagctcctggtcgaattgctgtggcctctcttcctcttcttcatcctggtggctgttcgccactcccacccgcccctggagcaccatgaatgccacttcccaaacaagccactgccatcggcgggcaccgtgccctggctccagggtctcatctgtaatgtgaacaacacctgctttccgcagctgacaccgggcgaggagcccgggcgcctgagcaacttcaacgactccctgtgagccagaggcagtgggtgcggccggcctgcaaactcggggctgcagtgccggccggaaccccgcctcctgccctctctctgtccccagggtctcccggctgctagccgatgcccgcactgtgctgggag

SEQ ID NO: 10270 - DNA, 1805 bp, Homo sapiens
cctcgtctccatctgtgtggtctttgccatgtcctttgtcccggccagcttcactcttgtcctcattgaggagcgagtcacccgagccaagcacctgcagctcatggggggcctgtcccccaccctctactggcttggcaactttctctgggacatggtgcgggggctgcttggacgggtgggggcccagccactgcttgccactgccctgtctggccccttgtaggcaggggcttgtccaagatggcctgggtaaagtcttgaggattgtgggagactttgtgccttcctactcaaaaagcaaggaggtcagggtgggaacagggctgagggtggcagtgcccacctctttaggctgataaaggtaactgccatctccaatgcagtgtaactacttggtgccagcatgcatcgtggtgctcatctttctggccttccagcagagggcatatgtggcccctgccaacctgcctgctctcctgctgttgctactactgtatgggtgaggcccccagtccctcagggcctattcttactgaccccttactgccttccacattaatgctgctgagatagaactctgcagtgactcccaaggagaggatatggaggtctgaggtgatgccgtgtgtgatccaattcagtggtgtgccaaggtggccttaaaagctcatcttatcctgactcatattagtagagttctaaggcagcccatgcctgtaattccagtactttgggaggccgaggcaggaggactgcttgtggccaggagtttgagaccagcctgggaaacatagagagacccacctctaaaaaagaaagaaagagagagaaagagaaagagagaaagaaaaaaaaaaaaacagaaatgtgctttgggtgaaaatgtcaaggtctaaggcagagaagatgggaatggagatttttattcctctcagggcttctcagtctgagtggttactccagtgactcctattgtcccttcagctggtcgatcacaccgctcatgtacccagcctccttcttcttctccgtgcccagcacagcctatgtggtgctcacctgcataaacctctttattggcatcaatggaagcatggccacctttgtgcttgagctcttctctgatcaggtggggcaccacgaggctggggcttgggctgggttgggtcgttggactcagcccctgaccaacatccgtctcccacccttgagcagaagctgcaggaggtgagccggatcttgaaacaggtcttccttatcttcccccacttctgcttgggccgggggctcattgacatggtgcggaaccaggccatggctgatgcctttgagcgcttgggtgagaacttcctgtcaggtggggccatggctacagatagctagcacccttggagacctagagttaattatacagagtggagaaaaacagccccccagggagacagccagggttcttaggtggccctaaggttgggccaagttggaggtacaagaaagcagccataaaaagctaattcttagattacatcacaagaggcctcttctgttttctatgccaattagactccagctgagtggcctatccaatttgtgttcctttcccttaagaatccagagtgacatggatggagaaagggccagaaaccaagactctcatggacccagtccctcctttctatatccacaggagacaggcagttccagtcacccctgcgctgggaggtggtcggcaagaacctcttggccatggtgatacaggggcccctcttccttctcttcacactactgctgcagcaccgaag

SEQ ID NO: 10271 - DNA, 512 bp, Homo sapiens
cctcgtctccatctgtgtggtctttgccatgtcctttgtcccggccagcttcactcttgtcctcattgaggagcgagtcacccgagccaagcacctgcagctcatggggggcctgtcccccaccctctactggcttggcaactttctctgggacatgtgtaactacttggtgccagcatgcatcgtggtgctcatctttctggccttccagcagagggcatatgtggcccctgccaacctgcctgctctcctgctgttgctactactgtatggaagctgcaggaggtgagccggatcttgaaacaggtcttccttatcttcccccacttctgcttgggccgggggctcattgacatggtgcggaaccaggccatggctgatgcctttgagcgcttgggagacaggcagttccagtcacccctgcgctgggaggtggtcggcaagaacctcttggccatggtgatacaggggcccctcttccttctcttcacactactgctgcagcaccgaag

SEQ ID NO: 10272 - DNA, 1864 bp, Homo sapiens
gccacaggagacagcgctggagaacggggaaccaggtaagtccttcccagtggccctggggtcctcccagccacccccccacagcagcgtgagcactgaccctctcatccctcacagctgggtcagccccagagactgaccagggctctgggccagacgccgtgggccgggtacagggctgggcactgacccgccagcagctccaggccctgcttctcaagcgctttctgcttgcccgccgcagccgccgcggcctgttcgcccaggtgaggagggctagcaccagggagtcgcatgggagtccctgagttccctaccctggccgtccactcagtggcctaatccaaacccttacccccgtgtgtattcccaacccaaagcacatttattgagggcactggggagccatgggtggttgtagagcaggagcagggacaggtgcaagcaagcctggagggtggatggaagcagcagctgatgggctggtcccccagatcgtgctgcctgccctctttgtgggcctggccctcgtgttcagcctcatcgtgcctcctttcgggcactacccggctctgcggctcagtcccaccatgtacggtgctcaggtgtccttcttcaggtgggtgcagaaggaaggggctggtggcaggaagactagggacctgggggtacagccctgaccctacatctcccctcacacacagtgaggacgccccaggggaccctggacgtgcccggctgctcgaggcgctgctgcaggaggcaggactggaggagcccccagtgcagcatagctcccacaggtgaggcgtcttgttggcctggacctttcccctctctggcctcagttttcccatctggtccctggccagggagcctcagggggcacctggagcatcccctgtgcccacctgggagctgggagcctctgtggctccaggaacccccagaagctgggtgcccacagaccttcaccttgaccctgcagcgcccttgagtgtgcacagcccattgtctgcaggttctcggcaccagaagttcctgctgaagtggccaaggtcttggccagtggcaactggaccccagagtctccatccccagcctgccagtgtagccggcccggtgcccggcgcctgctgcccgactgcccggctgcagctggtggtccccctccgccccaggcagtgaccggctctggggaagtggttcagaacctgacaggccggaacctgtctgacttcctggtcaagacctacccgcgcctggtgcgccaggggtgagccatgccctgggactcagtttccctggctatagcatgggtccttgggttgctggggctggtgtggtcctggaggaggaagtggaggggttggatgcccagcttggggctacgggctgggagtctcgcgtaccttcctttcctctttttttttttttttttttttgagatggagtctccctctgttgcccaggctggagtgcagaggtgtgatctcagctcattgcaacctccacctcccagtttcaagcgattctcctccctcagcctcccgagtagctgggattacaggcacgcaccaccactcccgactaatttttgtatttttagtagagatggggtttcaccgtgttgccaggctggtctcgaactcctgacctcaggtgatccacccgccttggcctcccaaagtgttgggattacaggcaggagccaccgcgcccggctttctttcctgtttttgtccacccttgactctgtgctcccctctcaccatctctctctctgtcccacatccctgtctgcctgtgtctctgtccatctctcccacagcctgaagactaagaagtgggtgaatgaggtcag

SEQ ID NO: 10273 - DNA, 571 bp, Homo sapiens
gccacaggagacagcgctggagaacggggaaccagctgggtcagccccagagactgaccagggctctgggccagacgccgtgggccgggtacagggctgggcactgacccgccagcagctccaggccctgcttctcaagcgctttctgcttgcccgccgcagccgccgcggcctgttcgcccagtgaggacgccccaggggaccctggacgtgcccggctgctcgaggcgctgctgcaggaggcaggactggaggagcccccagtgcagcatagctcccacaggttctcggcaccagaagttcctgctgaagtggccaaggtcttggccagtggcaactggaccccagagtctccatccccagcctgccagtgtagccggcccggtgcccggcgcctgctgcccgactgcccggctgcagctggtggtccccctccgccccaggcagtgaccggctctggggaagtggttcagaacctgacaggccggaacctgtctgacttcctggtcaagacctacccgcgcctggtgcgccagggcctgaagactaagaagtgggtgaatgaggtcag

SEQ ID NO: 10274 - DNA, 1567 bp, Homo sapiens
gcacttggcttaaggggcggcgcgctccctgcctgctgctgggcggagggaaggcggcaagagctgcggagcccctggaaggtgagaaggactcggagagggaagaaggcccgagactcgagaatgcggggttggggccgggagggatgcaagttccctgggaattagggggtccagcctctgacctccttccggtgaatgttgacgacggctgaattgatcactgattctcaaggggggcatcggacatctgggacccttaagagggcctttgccgatcacacacctgcagccccctgcccgttagaactcctgcactcccccttgccccgtcttacaaatggagaaactgagcccactcccccagatcctaagtcccgcttgatgtaaaggaaagaaccctggcgtaagggtctgggtctgaggtcccagttccggcctggtcacctttagcaacttcctgcccctctgtcagcgtcagattctccatctgtgtcagaggtggaccggcccaaggaaaatagatcaggaatcgctgactccaggagtctctatcccagccccttcgcctgactctttctctggctcccgcggtccctctgagcgattaatgctacataaggtgtgggcagagctggggtcgtgcctccagctgggcaactgcctgtctctctgggtgcctgggtttgctttcttgggcctcggtttccacttctgtagagtggggtgatagtccagcacttcccctgggcgtgtgaaatgtccagcactgccaatattcgttgctgttatcttcggagaacagtgaggggaaaggaatccttgcctgggctgggccaggcaggaggctgggggtcaggacctggaagaggcttccaggtgaggcttggggtggagcctggtgacgaaagcgttaagcccaaactcggtccctggaggattagaggatgatctttaagtccccagctgtcagccctgctcagagcgacagtcctggcagccaatcagatgcgaggacggctgcgggttgcgctcccattggtttactccacccctggggtagcggagcctctttatcgagtgactactgtttgcctcgctctaatcagagcttccaggaaccctgcgctgtgggataaaggaatgaggttcagaaaggggcagggagttgcccgcagccgcaccgcacgtcttcagcccgaccgttgtcctgacctctctgtcccgtcccctgcccagtctcaccatggccttctggacacagctgatgctgctgctctggaagaatttcatgtatcgccggagacagccggtaacgccccagtgtgagaccagggccgggtgggcaggcagcccccactgtcccccaccgtctcccacctattctcccccaggtccagctcctggtcgaattgctgtggcctctcttcctcttcttcatcctggtggctgttcgccactcccacccgcccctggagcaccatgaatgtgagcccccccagggaccaggcactttgtgtgtgtaggggaaggcagatggctcacccgtgcacaggaatcccccgtg

SEQ ID NO: 10275 - DNA, 539 bp, Homo sapiens
gcacttggcttaaggggcggcgcgctccctgcctgctgctgggcggagggaaggcggcaagagctgcggagcccctggaagagcttccaggaaccctgcgctgtgggataaaggaatgaggttcagaaaggggcagggagttgcccgcagccgcaccgcacgtcttcagcccgaccgttgtcctgacctctctgtcccgtcccctgcccagtctcaccatggccttctggacacagctgatgctgctgctctggaagaatttcatgtatcgccggagacagccggtaacgccccagtgtgagaccagggccgggtgggcaggcagcccccactgtcccccaccgtctcccacctattctcccccaggtccagctcctggtcgaattgctgtggcctctcttcctcttcttcatcctggtggctgttcgccactcccacccgcccctggagcaccatgaatgtgagcccccccagggaccaggcactttgtgtgtgtaggggaaggcagatggctcacccgtgcacaggaatcccccgtg

SEQ ID NO: 10276 - DNA, 975 bp, Homo sapiens
actgtttgcctcgctctaatcagagcttccaggaaccctgcgctgtgggataaaggaatgaggttcagaaaggggcagggagttgcccgcagccgcaccgcacgtcttcagcccgaccgttgtcctgacctctctgtcccgtcccctgcccagtctcaccatggccttctggacacagctgatgctgctgctctggaagaatttcatgtatcgccggagacagccggtaacgccccagtgtgagaccagggccgggtgggcaggcagcccccactgtcccccaccgtctcccacctattctcccccaggtccagctcctggtcgaattgctgtggcctctcttcctcttcttcatcctggtggctgttcgccactcccacccgcccctggagcaccatgaatgtgagcccccccagggaccaggcactttgtgtgtgtaggggaaggcagatggctcacccgtgcacaggaatcccccgtgcatgtcagggagccttcaccaggccgccaatacatggcatgggagtgagctctccatcgctggaggcatgcaagcggtgccgggcgacccgatgggggtggagtcaggcagagtccacagggcctcagcaccaggcgtctccccgcaggccacttcccaaacaagccactgccatcggcgggcaccgtgccctggctccagggtctcatctgtaatgtgaacaacacctgctttccgcagctgacaccgggcgaggagcccgggcgcctgagcaacttcaacgactccctgtgagccagaggcagtgggtgcggccggcctgcaaactcggggctgcagtgccggccggaaccccgcctcctgccctctctctgtccccagggtctcccggctgctagccgatgcccgcactgtgctgggaggggccagtgcccacaggacgctggctggcctagggaagctgatcgccacgctgagggctgcacgcagcacgg

SEQ ID NO: 10277 - DNA, 569 bp, Homo sapiens
actgtttgcctcgctctaatcagagcttccaggaaccctgcgctgtgggataaaggaatgaggttcagaaaggggcagggagttgcccgcagccgcaccgcacgtcttcagcccgaccgttgtcctgacctctctgtcccgtcccctgcccagtctcaccatggccttctggacacagctgatgctgctgctctggaagaatttcatgtatcgccggagacagccgctcctggtcgaattgctgtggcctctcttcctcttcttcatcctggtggctgttcgccactcccacccgcccctggagcaccatgaatgccacttcccaaacaagccactgccatcggcgggcaccgtgccctggctccagggtctcatctgtaatgtgaacaacacctgctttccgcagctgacaccgggcgaggagcccgggcgcctgagcaacttcaacgactccctggtctcccggctgctagccgatgcccgcactgtgctgggaggggccagtgcccacaggacgctggctggcctagggaagctgatcgccacgctgagggctgcacgcagcacgg

SEQ ID NO: 10278 - DNA, 1521 bp, Homo sapiens
gggagatgtccacaccagaagggtggcccaggccgggggaagcaggcagtgtggcgccaggcacaggtggccccggcctcacggagctcgtggtgccgggtcccgacagcatggaggagtgtgaagcgctctgctcgcgcctggccatcatggtgaatgggcggttccgctgcctgggcagcccgcaacatctcaagggcaggtgagccggcgcggcctccaggcaggtgtggggtgagggtgggcacgtaggtaggctcaggggagaggccagacgtagagccgggtgaggaaagtttggctccaactggagagatggccaaggctttagattgtcctgcaggggtgactgagggggcgagacaggctggggtgtgctgggggcgcaggaccaggaggcgtgagccgggggctctgggtggatttagaagacacaatcaggtgtgcgttggagtaggtgcagcctggagaggtgagggtggattgatgggtggagttaggggagggcctggttagtgggcggggccataggaaagtggggcgggggtatttattgtgtgggcgggggtagagtgcaagggcgaaagaggagtgtccgaaaaaggagtcaagtggggtgatagcttcgagagcaacctgggcaacctagggagaccccatctctataaaaaatttaaaaattagctggacatggtggtgtgtgcctgtggtctcagctacgcgggcggggggtggcgggggactgagacgggaggaccacttgatcgctagggtagtacaagtatggggcggggccagagagtattaggggctggagggtgagctgaggtgggacctgggaaaggcccgatccggtagccctggccccactcactgcagattcgcggcgggtcacacactgaccctgcgggtgcccgccgcaaggtcccagccggcagcggccttcgtggcggccgagttccctggggcggagctgcgcgaggcacatggaggccgcctgcgcttccagctgccgccgggagggcgctgcgccctggcgcgcgtctttggagagctggcggtgcacggcgcagagcacggcgtggaggacttttccgtgagccagacgatgctggaggaggtgatcacggcgccggggtcgggctgggggaggcaggctgggggccaggcccgtgggctgaccgtccctcttgtcccctctgggctgcccaccgctaggtattcttgtacttctccaaggaccaggggaaggacgaggacaccgaagagcagaaggaggcaggagtgggagtggaccccgcgccaggcctgcagcaccccaaacgcgtcagccagttcctcgatgaccctagcactgccgagactgtgctctgagcctccctcccctgcggggccgcggggaggccctgggaatggcaagggcaaggtagagtgcctaggagccctggactcaggctggcagaggggctggtgccctggagaaaataaagagaaggctggagagaagccgtggtggtgaaa

SEQ ID NO: 10279 - DNA, 725 bp, Homo sapiens
gggagatgtccacaccagaagggtggcccaggccgggggaagcaggcagtgtggcgccaggcacaggtggccccggcctcacggagctcgtggtgccgggtcccgacagcatggaggagtgtgaagcgctctgctcgcgcctggccatcatggtgaatgggcggttccgctgcctgggcagcccgcaacatctcaagggcagattcgcggcgggtcacacactgaccctgcgggtgcccgccgcaaggtcccagccggcagcggccttcgtggcggccgagttccctggggcggagctgcgcgaggcacatggaggccgcctgcgcttccagctgccgccgggagggcgctgcgccctggcgcgcgtctttggagagctggcggtgcacggcgcagagcacggcgtggaggacttttccgtgagccagacgatgctggaggaggaccaggggaaggacgaggacaccgaagagcagaaggaggcaggagtgggagtggaccccgcgccaggcctgcagcaccccaaacgcgtcagccagttcctcgatgaccctagcactgccgagactgtgctctgagcctccctcccctgcggggccgcggggaggccctgggaatggcaagggcaaggtagagtgcctaggagccctggactcaggctggcagaggggctggtgccctggagaaaataaagagaaggctggagagaagccgtggtggtgaaa

SEQ ID NO: 10280 - DNA, 1264 bp, Homo sapiens
ctctttattggcatcaatggaagcatggccacctttgtgcttgagctcttctctgatcaggtggggcaccacgaggctggggcttgggctgggttgggtcgttggactcagcccctgaccaacatccgtctcccacccttgagcagaagctgcaggaggtgagccggatcttgaaacaggtcttccttatcttcccccacttctgcttgggccgggggctcattgacatggtgcggaaccaggccatggctgatgcctttgagcgcttgggtgagaacttcctgtcaggtggggccatggctacagatagctagcacccttggagacctagagttaattatacagagtggagaaaaacagccccccagggagacagccagggttcttaggtggccctaaggttgggccaagttggaggtacaagaaagcagccataaaaagctaattcttagattacatcacaagaggcctcttctgttttctatgccaattagactccagctgagtggcctatccaatttgtgttcctttcccttaagaatccagagtgacatggatggagaaagggccagaaaccaagactctcatggacccagtccctcctttctatatccacaggagacaggcagttccagtcacccctgcgctgggaggtggtcggcaagaacctcttggccatggtgatacaggggcccctcttccttctcttcacactactgctgcagcaccgaagccaactcctgccacagttagtgaggtctatggagagggtggcaggggccaaggacctactttaagcccacagatattctgtccccaggcccagggtgaggtctctgccactcctgggagaggaggacgaggatgtagcccgtgaacgggagcgggtggtccaaggagccacccagggggatgtgttggtgctgaggaacttgaccaaggtaggtgtggtcaggtcgactgctgggtggggggtgctcccactggcccactcacctttctgaaagacctgcactctcccaggtataccgtgggcagaggatgccagctgttgaccgcttgtgcctggggattccccctggtgaggtgagtccaggggtggaggccaggtgcagggacagtgagtggctgccctactgcatgccctgcccatcatcctttactgaacacctactgtgtatccaccaccttttattgggcacctactgtatgccaatatttgtgctcctatttttattttattatattattatttatttattta

SEQ ID NO: 10281 - DNA, 676 bp, Homo sapiens
ctctttattggcatcaatggaagcatggccacctttgtgcttgagctcttctctgatcagaagctgcaggaggtgagccggatcttgaaacaggtcttccttatcttcccccacttctgcttgggccgggggctcattgacatggtgcggaaccaggccatggctgatgcctttgagcgcttgggagacaggcagttccagtcacccctgcgctgggaggtggtcggcaagaacctcttggccatggtgatacaggggcccctcttccttctcttcacactactgctgcagcaccgaagccaactcctgccacagcccagggtgaggtctctgccactcctgggagaggaggacgaggatgtagcccgtgaacgggagcgggtggtccaaggagccacccagggggatgtgttggtgctgaggaacttgaccaaggtataccgtgggcagaggatgccagctgttgaccgcttgtgcctggggattccccctggtgaggtgagtccaggggtggaggccaggtgcagggacagtgagtggctgccctactgcatgccctgcccatcatcctttactgaacacctactgtgtatccaccaccttttattgggcacctactgtatgccaatatttgtgctcctatttttattttattatattattatttatttattta

SEQ ID NO: 10282 - DNA, 2023 bp, Homo sapiens
aaaattgcaccgggtgctgagcgcagtagatcttgcctgttatctcagaactttgggaggccaaagtgggagaatctcttgaggacaggtattcgagactagcctgggcaacatagtgagaccgcctcccccccgcccccctcccccaccaacctcacgaaaatatctttaaaaattagccaggtgaggccgggcacagtggctcacgcctgtaatcccagcactttgggaggctgaggcgggcggatcacgaggtcaggagatcaagaccatcctgactaactcggtgaaaccctgcctctactaaaaaaaaaaagtacaaaaaattagccgggcgtggtagcacgcgcctgtaggcccagctacccaggaggctgaggcaggagaatcgcttgaacccaggaggcggaggttgcagtgagccgagatggcgccactgcactccagcctgggcgatagagcgagactccgtctcaaacaaatgaataaatgaataaaattagccaggcgacttgggaggccgagctggggggatcgtttgatcccgggaggtcaaggctgcagtgagctatgattgcagctcttcactccagcctgggcgacagagcaagaccctgtctaagaaaaaggttattcagggtggggccccgggagtttctagcccttccctacaaccggccaccatgcccctctcgcaggttttgggaccctggcccagccgcggaccccctgaccgacctgcgctacgtgtggggcggcttcgtgtacctgcaagacctggtggagcgtgcagccgtccgcgtgctcagcggcgccaacccccgggccggcctctacctgcagcagatgccctatccgtgctatgtggacgacgtgtgagctctggcacccctccccgctcttccccgcggcgggaaggtcccgggtgtgggggtgggcccaggctctgttgggaaccttcctgcggtccaggctgcgaactttgcacctttacaccactccacgtgacctgctgcagcgggaggagcaggggactctgagggtctggtggggggggggactctgagggtctgggggcccccggcgcagggacagcctgggctgcactgatgcctgagagccaaaggctggctggatcaggttccaaggaacagggaggcaaatcttcccgccttgagatcccgggacacgaaccagtcgtgccagatggtgggcggagggggggtctgcggagggtctccagcctccaccccagccgtccccaccccaggttcctgcgtgtgctgagccggtcgctgccgctcttcctgacgctggcctggatctactccgtgacactgacagtgaaggccgtggtgcgggagaaggagacgcggctgcgggacaccatgcgcgccatggggctcagccgcgcggtgctctggctaggctggttcctcagctgcctcgggcccttcctgctcagcgccgcactgctggttctggtgctcaaggtgggcgcgcctcggcctgcccggctgcagaatgggtgcgctggagggtgacagacaggggcggccccacgtgggtgcgcgcccccaggccaatccaggagctgcaccctaagctcccgttgcctctcacagctgggagacatcctcccctacagccacccgggcgtggtcttcctgttcttggcagccttcgcggtggccacggtgacccagagcttcctgctcagcgccttcttctcccgcgccaacctggctgcggcctgcggcggcctggcctacttctccctctacctgccctacgtgctgtgtgtggcttggcgggaccggctgcccgcgggtggccgcgtggccgcggtgagagccgggtcgggcgtggatgggggacgccccccgcttcggccgctcactgaccgcccgcttttccgcagagcctgctgtcgcccgtggccttcggcttcggctgcgagagcctggctctgctggaggagcagggcgagggcgcgcagtggcacaacgtgggcacccggcct

SEQ ID NO: 10283 - DNA, 587 bp, Homo sapiens
aaaattgcaccgggtgctgagcgcagtagatcttgcctgttatctcagaactttgggaggccaaagtgggagaatctcttgaggacaggttttgggaccctggcccagccgcggaccccctgaccgacctgcgctacgtgtggggcggcttcgtgtacctgcaagacctggtggagcgtgcagccgtccgcgtgctcagcggcgccaacccccgggccggcctctacctgcagcagatgccctatccgtgctatgtggacgacctgggagacatcctcccctacagccacccgggcgtggtcttcctgttcttggcagccttcgcggtggccacggtgacccagagcttcctgctcagcgccttcttctcccgcgccaacctggctgcggcctgcggcggcctggcctacttctccctctacctgccctacgtgctgtgtgtggcttggcgggaccggctgcccgcgggtggccgcgtggccgcgagcctgctgtcgcccgtggccttcggcttcggctgcgagagcctggctctgctggaggagcagggcgagggcgcgcagtggcacaacgtgggcacccggcct

SEQ ID NO: 10284 - DNA, 3280 bp, Homo sapiens
cgggaacccagtgctgcgcacctcagcatgggatactgccctcaatccgatgccatctttgagctgctgacgggccgcgagcacctggagctgcttgcgcgcctgcgcggtgtcccggaggcccaggttgcccaggtgagcccactttgtccccaccgctctcacctcccagggcccacccgacccaggccgtgcctctaaagcctggcccaatcccgcactctctcgccttggctccatccctgtccctgcccccagaccgtgcttccttcccctatacctctgtcccccatcctggtccaatagggatgtggctagcccgcctctttgccccgcaacaccaagttccaccattctcattggtccacccacccttccttccgctgcacgttgcccctctctccttgactctgccttctgtggccctgcccacttgctcctcttctgcctaccccctagggcttcgcgcctttctcgctggggtcacggtcacattctcactctggccgttcccagtttgcagccgtttcactgcctcttccatctgcttgggggtcttgtctttgccctggcccgccccaccctcacactgtcccaccccatgccctttctggccctgcctcatacccatgttggctccacccacaccatggccctgctccatacccatcccagctccacccataccaaggccccaccccatactcatgctggctccacccacaccatggccccgccccatactcatgctggctccacccacaccatggccccgccccatactcatgctggctccacccacaccatggccccgccccatactcatgctggctccacccacaccatggccccaccccatactcatgctgtctccacccacaccatggccctgccccatactcatgctggctctacccacaccatggccccgccgcatactcatgctggctccaccagtgtggccccgccccatactcatgctggctccacccacaccatggccccgccccatactcatgctggctccaccagtgtggccccgccccatactcatgctgtctccacccacaccatggccccgccccatactcatgctggctccacccacactatggccctgccccacacccatcccagctccacccacaccatggccccgccccatactcatgctggctccacccacaccatggccccgccccatactcatgctgcccccaccacactatgtcccattctcacatttgccctgccccatgcccattatgcccctgctccacactcaatgctggccccgccacactgtggccctgccccatactcatcaatatgagtccccatgcctactctggccccaccccacagaccgctggctcgggcctggcgcgtctgggactctcatggtacgcagaccggcctgcaggcacctacagcggagggaacaaacgcaagctggcgacggccctggcgctggttggggacccagccgtggtgtttctggtgcgtgggagcggtgcctgggtggggtggggcctgcgacggaggcggggccttgcttatgggatcttccgtgctccccaggacgagccgaccacaggcatggaccccagcgcgcggcgcttcctttggaacagccttttggccgtggtgcgggagggccgttcagtgatgctcacctcccataggtgggccgggctctgatgccctgggctgtggttaaggtgatccaggcctggagagagagccccaaagcacaaggccacaggggatggggggtcctggccctagtggggcgagggcgccaggccccggggtgtaaggacacacagaggtgggacgcggcgccgggatcagaacggtctggggaagagtggggagatgtccacaccagaagggtggcccaggccgggggaagcaggcagtgtggcgccaggcacaggtggccccggcctcacggagctcgtggtgccgggtcccgacagcatggaggagtgtgaagcgctctgctcgcgcctggccatcatggtgaatgggcggttccgctgcctgggcagcccgcaacatctcaagggcaggtgagccggcgcggcctccaggcaggtgtggggtgagggtgggcacgtaggtaggctcaggggagaggccagacgtagagccgggtgaggaaagtttggctccaactggagagatggccaaggctttagattgtcctgcaggggtgactgagggggcgagacaggctggggtgtgctgggggcgcaggaccaggaggcgtgagccgggggctctgggtggatttagaagacacaatcaggtgtgcgttggagtaggtgcagcctggagaggtgagggtggattgatgggtggagttaggggagggcctggttagtgggcggggccataggaaagtggggcgggggtatttattgtgtgggcgggggtagagtgcaagggcgaaagaggagtgtccgaaaaaggagtcaagtggggtgatagcttcgagagcaacctgggcaacctagggagaccccatctctataaaaaatttaaaaattagctggacatggtggtgtgtgcctgtggtctcagctacgcgggcggggggtggcgggggactgagacgggaggaccacttgatcgctagggtagtacaagtatggggcggggccagagagtattaggggctggagggtgagctgaggtgggacctgggaaaggcccgatccggtagccctggccccactcactgcagattcgcggcgggtcacacactgaccctgcgggtgcccgccgcaaggtcccagccggcagcggccttcgtggcggccgagttccctggggcggagctgcgcgaggcacatggaggccgcctgcgcttccagctgccgccgggagggcgctgcgccctggcgcgcgtctttggagagctggcggtgcacggcgcagagcacggcgtggaggacttttccgtgagccagacgatgctggaggaggtgatcacggcgccggggtcgggctgggggaggcaggctgggggccaggcccgtgggctgaccgtccctcttgtcccctctgggctgcccaccgctaggtattcttgtacttctccaaggaccaggggaaggacgaggacaccgaagagcagaaggaggcaggagtgggagtggaccccgcgccaggcctgcagcaccccaaacgcgtcagccagttcctcgatgaccctagcactgccgagactgtgctctgagcctccctcccctgcggggccgcggggaggccc

SEQ ID NO: 10285 - DNA, 876 bp, Homo sapiens
cgggaacccagtgctgcgcacctcagcatgggatactgccctcaatccgatgccatctttgagctgctgacgggccgcgagcacctggagctgcttgcgcgcctgcgcggtgtcccggaggcccaggttgcccagaccgctggctcgggcctggcgcgtctgggactctcatggtacgcagaccggcctgcaggcacctacagcggagggaacaaacgcaagctggcgacggccctggcgctggttggggacccagccgtggtgtttctggacgagccgaccacaggcatggaccccagcgcgcggcgcttcctttggaacagccttttggccgtggtgcgggagggccgttcagtgatgctcacctcccatagcatggaggagtgtgaagcgctctgctcgcgcctggccatcatggtgaatgggcggttccgctgcctgggcagcccgcaacatctcaagggcagattcgcggcgggtcacacactgaccctgcgggtgcccgccgcaaggtcccagccggcagcggccttcgtggcggccgagttccctggggcggagctgcgcgaggcacatggaggccgcctgcgcttccagctgccgccgggagggcgctgcgccctggcgcgcgtctttggagagctggcggtgcacggcgcagagcacggcgtggaggacttttccgtgagccagacgatgctggaggaggaccaggggaaggacgaggacaccgaagagcagaaggaggcaggagtgggagtggaccccgcgccaggcctgcagcaccccaaacgcgtcagccagttcctcgatgaccctagcactgccgagactgtgctctgagcctccctcccctgcggggccgcggggaggccc

SEQ ID NO: 10286 - DNA, 9567 bp, Homo sapiens
catgccctctgcctgccccctgggagctctcccggcccccccggccctcagctccccttccctgcctgcatggccccacagatacggaggcttctcgctggggggccgagacccaggcctgccctcgggccaagagttgggccgctcagtggaggagttgtgggcgctgctgagtcccctgcctggcggggccctcgaccgtgtcctgaaaaacctcacagcctgggctcacagcctggatgctcaggacagtctcaaggtgggaactgggggggcaggtgggcgtcctgtcacagcaaggtccaaccccattgctctgaccctatgaccttgacccccacccagatctggttcaacaacaaaggctggcactccatggtggcctttgtcaaccgagccagcaacgcaatcctccgtgctcacctgcccccaggcccggcccgccacgcccacagcatcaccacactcaaccaccccttgaacctcaccaaggagcagctgtctgagggtgcactgtgagtccctccaccctgcatgtcctaccctgcacgtcctaccctgcctccatttctctgtcgtttggggtggtgggagctggatttgaaccctgacacactcttgctttataaatgggggatagaaactgttcctctgctccctaagccagggaaatgggacctcctcagactcagcgggccccagcctcccccacacatcctcatcccaccaacctttatcctgcctgagacctgtacaacctctgctgccaaatcccaggcaccctcatccctaaattgcccctgccatctctgccactgctgactgccccatagacctttgtcccatcaatggcgtgttcagctctgctctgagcaacccatgcaccctcaccctacaacagctctcatgtcttcacctccaggatggcctcctcggtggacgtcctcgtctccatctgtgtggtctttgccatgtcctttgtcccggccagcttcactcttgtcctcattgaggagcgagtcacccgagccaagcacctgcagctcatggggggcctgtcccccaccctctactggcttggcaactttctctgggacatggtgcgggggctgcttggacgggtgggggcccagccactgcttgccactgccctgtctggccccttgtaggcaggggcttgtccaagatggcctgggtaaagtcttgaggattgtgggagactttgtgccttcctactcaaaaagcaaggaggtcagggtgggaacagggctgagggtggcagtgcccacctctttaggctgataaaggtaactgccatctccaatgcagtgtaactacttggtgccagcatgcatcgtggtgctcatctttctggccttccagcagagggcatatgtggcccctgccaacctgcctgctctcctgctgttgctactactgtatgggtgaggcccccagtccctcagggcctattcttactgaccccttactgccttccacattaatgctgctgagatagaactctgcagtgactcccaaggagaggatatggaggtctgaggtgatgccgtgtgtgatccaattcagtggtgtgccaaggtggccttaaaagctcatcttatcctgactcatattagtagagttctaaggcagcccatgcctgtaattccagtactttgggaggccgaggcaggaggactgcttgtggccaggagtttgagaccagcctgggaaacatagagagacccacctctaaaaaagaaagaaagagagagaaagagaaagagagaaagaaaaaaaaaaaaacagaaatgtgctttgggtgaaaatgtcaaggtctaaggcagagaagatgggaatggagatttttattcctctcagggcttctcagtctgagtggttactccagtgactcctattgtcccttcagctggtcgatcacaccgctcatgtacccagcctccttcttcttctccgtgcccagcacagcctatgtggtgctcacctgcataaacctctttattggcatcaatggaagcatggccacctttgtgcttgagctcttctctgatcaggtggggcaccacgaggctggggcttgggctgggttgggtcgttggactcagcccctgaccaacatccgtctcccacccttgagcagaagctgcaggaggtgagccggatcttgaaacaggtcttccttatcttcccccacttctgcttgggccgggggctcattgacatggtgcggaaccaggccatggctgatgcctttgagcgcttgggtgagaacttcctgtcaggtggggccatggctacagatagctagcacccttggagacctagagttaattatacagagtggagaaaaacagccccccagggagacagccagggttcttaggtggccctaaggttgggccaagttggaggtacaagaaagcagccataaaaagctaattcttagattacatcacaagaggcctcttctgttttctatgccaattagactccagctgagtggcctatccaatttgtgttcctttcccttaagaatccagagtgacatggatggagaaagggccagaaaccaagactctcatggacccagtccctcctttctatatccacaggagacaggcagttccagtcacccctgcgctgggaggtggtcggcaagaacctcttggccatggtgatacaggggcccctcttccttctcttcacactactgctgcagcaccgaagccaactcctgccacagttagtgaggtctatggagagggtggcaggggccaaggacctactttaagcccacagatattctgtccccaggcccagggtgaggtctctgccactcctgggagaggaggacgaggatgtagcccgtgaacgggagcgggtggtccaaggagccacccagggggatgtgttggtgctgaggaacttgaccaaggtaggtgtggtcaggtcgactgctgggtggggggtgctcccactggcccactcacctttctgaaagacctgcactctcccaggtataccgtgggcagaggatgccagctgttgaccgcttgtgcctggggattccccctggtgaggtgagtccaggggtggaggccaggtgcagggacagtgagtggctgccctactgcatgccctgcccatcatcctttactgaacacctactgtgtatccaccaccttttattgggcacctactgtatgccaatatttgtgctcctatttttattttattatattattatttatttatttatttatttatttatttatttgagatggagtctcactctgtctcccaggctggagtgcagtggtgggatctcagctcactgcaagctccacctcccgggttcatgccattctcctgcctcagcctcccgagtagctgggactgcaggcgcccaccaccacgcccggctaatttttttgtatttttagcagagacggggtttcaccgtgttagccaggatggtctccatctcctgacctcgtgatccacccgcctcagcctcccagagtgctgggattacaagcgtgagccaccacacctgccctattttatctttttttagagacggagtctcactctgtcgcccaggctggagtgcagtggtgagatctcggctcactacaagctccacctcccgggttcacaccattttcctgcctcagcctcccaggtagctgggactgcaggcgcctgccatcacgcctggctaatttttgtatttttagtagagacagggcttcaccatattagccaggatggtctcgatctcctgacctcatgatccacccgcctcagcctcccaaagtgctgggattacaggcgtgagccactgcgtctggcctgtgcatttatcttgagccaacaaaacctcattaagcacctactgcatgcttacctctgttaaacacacactgtgctcactaaagaggtgtactgaatacttttgtgtccatcaacgtttatcaaataccaatagaatttattggacccctattgtatacacatctacatcaagcacttgctcacagccagcatttatcaggcacctgctttgtaccagttcacattcaagcacctactatatacaaatgtatttgctgtgtgccacttattggccacctactagggctggtacacatctgcaaacaagtgctgtttgttagcacacattgcagtatatatatatatttttttttctttttttttcttttgagatggagtctcactgtcacccagcttggtgtgcaatggtgtaatcttggctcacggtaacctccgcctcccaggttcaagcgattctccagcctcagcctcccgagtagctgggaccacaggcacatgccgccatgcccagctgattttgtatttttagtagagacggggtttcaccatgttggccaggctggtcttgcactcctgacctcaaatgatccacccaccttggcctccgaaagttctgggatcacatgtgtgagccaccatgcccggcctttgtttttttctttttttttttttttgagacaaagtctcgctctgccacccaggctggagtgcagtgtcacgatctcggctcactgcaacctctgcctcccaggttcaggcgattctcctgcctcagcctcctgagtagctgggattacaggcgcccgccaccacaaccggctaatttttgtatttttagtagagatggggtttcacaatgttggtcaggctgatcttgaactcttgacctcaggtgatctgcccacctcggcttcccaaagtgctggggttacaggtgtgagccactgggcctggcccacagtatatctttactaagcacctactgtgtgctggccaacctctctaccttgggctgactgtgcacctagcctaagtacacacagtgtgccaggaaacatatggagagctcatgccctgatatttgttgagcactgctgcacacgacctttatagggtacccactgtgtgccaaaagccattccctgctaagtgacagctttatgcctcgctacataccccaatatctgcctagctcccccggggccccacccacggccttccatgtggacactcagaaatcagaggtgctgaggccaggcgtggtggctcacagctgtaaccccagcactttgggaggccaaggcaggaggatcacttgaggtcaggagttcgagaccagcctggccaacatgccaaaaccccgtctctactaaaaatacaaaaattagccgggcttggtggcacacgcctgtagtcccagctactccggagcctgagacaggagaattgcttgaacccaggaggtggaggttgcagtgggccaagatcgtgccattgcgccggggtgacacagcaaggctccgtctcaaaaaaaaaaaaaaaaaaaaaagaggctgggtgccgtggctcacgcctgtaatcccagcactttaggagttcaaggcaggcggatcacaaggtcaagagatcgagaccatcctggccaacacggtgaaaccccatctctactaaaaaaaaatacaaaaattagctgggcatggtggcaggcgtctgtagccccagctacttgggaggctaaggcaggagaattgcttgaacccgggaggcagaggttgcagtgagccaagatcgcaccactgcagtccagcctgggaaacaagagcaaaacttggtctcaaaaaaaaaaaaaaaagaaatcagagatgccggaaccagggcctggggcctcactgagcaccatctgtgggcatccctgtagtgttttgggctgctgggtgtgaatggagcagggaagacgtccacgtttcgcatggtgacgggggacacattggccagcaggggcgaggctgtgctggcaggccacaggtgaggggtgccaggtagggtcagggtggggcagggttggccctgacgtccttgtgcttccccacccctccacctccagtgaatggactgggctcactgccccacacctgcatggtctctgagacccctgcacctctacctcccacacgcggaccaggccctgagacacccctgtcccttatcagcgtggccctggatgggtgggccctgagacccctgtgttagccaccagtatggtcagggactagccagctctctgagcccccggcgcccccatccccagcgtggcccgggaacccagtgctgcgcacctcagcatgggatactgccctcaatccgatgccatctttgagctgctgacgggccgcgagcacctggagctgcttgcgcgcctgcgcggtgtcccggaggcccaggttgcccaggtgagcccactttgtccccaccgctctcacctcccagggcccacccgacccaggccgtgcctctaaagcctggcccaatcccgcactctctcgccttggctccatccctgtccctgcccccagaccgtgcttccttcccctatacctctgtcccccatcctggtccaatagggatgtggctagcccgcctctttgccccgcaacaccaagttccaccattctcattggtccacccacccttccttccgctgcacgttgcccctctctccttgactctgccttctgtggccctgcccacttgctcctcttctgcctaccccctagggcttcgcgcctttctcgctggggtcacggtcacattctcactctggccgttcccagtttgcagccgtttcactgcctcttccatctgcttgggggtcttgtctttgccctggcccgccccaccctcacactgtcccaccccatgccctttctggccctgcctcatacccatgttggctccacccacaccatggccctgctccatacccatcccagctccacccataccaaggccccaccccatactcatgctggctccacccacaccatggccccgccccatactcatgctggctccacccacaccatggccccgccccatactcatgctggctccacccacaccatggccccgccccatactcatgctggctccacccacaccatggccccaccccatactcatgctgtctccacccacaccatggccctgccccatactcatgctggctctacccacaccatggccccgccgcatactcatgctggctccaccagtgtggccccgccccatactcatgctggctccacccacaccatggccccgccccatactcatgctggctccaccagtgtggccccgccccatactcatgctgtctccacccacaccatggccccgccccatactcatgctggctccacccacactatggccctgccccacacccatcccagctccacccacaccatggccccgccccatactcatgctggctccacccacaccatggccccgccccatactcatgctgcccccaccacactatgtcccattctcacatttgccctgccccatgcccattatgcccctgctccacactcaatgctggccccgccacactgtggccctgccccatactcatcaatatgagtccccatgcctactctggccccaccccacagaccgctggctcgggcctggcgcgtctgggactctcatggtacgcagaccggcctgcaggcacctacagcggagggaacaaacgcaagctggcgacggccctggcgctggttggggacccagccgtggtgtttctggtgcgtgggagcggtgcctgggtggggtggggcctgcgacggaggcggggccttgcttatgggatcttccgtgctccccaggacgagccgaccacaggcatggaccccagcgcgcggcgcttcctttggaacagccttttggccgtggtgcgggagggccgttcagtgatgctcacctcccataggtgggccgggctctgatgccctgggctgtggttaaggtgatccaggcctggagagagagccccaaagcacaaggccacaggggatggggggtcctggccctagtggggcgagggcgccaggccccggggtgtaaggacacacagaggtgggacgcggcgccgggatcagaacggtctggggaagagtggggagatgtccacaccagaagggtggcccaggccgggggaagcaggcagtgtggcgccaggcacaggtggccccggcctcacggagctcgtggtgccgggtcccgacagcatggaggagtgtgaagcgctctgctcgcgcctggccatcatggtgaatgggcggttccgctgcctgggcagcccgcaacatctcaagggcaggtgagccggcgcggcctccaggcaggtgtggggtgagggtgggcacgtaggtaggctcaggggagaggccagacgtagagccgggtgaggaaagtttggctccaactggagagatggccaaggctttagattgtcctgcaggggtgactgagggggcgagacaggctggggtgtgctgggggcgcaggaccaggaggcgtgagccgggggctctgggtggatttagaagacacaatcaggtgtgcgttggagtaggtgcagcctggagaggtgagggtggattgatgggtggagttaggggagggcctggttagtgggcggggccataggaaagtggggcgggggtatttattgtgtgggcgggggtagagtgcaagggcgaaagaggagtgtccgaaaaaggagtcaagtggggtgatagcttcgagagcaacctgggcaacctagggagaccccatctctataaaaaatttaaaaattagctggacatggtggtgtgtgcctgtggtctcagctacgcgggcggggggtggcgggggactgagacgggaggaccacttgatcgctagggtagtacaagtatggggcggggccagagagtattaggggctggagggtgagctgaggtgggacctgggaaaggcccgatccggtagccctggccccactcactgcagattcgcggcgggtcacacactgaccctgcgggtgcccgccgcaaggtcccagccggcagcggccttcgtggcggccgagttccctggggcggagctgcgcgaggcacatggaggccgcctgcgcttccagctgccgccgggagggcgctgcgccctggcgcgcgtctttggagagctggcggtgcacggcgcagagcacggcgtggaggacttttccgtgagccagacgatgctggaggaggtgatcacggcgccggggtcgggctgggggaggcaggctgggggccaggcccgtgggctgaccgtccctcttgtcccctctgggctgcccaccgctaggtattcttgtacttctccaaggaccaggggaaggacgaggacaccgaagagcagaaggaggcaggagtgggagtggaccccgcgccaggcctgcagcaccccaaacgcgtcagccagttcctcgatgaccctagcactgccgagactgtgctctgagcctccctcccctgcggggccgcggggaggccctgggaatggcaagggcaaggtagagtgcctaggagccctggactcaggctggcagaggggctggtgccctggagaaaataaagagaaggctgg

SEQ ID NO: 10287 - DNA, 3855 bp, Homo sapiens
catgccctctgcctgccccctgggagctctcccggcccccccggccctcagctccccttccctgcctgcatggccccacagatacggaggcttctcgctggggggccgagacccaggcctgccctcgggccaagagttgggccgctcagtggaggagttgtgggcgctgctgagtcccctgcctggcggggccctcgaccgtgtcctgaaaaacctcacagcctgggctcacagcctggatgctcaggacagtctcaagatctggttcaacaacaaaggctggcactccatggtggcctttgtcaaccgagccagcaacgcaatcctccgtgctcacctgcccccaggcccggcccgccacgcccacagcatcaccacactcaaccaccccttgaacctcaccaaggagcagctgtctgagggtgcactgatggcctcctcggtggacgtcctcgtctccatctgtgtggtctttgccatgtcctttgtcccggccagcttcactcttgtcctcattgaggagcgagtcacccgagccaagcacctgcagctcatggggggcctgtcccccaccctctactggcttggcaactttctctgggacatggtgcgggggctgcttggacgggtgggggcccagccactgcttgccactgccctgtctggccccttgtaggcaggggcttgtccaagatggcctgggtaaagtcttgaggattgtgggagactttgtgccttcctactcaaaaagcaaggaggtcagggtgggaacagggctgagggtggcagtgcccacctctttaggctgataaaggtaactgccatctccaatgcagtgtaactacttggtgccagcatgcatcgtggtgctcatctttctggccttccagcagagggcatatgtggcccctgccaacctgcctgctctcctgctgttgctactactgtatgggtgaggcccccagtccctcagggcctattcttactgaccccttactgccttccacattaatgctgctgagatagaactctgcagtgactcccaaggagaggatatggaggtctgaggtgatgccgtgtgtgatccaattcagtggtgtgccaaggtggccttaaaagctcatcttatcctgactcatattagtagagttctaaggcagcccatgcctgtaattccagtactttgggaggccgaggcaggaggactgcttgtggccaggagtttgagaccagcctgggaaacatagagagacccacctctaaaaaagaaagaaagagagagaaagagaaagagagaaagaaaaaaaaaaaaacagaaatgtgctttgggtgaaaatgtcaaggtctaaggcagagaagatgggaatggagatttttattcctctcagggcttctcagtctgagtggttactccagtgactcctattgtcccttcagctggtcgatcacaccgctcatgtacccagcctccttcttcttctccgtgcccagcacagcctatgtggtgctcacctgcataaacctctttattggcatcaatggaagcatggccacctttgtgcttgagctcttctctgatcaggtggggcaccacgaggctggggcttgggctgggttgggtcgttggactcagcccctgaccaacatccgtctcccacccttgagcagaagctgcaggaggtgagccggatcttgaaacaggtcttccttatcttcccccacttctgcttgggccgggggctcattgacatggtgcggaaccaggccatggctgatgcctttgagcgcttgggtgagaacttcctgtcaggtggggccatggctacagatagctagcacccttggagacctagagttaattatacagagtggagaaaaacagccccccagggagacagccagggttcttaggtggccctaaggttgggccaagttggaggtacaagaaagcagccataaaaagctaattcttagattacatcacaagaggcctcttctgttttctatgccaattagactccagctgagtggcctatccaatttgtgttcctttcccttaagaatccagagtgacatggatggagaaagggccagaaaccaagactctcatggacccagtccctcctttctatatccacaggagacaggcagttccagtcacccctgcgctgggaggtggtcggcaagaacctcttggccatggtgatacaggggcccctcttccttctcttcacactactgctgcagcaccgaagccaactcctgccacagcccagggtgaggtctctgccactcctgggagaggaggacgaggatgtagcccgtgaacgggagcgggtggtccaaggagccacccagggggatgtgttggtgctgaggaacttgaccaaggtataccgtgggcagaggatgccagctgttgaccgcttgtgcctggggattccccctggtgagtgttttgggctgctgggtgtgaatggagcagggaagacgtccacgtttcgcatggtgacgggggacacattggccagcaggggcgaggctgtgctggcaggccacagcgtggcccgggaacccagtgctgcgcacctcagcatgggatactgccctcaatccgatgccatctttgagctgctgacgggccgcgagcacctggagctgcttgcgcgcctgcgcggtgtcccggaggcccaggttgcccagaccgctggctcgggcctggcgcgtctgggactctcatggtacgcagaccggcctgcaggcacctacagcggagggaacaaacgcaagctggcgacggccctggcgctggttggggacccagccgtggtgtttctggacgagccgaccacaggcatggaccccagcgcgcggcgcttcctttggaacagccttttggccgtggtgcgggagggccgttcagtgatgctcacctcccataggtgggccgggctctgatgccctgggctgtggttaaggtgatccaggcctggagagagagccccaaagcacaaggccacaggggatggggggtcctggccctagtggggcgagggcgccaggccccggggtgtaaggacacacagaggtgggacgcggcgccgggatcagaacggtctggggaagagtggggagatgtccacaccagaagggtggcccaggccgggggaagcaggcagtgtggcgccaggcacaggtggccccggcctcacggagctcgtggtgccgggtcccgacagcatggaggagtgtgaagcgctctgctcgcgcctggccatcatggtgaatgggcggttccgctgcctgggcagcccgcaacatctcaagggcagattcgcggcgggtcacacactgaccctgcgggtgcccgccgcaaggtcccagccggcagcggccttcgtggcggccgagttccctggggcggagctgcgcgaggcacatggaggccgcctgcgcttccagctgccgccgggagggcgctgcgccctggcgcgcgtctttggagagctggcggtgcacggcgcagagcacggcgtggaggacttttccgtgagccagacgatgctggaggaggtattcttgtacttctccaaggaccaggggaaggacgaggacaccgaagagcagaaggaggcaggagtgggagtggaccccgcgccaggcctgcagcaccccaaacgcgtcagccagttcctcgatgaccctagcactgccgagactgtgctctgagcctccctcccctgcggggccgcggggaggccctgggaatggcaagggcaaggtagagtgcctaggagccctggactcaggctggcagaggggctggtgccctggagaaaataaagagaaggctgg

SEQ ID NO: 10288 - DNA, 5693 bp, Homo sapiens
ctgcccgccgctgggtccgaccgcgctcgccttccttgcagccgcgcctcggccccatggacgccctgtgcggttccggggagctcggctccaagttctgggactccaacctgtctgtgcacacagaaaacccggacctcactccctgcttccagaactccctgctggcctgggtgccctgcatctacctgtgggtcgccctgccctgctacttgctctacctgcggcaccattgtcgtggctacatcatcctctcccacctgtccaagctcaagatggtcctgggtgtcctgctgtggtgcgtctcctgggcggaccttttttactccttccatggcctggtccatggccgggcccctgcccctgttttctttgtcacccccttggtggtgggggtcaccatgctgctggccaccctgctgatacagtatgagcggctgcagggcgtacagtcttcgggggtcctcattatcttctggttcctgtgtgtggtctgcgccatcgtcccattccgctccaagatccttttagccaaggcagagggtgagatctcagaccccttccgcttcaccaccttctacatccactttgccctggtactctctgccctcatcttggcctgcttcagggagaaacctccatttttctccgcaaagaatgtcgaccctaacccctaccctgagaccagcgctggctttctctcccgcctgtttttctggtggttcacaaagatggccatctatggctaccggcatcccctggaggagaaggacctctggtccctaaaggaagaggacagatcccagatggtggtgcagcagctgctggaggcatggaggaagcaggaaaagcagacggcacgacacaaggcttcagcagcacctgggaaaaatgcctccggcgaggacgaggtgctgctgggtgcccggcccaggccccggaagccctccttcctgaaggccctgctggccaccttcggctccagcttcctcatcagtgcctgcttcaagcttatccaggacctgctctccttcatcaatccacagctgctcagcatcctgatcaggtttatctccaaccccatggccccctcctggtggggcttcctggtggctgggctgatgttcctgtgctccatgatgcagtcgctgatcttacaacactattaccactacatctttgtgactggggtgaagtttcgtactgggatcatgggtgtcatctacaggaaggctctggttatcaccaactcagtcaaacgtgcgtccactgtgggggaaattgtcaacctcatgtcagtggatgcccagcgcttcatggaccttgcccccttcctcaatctgctgtggtcagcacccctgcagatcatcctggcgatctacttcctctggcagaacctaggtccctctgtcctggctggagtcgctttcatggtcttgctgattccactcaacggagctgtggccgtgaagatgcgcgccttccaggtaaagcaaatgaaattgaaggactcgcgcatcaagctgatgagtgagatcctgaacggcatcaaggtgctgaagctgtacgcctgggagcccagcttcctgaagcaggtggagggcatcaggcagggtgagctccagctgctgcgcacggcggcctacctccacaccacaaccaccttcacctggatgtgcagccccttcctggtgaccctgatcaccctctgggtgtacgtgtacgtggacccaaacaatgtgctggacgccgagaaggcctttgtgtctgtgtccttgtttaatatcttaagacttcccctcaacatgctgccccagttaatcagcaacctgactcaggccagtgtgtctctgaaacggatccagcaattcctgagccaagaggaacttgacccccagagtgtggaaagaaagaccatctccccaggctatgccatcaccatacacagtggcaccttcacctgggcccaggacctgccccccactctgcacagcctagacatccaggtcccgaaaggggcactggtggccgtggtggggcctgtgggctgtgggaagtcctccctggtgtctgccctgctgggagagatggagaagctagaaggcaaagtgcacatgaagggctccgtggcctatgtgccccagcaggcatggatccagaactgcactcttcaggaaaacgtgcttttcggcaaagccctgaaccccaagcgctaccagcagactctggaggcctgtgccttgctagctgacctggagatgctgcctggtggggatcagacagagattggagagaagggcattaacctgtctgggggccagcggcagcgggtcagtctggctcgagctgtttacagtgatgccgatattttcttgctggatgacccactgtccgcggtggactctcatgtggccaagcacatctttgaccacgtcatcgggccagaaggcgtgctggcaggcaagacgcgagtgctggtgacgcacggcattagcttcctgccccagacagacttcatcattgtgctagctgatggacaggtgtctgagatgggcccgtacccagccctgctgcagcgcaacggctcctttgccaactttctctgcaactatgcccccgatgaggaccaagggcacctggaggacagctggaccgcgttggaaggtgcagaggataaggaggcactgctgattgaagacacactcagcaaccacacggatctgacagacaatgatccagtcacctatgtggtccagaagcagtttatgagacagctgagtgccctgtcctcagatggggagggacagggtcggcctgtaccccggaggcacctgggtccatcagagaaggtgcaggtgacagaggcgaaggcagatggggcactgacccaggaggagaaagcagccattggcactgtggagctcagtgtgttctgggattatgccaaggccgtggggctctgtaccacgctggccatctgtctcctgtatgtgggtcaaagtgcggctgccattggagccaatgtgtggctcagtgcctggacaaatgatgccatggcagacagtagacagaacaacacttccctgaggctgggcgtctatgctgctttaggaattctgcaagggttcttggtgatgctggcagccatggccatggcagcgggtggcatccaggctgcccgtgtgttgcaccaggcactgctgcacaacaagatacgctcgccacagtccttctttgacaccacaccatcaggccgcatcctgaactgcttctccaaggacatctatgtcgttgatgaggttctggcccctgtcatcctcatgctgctcaattccttcttcaacgccatctccactcttgtggtcatcatggccagcacgccgctcttcactgtggtcatcctgcccctggctgtgctctacaccttagtgcagcgcttctatgcagccacatcacggcaactgaagcggctggaatcagtcagccgctcacctatctactcccacttttcggagacagtgactggtgccagtgtcatccgggcctacaaccgcagccgggattttgagatcatcagtgatactaaggtggatgccaaccagagaagctgctacccctacatcatctccaaccggtggctgagcatcggagtggagttcgtggggaactgcgtggtgctctttgctgcactatttgccgtcatcgggaggagcagcctgaacccggggctggtgggcctttctgtgtcctactccttgcaggtgacatttgctctgaactggatgatacgaatgatgtcagatttggaatctaacatcgtggctgtggagagggtcaaggagtactccaagacagagacagaggcgccctgggtggtggaaggcagccgccctcccgaaggttggcccccacgtggggaggtggagttccggaattattctgtgcgctaccggccgggcctagacctggtgctgagagacctgagtctgcatgtgcacggtggcgagaaggtggggatcgtgggccgcactggggctggcaagtcttccatgaccctttgcctgttccgcatcctggaggcggcaaagggtgaaatccgcattgatggcctcaatgtggcagacatcggcctccatgacctgcgctctcagctgaccatcatcccgcaggaccccatcctgttctcggggaccctgcgcatgaacctggaccccttcggcagctactcagaggaggacatttggtgggctttggagctgtcccacctgcacacgtttgtgagctcccagccggcaggcctggacttccagtgctcagagggcggggagaatctcagcgtgggccagaggcagctcgtgtgcctggcccgagccctgctccgcaagagccgcatcctggttttagacgaggccacagctgccatcgacctggagactgacaacctcatccaggctaccatccgcacccagtttgatacctgcactgtcctgaccatcgcacaccggcttaacactatcatggactacaccagggtcctggtcctggacaaaggagtagtagctgaatttgattctccagccaacctcattgcagctagaggcatcttctacgggatggccagagatgctggacttgcctaaaatatattcctgagatttcctcctggcctttcctggttttcatcaggaaggaaatgacaccaaatatgtccgcagaatggacttgatagcaaacactgggggcaccttaagattttgcacctgtaaagtgccttacagggtaactgtgctgaatgctttagatgaggaaatgatccccaagtggtgaatgacacgcctaaggtcacagctagtttgagccagttagactagtccccggtctcccgattcccaactgagtgttatttgcacactgcactgttttcaaataacgattttatgaaatgacctctgtcctccctctgatttttcatattttctaaagtttcgtttctgttttttaataaaaagctttttcctcctggaacagaagacagctgctgggtcaggccacccctaggaactcagtcctgtactctggggtgctgcctgaatccattaaaaatgggagtactgatgaaataaaactacatggtcaacagtatatacacagtagtctttttgcacttgttcacaaggtttggggattaggatctttggaggaggccaagaggaagactttctacacatgtacatggttgtagttacctgaacttcagacccaagagctcttggctgcaaatattgccttcacagccaaaattccctgggtaattgccagtagctcctgctctgctgtgcagatattgtaaaacggtgagaaaggccctgaaatctgacctggggcctcttgggaaagctgctgtgaacacctccacgttaatgtcatccctcagccctctatgcctgtttctctagggactgagaagtgcatgatgcttttacttccttgctcatttcgaagtctgttccagacagttcctataaccagtgaggcctccaagtcattcattttcctcagtctagccaaagctgaatgtgtgagcacaaagaagccgagaggccacctcctgcccagagagaagccacccacactcccaggttggcagacaagatgtgaggggtgaattaaatttgttttcttgagcaagccaa

SEQ ID NO: 10289 - DNA, 1881 bp, Homo sapiens
gcggaggcggctccggcgcccgctctgcccgccgctgggtccgaccgcgctcgccttccttgcagccgcgcctcggccccatggacgccctgtgcggttccggggagctcggctccaagttctgggactccaacctgtctgtgcacacagaaaacccggacctcactccctgcttccagaactccctgctggcctgggtgccctgcatctacctgtgggtcgccctgccctgctacttgctctacctgcggcaccattgtcgtggctacatcatcctctcccacctgtccaagctcaagatggtcctgggtgtcctgctgtggtgcgtctcctgggcggaccttttttactccttccatggcctggtccatggccgggcccctgcccctgttttctttgtcacccccttggtggtgggggtcaccatgctgctggccaccctgctgatacagtatgagcggctgcagggcgtacagtcttcgggggtcctcattatcttctggttcctgtgtgtggtctgcgccatcgtcccattccgctccaagatccttttagccaaggcagagggtgagatctcagaccccttccgcttcaccaccttctacatccactttgccctggtactctctgccctcatcttggcctgcttcagggagaaacctccatttttctccgcaaagaatgtcgaccctaacccctaccctgagaccagcgctggctttctctcccgcctgtttttctggtggttcacaaagatggccatctatggctaccggcatcccctggaggagaaggacctctggtccctaaaggaagaggacagatcccagatggtggtgcagcagctgctggaggcatggaggaagcaggaaaagcagacggcacgacacaaggcttcagcagcacctgggaaaaatgcctccggcgaggacgaggtgctgctgggtgcccggcccaggccccggaagccctccttcctgaaggccctgctggccaccttcggctccagcttcctcatcagtgcctgcttcaagcttatccaggacctgctctccttcatcaatccacagctgctcagcatcctgatcaggtttatctccaaccccatggccccctcctggtggggcttcctggtggctgggctgatgttcctgtgctccatgatgcagtcgctgatcttacaacactattaccactacatctttgtgactggggtgaagtttcgtactgggatcatgggtgtcatctacaggaaggctctggttatcaccaactcagtcaaacgtgcgtccactgtgggggaaattgtcaacctcatgtcagtggatgcccagcgcttcatggaccttgcccccttcctcaatctgctgtggtcagcacccctgcagatcatcctggcgatctacttcctctggcagaacctaggtccctctgtcctggctggagtcgctttcatggtcttgctgattccactcaacggagctgtggccgtgaagatgcgcgccttccaggtaaagcaaatgaaattgaaggactcgcgcatcaagctgatgagtgagatcctgaacggcatcaaggtgctgaagctgtacgcctgggagcccagcttcctgaagcaggtggagggcatcaggcagggtgagctccagctgctgcgcacggcggcctacctccacaccacaaccaccttcacctggatgtgcagccccttcctggtgaggcttggcacagggctgggtccctgcctccagggctctgggtgcccaggcatggccagggctcattggactctaccctgacaccacctccacgctgctcaggtgaccctgatcaccctctgggtgtacgtgtacgtggacccaaacaatgtgctggacgccg

SEQ ID NO: 10290 - DNA, 5326 bp, Homo sapiens
ccgcgctcgccttccttgcagccgcgcctcggccccatggacgccctgtgcggttccggggagctcggctccaagttctgggactccaacctgtctgtgcacacagaaaacccggacctcactccctgcttccagaactccctgctggcctgggtgccctgcatctacctgtgggtcgccctgccctgctacttgctctacctgcggcaccattgtcgtggctacatcatcctctcccacctgtccaagctcaagatggtcctgggtgtcctgctgtggtgcgtctcctgggcggaccttttttactccttccatggcctggtccatggccgggcccctgcccctgttttctttgtcacccccttggtggtgggggtcaccatgctgctggccaccctgctgatacagtatgagcggctgcagggcgtacagtcttcgggggtcctcattatcttctggttcctgtgtgtggtctgcgccatcgtcccattccgctccaagatccttttagccaaggcagagggtgagatctcagaccccttccgcttcaccaccttctacatccactttgccctggtactctctgccctcatcttggcctgcttcagggagaaacctccatttttctccgcaaagaatgtcgaccctaacccctaccctgagaccagcgctggctttctctcccgcctgtttttctggtggttcacaaagctgctaaaccctgaccctctgcggggctgcctgccgggcttcacctccccccaggatggccatctatggctaccggcatcccctggaggagaaggacctctggtccctaaaggaagaggacagatcccagatggtggtgcagcagctgctggaggcatggaggaagcaggaaaagcagacggcacgacacaaggcttcagcagcacctgggaaaaatgcctccggcgaggacgaggtgctgctgggtgcccggcccaggccccggaagccctccttcctgaaggccctgctggccaccttcggctccagcttcctcatcagtgcctgcttcaagcttatccaggacctgctctccttcatcaatccacagctgctcagcatcctgatcaggtttatctccaaccccatggccccctcctggtggggcttcctggtggctgggctgatgttcctgtgctccatgatgcagtcgctgatcttacaacactattaccactacatctttgtgactggggtgaagtttcgtactgggatcatgggtgtcatctacaggaaggctctggttatcaccaactcagtcaaacgtgcgtccactgtgggggaaattgtcaacctcatgtcagtggatgcccagcgcttcatggaccttgcccccttcctcaatctgctgtggtcagcacccctgcagatcatcctggcgatctacttcctctggcagaacctaggtccctctgtcctggctggagtcgctttcatggtcttgctgattccactcaacggagctgtggccgtgaagatgcgcgccttccaggtaaagcaaatgaaattgaaggactcgcgcatcaagctgatgagtgagatcctgaacggcatcaaggtgctgaagctgtacgcctgggagcccagcttcctgaagcaggtggagggcatcaggcagggtgagctccagctgctgcgcacggcggcctacctccacaccacaaccaccttcacctggatgtgcagccccttcctggtgaccctgatcaccctctgggtgtacgtgtacgtggacccaaacaatgtgctggacgccgagaaggcctttgtgtctgtgtccttgtttaatatcttaagacttcccctcaacatgctgccccagttaatcagcaacctgactcaggccagtgtgtctctgaaacggatccagcaattcctgagccaagaggaacttgacccccagagtgtggaaagaaagaccatctccccaggctatgccatcaccatacacagtggcaccttcacctgggcccaggacctgccccccactctgcacagcctagacatccaggtcccgaaaggggcactggtggccgtggtggggcctgtgggctgtgggaagtcctccctggtgtctgccctgctgggagagatggagaagctagaaggcaaagtgcacatgaagggctccgtggcctatgtgccccagcaggcatggatccagaactgcactcttcaggaaaacgtgcttttcggcaaagccctgaaccccaagcgctaccagcagactctggaggcctgtgccttgctagctgacctggagatgctgcctggtggggatcagacagagattggagagaagggcattaacctgtctgggggccagcggcagcgggtcagtctggctcgagctgtttacagtgatgccgatattttcttgctggatgacccactgtccgcggtggactctcatgtggccaagcacatctttgaccacgtcatcgggccagaaggcgtgctggcaggcaagacgcgagtgctggtgacgcacggcattagcttcctgccccagacagacttcatcattgtgctagctgatggacaggtgtctgagatgggcccgtacccagccctgctgcagcgcaacggctcctttgccaactttctctgcaactatgcccccgatgaggaccaagggcacctggaggacagctggaccgcgttggaaggtgcagaggataaggaggcactgctgattgaagacacactcagcaaccacacggatctgacagacaatgatccagtcacctatgtggtccagaagcagtttatgagacagctgagtgccctgtcctcagatggggagggacagggtcggcctgtaccccggaggcacctgggtccatcagagaaggtgcaggtgacagaggcgaaggcagatggggcactgacccaggaggagaaagcagccattggcactgtggagctcagtgtgttctgggattatgccaaggccgtggggctctgtaccacgctggccatctgtctcctgtatgtgggtcaaagtgcggctgccattggagccaatgtgtggctcagtgcctggacaaatgatgccatggcagacagtagacagaacaacacttccctgaggctgggcgtctatgctgctttaggaattctgcaagggttcttggtgatgctggcagccatggccatggcagcgggtggcatccaggctgcccgtgtgttgcaccaggcactgctgcacaacaagatacgctcgccacagtccttctttgacaccacaccatcaggccgcatcctgaactgcttctccaaggacatctatgtcgttgatgaggttctggcccctgtcatcctcatgctgctcaattccttcttcaacgccatctccactcttgtggtcatcatggccagcacgccgctcttcactgtggtcatcctgcccctggctgtgctctacaccttagtgcagcgcttctatgcagccacatcacggcaactgaagcggctggaatcagtcagccgctcacctatctactcccacttttcggagacagtgactggtgccagtgtcatccgggcctacaaccgcagccgggattttgagatcatcagtgatactaaggtggatgccaaccagagaagctgctacccctacatcatctccaaccggtcagaagccgcctccctcgctccctgctcctccaggaattcccagcaggctctctggtgttcagggtccttgtccctcctttcccctaagcagaaaactggccctgccctgcccctgccccatttcctcctcatctgatcccccataggtggctgagcatcggagtggagttcgtggggaactgcgtggtgctctttgctgcactatttgccgtcatcgggaggagcagcctgaacccggggctggtgggcctttctgtgtcctactccttgcaggtgacatttgctctgaactggatgatacgaatgatgtcagatttggaatctaacatcgtggctgtggagagggtcaaggagtactccaagacagagacagaggcgccctgggtggtggaaggcagccgccctcccgaaggttggcccccacgtggggaggtggagttccggaattattctgtgcgctaccggccgggcctagacctggtgctgagagacctgagtctgcatgtgcacggtggcgagaaggtggggatcgtgggccgcactggggctggcaagtcttccatgaccctttgcctgttccgcatcctggaggcggcaaagggtgaaatccgcattgatggcctcaatgtggcagacatcggcctccatgacctgcgctctcagctgaccatcatcccgcaggaccccatcctgttctcggggaccctgcgcatgaacctggaccccttcggcagctactcagaggaggacatttggtgggctttggagctgtcccacctgcacacgtttgtgagctcccagccggcaggcctggacttccagtgctcagagggcggggagaatctcagcgtgggccagaggcagctcgtgtgcctggcccgagccctgctccgcaagagccgcatcctggttttagacgaggccacagctgccatcgacctggagactgacaacctcatccaggctaccatccgcacccagtttgatacctgcactgtcctgaccatcgcacaccggcttaacactatcatggactacaccagggtcctggtcctggacaaaggagtagtagctgaatttgattctccagccaacctcattgcagctagaggcatcttctacgggatggccagagatgctggacttgcctaaaatatattcctgagatttcctcctggcctttcctggttttcatcaggaaggaaatgacaccaaatatgtccgcagaatggacttgatagcaaacactgggggcaccttaagattttgcacctgtaaagtgccttacagggtaactgtgctgaatgctttagatgaggaaatgatccccaagtggtgaatgacacgcctaaggtcacagctagtttgagccagttagactagtccccggtctcccgattcccaactgagtgttatttgcacactgcactgttttcaaataacgattttatgaaatgacctctgtcctccctctgatttttcatattttctaaagtttcgtttctgttttttaataaaaagctttttcctcctggaacagaagacagctgctgggtcaggccacccctaggaactcagtcctgtactctggggtgctgcctgaatccattaaaaatgggagtactgatgaaataaaactacatggtcaacagta

SEQ ID NO: 10291 - DNA, 4691 bp, Homo sapiens
gccagtgtgtctctgaaacggatccagcaattcctgagccaagaggaacttgacccccagagtgtggaaagaaagaccatctccccaggtctagagagcccctacctgggctgcctgccccagtccttgctccagaaaaacctctgtttcaagcttttcctttgttctctcctgaccccttttcttcttcctctgttcacatctgcttcgactctgacctcctccctcttccgggttctctgctctcctccgccctcctccacagggctccccacatccctttcttcctcccttttcccaaggatcccctccccatggcccaggctcctcccctgtcctcctttcccctgccccccagcctccctgcaggctaccccatcccttgagctccctccctgaccctgcccaccttggtcctctcaggctatgccatcaccatacacagtggcaccttcacctgggcccaggacctgccccccactctgcacaggtaccagcttctcccactcccttcccagctgcccacggtgggctggaagttcagatcaatagcagcaccctgcaaagcctttgaccaagaatgcaggaagagcttcagcctgccaggggggtgtctggaagggcggagggcttggttctgcaggtggagggttggagaccaaaaccctgatccctgcctctaactggactcctggggtccttgcccccagcctagacatccaggtcccgaaaggggcactggtggccgtggtggggcctgtgggctgtgggaagtcctccctggtgtctgccctgctgggagagatggagaagctagaaggcaaagtgcacatgaaggtgagagaggcaggggctcctgggcagggtgtggggctcagccaggccttgggcaagccccgaggtaaatttctcctgtggccagggctccgtggcctatgtgccccagcaggcatggatccagaactgcactcttcaggaaaacgtgcttttcggcaaagccctgaaccccaagcgctaccagcagactctggaggcctgtgccttgctagctgacctggagatgctgcctggtggggatcagacagagattggagagaaggtacagagtcctcttccatccctaagaggctagggcatagagctgcccacctcaacccagcccaggtccatatattcatcccttcattcacacattggtgtaacgttatgcccaactctgtgccaggcactggggaaacagatctattagcagatctgtttagtgaacaagtaggaactattgaatattctaggagccaggctgaaggcctgtgcagggtacagggagggcacagcagggagcctacataaggaagagcatcactttttttttttctttctttctgagataaggcctcactctgttgcccaggatggagtgccatggtgacatcatgggacgctgcagcttggaactcctgggctcaagtgatcctctcgcctcagcctcctgagtatctgggaccacaggcacatgccaccatacccagctaaatttttaattttttttagagacagcgtcttgccatgtcgcccaggctggctcaggagatcctcccaccctggcctcccagagtactgggattacaggcatgagctgctgcacctggctgagcatcactttttttttttagacagagccttgctctgtcacccaggctggagtgcagtggcgcagatcatggctcactgcaacctccacctcccgggttcaagcaattctcgtgtctcagccacccgagtagctgggattacgggtgcgcaccaccacacttggctaatttttgtgtttttagtacagacggggttttgccatgttggcccatctggtcttgaactcctggcttcaagtgatccccccgcctcagcctctcaaagtgctgggattacaggcatgagcaccgtgcctagccttaagcatcacttttgacctcagttttaacaactgaggaggaggagctcatcatgtatctgttcattcatttaccatatatttattaagcacccactctattctgggaaatagtatacagtagtgaatactaaaatgccgggctaatatctctaccttcatatagctcacattctagtggcaggaagagataataagtaagataaataagtacaatatataatatgttagataaatgctcagtggaaaaaataaagcggggaaggaatacaggaatgcctgcagagttgaatggttaaggtagcttgggaaatcctcactgagaatcagagaactcaacaaagagaccgagtgagccttgtctggagccagaaagctctgtctggggccatggaaccctgtatggggtcttggagttctctggcatgactaggagttgggaaatggagggaaaagatagagagaggcagaaccctgattaccttggttaagattttggcctttactctaaaaaacatggaacactggggaaaatttggggctttgctttttaacaatttttaactgtggtaaaaaccacacataacataaaatatatcatcttgcccggcatggtggctcccagcactctgggaggctgaggcaggtgtatcatttgaggtaaggagttcaaggccagccttgctaacatgataaaaccccatctctactagaaatacaaacaaattagccgagtgtgatggcgtgtgcctgtagtcccagctactcaggaggctgaggcaggagcattgcgtaagcccaggaggcggaggttgcaatgaactgagattgattgtatcactgcattccagcctgggcgacagagcaagactctgtcttaaaaaaaaaaaaaagaaaaaaaaacttaatcatttcttagtgtacagttcagcaatgttaagtacatttacattgctgtgcaaccgatctccagaaccttttcatcttgcaaaactaaaattgtgcctattaagcaactcctcattccccactgcccctaggccccagtaaccaccattctattttctgttcctaggaatttgactacttagtatcttagtccattttctattgcttataagagaatgcctgaaactaggtaatttataaagaaaagaaatgtattttgtacagttacggaggctgaagagtccacggtccaggggctgcatctggagagggcctccttgttggcggggagtctgcagagtcccaaggccatacagggcatcccatggcaaggggaccgagcatgctagctcaggtctctcttccttccttccttttttttttttttttttttttttttttttgagacaaggcttcactctgttgcccagactgtagattggagtacagcggcgtgatcttggctcactgcaacctccgcctcccaggttcaaacgattctccttcctcagcctcccgaatagctgggattacaggcgcacgcaactacagcccgactaatttttgtatttttagtagagatgggtttcaccatattggccatgctggtcttgaactcctgacttcaaatgatccacccacctcgacctcccaaattgctgggattacaggcatgagccaccacgcgcgacctcaggtttctctttctttcttataaagccaccggtcccactcccccagtaacccattcacgcatcaacctattaatccataaatggatcaaccattcatgagggctctgttttcatgacctaatcacctggtaaatgccacccctcaatcctgccacactggggggtaagtttcaacatgcactttggaaggaacaaatatttcaaccatatcacctaggtacctcacgtaagtggaatcatccagcatttgtcttttcgtgacgggcttatttcacttagcataatgtcctcaaggcatatccatgttgtagcatgtgtcagaatttccctccttgtaaggctgaatgatatttcattataggtatatacacatttgtgtgcccatttatccgtagatgggttgggcaggacaccaagctgggcagggtggtgaccaatggagcagaatggcctcacctgccccaggaggacttaccctttacctctgtccctcacagcattgcagggacagactaggccccatgtgaaatatagattcagaagactgctgttctggtcaggcacagtggctcacacctgtaatcccagcactttactttgggaggctgacgtgggccaattgcttgagctcaggagttggagaccaggctgggcaacatatggagattctgtctctataaaaaataaaacattttagtcagtagccaggcatggtggtcctgcaatcaatcctagctactcgggaggctgaggcatgagaattgctcaaacgcgagaggcagaggttgcagtgagccaagatcgcaccactgcactccagcctgggtgagtgagaccccatctcaggaaaaaaaaaaaaaaatctgccatcccaaataacagtggacaggccgttgtctccctgtgcctgtctgaccccatttttcccaccccccgcctccctccagggcattaacctgtctgggggccagcggcagcgggtcagtctggctcgagctgtttacagtgatgccgatattttcttgctggatgacccactgtccgcggtggactctcatgtggccaagcacatctttgaccacgtcatcgggccagaa

SEQ ID NO: 10292 - DNA, 542 bp, Homo sapiens
gccagtgtgtctctgaaacggatccagcaattcctgagccaagaggaacttgacccccagagtgtggaaagaaagaccatctccccagcctagacatccaggtcccgaaaggggcactggtggccgtggtggggcctgtgggctgtgggaagtcctccctggtgtctgccctgctgggagagatggagaagctagaaggcaaagtgcacatgaagggctccgtggcctatgtgccccagcaggcatggatccagaactgcactcttcaggaaaacgtgcttttcggcaaagccctgaaccccaagcgctaccagcagactctggaggcctgtgccttgctagctgacctggagatgctgcctggtggggatcagacagagattggagagaagggcattaacctgtctgggggccagcggcagcgggtcagtctggctcgagctgtttacagtgatgccgatattttcttgctggatgacccactgtccgcggtggactctcatgtggccaagcacatctttgaccacgtcatcgggccagaa

SEQ ID NO: 10293 - DNA, 12801 bp, Homo sapiens
gacagagcgagactccatctcaagagagaaaaaaaaaaagtccagaggagttttcttgctttggggtgttgtagaaatgatcttggagcttagccccaaaggacaaacagaatttctcttgtctctgggcaagttgtaggctcatgtgacaggtcaggacagtgtagggctggcataccgctcgctcacgttcacatgcttgcagagaacgtacacagacgaggtgactgaagcctggtctgcaggtcaggcaggtcatcctgatgccagcttgtactgtcaaagagtcacctaactgcaaacggaatttttgtaaagcagatcacattgttaatacctcaggtggctcaaaccttgaacgcgttggcaaacaaaaaacaatccagaaaggtcaattttcacaaaggtcagtgtgcacatgaatctacttgttaaaatgtacattttgattcagtagacctaggatggggctcaggactctgcactttgatcaagactccttggtacgcaaagtgtggcccatgggccagttgcatcaccatcctctgggagcttgttagaaatgaagaatctcaggttccaagtcccacctcagactacagaatccggcgttgcattttaacaagattctctgggaagtcttatacatattaaagttggagaaacagaaaccaaggcgaggtggtccttggttaagtctgcactgtcactgcccaagggagtcattcgtgattacagccccagctggcatgcctgtgggcttgatccaggcccacctgggtcatccatgggctaggatcccatggatgggcacatgatccaggagtctgaactcctcccaaagccattacggtggggaggggagatcgccatacgtataacccagtccctttggccaggtgacatttgctctgaactggatgatacgaatgatgtcagatttggaatctaacatcgtggctgtggagagggtcaaggagtactccaagacagagacagaggtgggtactggcatgagcccgggacagggggaatctgaagtagctggggaagaaagcttggtggctctctctccctcaacatcagggcctgccacgtatggggctcttcattcatttacccattcactccttactgagcatcaaccaatgctctatgctaggaggtgtagagagatcagagttgagcaagacggtgtttgcccttaggtgattctgatttggtgggaggggtaagacctattgcagggctttgcagtggatgaccagatctctggcgtggtgcacctggagagggcagatgagggagatccttcagctggggtgaccaggggagacgagcttagatgagaaggatggacaggctttgatagactaagtaagatggtggggtgggcagtgggaaggtgagcattccagccaaagagaccagcctgggcaaaggagtggaggtggggcagcatgccctttgttggggaaaaggagttgttccctactgggggttccagacttttctccaccgccccctctcatggtcacaccttagccctcttcatgcccagaagctgcagcatcagtgtcaagcatcccatctttggcccacgctcctatcctgctcgctctcatgctccaagtcccccactgtcacagcagtctgccttcactgggactcccaatcccatgacccccctttgtgtctctgtccatcagcttctctgccttcacctccctccccggccagcctagagtctatgctccaccaacacaaacgctctcacctgccttgcccttctctttcttctctctcagttgtactcacctccaaaacccaccccagctgagcccaccaatctgccttcttcatgcctgcactgagcacttaaaaccttgcaggaggcggggcacagtgactcatgcctgtaatcccagcactttgggaggccaaggtgggtggatctcttgaggtcgggagttcaaaaccagcctggccaacatggtgaaaccccatctctactaaaaatacaaaaaaatagctgggcgtggtggtgcacacctgtattcccagctacttgggagtccaaggcaggagaatcgcttgaacccaggcggtggaggttgcagtgagccgagattgcgccactgcaccccagcctggataacagagtgagactctgtctaaaaaaaaaaaaagcttgcaggagaaaaatcactgagttgacaagtttataaccacacaccacggctgcatgttcctgctttgcttccccaagaagcccatgttctcacgttcagaaagaattctgttgaataatctctgtcctcaaaccccacatctccctcctgctcagccatcgaccttgcctgacacctccataaaaagtaggttctaagacgtgaactccctcaaccttcctgcctctcagtctttaaacccgcctgtgtctccttcaccgttgtctccttttcacttttagcaggaatcatccctttctgtttcaaagcccagcccctccatttcttctcatggccgcttgaggacctggcttcctcagtcccgccctccatctcctgtcattcttgctccctctgttggacgcttcccatccacatgcaaaaatattccatcacatcttccattccagacacacacgcaaaccctcccccctgcactccactgccccatttctctgctctcctctgtcatgaagcatggtttaaagtatggtctctacaagctgcatccgcttcctcatcagccttgatgtcatctgcctcctgcagtcctctttctggccctcgctccacggagacagctcaccagtgaccttcctggttccaaatccaggggacgcttttctgttctcgtctaattcaacctcttagcaacgtcccaataaaatgacctctcccttcttcttggagtcctcgtggattccgtggcctgcattgcacccgccagtccacctgcctgaccccagcctggcttccccaggcatcaccctctggcccctcacccctcactgtctgggagcttccagttcccctgcttcatgtctagcagcccagttcctgcatggatacccatgctcctgtctctgtatcctataaatgtctgccctcaaccccacggcccgttctctgacgcctccttgagagaccaatctgtgcctgctgctctgctttttcacctctggccgcgtggtttctcctgcctcgaagcagggctggctccacaggaatagtcacagcgtccccactcccggaagaactgcgcgtttagagtaatgctctgccgtcagtgccttgacattctccatcattcttcaacaagaagcctcaggttttcattttgcactgggcctcccaaattatgtagccaatcctatctcaaagccaccatcatcttatgccctgccagtctattctgcttgtagctgccaagagatttaaaaaaaaaaaaaaaaaaaatcaaatcacgtcattcctctgtgtacagccctctaatggctttgcatcttaatcagagttaaaaaaaaaaaaagtccttaaaatggcctgcaaggccctacatgatggagccaccattacctcagcctcttacctcttgcctttgccagtgtgctccagaacacacctagagccatttatgcctgctgttccctctgcctggcatgccctccctccagatatccacttggcttgttccctcacctccttcgggtctttactaaagtctgcctcctccaggaagccttccctgaccaccctgtataaagcagcaacactaagcacttcttggccccagcactcatcacttcttgcgttgtatagatttgcttatctgttgattatatgcctccctctactagaacataaatctcacgagggtgaggactgtttcaatggggtaccattgtgtccccactgcctggcactgggctgccacccagtaacaatgaatgggtaaaggtaatgagagggggagttagggcaggcagggagggcacttcaaggaatataaggtgtggcacagtggctcacacctgtattcccaggactttgggaatcctcctaggcaggaggatccctggaggctaggagttcgagaccagcctggtcaacacagcgagacacagtctcttcagagtttttctttaaaaaattagccaggtgtggtgacacaggcctgtagtcctagctaatcaggaggctgaggcaggaggatggcttgagcccaggaattcaaggttgcattgagctatgattgcaccactgcactccagcctgagtgacagaacaagaacttgtcacagaacaaaacaagttagccaggcatggtggcatgtgcctgttgtagtcctagctactagggaggctgagggaggagaatcgctggaacccaggagttcaaggctgcaatgagccatgattgagaccctgtctctcaaaaattaaaaaaaaaaaaaaaaaggaacatgggcaagcagggagactgggaggggaaggacaggggagtgttggagtaggtctgtggggaataaagtcagagggataaaggagtcattgaacacaaggctgagccacaggggtgccaaggaccctcccagggaccatagttggggaggattgaggggccttgggggagagagaccgaaaggtgaaagagggcttcactgggcagctgatgtgaccccatctgcccctcctgccaggcgccctgggtggtggaaggcagccgccctcccgaaggttggcccccacgtggggaggtggagttccggaattattctgtgcgctaccggccgggcctagacctggtgctgagagacctgagtctgcatgtgcacggtggcgagaaggtacgcgtggggtaggcgggcctgcgtgtgtgttcatgcctgcagacatggccacagcccttgtggggagcttgggtcttttgagagcacaagtgctccagccacatgtttgttcggcctccaggagagtcctggagatgcgcctttgacctctcagcttccccctcagagccccttcccttctccgcccaggtggggatcgtgggccgcactggggctggcaagtcttccatgaccctttgcctgttccgcatcctggaggcggcaaagggtgaaatccgcattgatggcctcaatgtggcagacatcggcctccatgacctgcgctctcagctgaccatcatcccgcaggtaggagcctggcatgggctggccacactcaccaacggccctggaggcaggccccaccttgttctgtagctttaggatggagactgggaccccagtctcagaggcttgggcaggtggggagggacagacagcaggaagcagagccatcagtgagccacccgtcatggatctggaaagctcagacttaccctgcccagtcaggccctgtcctttgacctcctgggccagcacatggggaaggacccctccaagaaccccttcccccgagacattctgccctggtctttttgcgcagctctaattacatttcactttttctgtctcctccggggtattttttgtttctgccgagtggacactttggagtcagattagtggctctggttcctgcttcaacagaggtcttcgtgattggcaaagctgaggtttatcactcccctacaggcaattttctatctctttggccattgtgtcctctggggagctggaaacagagtgggaatgctgccaccttaatccctctcttcttccctggacctggggcctatggctcctcatagggcctaagctgcctccctctgaggccacgttgtatccccaggaccccatcctgttctcggggaccctgcgcatgaacctggaccccttcggcagctactcagaggaggacatttggtgggctttggagctgtcccacctgcacacgtttgtgagctcccagccggcaggcctggacttccagtgctcagagggcggggagaatctcaggtaaacactgggagtgcagaggtcaggaactgcaaccctccctgggaaaccctggcgggtgctgggaaacctgacaccaatgacacagagatgaggccagcccggatgtgcacagggctgtcctttcgtattgagcatattccgtgtgccaggcatggtgtactgccccgccgactcctcacacaagccccagcggtggtccatgatcccacttcaccggtcagggaactgaggctcagagatggtaaagggcttgacctaagttgcacagctgggagaaggcaggtctgggatttgaaccagctctgggagattccaaaaccctttgaggaagccctctcccctccagagctttcttacagccccagattttatgtcctcagccactgggctatgcactggaggggccagtagtcacctcttactgagtctaaaggttggagatacctatacctgtgctagctgtgtgatttggggctagttgcttaacctctctgtgcctacttttctttcactctaaaaggcagataataacagtccaaacctctttgcattatgctgcccaataaaaaacaaagcaagtcatgcatatgaagctaatgtttttttcttatagccacactttttaaaaaggaaaaacaagcaaaataaactgtaatactataacttatttagcccaatatatctaaaatattatttcaacacatcattgatataagtattagaaatattttgcgtttcttcctacaagtttgaaatccagtgtatatttcacatttacagaatgtctcaatttggactagtcacatttcaagtgctaatagccacatggggccagtggctaccacctggacagagcagtgttagggtcagtgtgatgacaggaaaagcgcttcgcttggatgctcctgtaaaatgtcagcttttcccctcctcccttccctccatcttctcctcctcctcctcctcttccctattttcatttttatattcagtccatactcatgcaccctccccagacctcaaaaactaaaacaaggccaggcacagtggctcacgcctgtaatcccagcactttaggaggccaaggcaggtggatcacttgagggcaggagttcaagaccagcctggccaacatggtgaaaccctgtctctgctaaacacaaaaattagctaggcgtgatggcgggcgcctgtaatcccagctattcgagaagccaaggcaggagaatcgcttgaaccctggaggcggaggttgcagtgagccaagatctcaccactgcactctagcctgggtgaccgagcgagacttcgtctcaagaaaaaaaactttacatttgcccagcacttaacaatattcaaagcactctggcctccactttctcctttaatctttaccatggtcctgtgggccagaaacgagcctccacggtttgaaatgatttcctcgcagcagttcagctggtaaggggcagagcggggactctggctctgtcccaaacctttccttgctgtatcacagccacctccctcacctggacaacattccccaaggcccctcattatcccaagggtgggactcccttgccacccacgcagcccttaagactaaatatgcatcttaagtggctctcacttacataaccacgtgggggtggctggcggacaaacatggtctctccagaccctgtgccccatgactgtctcttgcttgatccattcttctcacctgcttgctctcaacacttcccccagagcatgccccaccccgacacatgccgtgatcagagacagaaatcagctcccctcctccctcactgagcttgtagccactttaagtataacctgtgtcctgtgccagttccaccataaatcagccctgagttctatccggcggcttattctgctgccaaaaccttcattagttgcgggaatgggccagggagagagcccggactttactccggctgtggtgactcacgcctttgggaagggctgaggtatttgtccttggatgtggggatgctgtggcctctggttgggaacacagcctcgttttgtctgctggctctggcttccagagcaggaggctgaaggcgtgtgtcctgctcctcctttacctcctcagtgaccagacacaaagagtccccgggtgttcctctgccctgccattttcttgtcccagaagcagagccctggcctgtattccctatggggtgggaggtgactgcctgaattgtgtgatattaggctcagcaagatggcatcgtgtggcctatttgcaaatatccaagaagagccatgcaagtatgttcttactaaggtgtaaatggctgatagagtgaagcagagaaacatcacggcactagctgaaaagcaaggatggggaagaaagcaccgagagaggaggccaagggtgccaagagcagaccagggatttcacaatgccttttagcactggctcattccccaaggcccctcattatcccaatggtgtccagacctctgctccgttctggagggctgggctgtggcagaaatgggagaagtcagacagaaaaccagtcctgggccactgaggagtgaaacaggtctgggaatgaggcccagaggcaggtgggaggcccccagctggaaatgcctgccttctccactcccagcgtgggccagaggcagctcgtgtgcctggcccgagccctgctccgcaagagccgcatcctggttttagacgaggccacagctgccatcgacctggagactgacaacctcatccaggctaccatccgcacccagtttgatacctgcactgtcctgaccatcgcacaccggcttaacactatcatggactacaccaggtgggacacggaaacctgagcaatggggaacctggtggggccacctggggcatcaggaatgggcagggcagattagggttatctgaacaaggcaatgttcctgggattgctagggcatggcaggcagagcagagtttcccaagatctggataaggggcagaccagagtggggtggcctgggctcaggggtggggtatacaatgacattttcatttttcttcttcttcttcttttttttttttgagacagagttttgctctgttgcctaggctggagtgcagtggctcactgcagcctcagcctctcgaagtactgggattacaggcgtgcaccaccacatccggctaatttttgtatttttagtagagacggtttcaccatgttggccaggctggtctcgaactcctgacctcaagtgatccacctgtctcggcctcccaaagtgctgggattacaggcgtgagccactgcgcccagcttcaacaatgacattttctaacacatggggaagggcacactgggctccacaggcactgtctttgtgcacaggccacttgcatcctgcctcctccatgaggcaatgtaaggggaactggaggcttcatgctgagtcccatcacttcctaagaaacctgctggcagagtgcctgcatgtccctcaccttattggtgtctcacagccactctggtcacagatgaagaagcaactcaagtggcagctggaccgtgacagcaccatgaggagctgagccttgtggggagagcactgtgtctggagtcccaggctgctgtgtgaccctgggcaatttgcaaaacctttctgagcctgtttcaaatgaaaatgatgcttcgtgggattgtcgtagtcaatgagggctgggcacagtggctcacacctgtaatctcagcactttgggaggccaaggagggcggatgacttgaggtgaggagttcaagaccagcctggccaacatggagaaaccctgtctctactaaaaacaaaacaaaacaaaacaaaaacaaaaatttgccggatgtggtggtgcatgcctgtaatctcagctactcgggaggctgacagagaattgcttgaactcaggaagcaaagattgcagtgagccaagattacgccaggacactccagtctgagtgacagagtgagacgttgtctcaaaaaaaaaaaaaaatggtggccaacgcggtggctcacacctgtaatcccaggactttgggaggccgaggcaggcagatcatttgaggtcagaagttagagaccagcctggccaacatggtgaaaccctgtctctactaaaaatacaaaaattagcctctcatgtggcaggcacctgtagtcccagctgctcaggaggctgaggcaggagaatcacttgaacccaggaggcagagtttgcgccactgcactctagcctgggtgcagagcgagactctgcctcaaaaaaaagaaaaaagtcaatgaaagatatttaaactgcaggtgatcctgggaaatgacagtgtcctccccagccccttgctctaattcttgcgctaggccctccaaggatgaggggaggggccatgccctcagaagcttgtggcttccttggagaggcagaccactccctcattgtgccagatgtcaaagtgtggtgctggaggtcgaggagagagggctgggtgactcagaagcctcacgggagtgaactggccctggcctggcaggctgtgctccctagaaactagaggggaggaggaggcaggaggctcagacaagtcttctttgaaggagtatagtgggaataccccaacaggccttcactcactcaagaaacacttgcaggacgatggagtgggaagggtgccatggacagggcaatgggtcagaccttgctctcttggaagtgcccccatgcagccagcagtgtcttgggagccaagctgagaatgcctgatgctaccctctgtctgttccatccctctcctaccctcaccccccactcccatttaggaccccactgggagaagggagggtgggcaggaagtgctgagccctgggtttggaggagggacagggctgggctgagaggacctgttcccaggcctaaccaaaactgtttcattcaccagcagccctagggtgaggggcttggatggaccttggaggttgggagttcattcattctagtggaacaggcagaaattaatcaaataatcatgtgtaaatagggcccataggaaggacgcaaaggcctgtgtgtgcaggccagaaaaaggctatccacacagggtggccaggacactttctcctgtaaggaagggatgcaccagccaggcctgaaagaatgagtaagagttggaggatggaggtggggcaataaggtagggagcgagctgaaaattgcaggcaaaggatataacacatgccccaaggcaggagggtacaggaggctggagtgcgtgggagggaggcagtagaaccaagatgggggtggagaacaggccgcactctgctgcactttgaggaccatgggagagcattcagtccttacccaagagcaatcaaaagccgctgaagaccttgattttggagtcagggttgggatcggcgggaggggagggggggcggtggccaggcagtgatgtcacagacacagtccttcccaggacacatctgggagcccagtaggctgagaaccagaatgcagtcagccccctcccatggaggagcacttctccaggctggggagagccccttcccctcctgccgtaccctggtggagccagcccactggccttgtaccaggtgcactcggtgagtggttggtgggagattctaaccctgggctcaggcctagctgtttgtgtgtgagctggagacccaccgagcagcagcagcagcagcagcagccgcagcagccgccaccagatttgcagcccaagccccagattccagtgtcagcctcgctgcagctggtttcctgccgtgtgcttttgtgagccgacacaaagcagatggatgtgcacagagcccagcgcacaggcccatggctccctgcgcacagcctgctgaagtcctgtgaccccggcaaggggaagggctcattagggaaggttttcagagccctgactagcagagatgaataggaccttgtgtttgatcccagaaactgcttcacttgccagaactaacagaatggctaaaataaccagccttgcaagtgtgcacatgtggtgcggtggctgtgttgggtgggttggcatgtcactgtgggcctgagcaagtacccagaagagcaggattagacgatgtgaccaggtcagggctgatggaaacctgaccacttctctcttttttgactagggtcctggtcctggacaaaggagtagtagctgaatttgattctccagccaacctcattgcagctagaggcatcttctacgggatggccagagatgctggacttgcctaaaatatattcctgagatttcctcctggcctttcctggttttcatcaggaaggaaatgacaccaaatatgtccgcagaatggacttgatagcaaacactgggggcaccttaagattttgcacctgtaaagtgccttacagggtaactgtgctgaatgctttagatgaggaaatgatccccaagtggtgaatgacacgcctaaggtcacagctagtttgagccagttagactagtccccggtctcccgattcccaactgagtgttatttgcacactgcactgttttcaaataacgattttatgaaatgacctctgtcctccctctgatttttcatattttctaaagtttcgtttctgttttttaataaaaagctttttcctcctggaacagaagacagctgctgggtcaggccacccctaggaactcagtcctgtactctggggtgctgcctgaatccattaaaaatgggagtactgatgaaataaaactacatggtcaaca

SEQ ID NO: 10294 - DNA, 2277 bp, Homo sapiens
gacagagcgagactccatctcaagagagaaaaaaaaaaagtccagaggagttttcttgctttggggtgttgtagaaatgatcttggagcttagccccaaaggacaaacagaatttctcttgtctctgggcaagttgtaggctcatgtgacaggtcaggacagtgtagggctggcataccgctcgctcacgttcacatgcttgcagagaacgtacacagacgaggtgactgaagcctggtctgcaggtcaggcaggtcatcctgatgccagcttgtactgtcaaagagtcacctaactgcaaacggaatttttgtaaagcagatcacattgttaatacctcaggtggctcaaaccttgaacgcgttggcaaacaaaaaacaatccagaaaggtcaattttcacaaaggtcagtgtgcacatgaatctacttgttaaaatgtacattttgattcagtagacctaggatggggctcaggactctgcactttgatcaagactccttggtacgcaaagtgtggcccatgggccagttgcatcaccatcctctgggagcttgttagaaatgaagaatctcaggttccaagtcccacctcagactacagaatccggcgttgcattttaacaagattctctgggaagtcttatacatattaaagttggagaaacagaaaccaaggcgaggtggtccttggttaagtctgcactgtcactgcccaagggagtcattcgtgattacagccccagctggcatgcctgtgggcttgatccaggcccacctgggtcatccatgggctaggatcccatggatgggcacatgatccaggagtctgaactcctcccaaagccattacggtggggaggggagatcgccatacgtataacccagtccctttggccaggtgacatttgctctgaactggatgatacgaatgatgtcagatttggaatctaacatcgtggctgtggagagggtcaaggagtactccaagacagagacagaggcgccctgggtggtggaaggcagccgccctcccgaaggttggcccccacgtggggaggtggagttccggaattattctgtgcgctaccggccgggcctagacctggtgctgagagacctgagtctgcatgtgcacggtggcgagaaggtggggatcgtgggccgcactggggctggcaagtcttccatgaccctttgcctgttccgcatcctggaggcggcaaagggtgaaatccgcattgatggcctcaatgtggcagacatcggcctccatgacctgcgctctcagctgaccatcatcccgcaggaccccatcctgttctcggggaccctgcgcatgaacctggaccccttcggcagctactcagaggaggacatttggtgggctttggagctgtcccacctgcacacgtttgtgagctcccagccggcaggcctggacttccagtgctcagagggcggggagaatctcagcgtgggccagaggcagctcgtgtgcctggcccgagccctgctccgcaagagccgcatcctggttttagacgaggccacagctgccatcgacctggagactgacaacctcatccaggctaccatccgcacccagtttgatacctgcactgtcctgaccatcgcacaccggcttaacactatcatggactacaccagggtcctggtcctggacaaaggagtagtagctgaatttgattctccagccaacctcattgcagctagaggcatcttctacgggatggccagagatgctggacttgcctaaaatatattcctgagatttcctcctggcctttcctggttttcatcaggaaggaaatgacaccaaatatgtccgcagaatggacttgatagcaaacactgggggcaccttaagattttgcacctgtaaagtgccttacagggtaactgtgctgaatgctttagatgaggaaatgatccccaagtggtgaatgacacgcctaaggtcacagctagtttgagccagttagactagtccccggtctcccgattcccaactgagtgttatttgcacactgcactgttttcaaataacgattttatgaaatgacctctgtcctccctctgatttttcatattttctaaagtttcgtttctgttttttaataaaaagctttttcctcctggaacagaagacagctgctgggtcaggccacccctaggaactcagtcctgtactctggggtgctgcctgaatccattaaaaatgggagtactgatgaaataaaactacatggtcaaca

SEQ ID NO: 10295 - DNA, 1063 bp, Homo sapiens
aaatgggagaagtcagacagaaaaccagtcctgggccactgaggagtgaaacaggtctgggaatgaggcccagaggcaggtgggaggcccccagctggaaatgcctgccttctccactcccagcgtgggccagaggcagctcgtgtgcctggcccgagccctgctccgcaagagccgcatcctggttttagacgaggccacagctgccatcgacctggagactgacaacctcatccaggctaccatccgcacccagtttgatacctgcactgtcctgaccatcgcacaccggcttaacactatcatggactacaccaggtgggacacggaaacctgagcaatggggaacctggtggggccacctggggcatcaggaatgggcagggcagattagggttatctgaacaaggcaatgttcctgggattgctagggcatggcaggcagagcagagtttcccaagatctggataaggggcagaccagagtggggtggcctgggctcaggggtggggtatacaatgacattttcatttttcttcttcttcttcttttttttttttgagacagagttttgctctgttgcctaggctggagtgcagtggctcactgcagcctcagcctctcgaagtactgggattacaggcgtgcaccaccacatccggctaatttttgtatttttagtagagacggtttcaccatgttggccaggctggtctcgaactcctgacctcaagtgatccacctgtctcggcctcccaaagtgctgggattacaggcgtgagccactgcgcccagcttcaacaatgacattttctaacacatggggaagggcacactgggctccacaggcactgtctttgtgcacaggccacttgcatcctgcctcctccatgaggcaatgtaaggggaactggaggcttcatgctgagtcccatcacttcctaagaaacctgctggcagagtgcctgcatgtccctcaccttattggtgtctcacagccactctggtcacagatgaagaagcaactcaagtggcagctggaccgtgacagcaccatgaggag

SEQ ID NO: 10296 - DNA, 383 bp, Homo sapiens
aaatgggagaagtcagacagaaaaccagtcctgggccactgaggagtgaaacaggtctgggaatgaggcccagaggcaggtgggaggcccccagctggaaatgcctgccttctccactcccagcgtgggccagaggcagctcgtgtgcctggcccgagccctgctccgcaagagccgcatcctggttttagacgaggccacagctgccatcgacctggagactgacaacctcatccaggctaccatccgcacccagtttgatacctgcactgtcctgaccatcgcacaccggcttaacactatcatggactacaccagccactctggtcacagatgaagaagcaactcaagtggcagctggaccgtgacagcaccatgaggag

SEQ ID NO: 10297 - DNA, 5271 bp, Homo sapiens
ccgcgctcgccttccttgcagccgcgcctcggccccatggacgccctgtgcggttccggggagctcggctccaagttctgggactccaacctgtctgtgcacacagaaaacccggacctcactccctgcttccagaactccctgctggcctgggtgccctgcatctacctgtgggtcgccctgccctgctacttgctctacctgcggcaccattgtcgtggctacatcatcctctcccacctgtccaagctcaagatggtcctgggtgtcctgctgtggtgcgtctcctgggcggaccttttttactccttccatggcctggtccatggccgggcccctgcccctgttttctttgtcacccccttggtggtgggggtcaccatgctgctggccaccctgctgatacagtatgagcggctgcagggcgtacagtcttcgggggtcctcattatcttctggttcctgtgtgtggtctgcgccatcgtcccattccgctccaagatccttttagccaaggcagagggtgagatctcagaccccttccgcttcaccaccttctacatccactttgccctggtactctctgccctcatcttggcctgcttcagggagaaacctccatttttctccgcaaagaatgtcgaccctaacccctaccctgagaccagcgctggctttctctcccgcctgtttttctggtggttcacaaagatggccatctatggctaccggcatcccctggaggagaaggacctctggtccctaaaggaagaggacagatcccagatggtggtgcagcagctgctggaggcatggaggaagcaggaaaagcagacggcacgacacaaggcttcagcagcacctgggaaaaatgcctccggcgaggacgaggtgctgctgggtgcccggcccaggccccggaagccctccttcctgaaggccctgctggccaccttcggctccagcttcctcatcagtgcctgcttcaagcttatccaggacctgctctccttcatcaatccacagctgctcagcatcctgatcaggtttatctccaaccccatggccccctcctggtggggcttcctggtggctgggctgatgttcctgtgctccatgatgcagtcgctgatcttacaacactattaccactacatctttgtgactggggtgaagtttcgtactgggatcatgggtgtcatctacaggaaggctctggttatcaccaactcagtcaaacgtgcgtccactgtgggggaaattgtcaacctcatgtcagtggatgcccagcgcttcatggaccttgcccccttcctcaatctgctgtggtcagcacccctgcagatcatcctggcgatctacttcctctggcagaacctaggtccctctgtcctggctggagtcgctttcatggtcttgctgattccactcaacggagctgtggccgtgaagatgcgcgccttccaggtaaagcaaatgaaattgaaggactcgcgcatcaagctgatgagtgagatcctgaacggcatcaaggtgctgaagctgtacgcctgggagcccagcttcctgaagcaggtggagggcatcaggcagggtgagctccagctgctgcgcacggcggcctacctccacaccacaaccaccttcacctggatgtgcagccccttcctggtgaccctgatcaccctctgggtgtacgtgtacgtggacccaaacaatgtgctggacgccgagaaggcctttgtgtctgtgtccttgtttaatatcttaagacttcccctcaacatgctgccccagttaatcagcaacctgactcaggccagtgtgtctctgaaacggatccagcaattcctgagccaagaggaacttgacccccagagtgtggaaagaaagaccatctccccaggctatgccatcaccatacacagtggcaccttcacctgggcccaggacctgccccccactctgcacagcctagacatccaggtcccgaaaggggcactggtggccgtggtggggcctgtgggctgtgggaagtcctccctggtgtctgccctgctgggagagatggagaagctagaaggcaaagtgcacatgaagggctccgtggcctatgtgccccagcaggcatggatccagaactgcactcttcaggaaaacgtgcttttcggcaaagccctgaaccccaagcgctaccagcagactctggaggcctgtgccttgctagctgacctggagatgctgcctggtggggatcagacagagattggagagaagggcattaacctgtctgggggccagcggcagcgggtcagtctggctcgagctgtttacagtgatgccgatattttcttgctggatgacccactgtccgcggtggactctcatgtggccaagcacatctttgaccacgtcatcgggccagaaggcgtgctggcaggcaagacgcgagtgctggtgacgcacggcattagcttcctgccccagacagacttcatcattgtgctagctgatggacaggtgtctgagatgggcccgtacccagccctgctgcagcgcaacggctcctttgccaactttctctgcaactatgcccccgatgaggaccaagggcacctggaggacagctggaccgcgttggaaggtgcagaggataaggaggcactgctgattgaagacacactcagcaaccacacggatctgacagacaatgatccagtcacctatgtggtccagaagcagtttatgagacagctgagtgccctgtcctcagatggggagggacagggtcggcctgtaccccggaggcacctgggtccatcagagaaggtgcaggtgacagaggcgaaggcagatggggcactgacccaggaggagaaagcagccattggcactgtggagctcagtgtgttctgggattatgccaaggccgtggggctctgtaccacgctggccatctgtctcctgtatgtgggtcaaagtgcggctgccattggagccaatgtgtggctcagtgcctggacaaatgatgccatggcagacagtagacagaacaacacttccctgaggctgggcgtctatgctgctttaggaattctgcaagggttcttggtgatgctggcagccatggccatggcagcgggtggcatccaggctgcccgtgtgttgcaccaggcactgctgcacaacaagatacgctcgccacagtccttctttgacaccacaccatcaggccgcatcctgaactgcttctccaaggacatctatgtcgttgatgaggttctggcccctgtcatcctcatgctgctcaattccttcttcaacgccatctccactcttgtggtcatcatggccagcacgccgctcttcactgtggtcatcctgcccctggctgtgctctacaccttagtgcagcgcttctatgcagccacatcacggcaactgaagcggctggaatcagtcagccgctcacctatctactcccacttttcggagacagtgactggtgccagtgtcatccgggcctacaaccgcagccgggattttgagatcatcagtgatactaaggtggatgccaaccagagaagctgctacccctacatcatctccaaccggtcagaagccgcctccctcgctccctgctcctccaggaattcccagcaggctctctggtgttcagggtccttgtccctcctttcccctaagcagaaaactggccctgccctgcccctgccccatttcctcctcatctgatcccccataggtggctgagcatcggagtggagttcgtggggaactgcgtggtgctctttgctgcactatttgccgtcatcgggaggagcagcctgaacccggggctggtgggcctttctgtgtcctactccttgcaggtgacatttgctctgaactggatgatacgaatgatgtcagatttggaatctaacatcgtggctgtggagagggtcaaggagtactccaagacagagacagaggcgccctgggtggtggaaggcagccgccctcccgaaggttggcccccacgtggggaggtggagttccggaattattctgtgcgctaccggccgggcctagacctggtgctgagagacctgagtctgcatgtgcacggtggcgagaaggtggggatcgtgggccgcactggggctggcaagtcttccatgaccctttgcctgttccgcatcctggaggcggcaaagggtgaaatccgcattgatggcctcaatgtggcagacatcggcctccatgacctgcgctctcagctgaccatcatcccgcaggaccccatcctgttctcggggaccctgcgcatgaacctggaccccttcggcagctactcagaggaggacatttggtgggctttggagctgtcccacctgcacacgtttgtgagctcccagccggcaggcctggacttccagtgctcagagggcggggagaatctcagcgtgggccagaggcagctcgtgtgcctggcccgagccctgctccgcaagagccgcatcctggttttagacgaggccacagctgccatcgacctggagactgacaacctcatccaggctaccatccgcacccagtttgatacctgcactgtcctgaccatcgcacaccggcttaacactatcatggactacaccagggtcctggtcctggacaaaggagtagtagctgaatttgattctccagccaacctcattgcagctagaggcatcttctacgggatggccagagatgctggacttgcctaaaatatattcctgagatttcctcctggcctttcctggttttcatcaggaaggaaatgacaccaaatatgtccgcagaatggacttgatagcaaacactgggggcaccttaagattttgcacctgtaaagtgccttacagggtaactgtgctgaatgctttagatgaggaaatgatccccaagtggtgaatgacacgcctaaggtcacagctagtttgagccagttagactagtccccggtctcccgattcccaactgagtgttatttgcacactgcactgttttcaaataacgattttatgaaatgacctctgtcctccctctgatttttcatattttctaaagtttcgtttctgttttttaataaaaagctttttcctcctggaacagaagacagctgctgggtcaggccacccctaggaactcagtcctgtactctggggtgctgcctgaatccattaaaaatgggagtactgatgaaataaaactacatggtcaacagta

SEQ ID NO: 10298 - DNA, 2750 bp, Homo sapiens
tacagtgatgccgatattttcttgctggatgacccactgtccgcggtggactctcatgtggccaagcacatctttgaccacgtcatcgggccagaaggcgtgctggcaggcaaggtgaggcctgccagaggctaagggggctaaggtgagatctgaggcccgaagagagagctggtgagaggctgaggggtttggatgagacttggaggtgtggggggcgcaagaagtgggcatgtgggttgggcatcaggagaaacctgtggggacaactcccccacctgcgaggttctgagcaggctgtggcgagcacagggtgagtcacccatgtgcctgtccaagctccctggcacatgggcacacttcacactcactctgtggctccgtgcctgtgccaggggtgtgctggagggtggtaggggtgagagcctgctgccttctccccagacgcgagtgctggtgacgcacggcattagcttcctgccccagacagacttcatcattgtgctagctgatggacaggtgtctgagatgggcccgtacccagccctgctgcagcgcaacggctcctttgccaactttctctgcaactatgcccccgatgaggaccaagggcacctggaggacagctggaccggtatctgccatcctgggccctctgattcccatgccttcccagcattccccctgtctggggtctctgagtgtgtctagactggcctagtgttgtgccaggcaggttctgggaaacttgggccatctgtgtgacagtcaccagaggtaaagtaaactggacatagtcgggtcccactgcctcctccatcctactctaccctaactgtgggaactcagatcctccgccccggtctcagagcctgttttctttctttctttctttctttctttctttctttctttctttctttctttctttctttctttctttctttctttctttctctctctctctctctctctctctctctctctctctctctctctctctctctctctctttctttctttctttctttctttctttctttctttcttttttttcttttgaggcagagtctggctctgtcgccgggctggagtgcagtggtacaatctcagctcactgcaacctctgcctcccaggttcaagtgattctcctgcctcaggctcccgagtagctgggactacaggcatgcgccaccacgcctggctaatttttgtatttttagtacagacatggtttcaccatgttggccaggatggtctcgatctcttgacctcgtgatctgcctgcctcggcctcccaaagtgctgggattacaggtgtgagccaccttgcccgatctcagagcctgttttccatctgttgaaagcataggagggcccaggcccagcttgtgtggcaaggctgcttcatggataaatagtttggcaagtatgcaagtgcttagcaaagccgcttatttatcaaccaaaatttattggacaatcactatatacaggcactgttccagacactaagctatagcagtgagcaaacaaaaaaattatagtcctcatggagcttgttgacgtctctgggctcacaacatgcccctggctccttgttgcccagacccagctccccagcccccaattctggattggctcacagaccttttcctgggctttcttgcctatggctatacatacagccaacgtgccttgagcatttaccaagtgctgtgcccctcgctcacacactggacacattttcttttaagcctacagtcatgcagattttttttttttttttttggggacagtttctcactctgttgcccaggctggagtgcaacggtgcgatcttggctcactgcaacctttgcctcctgggttcaagcgattctcctgcctcagcctcccgagtagccaggattataggtgcccgccaccacgcccggctaatttttgtatttttagtagagacggggtttcaccatgttggccaggctggtctcgatctcctgacctcgtgagctgcctgcctcagcctcccaaagtgctgggattacaggcgtgagccaccatgcccgaccaaggacgtgagttttaagctcagccagtctaactccagagcccaagttcctaacccttgtatttgagtccgtttctccataatttgtgaagagagtttttcttgttgcttaacccaagtctttcttgttgccctttcaatccccctcattttattttcatgcttgtccattgaacccctttcattagagtggggaatgggagataccaggggcttgcagggagaactagctgaaccctatctccttcctcccaccctactgcagcgttggaaggtgcagaggataaggaggcactgctgattgaagacacactcagcaaccacacggatctgacagacaatgatccagtcacctatgtggtccagaagcagtttatgaggtgagttcctgagagctcccagccctcccggaggctgtatcaggcctccccaggccctgccagatggggtgcaggtttctccctgacactcccagcctctgtcctggggggtgcttgaggccccctccctgggcctgaccagctgcctccacagacagctgagtgccctgtcctcagatggggagggacagggtcggcctgtaccccggaggcacctgggtccatcagagaaggtgcaggtgacagaggcgaaggcagatggggcactgacccaggaggagaaagcagccattggcac

SEQ ID NO: 10299 - DNA, 540 bp, Homo sapiens
tacagtgatgccgatattttcttgctggatgacccactgtccgcggtggactctcatgtggccaagcacatctttgaccacgtcatcgggccagaaggcgtgctggcaggcaagacgcgagtgctggtgacgcacggcattagcttcctgccccagacagacttcatcattgtgctagctgatggacaggtgtctgagatgggcccgtacccagccctgctgcagcgcaacggctcctttgccaactttctctgcaactatgcccccgatgaggaccaagggcacctggaggacagctggaccgcgttggaaggtgcagaggataaggaggcactgctgattgaagacacactcagcaaccacacggatctgacagacaatgatccagtcacctatgtggtccagaagcagtttatgagatggggagggacagggtcggcctgtaccccggaggcacctgggtccatcagagaaggtgcaggtgacagaggcgaaggcagatggggcactgacccaggaggagaaagcagccattggcac

SEQ ID NO: 10300 - DNA, 3936 bp, Homo sapiens
gggatttcacaatgccttttagcactggctcattccccaaggcccctcattatcccaatggtgtccagacctctgctccgttctggagggctgggctgtggcagaaatgggagaagtcagacagaaaaccagtcctgggccactgaggagtgaaacaggtctgggaatgaggcccagaggcaggtgggaggcccccagctggaaatgcctgccttctccactcccagcgtgggccagaggcagctcgtgtgcctggcccgagccctgctccgcaagagccgcatcctggttttagacgaggccacagctgccatcgacctggagactgacaacctcatccaggctaccatccgcacccagtttgatacctgcactgtcctgaccatcgcacaccggcttaacactatcatggactacaccaggtgggacacggaaacctgagcaatggggaacctggtggggccacctggggcatcaggaatgggcagggcagattagggttatctgaacaaggcaatgttcctgggattgctagggcatggcaggcagagcagagtttcccaagatctggataaggggcagaccagagtggggtggcctgggctcaggggtggggtatacaatgacattttcatttttcttcttcttcttcttttttttttttgagacagagttttgctctgttgcctaggctggagtgcagtggctcactgcagcctcagcctctcgaagtactgggattacaggcgtgcaccaccacatccggctaatttttgtatttttagtagagacggtttcaccatgttggccaggctggtctcgaactcctgacctcaagtgatccacctgtctcggcctcccaaagtgctgggattacaggcgtgagccactgcgcccagcttcaacaatgacattttctaacacatggggaagggcacactgggctccacaggcactgtctttgtgcacaggccacttgcatcctgcctcctccatgaggcaatgtaaggggaactggaggcttcatgctgagtcccatcacttcctaagaaacctgctggcagagtgcctgcatgtccctcaccttattggtgtctcacagccactctggtcacagatgaagaagcaactcaagtggcagctggaccgtgacagcaccatgaggagctgagccttgtggggagagcactgtgtctggagtcccaggctgctgtgtgaccctgggcaatttgcaaaacctttctgagcctgtttcaaatgaaaatgatgcttcgtgggattgtcgtagtcaatgagggctgggcacagtggctcacacctgtaatctcagcactttgggaggccaaggagggcggatgacttgaggtgaggagttcaagaccagcctggccaacatggagaaaccctgtctctactaaaaacaaaacaaaacaaaacaaaaacaaaaatttgccggatgtggtggtgcatgcctgtaatctcagctactcgggaggctgacagagaattgcttgaactcaggaagcaaagattgcagtgagccaagattacgccaggacactccagtctgagtgacagagtgagacgttgtctcaaaaaaaaaaaaaaatggtggccaacgcggtggctcacacctgtaatcccaggactttgggaggccgaggcaggcagatcatttgaggtcagaagttagagaccagcctggccaacatggtgaaaccctgtctctactaaaaatacaaaaattagcctctcatgtggcaggcacctgtagtcccagctgctcaggaggctgaggcaggagaatcacttgaacccaggaggcagagtttgcgccactgcactctagcctgggtgcagagcgagactctgcctcaaaaaaaagaaaaaagtcaatgaaagatatttaaactgcaggtgatcctgggaaatgacagtgtcctccccagccccttgctctaattcttgcgctaggccctccaaggatgaggggaggggccatgccctcagaagcttgtggcttccttggagaggcagaccactccctcattgtgccagatgtcaaagtgtggtgctggaggtcgaggagagagggctgggtgactcagaagcctcacgggagtgaactggccctggcctggcaggctgtgctccctagaaactagaggggaggaggaggcaggaggctcagacaagtcttctttgaaggagtatagtgggaataccccaacaggccttcactcactcaagaaacacttgcaggacgatggagtgggaagggtgccatggacagggcaatgggtcagaccttgctctcttggaagtgcccccatgcagccagcagtgtcttgggagccaagctgagaatgcctgatgctaccctctgtctgttccatccctctcctaccctcaccccccactcccatttaggaccccactgggagaagggagggtgggcaggaagtgctgagccctgggtttggaggagggacagggctgggctgagaggacctgttcccaggcctaaccaaaactgtttcattcaccagcagccctagggtgaggggcttggatggaccttggaggttgggagttcattcattctagtggaacaggcagaaattaatcaaataatcatgtgtaaatagggcccataggaaggacgcaaaggcctgtgtgtgcaggccagaaaaaggctatccacacagggtggccaggacactttctcctgtaaggaagggatgcaccagccaggcctgaaagaatgagtaagagttggaggatggaggtggggcaataaggtagggagcgagctgaaaattgcaggcaaaggatataacacatgccccaaggcaggagggtacaggaggctggagtgcgtgggagggaggcagtagaaccaagatgggggtggagaacaggccgcactctgctgcactttgaggaccatgggagagcattcagtccttacccaagagcaatcaaaagccgctgaagaccttgattttggagtcagggttgggatcggcgggaggggagggggggcggtggccaggcagtgatgtcacagacacagtccttcccaggacacatctgggagcccagtaggctgagaaccagaatgcagtcagccccctcccatggaggagcacttctccaggctggggagagccccttcccctcctgccgtaccctggtggagccagcccactggccttgtaccaggtgcactcggtgagtggttggtgggagattctaaccctgggctcaggcctagctgtttgtgtgtgagctggagacccaccgagcagcagcagcagcagcagcagccgcagcagccgccaccagatttgcagcccaagccccagattccagtgtcagcctcgctgcagctggtttcctgccgtgtgcttttgtgagccgacacaaagcagatggatgtgcacagagcccagcgcacaggcccatggctccctgcgcacagcctgctgaagtcctgtgaccccggcaaggggaagggctcattagggaaggttttcagagccctgactagcagagatgaataggaccttgtgtttgatcccagaaactgcttcacttgccagaactaacagaatggctaaaataaccagccttgcaagtgtgcacatgtggtgcggtggctgtgttgggtgggttggcatgtcactgtgggcctgagcaagtacccagaagagcaggattagacgatgtgaccaggtcagggctgatggaaacctgaccacttctctcttttttgactagggtcctggtcctggacaaaggagtagtagctgaatttgattctccagccaacctcattgcagctagaggcatcttctacgggatggccagagatgctggacttgcctaaaatatattcctgagatttcctcctggcctttcctggttttcatc

SEQ ID NO: 10301 - DNA, 575 bp, Homo sapiens
gggatttcacaatgccttttagcactggctcattccccaaggcccctcattatcccaatggtgtccagacctctgctccgttctggagggctgggctgtggcagaaatgggagaagtcagacagaaaaccagtcctgggccactgaggagtgaaacaggtctgggaatgaggcccagaggcaggtgggaggcccccagctggaaatgcctgccttctccactcccagcgtgggccagaggcagctcgtgtgcctggcccgagccctgctccgcaagagccgcatcctggttttagacgaggccacagctgccatcgacctggagactgacaacctcatccaggctaccatccgcacccagtttgatacctgcactgtcctgaccatcgcacaccggcttaacactatcatggactacaccagggtcctggtcctggacaaaggagtagtagctgaatttgattctccagccaacctcattgcagctagaggcatcttctacgggatggccagagatgctggacttgcctaaaatatattcctgagatttcctcctggcctttcctggttttcatc

SEQ ID NO: 10302 - DNA, 3119 bp, Homo sapiens
gcattaacctgtctgggggccagcggcagcgggtcagtctggctcgagctgtttacagtgatgccgatattttcttgctggatgacccactgtccgcggtggactctcatgtggccaagcacatctttgaccacgtcatcgggccagaaggcgtgctggcaggcaaggtgaggcctgccagaggctaagggggctaaggtgagatctgaggcccgaagagagagctggtgagaggctgaggggtttggatgagacttggaggtgtggggggcgcaagaagtgggcatgtgggttgggcatcaggagaaacctgtggggacaactcccccacctgcgaggttctgagcaggctgtggcgagcacagggtgagtcacccatgtgcctgtccaagctccctggcacatgggcacacttcacactcactctgtggctccgtgcctgtgccaggggtgtgctggagggtggtaggggtgagagcctgctgccttctccccagacgcgagtgctggtgacgcacggcattagcttcctgccccagacagacttcatcattgtgctagctgatggacaggtgtctgagatgggcccgtacccagccctgctgcagcgcaacggctcctttgccaactttctctgcaactatgcccccgatgaggaccaagggcacctggaggacagctggaccggtatctgccatcctgggccctctgattcccatgccttcccagcattccccctgtctggggtctctgagtgtgtctagactggcctagtgttgtgccaggcaggttctgggaaacttgggccatctgtgtgacagtcaccagaggtaaagtaaactggacatagtcgggtcccactgcctcctccatcctactctaccctaactgtgggaactcagatcctccgccccggtctcagagcctgttttctttctttctttctttctttctttctttctttctttctttctttctttctttctttctttctttctttctttctttctctctctctctctctctctctctctctctctctctctctctctctctctctctctctttctttctttctttctttctttctttctttctttcttttttttcttttgaggcagagtctggctctgtcgccgggctggagtgcagtggtacaatctcagctcactgcaacctctgcctcccaggttcaagtgattctcctgcctcaggctcccgagtagctgggactacaggcatgcgccaccacgcctggctaatttttgtatttttagtacagacatggtttcaccatgttggccaggatggtctcgatctcttgacctcgtgatctgcctgcctcggcctcccaaagtgctgggattacaggtgtgagccaccttgcccgatctcagagcctgttttccatctgttgaaagcataggagggcccaggcccagcttgtgtggcaaggctgcttcatggataaatagtttggcaagtatgcaagtgcttagcaaagccgcttatttatcaaccaaaatttattggacaatcactatatacaggcactgttccagacactaagctatagcagtgagcaaacaaaaaaattatagtcctcatggagcttgttgacgtctctgggctcacaacatgcccctggctccttgttgcccagacccagctccccagcccccaattctggattggctcacagaccttttcctgggctttcttgcctatggctatacatacagccaacgtgccttgagcatttaccaagtgctgtgcccctcgctcacacactggacacattttcttttaagcctacagtcatgcagattttttttttttttttttggggacagtttctcactctgttgcccaggctggagtgcaacggtgcgatcttggctcactgcaacctttgcctcctgggttcaagcgattctcctgcctcagcctcccgagtagccaggattataggtgcccgccaccacgcccggctaatttttgtatttttagtagagacggggtttcaccatgttggccaggctggtctcgatctcctgacctcgtgagctgcctgcctcagcctcccaaagtgctgggattacaggcgtgagccaccatgcccgaccaaggacgtgagttttaagctcagccagtctaactccagagcccaagttcctaacccttgtatttgagtccgtttctccataatttgtgaagagagtttttcttgttgcttaacccaagtctttcttgttgccctttcaatccccctcattttattttcatgcttgtccattgaacccctttcattagagtggggaatgggagataccaggggcttgcagggagaactagctgaaccctatctccttcctcccaccctactgcagcgttggaaggtgcagaggataaggaggcactgctgattgaagacacactcagcaaccacacggatctgacagacaatgatccagtcacctatgtggtccagaagcagtttatgaggtgagttcctgagagctcccagccctcccggaggctgtatcaggcctccccaggccctgccagatggggtgcaggtttctccctgacactcccagcctctgtcctggggggtgcttgaggccccctccctgggcctgaccagctgcctccacagacagctgagtgccctgtcctcagatggggagggacagggtcggcctgtaccccggaggcacctgggtccatcagagaaggtgcaggtgacagaggcgaaggcagatggggcactgacccaggaggagaaagcagccattggcactgtgagtcggtggggcaagaggggctggaggggatggacaggcaggccccagcagccccagggtttatggagtcccctgtccctgactgccatggctgctccctacaggtggagctcagtgtgttctgggattatgccaaggccgtggggctctgtaccacgctggccatctgtctcctgtatgtgggtcaaagtgcggctgccattggagccaatgtgtggctcagtgcctggacaaatgatgccatggcagacagtagacagaacaacacttccctgaggctgggcgtctatgctgctttaggaattctgcaag

SEQ ID NO: 10303 - DNA, 856 bp, Homo sapiens
gcattaacctgtctgggggccagcggcagcgggtcagtctggctcgagctgtttacagtgatgccgatattttcttgctggatgacccactgtccgcggtggactctcatgtggccaagcacatctttgaccacgtcatcgggccagaaggcgtgctggcaggcaaggtgaggcctgccagaggctaagggggctaagacgcgagtgctggtgacgcacggcattagcttcctgccccagacagacttcatcattgtgctagctgatggacaggtgtctgagatgggcccgtacccagccctgctgcagcgcaacggctcctttgccaactttctctgcaactatgcccccgatgaggaccaagggcacctggaggacagctggaccgcgttggaaggtgcagaggataaggaggcactgctgattgaagacacactcagcaaccacacggatctgacagacaatgatccagtcacctatgtggtccagaagcagtttatgagacagctgagtgccctgtcctcagatggggagggacagggtcggcctgtaccccggaggcacctgggtccatcagagaaggtgcaggtgacagaggcgaaggcagatggggcactgacccaggaggagaaagcagccattggcactgtggagctcagtgtgttctgggattatgccaaggccgtggggctctgtaccacgctggccatctgtctcctgtatgtgggtcaaagtgcggctgccattggagccaatgtgtggctcagtgcctggacaaatgatgccatggcagacagtagacagaacaacacttccctgaggctgggcgtctatgctgctttaggaattctgcaag

SEQ ID NO: 10304 - DNA, 2074 bp, Homo sapiens
gccaccacgcctggctaatttttgtatttttagtacagacatggtttcaccatgttggccaggatggtctcgatctcttgacctcgtgatctgcctgcctcggcctcccaaagtgctgggattacaggtgtgagccaccttgcccgatctcagagcctgttttccatctgttgaaagcataggagggcccaggcccagcttgtgtggcaaggctgcttcatggataaatagtttggcaagtatgcaagtgcttagcaaagccgcttatttatcaaccaaaatttattggacaatcactatatacaggcactgttccagacactaagctatagcagtgagcaaacaaaaaaattatagtcctcatggagcttgttgacgtctctgggctcacaacatgcccctggctccttgttgcccagacccagctccccagcccccaattctggattggctcacagaccttttcctgggctttcttgcctatggctatacatacagccaacgtgccttgagcatttaccaagtgctgtgcccctcgctcacacactggacacattttcttttaagcctacagtcatgcagattttttttttttttttttggggacagtttctcactctgttgcccaggctggagtgcaacggtgcgatcttggctcactgcaacctttgcctcctgggttcaagcgattctcctgcctcagcctcccgagtagccaggattataggtgcccgccaccacgcccggctaatttttgtatttttagtagagacggggtttcaccatgttggccaggctggtctcgatctcctgacctcgtgagctgcctgcctcagcctcccaaagtgctgggattacaggcgtgagccaccatgcccgaccaaggacgtgagttttaagctcagccagtctaactccagagcccaagttcctaacccttgtatttgagtccgtttctccataatttgtgaagagagtttttcttgttgcttaacccaagtctttcttgttgccctttcaatccccctcattttattttcatgcttgtccattgaacccctttcattagagtggggaatgggagataccaggggcttgcagggagaactagctgaaccctatctccttcctcccaccctactgcagcgttggaaggtgcagaggataaggaggcactgctgattgaagacacactcagcaaccacacggatctgacagacaatgatccagtcacctatgtggtccagaagcagtttatgaggtgagttcctgagagctcccagccctcccggaggctgtatcaggcctccccaggccctgccagatggggtgcaggtttctccctgacactcccagcctctgtcctggggggtgcttgaggccccctccctgggcctgaccagctgcctccacagacagctgagtgccctgtcctcagatggggagggacagggtcggcctgtaccccggaggcacctgggtccatcagagaaggtgcaggtgacagaggcgaaggcagatggggcactgacccaggaggagaaagcagccattggcactgtgagtcggtggggcaagaggggctggaggggatggacaggcaggccccagcagccccagggtttatggagtcccctgtccctgactgccatggctgctccctacaggtggagctcagtgtgttctgggattatgccaaggccgtggggctctgtaccacgctggccatctgtctcctgtatgtgggtcaaagtgcggctgccattggagccaatgtgtggctcagtgcctggacaaatgatgccatggcagacagtagacagaacaacacttccctgaggctgggcgtctatgctgctttaggaattctgcaaggtgagcttgtgggggtgtccagaaggggctccaatatcccttcttctctgggctgccaggccccccaaaccgtgcccttgcatccaagcctccctaacccactctggtcaacccgtgtctctgattctgcccctttgtgcccgctcactagtccaggtgagccagcgccctctgccttctccaacagggttcttggtga

SEQ ID NO: 10305 - DNA, 715 bp, Homo sapiens
gccaccacgcctggctaatttttgtatttttagtacagacatggtttcaccatgttggccaggatggtctcgatctcttgacctcgtgatctgcctgcctcggcctcccaaagtgctgggattacaggtgtgagccaccttgcccgatctcagagcctgttttccatctgttgaaagcataggagggcccaggcccagcttgtgtggcaaggctgcttcatggataaatagtttgcgttggaaggtgcagaggataaggaggcactgctgattgaagacacactcagcaaccacacggatctgacagacaatgatccagtcacctatgtggtccagaagcagtttatgagacagctgagtgccctgtcctcagatggggagggacagggtcggcctgtaccccggaggcacctgggtccatcagagaaggtgcaggtgacagaggcgaaggcagatggggcactgacccaggaggagaaagcagccattggcactgtggagctcagtgtgttctgggattatgccaaggccgtggggctctgtaccacgctggccatctgtctcctgtatgtgggtcaaagtgcggctgccattggagccaatgtgtggctcagtgcctggacaaatgatgccatggcagacagtagacagaacaacacttccctgaggctgggcgtctatgctgctttaggaattctgcaagggttcttggtga

SEQ ID NO: 10306 - DNA, 24555 bp, Homo sapiens
gggctcggcagggcgggtccgggcggagcgcggggtgcggagggcggaggcggctccggcgcccgctctgcccgccgctgggtccgaccgcgctcgccttccttgcagccgcgcctcggccccatggacgccctgtgcggttccggggagctcggctccaagttctgggtaaggcgcggggctccggggtcactgcgcgggggccagggtcggccggcttcgcccggtccccgccgcctgccttcccgcggggccggcaggtatcccgggacggagcccctgagacggcctgggcgcccgggagggggcgatgggctcgggagggaggttggctgcgccgcccggagccgggtcccacgcggtgtcggggacctgccctgctctgcccttcccggctgcagcactggggagcccgggaaagtgaggaagagtgcgcggctggggcgcaaaggcacagtgcgtggctgggtgagtcggctccatcccagcccctccgtcgggtgcggaaggggcgtttcgcaatcagccgcgggttcctgatggagggtcttccctcagcatctgcctcaggttaggactcggttgcccacctgggcatggattgcccccagggcatccagagcacctgctcaaccaggtgttttgggaggccggctgtgcagtgtcccacccttcttaggaaggtttcctgccaccttcttttctctaggtaagactgaggtctgagagcaggccatccccaccactccggactcagaagggagaagcagaccccagtctggagacaggtgcagggtgtcaggattcctgtagtccaactcccttctcacagatggagaaagggaggcccagagagaggaagggacttgcccaaagttacccagttcaatgaaggcagagctgggatagaaaaacaggctacaggccaggtgcagtggttcacgcctgtaatcccaccctttgggaggcagaggtgggaggatcacttcagcccaggagttttagattactgtgagctatgatcgcaccactgcactgtggcctgggcgaaagagtgagaccctgtctctaaaaaaataaataaataagaaaagaaaatcaagcctttggtgactctcactccaaatctctttctaagacaggctgctcttcagcctgctgactccagcctccagcacagttcaggtgagctaagtgcatacagcctaggagctttcttaccaacttgcaaaacttacttgcctctatgaggcaagtgatcatgtggtctccgttttacagagggagctcagattaaaggtgcttctctgtggtcattaaaggggtgtccagggcttgtgaatcccaatctctaagtcttttcctattttgagtatttgtacatatatgccctttgtgtgtgtacgcacacacgcaggcacgtggggtgttacccaagagttcgtgctgtgcacgtgtgtgcacaggtgtataagtctggagctatgctcttgggctgtgtttagaatgggctgaaggcgttatatggattttttgaaacttggggcaatggaggtaaaaaaaaaaactgtaaaaaggcatatttgggattctctctttttctgtgggtgacccaaaggttaatccgagatggtgcaacttctctgccactgcccttctttcccagtcccacaggaacttcatgtattattcagcatggacaggccacttgccaccagggtccagaggttgtgcctttgcctcatgagcacacttcctttcactgccctttgggccaggctggtatgaccgtggcaggtttgtggtgcctgggatgccaaacagaaaatcaagagggtagttgtgcccaagcttcaggcacaagggctcattgttcctgggtagcctcctgaaccctgagagcttaggactctacagagacaggtctcctggaccccagagttgggaaattcaggactccctttttgtcccatgttcagacatcctctggctctaccttaacatgggattgtggaatccaagaaagtgggagcttgggagtttgaagcagcgagtccaacccctcagtgtagagctggggaaactgaggccaagggagtgaaggtcacaggacaatcaaagacagagtgctgggctgggaaaccggaccccggggctgtggttacagggttgccattgcctggctgtgagcctttgagcctctgggccctctggcccgcgcacttctccttgatgctcgtgagctatacacacctcctctgaggatgcaggctcagtgggagtcagctcatctacattatgaagccctcgtgagatctctgcttggataccttaaatggcaaactgaccaccccccttcccaccccaatctctaaacatctttcacattctcttctggctcctgaaagctgttccaggctgcacccagtgtggctggtgactggggaaggagcgtggagagagaaaggaggctcccagctcatcctctgagggaatgacagggtttgtacagctgaaaggagagagagtctacactggaagctggatcctctgccacagcctaattacaaaaaaggcctggagttctgggctgttcatttgtgatgtgctgtgttgcatctcatttgcatggtgtattattaaggcacaactccccctgaacctttaccttaggggcctgtgggtgacccactttgtgggaagtggttcagggcagcccggaagtacctgaactaggagtgaaaatgcaaggagggggtggggtgttcaggcccctctgggccgctcatttaatctaccaagatgctcagtagctcatccttatagcttcagtttctccaccagtggaatgggaaataacccaacccctacccacctcacaagatttttctgatcaaatgagacagggaatgtggaatgattttaagaactaagaagttttctatgggtggcaagttctgacattccccggaagagggaggagaaagaaaaatggggttagaagaaaatgtcagacgtgggaagacctgcagggaaagagctggtagggctgtcgggccagtggctcccatttcagctgtttgctggggagctgggagctgttcctggctcagtctgagggtaggagactggagaggaccatgccccttgggacatgtgtacacacatctgtgtactcacacaccacctgccaggtgaatgatttgtgtgaatccttctctctctcacccatatcgactttgaagcaggttaccaacttccctgaatgtgccttgggagtttttgtggaaataaattccaaaagagtgaactgtgtaattaaaccacctcactactcaggaggccagaggtgcctcagaacaagggaggaggtgggatcctctgcctgcaggattcctctctgttctgaaccacagaggttgggagcacctgggtggtgaagggagtatgtggaggaagggcctggaggtatttaccccccgccagataaacacctgttggcagaattagccttgatctgacagccccaggaagcttagaaatctgaagatcctgaccatgaaagccatccaaagatggcaaggaccgcctgagaagtagtgagctccctgtcactggggggtatgtaaggacatggttagtgactgcttggcggagatgctggagagaggattcaagccaggaaagaaggtggggtcctgagattctgtgactgggtagagggaagatgcggccagtggggattcattagttcctcctctgagatttctggactcctccttccctggctctctccctgctctacatacggaatttgcctagaagcagctcttggtagaggcctctgggtctccccttggttaggcccacatgggaaaggtgacctcattgttcccttagctgtttacccatcctagggaggggcagatccctggtcccttggaggctcagctccctgtgtctcctgctctgttttagctagccccaattctgctattcaccagctgtgtgactttgggcaaatgactcaccttctctgggctccagcagggctgaggtgggctctggggcctgcttcaggtctggagttgcccaattttggaaggatgagccttgggcttgggggcgaaggctatgcatgattagggcccttcaaagcttagagctcctgggtatcagggtctcctctgccttcttagtaggcagccacaaaaatgtatgagtaatgggcaaggctcctatgccaatgtattttgactcacaaatgaagacagtgtcctgcacatccatggggaagctgagtgggaggtagacactcctccgcttagcagacaccatagctcaccctcccctcaggaacccagtcctccctgcaaggccagagctcccggggctcctttcctccatctcagctgctgcaagcaaacccagtgctggatggctttgacctctgagctcttggcttctggctacggcatttcattgcttgtggcctcaggctggcttctcctcaatcctgctgttcccccacttcacctgggccttaggtccctgagggccagagagatacggggaaggaagtgagtcagggaagtggcattcaggagggagctttgccaagcccgcctgtagtccccagacagggaaatggtcttgaaacactgggcaggcttccagggaggaaggacttggcagggatgaccagctgagccaccccggagtagggccagagcacccggactgtattcagtcctctccattggggcaggatccctggggagttgggggtgaaatgagacctggtatgccattgctggggtggctgggcccctccccttcccgaactgaagttgtttctgtttctggtactgcggtgcagtggttggggctggcagggggcagggtgggatagtgaatgagagcctaactctaggcttggattttggatttctccttttttttttttttgtgacagagtcttgctctgtcgcccaggctgaagtgcagtagcacaatctcaactcactgcaacctccacctcccaggttcaagcaatcctcctgcctcagcctcccaagtagctgggattacaggtgcacaccaccatgcccggctaatttttgtatttttagtagagacggggtttcaccatgatggccaggctggtctcaaattcctgacctcaagtcatctgcccacctcagcctcctaaagtgctgggattacaggcgtgagccaccgcattcagccagatttctcctaactggatattcaggtttctagtcaggggctcccagaaccccagctaggccactacccaggtgttagccgctctgctccctcagctctgtgagaataattgcaaaaagcaggtgatatgagaatgggctgcatggctgaaaggtgatctgggtgcaagtgctctatccccagggtgggacatcatgccggagtcctaccaggtgtacaggaaacactaatcctgtgggaaggagctgggccctggaacaaaactctctgggtctaatcccagcatcagccctgggtgtcagctgtcatgagcgtgaaatgatcatcctggcccacagcaggagctcagtgaaccaaagccccttccagaagcacattggccagttgagcccgtgagccatccctgcaaggggccagcaggcgcagcacaaccagtttttgtttgtttgtttgttgtgttgtgttgtgtttttgagaaggagtctcgctctgccaccctggctggagtgcagtggcgtgatctcagctcactgcaacctccgcctcccaggttcaaacaattatcctgcctcagcctcctgagtagctgggattacaggcatgcgccaccatgcctagataatttttttaaatatttttagtagagacagcgtttcgtcatgttggccaggctggtcgcagactcctgacctcaggggacccaccctcctcggcctcccaaagtgctgggattacagcacagccagtttttgacccctgcccccaggccttccaaaggctgagggagggtgagtggggatcagcacgtgtccttgctctctccacgccttcattgctgctgagtcaatggtcttgtctgttcatcccttccctatctgggacttcaggagctgccctgcagtggtggcttccttctccagtaccacacaggaatagggaagtaatgactcttctcatgacagagactgtcaacaggcctggggcccccagggcttgggaagtccctggcaaagctggggcagagggctccggggtcctcaccccccgcccccatcgcctgtatgagtctgcagtgatttcagcttcagtgaccatgaagtctgccatgagggggcctctgccacgtggtccattctggatgtgggaccttaccccttatcagccccatccagctgtttaatcgcattattaaggaagctgttgttgctgtggaaactgtgtgggtgatggtgggggagggggctgtgggctcagctctcacctcccagcagtgctcttcagagcgggaatgagaggagagccttgagtagggatcgtcatcctgccctgcagggattcagggagtgttacagggtccagggaataaccttcactggccctgtcctcaccttcattttacacataactgagttggagacccttctgggtgccaagaactgtggccttggtaccagggagagaacactgtgttcctgggcatgaagctgcagaggctgcggctggagttggcaccctccatttatctattcatttgtttattcattcttttgttcaatagatggttattgagtaccttctctgtgccaggccctgctctaagcaacaggaaataccatcaactgcagaatacagagctaaagaatctgtcttcgtggagcatatactctagtgggaagaggcagtaaaacaagaatcataaaggccaggtgcagtggctcatgcctgtaatcccagcactttgggaggccgaagcaggaggatcacttgagcccagaagttcgagaccagtctgggccacatagtgggaccccatctctacaaaaaaattaaaaaattagctgggcgtggtggcacatgcctgtagtcccagctactcaggaggctgaggcaggaggatcgcttgagcccaagaggtcaagattacagtggggaaaaaaaaaaaaaaagaacagttgaatgtggcactgtcatgccgttcaacctgtaatttgaaggtagaatggacagggtttgctgagagaccggatgtgggatgtgagagaaagagaagaatcaggggcaactccaaggactctggtctgggaagagagacaggaggaaggaactgccatccccgggccaggcaggctagaaaggcagggacggccaagagctcagttctggacgtgttttgtatgacgtgtcccatagttgatgtcctagctcagggtctggagtgaaccaaatagggagttaggggtgagggcctgtgtgggcgggtaccccctgcctcctagggagggccctgcccaggtgggacatgcttatctcaaggaaaggagcccaggctgaatgcccttgagggtcaaagcagccacccagttctcacagccccaaagtcccctggttgttgccacagagcaggtgtctgcgaaaccaaaacacgggcctgacagctggaggctccatcacccgcttccctgagtgttgtcccgttgccatcgaagtgctttgctgttcattctccctcaccttctccccgctgtggggaggtgaccagatgctgtcatcactcccattactcacaggtggagactgaggttcaagggcacgaaggggctcaccaacagttgcatggctcaaaagtggcagaagccatcctggattctccgcatcggggttgggttcttcctgtggccactccccacccgccttacagagccatgccaccggcctgcaagtgcacacagcgattcccaccatgtccccacgcctgggctcctgtcctcaacatgcacactcccttgtgagtcaatggccccgtgtggcatcacaaagcctgggtgcctgtcccggccacacactgctgggtgtccttgaacctgttgccaaagtgggtgtagtttctcttttgtacactgggcctaacagtgcccctcctatatacccctggaagttgttctgagacaacatccagataacaactaggtaagtgcagtaataaaatgcgggagaaacattaggggcctttattttcctcacttaactggctgccagggaaaagcaaggaaaggtcagaggctggggtgccccagagaggccccatgtagatgaggctctggctgggcccagagaaatgggatgtacactccggcccagagacctgaagatctgggttcagggcagctttgggacaggctatctggatggcaactaactggagtacctgatcaggcctagaggtgtgtcctgtgacccagtgtccaggcctgggccagcatgtcagagactcagcaagagtatgtgggtccttggctcacattgtttgagcaactactgaatactgaataggactactgaatactgaatactgaataggacaagatgtacatggtacaacttctgcccacctgggccttcaatgaaatgcccccaggcagcatgtccctgactgcatgcttcacagagcagggataggcctgcccaacgtgccactgtatctgcagaacccagcccactgcctgactcaccaaggccctcaccaaacattgtcaaggccaagagtgacgctccagggaaggggatctctctaggaggaagggtgctcaagatgaagaaggtgggttttcagccaggcctgtcacccctccctggagtggttaggttaggattttgacaagtggtaaaaagagggactaggttgagcaagggggtaggagcaagaatctcagagcagatttaggatgaagtgagttggctgtgggggaagggagcaatgggaaaggaggtgggaggagatgccatggggggggtcttgaggaccaggttgggtgctaggatgtggcttcatgagcagcaggagtcactgcaggtttgtgggcatgaggcaagaggcacaaagctgtattttgggaagagccatctcgcaggtgggcaggggcactggagggcagagggctgccccagatgggattaagaagggaaggcaggccaggcacagtggctcacgcctgaaatcctggcactttgggaggctgaggcgggcggatcacaaggtcaggagttcgagaccagcctgaccaacacggtgaaaccccgtctctactaaaaatacaaaaattagctgggcgtggtggcgggcatctgtaatcccagctactcaggaggctgaggcaggagaatcatttgaacccgggaggtggaggttgcagtgagccaaggtcacaccactgcactccagcctgggtgacagagccagactccgtctcaaaaaaaaaaaaaaaaaaaaaaggaagaagggaaggcaggctggggaggttggggaaaggaagcagggagtgcagatcactccccttccatgagttgttttcttaagatgctagaacttggccaggcatggtggctcacccctgtaatcccagcactttgggaggctgaggctggcagatcacttgaggtcaggagttccagaccagcctggccaacatggtgaaaccccatctctactaataatacaaaatttagctgggtgtggtggtgtgcacctgtggtcctagctacttgggaggctgagacaggagaatcacttgaaccctggaggcacaggttgcagagagctgagatcgtgccactgcactccagccgaggtgacagagtgagactccgtctcaaaaccaaaacaaaacaaaaaccaaggccgggtgcagtggctcatgcctgtaatcccagcactttgggaggccgaggtgggcagatcacaaggtcaggagatcgagaccatcctcgctaacacggtaaaaccccgtctctactaaaaatacaaaaaattagacgggcatggtggcgggcgcctgtagtctcagccaatcaggaggctgaggcaggagaatggcgtgaacccgggaggcggagcttgcagtgagccgagatcacgccactgcactccagcctgggcgacagagcgagactccgtctcaaaaacaagcaaacaaaaaaacagaaaacaaaaattagcctggcgtagtggcatgtgcctgtaattccagctacccaggaggctgaggtgggagaatcgcttgaaccctggaggcagaggttgcagtgagccaaggtcgcaccactgcactccagcctgggtgacagagcgagacttggccttaaaaaaaaaaaaaaaagaaagaaattaaccagccgtggtggtgcacgcccgtaatcccagctactcagaaggctgaggcacgagaatcacttgaacacgggaggcagaggttgcagtaagccaagattgtgccactgccctccagcctgggcgacagagcaagattccatcaaaaaaaaaaaaaaaaaaaaaaaaaaaagatgggagaactcagaactcaagcatatagattattcaacagttcacatagccagatagttcaaggccagctgtgggctttgaatgccatagtaaaatgtttgaactttgccttctaggcagtagggagctactgaaagtttaaagggatggtatactattattctttcattcatttattcaataaacgtgtatgtgtgtgtgtgtattttttttttaagagtccaggtcttgctctgttgctcaggctagagtggagtggcataatcatggctcactgcagcaacaaactcccgggctcaagagatcctcccgccttagcctccatgtaactgggactacaggtgcctgtcaccagaccaggctaatgttttacatttttgtagagacagcgtcttgctatgttgcccaggctggtctcaaactcctggcctcaagtgatgctcctgccttggcctctcaaagcactgggcaatgtccctggtcttcaataaatatttgatttatttaagcaaatcttttttctgagcacctactatgtgctaggcaccattctaagtacttaggatacatagataaataaaataaaggttcttcccttcaaagagcttacatgtcagcaagtaaaggaaaagatgagagaaaatataataaatcagtaaattatatatcatgtcaaaaggtgataggtgttatagagaaaagaaaaagcggagaagggtgggagaattgggaatacaggggtgggacacaggtggcagtattaaacaggatggtcagggtaggcttcattgagaaagaaagacttcaggatgtctgggggaggagtgttccaggaagagagaagagcaagtgcaaaggccctgagacaggagcagcaagtgcatttagaaacagcaaggaggccagtggctggagtgaagcaggaaaggcggggagagggtcatgggttgggggaagggacattgtgcaggtctatgcaggctattgtagggtgtatggagtgaagatgtcaagtcagcagttagatatggagctggagatttggggagcaatgagctggagagatagacttgaaagtcattggcatatagatggtacatcatatcatcatatgagactgcatgggattgccaagaggttgagtgcagataggaaggaggcagagaagaggaaaggactgagctccaggaccctcttgcaccaggcaggggaatcagcaaagagactgtgatggcatggccagaaaggaaggggaaaaccatgcaggatctgggaccccagggaatctgaagggaagagaccagaagtctatggcaattgctcatgaagagatgagggtctggccaaggggccaggtgggaggaaccaggtaagagatattatcatcccaatgttacccttaaagaaaccaaggcccagagaggggagaggttaagaacctgggtcaagatcacacagcttaagtgtgacttcttctttttattttttatttttttgagacggagtctccctctgtcaccaggctggagtgcagtggcacaatctcagctcactgcaacctccgcctcccgggttcaaacagttcacctgcctcagcctcccgagtagctgggattacaggtgcctgccaccacgcccagctaatttttgtatttttagtagagacgggatttcaccatgttggtcaggctggtctcgaactcctgacctcgtgatcttcccacctcagcctcccaaagagctgggattacaggtgtaagccattgtgcccggccaagtgtgagttcttttaagctgtgtgaccttggccaaggtgcttaacctttccctgccaagtctcaaacacctctttgtccagctactatgcttccatcaagaatcaataggacctatgtccctacaggtgtcagggtagctggcagaatggtgatgcccttggcagaggcaggcaaggccaaaggaagggctggttctggcagggagtgaaggatcttactttgagaggtattgaatatgaggtggctgcagacagatggtgacgccatctgagaggcagcaggaagtaggcgctgaggctcaggaggtgatttgagctgttgatctggatttgggactcctcaggacaatctgtgaacaatgatgagagagagcaccaaggaccaaggtctgaacttgggagctagggcccatgtccacagggtgaactggaaggaagataaggagacagcaaggaatgcttgccaagaaaccaggagaccaggaaagagtagtttccaagagatgggggaagcccacactgttgcagggaggtcctgcataaagtctgaaacgggtctatttaattcgcccttggaggctgggcatggtgtctcacacctgtaatcccagcactttgggaggccaaggcgggtggatgacctgaggtcaagagtttgagaaccagcctggtcaacatggcaaaaccccgtctgtactaaaaatacaaaaattggccgggcgtggtggtggaagcctgtaatcccagctactcgggaggctgaggcaggagaatcacctgaatcccagaggcggaggttgctgtgagctgagatcacaccactgcacaccagcctgggagacagagcaagactctgcccaaaagaaaaaaaaaaattgtagttggaaggacttctggttctatagggtggattgaacacaagactttatctccagtccttcctgattttccatcaaagtgacagtaaggaataaagaatgtaaacctacaaggacaaagagaagaggagacaacagcagacaagatattaacacctttttggaaagtgagaaacaggttgaggagtgatcactgacacagcagagaacaactgaaaccaaaggccatttggagtctgtaaaagctcggggattggagggctgaaggaggcaaggggaagagcagggctgaaagcagcggctgctaggagaatgcataaggagagatgaaacacccaagatacttatccatctcctctcaaagccaggcaaattccagccacctcacagaagaccagcagtttattctgtggaattaagtaaaagtctgcatactgaaggatagaaccctcagccctcactcctaaattggtcccagagaaaagacctccagattcttccagttgttgggggagtcttccctaaaggaccaggttcctacttgatcactctgcagtgaagcccaacagccaataagcttggtcctcggtactctgtcttcagtagctgtttcttggtccttggtccttggtactctcactcatcattgttcacagattgccctgaggagtcccagatccagtcccaaatccacctgcccccaacacacagagcagccaactctttagtgtcttactccaaaatattgagacagccaagccgcaagaatcaccacaggtcgggtgcagtgactcacgcctgtaatcccagcactttgggaggccgaggcaggcggatcacttgaagtcaggagttcgagaccagcctggccaacatggcaaaacccctctactaaaaatacaaaaattagctgggcattgtgacacgtgcctgtaatcccagctactcgggaggctgaggcaggagaatttcttgaacctcagaggcagaggttgcagtgagctgagatcgtactaccacactccagcctgggcgacagagggagactccatctcaaaaaaaaaaaaaaaaagtcaccacacatttgaggaaaaattctgttaaaataaaaactttagacaaattaaatttagcagagtttatctgagcaaagaacaattcatgaatcagccagcatcctgaaccagtagaggttcacagagttttaccacccagcagtatgggcaggcagtattaatggacagagaaaggaattgatgtatagaaacagcttgattggcgacagatcagtatttgccttatttgggcatggtgcaatgaggtgtttgccttatgtggacatgttctgatgatctggcagcttgtgattggctgaaaattctgctatatttggctgagacttggctgcttattgtaagaatatactctcaagttacgttgcagtttgtttacatattgaattatgctacagtccactatgtatggagtcagctttatacctgggtgacagagtgagactttgtcaaaaaaagaaggagaggagaggagagagaggagagagatgaggggtggggaggggaagggaggaaaggagaaaggaaggaaggaaagaaggaagggagggagggaagggaaggagggagggaagaagggaaagaaagaaggaaggaaggaaggaagaaagagagagagagaaaggaaggaaggaaggaaataggcaacacataaaataaatttttttaataggatcacaggtcactgtgaacaatagccgttcattaaatgacttcggaggcatatacaaaaagttacatagttgtagaaaaagcttagctgttttaatagcgagttctcagttttcttaagtgatcaaaaacctaacaaagacagcatgaagcacaggaaattatctgggtagaacacagaatctttgttttctaggccaactacctaaagagaaagaaaaacattttacaatttcctattatgatcagaccaataatctaagaacaccatgttgttttaatggagagaaccaaattctagttttgcatcagtgtaattttgatattaatgctagctcttatcgcccaggctggagtgcaatggtgcaatctctgcttactgcaacctccgcctcccgggttcaagtgattctcctgcctcagcctctcaagtagctgggattacaggcgcctgccaccacacccggcttattttttgtatttttagtagagatggggtttcaccatgttggccaggctgggctcgaactcctgacctcaagtgatccacccgcctctgcctcccaaagtcctgggattacaggcgtgagccactgcacccggtcgctaacttttattcttaaaaaacttgtaaataattacctcctaatcttaaccagcttgatcacccataaaatttctttcacaagattcatcttccacaaacctcctacaactcttatatccattcactttttgtcctatactttcctcttctcattttcgaaaaatcagtcatttcactttaggacaaaatttattctctttttccgttatcaaaacaaaacatcctcacgtcttatagcttttccttagcttcctttgtatatttctttttcatatattcctttttcttaccttccttgtatattttcatatagattttcccccttattgtttctagtaattgtagctacatatattaattagaattcttaaccccggccaggtacagtggctcatgcctgtaatcccagcactttggagtccgaggtaggcagatcacttgagggcagaagttcaagaccggcctggctgacatgctgaaaccctgtctctattaaaaatacaaaaattggctgggcgtggtggcgggcacctgtaatcccagctactggggaggctcaggcaggagaattacctgaacccaggaggtggaggttgcagtgagtcaagattgagccactgcactccagcctgggtgacagcgcgagactccatctcagaaaaaaaaaaaaaaaaaaagaattcttaacccttagtgaccttaatttccatggacattagaaagtaagcatttgtgaattgtgtgtcacaccagctgtagattggtaaatctatgaaccataatgtctagaagcatgagctttctcatagtacaatttgtcagtgtggcacagaacatgtttctcaatggtccaaaatgtctttaagtctctctgtaaaaataaactgtaaaggaggcaaaatttcatttgtatccctttaggttttttgtttgtttgttttgtgaggcctgaaaactaaattgttgtttgtacagatttccctcctcctcaactttctattcttgatgctaagagtgttaaaaccttctggtggctgagcgtggtggctcacgcctgtaatcctagcactttgggaggctgaggcaggtggaacacttgacctcaggatttcgagaccagcctgggcaacatggtgaaaccccatctctacaaaaaatacaaaaattagctggatgtggtagcttgtgtctgtagtcccagatactttggcggggctgaggcgggaggattgcttgagcccaggaggcagaggttgcagtgagccgagatcttgccacttgcactccagagtaggcgatagagaccctatttcaaaaaagtaataataaaaccttctggtataggaaggacatcttttacatgggaattttatcttacattcatttaactcacttattttcaacacttatgcttggattgcctataaagatgagataataaacaactagtcatcattttgtttttcttgctgacaaattttataatataaagacaacataagcttgttttaccagtaaacctagataggaaatcatgcatctttatgatatttaatccccaaaactatgaaaacatgtctgtttcagtcaaaccaacaatattcttatttgccaaagattacccaagtcagatgagctgcaaaagtatttgaggtagttcttaattttctgagagaatacttcatttatacaagcacttatttttcttaaagccaacaaaatagagctctttcataatttaattttggagcattaaaaggagataagaaactatgatacctgtatcatacatacagacttatataaacataaacagcaacagatcttacagctttcatttaaatatcttagccatgttccaggtacagtaatataaaactcctgaatttattaaagactatctggatccaaattgttcttctggccaatggaacaagatttcttgcccagatgactaaagcttttgaataagattcgtgaaggagcttttaagatttttttgtttgatttctgtaaggaacctattataaagaggcaattttttattcatttaatcttttagatgcctctgtgtatcaattaaagaatgcatcccattgcttttgtggcatttttgaacctttcttttctaatgcaccttgcaagtgaacagttttatctaggtcaaaactttcccactgtggccactgtaactcttaagttgtcctcagcaaagttaacccatttttccaaaaatacacatgttcctcataattgttgttcatgaagttagccaccgtcccagaaagtggcgtctcagactctggagtcccagactccttagatttggaggaactcactttcaaaaggcacctgcctgaggcttttaactggatccatttcagttaattatcagatctgatttgctcctggacccagtcctacttgacccagtctaagaattgttcaaataaacttggagaacacaaaacacaaattcctgaagcttggaatctgagatagaactcacccatgacctccagttgctacaagagaacaattggcacagtgtgccctgtcaggtacccttacttggtcactaaatgctcctgagggtcactggagttctacttccgatcccacttctgacaccaatctgttaaaagaaaagctttaggccgggcacggtggctcacgcctgttatcccagcactttgggaggccgaggtgggtggatcacctgaggtcaggagttcaagaccagcctggcctacatggtgaaaccccatctctactaaaaatacaaaaattagtcaggcatggtggtgggcgcctgtagtccaagctactcaggaggctaaggcaggagaattgcttgaagctgggaggtggtggttgcagtgaaccgagatcacgccattacactccagcgtgggggccaagagcgagactgtctcaaaaaaaaaaaaaaaaaaagaaaaagaaaaagaaaaaggaaaagctttagacaaatttagcagagcttatttgaaaaaataagcaattcatgaattcagcagcatgctaaactagtaaagactcggctgggcgtggtggctcacacctgtaatcccagcactttgggaggctgaggcaggcagatcacctgaggtcaggagttcaagaccaccctggctaatatgatgaaaccccatttctactaaaaatacaaaaaaattagctgggcgtggaggcacacacctgtaatcccagctactcaggaggctgaggcaggagaatggcttgaacctgggaggcagaggttgcagtgagccaagatcacaccattgcactccagcctgggcaacaagagtgaaacgccatctcaaaagaaaaaaaaaaaaaacctaaaccagtaaaggctcaaagaactccacctaaccatgtggtcaagtagtacttacagagagaaaaaaagtgacacatagaaatagcctatttagaactcggcatttgctttatctggacaggtctaagcactttgcagtctgcgattggctgaaagctcagttgcaatgattggctgagactcagctacttgttacaagaaactctcatgttaggtttgtttacatattaagttgggtttcagttcactatgtaaggaggcagcttaaggccaaatttaatctaatttaacacctccagcttgaaagacaaaaccaaaccaaatcaaccaagaaacagaaaaaagaaaattcaaagatgtatgagcatgcataactttgataaaaataaaaataataattatttgaattggcaattagaaaatagttatatcctcaggtaacagatgtctctaggtggatgagattgtgggtggtttttcttgttgttgatattttctgtgcatctctaaaaaacatctaatgctttgcaaagaacataagaaacagattagtacattagtggccttggaggaaacaatctcagtaaaacatgtgtttattaatgaatgtattcccccatccctttccaaaaaagttcataggtgtagttatagtcaaaggtaagaggcagtcttgtcagagccagtaaagtaaccaaccatcctggtttgcccaagaccaagcagcttcccaagacactagactttcagtgctaaaaccagagaagtcccatccatactaggagagttgatcactctagtctgtgtaatttgcaaagactctccatatcctttggttcctgtgagtctcaaatccacccagtgaggtacaggtgggccggtggatggtcacctccatttcagaagagaggcagctaaggctcagggaatctccctatccctgacccgggaaaggccttaagagaaagtggtcttttaaactgtgtgtatatatcactttgataaaattaaaaattagttttaaagaagagagagggccaggcgcagtggctcacgcctgtaatcccagcactttcggaggccgaggcgggcaggtcgtaaggtcaagagatcgagaccatcctggctaacacaggtgaaactccatctctattaaaaatacaaaaaaaaaaaaattagccgggcgtagtggtgggcacctgtagtcccagctactccagaggctgaggcaggagaatggcgtgaacctgggaggcggagttttcagtgagccgagattgcgccactgcactccagcctgggcgacagagtgagactccatctcaaaaaaaaaaaaaaaaaaaagagtgagggccaggcgcagccgtcacgcctgtaatcccagcactttcggaggccgatgcgggcagatcacgaggtcaagagatcgagaccatcctggccaacatggtgaaaccccgtctctactaaaaatacaaaaattagccaggcgtggtggtgggcgcctgtagtcccagctactcaggaggctgaggcaggagaatcgcttgaacccgggaggcagaggttgcagtgagccaagatggcaacactgcactccagcctggcaacagagtgagactctgtctcaaaaaaaaaaaaaaaaacaaaaacaaaaaaaaaagagtgggaatccagaatgatagaaagaaaatgagcctgggagggatgaactgcagaggaccataaggtaacatgggagcagttttgcaggtgtatacaactgtcaaaactcactgattgtacactttaattgggtgcagtttttgttgcccttaaattatgcctcaattagagagaaagagagagaatataaggaaatgggggcagccatggcgtccttggagaattcacacttgggacgacaactgctcatttgtgtactctctcctcctcacctgtcttccactccacccctgtctctgatggaacatctctccagctaagccatcttcctcaaggcagcccaattctctgtggggctgccacagcactaaactgttctctgtgtccccaggactccaacctgtctgtgcacacagaaaacccggacctcactccctgcttccagaactccctgctggcctgggtgccctgcatctacctgtgggtcgccctgccctgctacttgctctacctgcggcaccattgtcgtggctacatcatcctctcccacctgtccaagctcaagatggtcagtggctcagggatctcctaccgatggggctgggccctggggattctgcttttattttttaatttaattaaattaattaattaattaatttagagacagagtctcactctgtcgcccaggctggagtgcagtggcatgatcttggctcactgcaacctctgccttctgggttcaagcgattctcctgcctcagcctcctgagtagctgggattacaggcatgcgccaccacacccagctaatttttgtatttttagtagagatggggttttgccattttggcaggctggtctccaactcctgacctcaggtgatcagcctcccaaagtgctgggattagaggcatgagccactgtgcccagccagcattctggttttaatgaggccctctcccacctcctcggctggactgggttccccagtctcacctgacctgcttggggtcatgggaatctgacaactgagaatatatacagccagctgacatattccccacttgggaaagtttaagtaagttcagcaacactctccccacctccagcaagcttctggtcagctccattcccagacctcagtgccagtcccaggcaggtctagtggattctggtggcttcaggtacaaagaccccttcccagtgaggactgtccttgcctctggggatgcggattccaacctgtgctctcttcgcaggtcctgggtgtcctgctgtggtgcgtctcctgggcggaccttttttactccttccatggcctggtccatggccgggcccctgcccctgttttctttgtcacccccttggtggtgggggtcaccatggtcagtgtggggccctgggaaagtggatgggggaggtctccattgggttgtggactgtgatagggaaactgtgggctctgaggagagggctggacatattgggaatgggaagaagaagggggtggccccagaaacttctggccatgtgggatggggagaaatggaggcaggtccagatgtgtgtgttctgcccgggcctccctgccctccctgcacagctgctggccaccctgctgatacagtatgagcggctgcagggcgtacagtcttcgggggtcctcattatcttctggttcctgtgtgtggtctgcgccatcgtcccattccgctccaagatccttttagccaaggcagaggtaaggttgggggagaggggaacctgccaggtttagccctgataggagggtgacctcagggttcaaagtcactgctgggtcccaggtccctccctcgaggcttcaagtacaaacacaattgtgttgttctccacttgctacatttctacctggaagcaggctgaggagggggcaccagtgtaacacaggaatgagccaagatgccaccactgttggaccatcatgtgagggtagggggctgttccacagcacccacccaccaagtgcaatatctgacgtgggtgtcagtcagtgcctgtgtaatgaacacatgtatgcagacaagtgtgaagagttctggcttacctagaggtcccattagcatgttcccttcctttcttcccacctccctcagttcctggccttcctcttgatcttcagtggctgtgatgttgggctggtgggatggaacactgcaggccaacctagtgcctcccatttctccatctcagcgggaagcaggcaaggagagtagcaaagaacataggctgtgaacaacccacttactccccatgtgggctcgggcgggtcgctgaaacctttggagcctcatttccttaattgcagaaagggcgtcatgagctgtcctgcctgtaggctgatgtcccagttagacaaggtcatgtaggtaaggtgatggcaccacacctggcacaggtgccacacctggtcctcgctgaaccagagctcccttgtgatccttcctcatctctcagagtcctctgagtggggacctggaggcccccaggtgctgcctcctgccccagaggagactgatgccccaagggactccgcagggcaggggctgcaggcccaggcttttccagtgcttctgacgcccctccactctcccacccagggtgagatctcagaccccttccgcttcaccaccttctacatccactttgccctggtactctctgccctcatcttggcctgcttcagggagaaacctccatttttctccgcaaagaatgtcgaccctgtgagtttcccatggagggtgcgggggctccacagctgagtcctcagcccaactctgaccagcagcccccaacccctccagttcctttcaaagtgggagagaggtcatccccacaatctgtaaactggggcttggagcaggaacaagggtcccctccatttccctactctgctttgagagggtggtgggcactcctgattcccccgtcctattctctcgccttctagaacccctaccctgagaccagcgctggctttctctcccgcctgtttttctggtggttcacaaagtgagttggctcttccaccagccaggccagagggaggggagggatggaaggtgagatggagaaaggggagcagggcagcagtttagggaccgggctggccacctatcccaccccccaccgcagtgggcacagggcagatgagggtagggaagtggtctgggagggggaccaaatgcagaggcctggcctggcccagtgccgcccccaggctacaggccagccctgcatctggcaggctgtggggacaggcccaggaggctggaagaagactgtcattagttctgagctcctctgtttgtgataaacttgcagcctgtcatctccttggctgcgcctcagagcggcttgagcaggataactgtgtctgtgacctgggtgacagctcattaaccccacagcactgaggaagcacccgaggctggggccaaattgcccaggcctcgtcctcacccagggccccaggcagcgtggattccatcaccagggcctggggtggggaggagatgggacacctggggaggaggaggagaagggggtagtggtaggaacttcggagggagagccagtgacctcaagcctattcactgaggaaatgaaggagacacctttcatggtcacagtgcccgagggagaccctcctttctggagaccctggggccctggagacactgacccttggctccaggctgctaaaccctgaccctctgcggggctgcctgccgggcttcacctccccccaggatggccatctatggctaccggcatcccctggaggagaaggacctctggtccctaaaggaagaggacagatcccagatggtggtgcagcagctgctggaggcatggaggaagcaggaaaagcagacggcacg

SEQ ID NO: 10307 - DNA, 1042 bp, Homo sapiens
gggctcggcagggcgggtccgggcggagcgcggggtgcggagggcggaggcggctccggcgcccgctctgcccgccgctgggtccgaccgcgctcgccttccttgcagccgcgcctcggccccatggacgccctgtgcggttccggggagctcggctccaagttctggaacccagcccactgcctgactcaccaaggccctcaccaaacattgtcaaggccaagagtgacgctccagggaaggggatctctctaggaggaagggtgctcaagatgaagaaggactccaacctgtctgtgcacacagaaaacccggacctcactccctgcttccagaactccctgctggcctgggtgccctgcatctacctgtgggtcgccctgccctgctacttgctctacctgcggcaccattgtcgtggctacatcatcctctcccacctgtccaagctcaagatggtcctgggtgtcctgctgtggtgcgtctcctgggcggaccttttttactccttccatggcctggtccatggccgggcccctgcccctgttttctttgtcacccccttggtggtgggggtcaccatgctgctggccaccctgctgatacagtatgagcggctgcagggcgtacagtcttcgggggtcctcattatcttctggttcctgtgtgtggtctgcgccatcgtcccattccgctccaagatccttttagccaaggcagagggtgagatctcagaccccttccgcttcaccaccttctacatccactttgccctggtactctctgccctcatcttggcctgcttcagggagaaacctccatttttctccgcaaagaatgtcgaccctaacccctaccctgagaccagcgctggctttctctcccgcctgtttttctggtggttcacaaagatggccatctatggctaccggcatcccctggaggagaaggacctctggtccctaaaggaagaggacagatcccagatggtggtgcagcagctgctggaggcatggaggaagcaggaaaagcagacggcacg

SEQ ID NO: 10308 - DNA, 5443 bp, Homo sapiens
agatggagtccaggccaggaatgagacaagtattcaggagcaatttgggagatgggcgtgtgcgccagagagacagaggagtgccaggcaacctgggtgctggcctgggtaactggaggacgatggatcttttgctgagctgatgggctcggtgggaggaggaggctgggtggggggcaaggtggtggatggagtctggtcatgtggggccagtggtgctggtgggtcctccaaggggagattcccagctagctggaagtcaaactctcgagcccaagagtttgagaccagcctgagcaacatagcaagaccctgtctctacaaaaaagttaagatattagccaggcctggtggcatacgcctagagtcctagctactcaagaggctgaggtgggaagactgcctgagcctgagaggttgaggctgccgtgagctgtgatggcaccaccgcactccagtctaggtgacagagagagaccctgtctcaaaaaaaaaaaaaaaaaaaaagagagagagagacaccagtcactgggctggggccactggggcccaccctactccaatatgacctcaccaaatgaggccacgttcacaggtaccaggtgttgggagctgaacatatctttctgggagacacaacttaagctatcacagaaggggaggcctggctatgattatggctggagggctccatgtagtcgagaggagagtgtcccaacaatgaagagactcggtcatgtcaataggtgaaggtgtagagcttccagcagaggtggccagggtgaagctcagcggcaaagggggcaacagcgcagcaagttcctgaggaggcagaggaaggccagggctcgggggcaggggcagcctccgacagcctgagcaccagaaaaaggaggacaagccactggagggcagtttgtgagtggcaaggagtttgtgggtggcagggagttctcaatgggtggctaagcaagaaggcaggtagctgctgagaggggtggggggctgggatgggcctgaagggaagagaagagaggtgaagaaggccccaagagcgggggcggattagggacctagagaaggttgctaggcagtgctgggggccactgagtttggaaaggtggatttgagcggcaagagtctttgtggtcatgtggcggaatctagagcccccagcagcctaggagaaggagcagggaagtccagtcaatggaaacgtggcatttcttcccgccatatgtcaggaggtaagaaggcaggcaggtgaggctggtggtgagagcgtcatcgatagggcgtgcagcagggtccatggtggatagagaacgaggtgaaggcagagtggagccaggaggtcgtggtcttgaggcagtactgggttgaccctccctggcccaagaggttggagggggtggaggtttcagaggccaggggtgcagtggagactgcgggtaaaagcaaagggcagcagaggagggagcagccatgggggcagcactgcccacctcactcctctctcctccccacagcatcctgatcaggtttatctccaaccccatggccccctcctggtggggcttcctggtggctgggctgatgttcctgtgctccatgatgcagtcgctgatcttacaacactattaccactacatctttgtgactggggtgaagtttcgtactgggatcatgggtgtcatctacaggaaggtcagctggagcagggcccaggggaaaggctggccctgggcagcttgcaagaggctcgcagccaagtccacccactactgtctacctgcaggctctggttatcaccaactcagtcaaacgtgcgtccactgtgggggaaattgtcaacctcatgtcagtggatgcccagcgcttcatggaccttgcccccttcctcaatctgctgtggtcagcacccctgcagatcatcctggcgatctacttcctctggcaggtgactctccaaccctgacctctgcctccttcctctgacatgctgcagaagtggcaagagaggattattctggaactgggagcatggcacatgcttgtagtcccagctgctcaggcggctgaggcaagaggatcacttgagcccaagagttctggctgcagtgcgccacgattgtgcctgcgaatagccaccacactccagcctgggcaacatagcaagaccttgtctctaaaaagaaacaaagaaaacagaaaaaaagaaggagggttattctgggttagcagaggggatatagaattgacacaagagctggctgggcacggtggctcacgcctgtaatcccagcattttgggagaccaaggcgggtggatcacgaggtcaggagttcgagaccagcccggccaggatggtgaaaccccatctctactaaaaatacaaaaattagccagacgtggtggcgggtgcctgtagtcacagctactcaggaggctgaggcaggagaatcgcttgaacccaggaggcagaggttgcagtgagccgagatcataccactgcactctagcctgggtgacagagcaagactctgtctcaaaaaaaaaaaaaaaaaaaaaaaaagaattgacacaagagcttccctaggcattggtggggatggagggataggacttcgaggatgctgatgtctgcaaaggaatcttcccaacatctgttgctatccttcctgcagaagccagggaggaaagaaagtcttggagggaggtgggtgtgactctggctgtcatcgtctatatttgccttcctgtgtgtctggacacccttctatatctgctgtctgtccctgtcgtcgttatctaatggctggctgcttctacaaatgttgtggtcattctgactttctatctgtttggccaaccaccatcttttgcttcctgcccatctacacatttcaagttaacaggcctctgtttgcctgttgggttctctctgtagactttggtaatctgtccctatgtgtcatctatccaccggtgcctcctcagaacctaggtccctctgtcctggctggagtcgctttcatggtcttgctgattccactcaacggagctgtggccgtgaagatgcgcgccttccaggtaggtgctgtcagaggtgcatcctcctgcctgcagcacccggccggctgcctgggggaaggtgtccactaaccttggggcctcccaactaccttgcttcctgagtatggatggctactagccatttgcagaaaccatagctcactcttccctcacagctctcagagggttttactgacattctcattttgtagcagaagaccaacgcttagagaaataatggcagtccagaatcaggcagggctgggactcaaacctgactatcctggtctaacaaggagttttcccgctgcactgtgctaagcatgaatagccagtcactcagtctactatttgcaaacatttcttgaagtgttttttttctttttttttttttttgagacagggtctcgttctgtcacccatgctggaatgcagtggcatgatctcggctcactgcaacctctgcctcccgggttcaagcgatcttcctgcctcagcctccctagtagctgggactacaggcacatgccaccacacccggcttatttttgtatttttttttttagtagagatggggtttcaccatgttggccaggctggtctcaaactcctgacctcaggtgatccgttcatcttagcctcccaaagtgctgggattacaggtgtgagccatcacacctggcctattgaagtctactagcttcccactgcccataggaaaaatgacaaaccccctaagaagactcagcaggcttctgcttaccttgcaagtcctcaccccctgcggactggccaagtttcagccagtctggtcttctttcttttctccacagcaccaagctcagggtacctctaggggccaccacatatactattccctctgcctggaatgcttgtcatccccctcttgcctgcctaactcctttccttcccttacctctcggcattgaagtcacttcctcggctgggcacggtggctcatgcctgtaatcccagagctttgggaggccgaggcaggtggatcacctgaggttgggagatcgagaccagccagaccaacatggagaaaccccgtctctactaaaaatacaaaattagccgggcatggtggcacatgcctgtaatcccagctactctggagtctgaggcaggagaatcccttgaatccaggaggcagaggttgcggtgagccaagatcgcgccattgcactcccacctgggcaacaagagcgaaactccgtctcaaaaaaaaaagtcacttcctccagaagtccaccctgactgcccagtctcagtctaagttagtttccctgccatcacctcattactttcttacaggatcctgtgatttcccatcagaacacacataatgattaataattaagcatttattcagatcattgtttgcttattgtatgcctcccccatcagatcgtcagctgtatcatggcaggggccttgtctgaattcatcgtgacaaattctacacgtagcccatggcctggcacatagtaggcactccataaataggggttgaatgaatacattaatctggtgtgccacaccttgggctaaggtcttggagaacaaagagaaataaatagtccatcccctcaggaagctcacagtctgattagagaaacatatatgtaaaggaatggttatggaacaaaaggaaagtgcaatgtgctttagaaacccagggaaggggaccaggtgtggtggctcacacctgtaatcccagcacttggggaggccaaggtgggaggatcacatgaggccaggagtttgaaatcagcctgggcaacagagtgagacctcgtccctacaaaaaaatttaaaaattagctgggcatggttgttcatgcctgtagttccagctagtcaggaggctgagacaggaggatcaaaggagcccaggagtttgaggctgcagtgagctatgattgtaccactgcagtccagcctgggcaacacagtgaggcaccatctctaaaataaataatactagcaataataataagaagaagaaaaagaagtagtaggagaagaaacccagggcaggggacagaggatgctgcctggggaggccggtgcagtggcactgagggtggagatggatcttgtcaggcagaggacacagggaggcaggggctgtgcattccaggccaaggcacagcacaggcccagcaaggagttgtgagaaggaatggtgggcagcgtggaatggctgcaatggatgagaatggatggaaggtaggaccctgtgagcaggaggtcaggggagggagcaggtgtgccactgacactctttctgcctgcacaggtaaagcaaatgaaattgaaggactcgcgcatcaagctgat

SEQ ID NO: 10309 - DNA, 582 bp, Homo sapiens
agatggagtccaggccaggaatgagacaagtattcaggagcaatttgggagatgggcgtgtgcgccagagagacagaggagtgccaggcaacctgggtgctggcctggcatcctgatcaggtttatctccaaccccatggccccctcctggtggggcttcctggtggctgggctgatgttcctgtgctccatgatgcagtcgctgatcttacaacactattaccactacatctttgtgactggggtgaagtttcgtactgggatcatgggtgtcatctacaggaaggctctggttatcaccaactcagtcaaacgtgcgtccactgtgggggaaattgtcaacctcatgtcagtggatgcccagcgcttcatggaccttgcccccttcctcaatctgctgtggtcagcacccctgcagatcatcctggcgatctacttcctctggcagaacctaggtccctctgtcctggctggagtcgctttcatggtcttgctgattccactcaacggagctgtggccgtgaagatgcgcgccttccaggtaaagcaaatgaaattgaaggactcgcgcatcaagctgat

SEQ ID NO: 10310 - DNA, 4488 bp, Homo sapiens
tgcccccgatgaggaccaagggcacctggaggacagctggaccggtatctgccatcctgggccctctgattcccatgccttcccagcattccccctgtctggggtctctgagtgtgtctagactggcctagtgttgtgccaggcaggttctgggaaacttgggccatctgtgtgacagtcaccagaggtaaagtaaactggacatagtcgggtcccactgcctcctccatcctactctaccctaactgtgggaactcagatcctccgccccggtctcagagcctgttttctttctttctttctttctttctttctttctttctttctttctttctttctttctttctttctttctttctttctttctctctctctctctctctctctctctctctctctctctctctctctctctctctctctttctttctttctttctttctttctttctttctttcttttttttcttttgaggcagagtctggctctgtcgccgggctggagtgcagtggtacaatctcagctcactgcaacctctgcctcccaggttcaagtgattctcctgcctcaggctcccgagtagctgggactacaggcatgcgccaccacgcctggctaatttttgtatttttagtacagacatggtttcaccatgttggccaggatggtctcgatctcttgacctcgtgatctgcctgcctcggcctcccaaagtgctgggattacaggtgtgagccaccttgcccgatctcagagcctgttttccatctgttgaaagcataggagggcccaggcccagcttgtgtggcaaggctgcttcatggataaatagtttggcaagtatgcaagtgcttagcaaagccgcttatttatcaaccaaaatttattggacaatcactatatacaggcactgttccagacactaagctatagcagtgagcaaacaaaaaaattatagtcctcatggagcttgttgacgtctctgggctcacaacatgcccctggctccttgttgcccagacccagctccccagcccccaattctggattggctcacagaccttttcctgggctttcttgcctatggctatacatacagccaacgtgccttgagcatttaccaagtgctgtgcccctcgctcacacactggacacattttcttttaagcctacagtcatgcagattttttttttttttttttggggacagtttctcactctgttgcccaggctggagtgcaacggtgcgatcttggctcactgcaacctttgcctcctgggttcaagcgattctcctgcctcagcctcccgagtagccaggattataggtgcccgccaccacgcccggctaatttttgtatttttagtagagacggggtttcaccatgttggccaggctggtctcgatctcctgacctcgtgagctgcctgcctcagcctcccaaagtgctgggattacaggcgtgagccaccatgcccgaccaaggacgtgagttttaagctcagccagtctaactccagagcccaagttcctaacccttgtatttgagtccgtttctccataatttgtgaagagagtttttcttgttgcttaacccaagtctttcttgttgccctttcaatccccctcattttattttcatgcttgtccattgaacccctttcattagagtggggaatgggagataccaggggcttgcagggagaactagctgaaccctatctccttcctcccaccctactgcagcgttggaaggtgcagaggataaggaggcactgctgattgaagacacactcagcaaccacacggatctgacagacaatgatccagtcacctatgtggtccagaagcagtttatgaggtgagttcctgagagctcccagccctcccggaggctgtatcaggcctccccaggccctgccagatggggtgcaggtttctccctgacactcccagcctctgtcctggggggtgcttgaggccccctccctgggcctgaccagctgcctccacagacagctgagtgccctgtcctcagatggggagggacagggtcggcctgtaccccggaggcacctgggtccatcagagaaggtgcaggtgacagaggcgaaggcagatggggcactgacccaggaggagaaagcagccattggcactgtgagtcggtggggcaagaggggctggaggggatggacaggcaggccccagcagccccagggtttatggagtcccctgtccctgactgccatggctgctccctacaggtggagctcagtgtgttctgggattatgccaaggccgtggggctctgtaccacgctggccatctgtctcctgtatgtgggtcaaagtgcggctgccattggagccaatgtgtggctcagtgcctggacaaatgatgccatggcagacagtagacagaacaacacttccctgaggctgggcgtctatgctgctttaggaattctgcaaggtgagcttgtgggggtgtccagaaggggctccaatatcccttcttctctgggctgccaggccccccaaaccgtgcccttgcatccaagcctccctaacccactctggtcaacccgtgtctctgattctgcccctttgtgcccgctcactagtccaggtgagccagcgccctctgccttctccaacagggttcttggtgatgctggcagccatggccatggcagcgggtggcatccaggctgcccgtgtgttgcaccaggcactgctgcacaacaagatacgctcgccacagtccttctttgacaccacaccatcaggccgcatcctgaactgcttctccaaggacatctatgtcgttgatgaggttctggcccctgtcatcctcatgctgctcaattccttcttcaacgccatctccactcttgtggtcatcatggccagcacgccgctcttcactgtggtcatcctgcccctggctgtgctctacaccttagtgcaggtgtggggtgggcgtgattccagtgtgggcgtggtgttattggggcggggcaacacatgggcgggggcagcaggggtgggacacttcaggccaccaacattacagagttttgttaggggcagtcgttgcttaacatttatgttaggggagccattacttaacctctttgaaactcatttgcctcacctgtaaaatagaatgactcatagaccttcctcatggagttggtgagagaataaaatgaaatagttatacattgtagctggcactgggactttcctgttggctttttttttttggggggggggggacggaatctcgagtctcgctctgtcgctcaggctggagtgcagctgcacgatctcagctcactgtaacctccgcctcccaggttcaagcaattctgtttcagcctcccaggtagctgggattacaggcatgcgccaccacgcccagctaatttttgtagttttagtagagatggggtttcactatgttggccaggctgctcttgaactcctgacctcaagtgatccgcccacctcggcctcccaaagtgctgggattacaggtgggaaccaccatacccggccttcctgttggctgttttttgataaaacattgtcaacagtttgggacacattatcctttccttccttttatacatatctaaacatacgtgtatgcatgcgtttaacatagatgagttgataaccttcagatacagctaactgtaaaaggcctttgcagacactgaactcctgttctgtaatgaattagtcagttcccggggatagatgctcaacacctgggtatagcgaccatgatctaggctgtgctctgtgctgggctaggggagaatcagatagacatcctgtatagcctggatatctgaggccacagaggagaggatggaaactggaggcagagccgtgttgttgtggggttgaagcagagatgatcagagggagggagtgaatgacacatcaaggccccaagtcttgggtccttggaggtgggggaaggcagcgatgtctcgtggtgggagtgaggctggctgggaggactcatctgaaaatggatgagttcagagacaggcaggactgagttgggggttccatggccctgaccccaaactccttctccctccatcagcgcttctatgcagccacatcacggcaactgaagcggctggaatcagtcagccgctcacctatctactcccacttttcggagacagtgactggtgccagtgtcatccgggcctacaaccgcagccgggattttgagatcatcagtgatactaaggtggatgccaaccagagaagctgctacccctacatcatctccaaccggtcagaagccgcctccctcgctccctgctcctccaggaattcccagcaggctctctggtgttcagggtccttgtccctcctttcccctaagcagaaaactggccctgccctgcccctgccccatttcctcctcatctgatcccccataggtggctgagc

SEQ ID NO: 10311 - DNA, 898 bp, Homo sapiens
tgcccccgatgaggaccaagggcacctggaggacagctggaccgcgttggaaggtgcagaggataaggaggcactgctgattgaagacacactcagcaaccacacggatctgacagacaatgatccagtcacctatgtggtccagaagcagtttatgagacagctgagtgccctgtcctcagatggggagggacagggtcggcctgtaccccggaggcacctgggtccatcagagaaggtgcaggtgacagaggcgaaggcagatggggcactgacccaggaggagaaagcagccattggcactgtggagctcagtgtgttctgggattatgccaaggccgtggggctctgtaccacgctggccatctgtctcctgtatgtgggtcaaagtgcggctgccattggagccaatgtgtggctcagtgcctggacaaatgatgccatggcagacagtagacagaacaacacttccctgaggctgggcgtctatgctgctttaggaattctgcaagggttcttggtgatgctggcagccatggccatggcagcgggtggcatccaggctgcccgtgtgttgcaccaggcactgctgcacaacaagatacgctcgccacagtccttctttgacaccacaccatcaggccgcatcctgaactgcttctccaaggacatctatgtcgttgatgagcgcttctatgcagccacatcacggcaactgaagcggctggaatcagtcagccgctcacctatctactcccacttttcggagacagtgactggtgccagtgtcatccgggcctacaaccgcagccgggattttgagatcatcagtgatactaaggtggatgccaaccagagaagctgctacccctacatcatctccaaccggtggctgagc

SEQ ID NO: 10312 - DNA, 611 bp, Homo sapiens
ggctgatgttcctgtgctccatgatgcagtcgctgatcttacaacactattaccactacatctttgtgactggggtgaagtttcgtactgggatcatgggtgtcatctacaggaaggtcagctggagcagggcccaggggaaaggctggccctgggcagcttgcaagaggctcgcagccaagtccacccactactgtctacctgcaggctctggttatcaccaactcagtcaaacgtgcgtccactgtgggggaaattgtcaacctcatgtcagtggatgcccagcgcttcatggaccttgcccccttcctcaatctgctgtggtcagcacccctgcagatcatcctggcgatctacttcctctggcaggtgactctccaaccctgacctctgcctccttcctctgacatgctgcagaagtggcaagagaggattattctggaactgggagcatggcacatgcttgtagtcccagctgctcaggcggctgaggcaagaggatcacttgagcccaagagttctggctgcagtgcgccacgattgtgcctgcgaatagccaccacactccagcctgggcaacatagcaagaccttgtctctaaaaagaaacaa

SEQ ID NO: 10313 - DNA, 520 bp, Homo sapiens
ggctgatgttcctgtgctccatgatgcagtcgctgatcttacaacactattaccactacatctttgtgactggggtgaagtttcgtactgggatcatgggtgtcatctacaggaaggctctggttatcaccaactcagtcaaacgtgcgtccactgtgggggaaattgtcaacctcatgtcagtggatgcccagcgcttcatggaccttgcccccttcctcaatctgctgtggtcagcacccctgcagatcatcctggcgatctacttcctctggcaggtgactctccaaccctgacctctgcctccttcctctgacatgctgcagaagtggcaagagaggattattctggaactgggagcatggcacatgcttgtagtcccagctgctcaggcggctgaggcaagaggatcacttgagcccaagagttctggctgcagtgcgccacgattgtgcctgcgaatagccaccacactccagcctgggcaacatagcaagaccttgtctctaaaaagaaacaa

SEQ ID NO: 10314 - DNA, 5713 bp, Homo sapiens
ctgccctcatcttggcctgcttcagggagaaacctccatttttctccgcaaagaatgtcgaccctgtgagtttcccatggagggtgcgggggctccacagctgagtcctcagcccaactctgaccagcagcccccaacccctccagttcctttcaaagtgggagagaggtcatccccacaatctgtaaactggggcttggagcaggaacaagggtcccctccatttccctactctgctttgagagggtggtgggcactcctgattcccccgtcctattctctcgccttctagaacccctaccctgagaccagcgctggctttctctcccgcctgtttttctggtggttcacaaagtgagttggctcttccaccagccaggccagagggaggggagggatggaaggtgagatggagaaaggggagcagggcagcagtttagggaccgggctggccacctatcccaccccccaccgcagtgggcacagggcagatgagggtagggaagtggtctgggagggggaccaaatgcagaggcctggcctggcccagtgccgcccccaggctacaggccagccctgcatctggcaggctgtggggacaggcccaggaggctggaagaagactgtcattagttctgagctcctctgtttgtgataaacttgcagcctgtcatctccttggctgcgcctcagagcggcttgagcaggataactgtgtctgtgacctgggtgacagctcattaaccccacagcactgaggaagcacccgaggctggggccaaattgcccaggcctcgtcctcacccagggccccaggcagcgtggattccatcaccagggcctggggtggggaggagatgggacacctggggaggaggaggagaagggggtagtggtaggaacttcggagggagagccagtgacctcaagcctattcactgaggaaatgaaggagacacctttcatggtcacagtgcccgagggagaccctcctttctggagaccctggggccctggagacactgacccttggctccaggctgctaaaccctgaccctctgcggggctgcctgccgggcttcacctccccccaggatggccatctatggctaccggcatcccctggaggagaaggacctctggtccctaaaggaagaggacagatcccagatggtggtgcagcagctgctggaggcatggaggaagcaggaaaagcagacggcacggtgaggccctccccttgccccaacacccagccccttcgcttaccccagatctcctgcagaggacgctggtagaccttggagggcggcattgctggggtggcaagcagagcaggaccaggtgatttcttggcagcctcgggaccattctatgggaagcttaggcctggatggcgctagttctcccagctctggtgggggcaggagaatggctggcactttggagcaactactccatcccaggtcccatcctaaggatataaataaactcacttaatttttcaacagccctaaagggtaggttcaagtgtccctgtgttacagatggggacactggggccgggtgtggtggctcacagctgtaatcctaacactttgagatgccaaggcaggaggattgcttgagtccaagagttcaagaccagcctgggcaatatagtgagaccttgtctctacaaaaaataaacaagatgagccgggcatggtggtgtgcacctgtagtcccagctacttgagaggctgaggtgggaggatcatttgagcccaagaggtcaaggctatagtgagctgagattgtgccactgtactccagtctgggcaatagagtgagaccttttctcaacaacaacaaaaacagatggagacaccgaagcacagaaatttaacagagggcctcccagggtccccaagttggtggtggcagagctggaatccacatggagccggctggccccagaggttctcctcatatcactgcaccaccctgcctgactgagagggctgattccagggccaggagccagcacacccctgccaattctgcctcctcctgtctggaggcggcggctgaatgagatgatcttcccctgaggggtcttcccactgtcagcctcttatcaaggaccacaaacctgtctctggccaactgcctcaccaagagagctgacgctgagcatcatctttctccacccaattctgaccccaggattgaaccctccctcctcccatccacaatccaggcctaggagttcaatgtttgctcagcccggagcttccggttgtcaccagctgttggaggagcctggggctgggcatggttagcagtatcctggctttcatggcttggagcctccacgaagacctatgggcccccagtctgcctgctgcaccccctctcagtccctccatgccactccaccccctccctgttcagctgcccggtggctgtaccaacagccatccttgatcttatctaccttccctcttggcgtcctccctggagccagcactggggaggcggggagagggccagactggggggatagctgggttttagagtccttgtggtagcagtctggccaccccttcagatgccctctggcagctgaggacagagtcgcttgtgcaattcttatgctgtctgttcccctcccagctctgagagccaagaaaacagctccttcctcctcctcactcctagccagcccagcctagcccttggcttcctggagcccctgtccccattcctaacccactgctccttcctccctggaccagacacaaggcttcagcagcacctgggaaaaatgcctccggcgaggacgaggtgctgctgggtgcccggcccaggccccggaagccctccttcctgaaggccctgctggccaccttcggctccagcttcctcatcagtgcctgcttcaagcttatccaggacctgctctccttcatcaatccacagctgctcaggtctctccacactccggctcactatagccctgccctgggcagcagggctggctggctagcccagaggaaggaacaacgtacagtgaaaagaaccccagaccaggaaccagggaggctagctccactttctgtgtgacctttggcaagtggcattgcctgacttgtttcctcactcacattcaacttagaattgctgtgcatatactatgtgccgggcaccgtggtgtgtacgttaacaagcattgggtctttaaatcttcccaacaatcctatgcggaattgccccattcccatgtcacagatgagaaagcaggaactcagagaggtgaagtgacttggccaagggcacacagcaaagaaggaatcaggtctgagtccaggactctgagctccgactgaggtgctctgtccccaccatcaggctctaacatctgtctcaggaatggcttggactagaacgagctctcaaatgagagggtgggaaggagagctgcctagtagctaagtccccacctccttgcccctccgtgcatgcattaatttgttcagcaaacatttattgaacctccagggtaccagaatggtgctcgatactagggatacagagttcaataagacagggtcttgatgtcttatgggagaaaccagcgtgtaaatcaattagaattcagtgggggcagaagtgttctcgggtgtctggaaaaccccgggaggggcaaagaagccagcctgggatgcagcaggaagcacccactggcttgggaggtcaacgaatttggagagacaagtaggtgaagaaacaggggaaagttcagcctcagcttagtcacaaagccctgaaacagcatgactcaggtgtttctgagtggcagaggaaatggcaacgagagggaggggcaggaaaacagagagagggagagctaaggatatccttgaaagatctgagccagggaggggcatctggcttcaaggatctcctgccaggagtgtgggggatgtagggcagggtggctggatggaagtgggccaacccggtcagatggagtccaggccaggaatgagacaagtattcaggagcaatttgggagatgggcgtgtgcgccagagagacagaggagtgccaggcaacctgggtgctggcctgggtaactggaggacgatggatcttttgctgagctgatgggctcggtgggaggaggaggctgggtggggggcaaggtggtggatggagtctggtcatgtggggccagtggtgctggtgggtcctccaaggggagattcccagctagctggaagtcaaactctcgagcccaagagtttgagaccagcctgagcaacatagcaagaccctgtctctacaaaaaagttaagatattagccaggcctggtggcatacgcctagagtcctagctactcaagaggctgaggtgggaagactgcctgagcctgagaggttgaggctgccgtgagctgtgatggcaccaccgcactccagtctaggtgacagagagagaccctgtctcaaaaaaaaaaaaaaaaaaaaagagagagagagacaccagtcactgggctggggccactggggcccaccctactccaatatgacctcaccaaatgaggccacgttcacaggtaccaggtgttgggagctgaacatatctttctgggagacacaacttaagctatcacagaaggggaggcctggctatgattatggctggagggctccatgtagtcgagaggagagtgtcccaacaatgaagagactcggtcatgtcaataggtgaaggtgtagagcttccagcagaggtggccagggtgaagctcagcggcaaagggggcaacagcgcagcaagttcctgaggaggcagaggaaggccagggctcgggggcaggggcagcctccgacagcctgagcaccagaaaaaggaggacaagccactggagggcagtttgtgagtggcaaggagtttgtgggtggcagggagttctcaatgggtggctaagcaagaaggcaggtagctgctgagaggggtggggggctgggatgggcctgaagggaagagaagagaggtgaagaaggccccaagagcgggggcggattagggacctagagaaggttgctaggcagtgctgggggccactgagtttggaaaggtggatttgagcggcaagagtctttgtggtcatgtggcggaatctagagcccccagcagcctaggagaaggagcagggaagtccagtcaatggaaacgtggcatttcttcccgccatatgtcaggaggtaagaaggcaggcaggtgaggctggtggtgagagcgtcatcgatagggcgtgcagcagggtccatggtggatagagaacgaggtgaaggcagagtggagccaggaggtcgtggtcttgaggcagtactgggttgaccctccctggcccaagaggttggagggggtggaggtttcagaggccaggggtgcagtggagactgcgggtaaaagcaaagggcagcagaggagggagcagccatgggggcagcactgcccacctcactcctctctcctccccacagcatcctgatcaggtttatctccaaccccatggccccctcctggtggggcttcctggtggctgggctgatgttcctgtgctccatgatgcagtcgctgatcttacaacactattaccactacatctttgtgactggggtgaagtttcgtactgggatcatgggtgtcatctacagg

SEQ ID NO: 10315 - DNA, 484 bp, Homo sapiens
ctgccctcatcttggcctgcttcagggagaaacctccatttttctccgcaaagaatgtcgaccctaacccctaccctgagaccagcgctggctttctctcccgcctgtttttctggtggttcacaaagtgagttggctcttccaccagccaggccagagggaggggagggatggaaggatggccatctatggctaccggcatcccctggaggagaaggacctctggtccctaaaggaagaggacagatcccagatggtggtgcagcagctgctggaggcatggaggaagcaggaaaagcagacggcacgcatcctgatcaggtttatctccaaccccatggccccctcctggtggggcttcctggtggctgggctgatgttcctgtgctccatgatgcagtcgctgatcttacaacactattaccactacatctttgtgactggggtgaagtttcgtactgggatcatgggtgtcatctacagg

SEQ ID NO: 10316 - DNA, 1139 bp, Homo sapiens
cgggggcagggagaccggacccagaggcactggggtagggctcggcagggcgggtccgggcggagcgcggggtgcggagggcggaggcggctccggcgcccgctctgcccgccgctgggtccgaccgcgctcgccttccttgcagccgcgcctcggccccatggacgccctgtgcggttccggggagctcggctccaagttctgggtaaggcgcggggctccggggtcactgcgcgggggccagggtcggccggcttcgcccggtccccgccgcctgccttcccgcggggccggcaggtatcccgggacggagcccctgagacggcctgggcgcccgggagggggcgatgggctcgggagggaggttggctgcgccgcccggagccgggtcccacgcggtgtcggggacctgccctgctctgcccttcccggctgcagcactggggagcccgggaaagtgaggaagagtgcgcggctggggcgcaaaggcacagtgcgtggctgggtgagtcggctccatcccagcccctccgtcgggtgcggaaggggcgtttcgcaatcagccgcgggttcctgatggagggtcttccctcagcatctgcctcaggttaggactcggttgcccacctgggcatggattgcccccagggcatccagagcacctgctcaaccaggtgttttgggaggccggctgtgcagtgtcccacccttcttaggaaggtttcctgccaccttcttttctctaggtaagactgaggtctgagagcaggccatccccaccactccggactcagaagggagaagcagaccccagtctggagacaggtgcagggtgtcaggattcctgtagtccaactcccttctcacagatggagaaagggaggcccagagagaggaagggacttgcccaaagttacccagttcaatgaaggcagagctgggatagaaaaacaggctacaggccaggtgcagtggttcacgcctgtaatcccaccctttgggaggcagaggtgggaggatcacttcagcccaggagttttagattactgtgagctatgatcgcaccactgcactgtggcctgggcgaaagagtgagaccctgtctctaaaaaaataaataaataagaaaagaaaatcaa

SEQ ID NO: 10317 - DNA, 656 bp, Homo sapiens
cgggggcagggagaccggacccagaggcactgggccgcgcctcggccccatggacgccctgtgcggttccggggagctcggctccaagttctggcactggggagcccgggaaagtgaggaagagtgcgcggctggggcgcaaaggcacagtgcgtggctgggtgagtcggctccatcccagcccctccgtcgggtgcggaaggggcgtttcgcaatcagccgcgggttcctgatggagggtcttccctcagcatctgcctcaggtaagactgaggtctgagagcaggccatccccaccactccggactcagaagggagaagcagaccccagtctggagacaggtgcagggtgtcaggattcctgtagtccaactcccttctcacagatggagaaagggaggcccagagagaggaagggacttgcccaaagttacccagttcaatgaaggcagagctgggatagaaaaacaggctacaggccaggtgcagtggttcacgcctgtaatcccaccctttgggaggcagaggtgggaggatcacttcagcccaggagttttagattactgtgagctatgatcgcaccactgcactgtggcctgggcgaaagagtgagaccctgtctctaaaaaaataaataaataagaaaagaaaatcaa

SEQ ID NO: 10318 - DNA, 1562 bp, Homo sapiens
ggatgggcctgaagggaagagaagagaggtgaagaaggccccaagagcgggggcggattagggacctagagaaggttgctaggcagtgctgggggccactgagtttggaaaggtggatttgagcggcaagagtctttgtggtcatgtggcggaatctagagcccccagcagcctaggagaaggagcagggaagtccagtcaatggaaacgtggcatttcttcccgccatatgtcaggaggtaagaaggcaggcaggtgaggctggtggtgagagcgtcatcgatagggcgtgcagcagggtccatggtggatagagaacgaggtgaaggcagagtggagccaggaggtcgtggtcttgaggcagtactgggttgaccctccctggcccaagaggttggagggggtggaggtttcagaggccaggggtgcagtggagactgcgggtaaaagcaaagggcagcagaggagggagcagccatgggggcagcactgcccacctcactcctctctcctccccacagcatcctgatcaggtttatctccaaccccatggccccctcctggtggggcttcctggtggctgggctgatgttcctgtgctccatgatgcagtcgctgatcttacaacactattaccactacatctttgtgactggggtgaagtttcgtactgggatcatgggtgtcatctacaggaaggtcagctggagcagggcccaggggaaaggctggccctgggcagcttgcaagaggctcgcagccaagtccacccactactgtctacctgcaggctctggttatcaccaactcagtcaaacgtgcgtccactgtgggggaaattgtcaacctcatgtcagtggatgcccagcgcttcatggaccttgcccccttcctcaatctgctgtggtcagcacccctgcagatcatcctggcgatctacttcctctggcaggtgactctccaaccctgacctctgcctccttcctctgacatgctgcagaagtggcaagagaggattattctggaactgggagcatggcacatgcttgtagtcccagctgctcaggcggctgaggcaagaggatcacttgagcccaagagttctggctgcagtgcgccacgattgtgcctgcgaatagccaccacactccagcctgggcaacatagcaagaccttgtctctaaaaagaaacaaagaaaacagaaaaaaagaaggagggttattctgggttagcagaggggatatagaattgacacaagagctggctgggcacggtggctcacgcctgtaatcccagcattttgggagaccaaggcgggtggatcacgaggtcaggagttcgagaccagcccggccaggatggtgaaaccccatctctactaaaaatacaaaaattagccagacgtggtggcgggtgcctgtagtcacagctactcaggaggctgaggcaggagaatcgcttgaacccaggaggcagaggttgcagtgagccgagatcataccactgcactctagcctgggtgacagagcaagactctgtctcaaaaaaaaaaaaaaaaaaa

SEQ ID NO: 10319 - DNA, 1562 bp, Homo sapiens; identical to SEQ ID NO: 10318

SEQ ID NO: 10320 - DNA, 5712 bp, Homo sapiens
cttgcgcggtgtggcggccgatgccgctataaaggcttgttttgctgcagggctcatgctcgggagcgtggttgagcggctggcgcggttgtcctggagcaggggcgcaggaattctgatgtgaaactaacagtctgtgagccctggaacctccactcagagaagatgaaggatatcgacataggaaaagagtatatcatccccagtcctgggtatagaagtgtgagggagagaaccagcacttctgggacgcacagagaccgtgaagattccaagttcaggagaactcgaccgttggaatgccaagatgccttggaaacagcagcccgagccgagggcctctctcttgatgcctccatgcattctcagctcagaatcctggatgaggagcatcccaagggaaagtaccatcatggcttgagtgctctgaagcccatccggactacttccaaacaccagcacccagtggacaatgctgggcttttttcctgtatgactttttcgtggctttcttctctggcccgtgtggcccacaagaagggggagctctcaatggaagacgtgtggtctctgtccaagcacgagtcttctgacgtgaactgcagaagactagagagactgtggcaagaagagctgaatgaagttgggccagacgctgcttccctgcgaagggttgtgtggatcttctgccgcaccaggctcatcctgtccatcgtgtgcctgatgatcacgcagctggctggcttcagtggaccagccttcatggtgaaacacctcttggagtatacccaggcaacagagtctaacctgcagtacagcttgttgttagtgctgggcctcctcctgacggaaatcgtgcggtcttggtcgcttgcactgacttgggcattgaattaccgaaccggtgtccgcttgcggggggccatcctaaccatggcatttaagaagatccttaagttaaagaacattaaagagaaatccctgggtgagctcatcaacatttgctccaacgatgggcagagaatgtttgaggcagcagccgttggcagcctgctggctggaggacccgttgttgccatcttaggcatgatttataatgtaattattctgggaccaacaggcttcctgggatcagctgtttttatcctcttttacccagcaatgatgtttgcatcacggctcacagcatatttcaggagaaaatgcgtggccgccacggatgaacgtgtccagaagatgaatgaagttcttacttacattaaatttatcaaaatgtatgcctgggtcaaagcattttctcagagtgttcaaaaaatccgcgaggaggagcgtcggatattggaaaaagctgggtacttccagagcatcactgtgggtgtggctcccattgtggtggtgattgccagcgtggtgaccttctctgttcatatgaccctgggcttcgatctgacagcagcacaggctttcacagtggtgacagtcttcaattccatgacttttgctttgaaagtaacaccgttttcagtaaagtccctctcagaagcctcagtggctgttgacagatttaagagtttgtttctaatggaagaggttcacatgataaagaacaaaccagccagtcctcacatcaagatagagatgaaaaatgccaccttggcatgggactcctcccactccagtatccagaactcgcccaagctgacccccaaaatgaaaaaagacaagagggcttccaggggcaagaaagagaaggtgaggcagctgcagcgcactgagcatcaggcggtgctggcagagcagaaaggccacctcctcctggacagtgacgagcggcccagtcccgaagaggaagaaggcaagcacatccacctgggccacctgcgcttacagaggacactgcacagcatcgatctggagatccaagagggtaaactggttggaatctgtggcagtgtgggaagtggaaaaacctctctcatttcagccattttaggccagatgacgcttctagagggcagcattgcaatcagtggaaccttcgcttatgtggcccagcaggcctggatcctcaatgctactctgagagacaacatcctgtttgggaaggaatatgatgaagaaagatacaactctgtgctgaacagctgctgcctgaggcctgacctggccattcttcccagcagcgacctgacggagattggagagcgaggagccaacctgagcggtgggcagcgccagaggatcagccttgcccgggccttgtatagtgacaggagcatctacatcctggacgaccccctcagtgccttagatgcccatgtgggcaaccacatcttcaatagtgctatccggaaacatctcaagtccaagacagttctgtttgttacccaccagttacagtacctggttgactgtgatgaagtgatcttcatgaaagagggctgtattacggaaagaggcacccatgaggaactgatgaatttaaatggtgactatgctaccatttttaataacctgttgctgggagagacaccgccagttgagatcaattcaaaaaaggaaaccagtggttcacagaagaagtcacaagacaagggtcctaaaacaggatcagtaaagaaggaaaaagcagtaaagccagaggaagggcagcttgtgcagctggaagagaaagggcagggttcagtgccctggtcagtatatggtgtctacatccaggctgctgggggccccttggcattcctggttattatggcccttttcatgctgaatgtaggcagcaccgccttcagcacctggtggttgagttactggatcaagcaaggaagcgggaacaccactgtgactcgagggaacgagacctcggtgagtgacagcatgaaggacaatcctcatatgcagtactatgccagcatctacgccctctccatggcagtcatgctgatcctgaaagccattcgaggagttgtctttgtcaagggcacgctgcgagcttcctcccggctgcatgacgagcttttccgaaggatccttcgaagccctatgaagttttttgacacgacccccacagggaggattctcaacaggttttccaaagacatggatgaagttgacgtgcggctgccgttccaggccgagatgttcatccagaacgttatcctggtgttcttctgtgtgggaatgatcgcaggagtcttcccgtggttccttgtggcagtggggccccttgtcatcctcttttcagtcctgcacattgtctccagataccaggagctgctggatgacaaccaagctcctttttttttgtttacgtgtgcgatgcggtggctggctgtgcggctggacctcatcagcatcgccctcatcaccaccacggggctgatgatcgttcttatgcacgggcagattcccccagcctatgcgggtctcgccatctcttatgctgtccagttaacggggctgttccagtttacggtcagactggcatctgagacagaagctcgattcacctcggtggagaggatcaatcactacattaagactctgtccttggaagcacctgccagaattaagaacaaggctccctcccctgactggccccaggagggagaggtgacctttgagaacgcagagatgaggtaccgagaaaacctccctctcgtcctaaagaaagtatccttcacgatcaaacctaaagagaagattggcattgtggggcggacaggatcagggaagtcctcgctggggatggccctcttccgtctggtggagttatctggaggctgcatcaagattgatggagtgagaatcagtgatattggccttgccgacctccgaagcaaactctctatcattcctcaagagccggtgctgttcagtggcactgtcagatcaaatttggaccccttcaaccagtacactgaagaccagatttgggatgccctggagaggacacacatgaaagaatgtattgctcagctacctctgaaacttgaatctgaagtgatggagaatggggataacttctcagtgggggaacggcagctcttgtgcatagctagagccctgctccgccactgtaagattctgattttagatgaagccacagctgccatggacacagagacagacttattgattcaagagaccatccgagaagcatttgcagactgtaccatgctgaccattgcccatcgcctgcacacggttctaggctccgataggattatggtgctggcccagggacaggtggtggagtttgacaccccatcggtccttctgtccaacgacagttcccgattctatgccatgtttgctgctgcagagaacaaggtcgctgtcaagggctgactcctccctgttgacgaagtctcttttctttagagcattgccattccctgcctggggcgggcccctcatcgcgtcctcctaccgaaaccttgcctttctcgattttatctttcgcacagcagttccggattggcttgtgtgtttcacttttagggagagtcatattttgattattgtatttattccatattcatgtaaacaaaatttagtttttgttcttaattgcactctaaaaggttcagggaaccgttattataattgtatcagaggcctataatgaagctttatacgtgtagctatatctatatataattctgtacatagcctatatttacagtgaaaatgtaagctgtttattttatattaaaataagcactgtgctaataacagtgcatattcctttctatcatttttgtacagtttgctgtactagagatctggttttgctattagactgtaggaagagtagcatttcattcttctctagctggtggtttcacggtgccaggttttctgggtgtccaaaggaagacgtgtggcaatagtgggccctccgacagccccctctgccgcctccccacggccgctccaggggtggctggagacgggtgggcggctggagaccatgcagagcgccgtgagttctcagggctcctgccttctgtcctggtgtcacttactgtttctgtcaggagagcagcggggcgaagcccaggccccttttcactccctccatcaagaatggggatcacagagacattcctccgagccggggagtttctttcctgccttcttctttttgctgttgtttctaaacaagaatcagtctatccacagagagtcccactgcctcaggttcctatggctggccactgcacagagctctccagctccaagacctgttggttccaagccctggagccaactgctgctttttgaggtggcactttttcatttgcctattcccacacctccacagttcagtggcagggctcaggatttcgtgggtctgttttcctttctcaccgcagtcgtcgcacagtctctctctctctctcccctcaaagtctgcaactttaagcagctcttgctaatcagtgtctcacactggcgtagaagtttttgtactgtaaagagacctacctcaggttgctggttgctgtgtggtttggtgtgttcccgcaaaccccctttgtgctgtggggctggtagctcaggtgggcgtggtcactgctgtcatcaattgaatggtcagcgttgcatgtcgtgaccaactagacattctgtcgccttagcatgtttgctgaacaccttgtggaagcaaaaatctgaaaatgtgaataaaattattttggattttgt

SEQ ID NO: 10321 - DNA, 5790 bp, Homo sapiens
atgctcgggagcgtggttgagcggctggcgcggttgtcctggagcaggggcgcaggaattctgatgtgaaactaacagtctgtgagccctggaacctccactcagagaagatgaaggatatcgacataggaaaagagtatatcatccccagtcctgggtatagaagtgtgagggagagaaccagcacttctgggacgcacagagaccgtgaagattccaagttcaggagaactcgaccgttggaatgccaagatgccttggaaacagcagcccgagccgagggcctctctcttgatgcctccatgcattctcagctcagaatcctggatgaggagcatcccaagggaaagtaccatcatggcttgagtgctctgaagcccatccggactacttccaaacaccagcacccagtggacaatgctgggcttttttcctgtatgactttttcgtggctttcttctctggcccgtgtggcccacaagaagggggagctctcaatggaagacgtgtggtctctgtccaagcacgagtcttctgacgtgaactgcagaagactagagagactgtggcaagaagagctgaatgaagttgggccagacgctgcttccctgcgaagggttgtgtggatcttctgccgcaccaggctcatcctgtccatcgtgtgcctgatgatcacgcagctggctggcttcagtggaccagccttcatggtgaaacacctcttggagtatacccaggcaacagagtctaacctgcagtacagcttgttgttagtgctgggcctcctcctgacggaaatcgtgcggtcttggtcgcttgcactgacttgggcattgaattaccgaaccggtgtccgcttgcggggggccatcctaaccatggcatttaagaagatccttaagttaaagaacattaaagagaaatccctgggtgagctcatcaacatttgctccaacgatgggcagagaatgtttgaggcagcagccgttggcagcctgctggctggaggacccgttgttgccatcttaggcatgatttataatgtaattattctgggaccaacaggcttcctgggatcagctgtttttatcctcttttacccagcaatgatgtttgcatcacggctcacagcatatttcaggagaaaatgcgtggccgccacggatgaacgtgtccagaagatgaatgaagttcttacttacattaaatttatcaaaatgtatgcctgggtcaaagcattttctcagagtgttcaaaaaatccgcgaggaggagcgtcggatattggaaaaagctgggtacttccagagcatcactgtgggtgtggctcccattgtggtggtgattgccagcgtggtgaccttctctgttcatatgaccctgggcttcgatctgacagcagcacaggctttcacagtggtgacagtcttcaattccatgacttttgctttgaaagtaacaccgttttcagtaaagtccctctcagaagcctcagtggctgttgacagatttaagagtttgtttctaatggaagaggttcacatgataaagaacaaaccagccagtcctcacatcaagatagagatgaaaaatgccaccttggcatgggactcctcccactccagtatccagaactcgcccaagctgacccccaaaatgaaaaaagacaagagggcttccaggggcaagaaagagaaggtgaggcagctgcagcgcactgagcatcaggcggtgctggcagagcagaaaggccacctcctcctggacagtgacgagcggcccagtcccgaagaggaagaaggcaagcacatccacctgggccacctgcgcttacagaggacactgcacagcatcgatctggagatccaagagggtaaactggttggaatctgtggcagtgtgggaagtggaaaaacctctctcatttcagccattttaggccagatgacgcttctagagggcagcattgcaatcagtggaaccttcgcttatgtggcccagcaggcctggatcctcaatgctactctgagagacaacatcctgtttgggaaggaatatgatgaagaaagatacaactctgtgctgaacagctgctgcctgaggcctgacctggccattcttcccagcagcgacctgacggagattggagagcgaggagccaacctgagcggtgggcagcgccagaggatcagccttgcccgggccttgtatagtgacaggagcatctacatcctggacgaccccctcagtgccttagatgcccatgtgggcaaccacatcttcaatagtgctatccggaaacatctcaagtccaagacagttctgtttgttacccaccagttacagtacctggttgactgtgatgaagtgatcttcatgaaagagggctgtattacggaaagaggcacccatgaggaactgatgaatttaaatggtgactatgctaccatttttaataacctgttgctgggagagacaccgccagttgagatcaattcaaaaaaggaaaccagtggttcacagaagaagtcacaagacaagggtcctaaaacaggatcagtaaagaaggaaaaagcagtaaagccagaggaagggcagcttgtgcagctggaagagaaagggcagggttcagtgccctggtcagtatatggtgtctacatccaggctgctgggggccccttggcattcctggttattatggcccttttcatgctgaatgtaggcagcaccgccttcagcacctggtggttgagttactggatcaagcaaggaagcgggaacaccactgtgactcgagggaacgagacctcggtgagtgacagcatgaaggacaatcctcatatgcagtactatgccagcatctacgccctctccatggcagtcatgctgatcctgaaagccattcgaggagttgtctttgtcaagggcacgctgcgagcttcctcccggctgcatgacgagcttttccgaaggatccttcgaagccctatgaagttttttgacacgacccccacagggaggattctcaacaggttttccaaagacatggatgaagttgacgtgcggctgccgttccaggccgagatgttcatccagaacgttatcctggtgttcttctgtgtgggaatgatcgcaggagtcttcccgtggttccttgtggcagtggggccccttgtcatcctcttttcagtcctgcacattgtctccagggtcctgattcgggagctgaagcgtctggacaatatcacgcagtcacctttcctctcccacatcacgtccagcatacagggccttgccaccatccacgcctacaataaagggcaggagtttctgcacagataccaggagctgctggatgacaaccaagctcctttttttttgtttacgtgtgcgatgcggtggctggctgtgcggctggacctcatcagcatcgccctcatcaccaccacggggctgatgatcgttcttatgcacgggcagattcccccagcctatgcgggtctcgccatctcttatgctgtccagttaacggggctgttccagtttacggtcagactggcatctgagacagaagctcgattcacctcggtggagaggatcaatcactacattaagactctgtccttggaagcacctgccagaattaagaacaaggctccctcccctgactggccccaggagggagaggtgacctttgagaacgcagagatgaggtaccgagaaaacctccctctcgtcctaaagaaagtatccttcacgatcaaacctaaagagaagattggcattgtggggcggacaggatcagggaagtcctcgctggggatggccctcttccgtctggtggagttatctggaggctgcatcaagattgatggagtgagaatcagtgatattggccttgccgacctccgaagcaaactctctatcattcctcaagagccggtgctgttcagtggcactgtcagatcaaatttggaccccttcaaccagtacactgaagaccagatttgggatgccctggagaggacacacatgaaagaatgtattgctcagctacctctgaaacttgaatctgaagtgatggagaatggggataacttctcagtgggggaacggcagctcttgtgcatagctagagccctgctccgccactgtaagattctgattttagatgaagccacagctgccatggacacagagacagacttattgattcaagagaccatccgagaagcatttgcagactgtaccatgctgaccattgcccatcgcctgcacacggttctaggctccgataggattatggtgctggcccagggacaggtggtggagtttgacaccccatcggtccttctgtccaacgacagttcccgattctatgccatgtttgctgctgcagagaacaaggtcgctgtcaagggctgactcctccctgttgacgaagtctcttttctttagagcattgccattccctgcctggggcgggcccctcatcgcgtcctcctaccgaaaccttgcctttctcgattttatctttcgcacagcagttccggattggcttgtgtgtttcacttttagggagagtcatattttgattattgtatttattccatattcatgtaaacaaaatttagtttttgttcttaattgcactctaaaaggttcagggaaccgttattataattgtatcagaggcctataatgaagctttatacgtgtagctatatctatatataattctgtacatagcctatatttacagtgaaaatgtaagctgtttattttatattaaaataagcactgtgctaataacagtgcatattcctttctatcatttttgtacagtttgctgtactagagatctggttttgctattagactgtaggaagagtagcatttcattcttctctagctggtggtttcacggtgccaggttttctgggtgtccaaaggaagacgtgtggcaatagtgggccctccgacagccccctctgccgcctccccacggccgctccaggggtggctggagacgggtgggcggctggagaccatgcagagcgccgtgagttctcagggctcctgccttctgtcctggtgtcacttactgtttctgtcaggagagcagcggggcgaagcccaggccccttttcactccctccatcaagaatggggatcacagagacattcctccgagccggggagtttctttcctgccttcttctttttgctgttgtttctaaacaagaatcagtctatccacagagagtcccactgcctcaggttcctatggctggccactgcacagagctctccagctccaagacctgttggttccaagccctggagccaactgctgctttttgaggtggcactttttcatttgcctattcccacacctccacagttcagtggcagggctcaggatttcgtgggtctgttttcctttctcaccgcagtcgtcgcacagtctctctctctctctcccctcaaagtctgcaactttaagcagctcttgctaatcagtgtctcacactggcgtagaagtttttgtactgtaaagagacctacctcaggttgctggttgctgtgtggtttggtgtgttcccgcaaaccccctttgtgctgtggggctggtagctcaggtgggcgtggtcactgctgtcatcaattgaatggtcagcgttgcatgtcgtgaccaactagacattctgtcgccttagcatgtttgctgaacaccttgtggaagcaaaaatctgaaaatgtgaataaaattattttggattttgtaaaa

SEQ ID NO: 10322 - DNA, 1923 bp, Homo sapiens
ggctcatgctcgggagcgtggttgagcggctggcgcggttgtcctggagcaggggcgcaggaattctgatgtgaaactaacagtctgtgagccctggaacctccactcagagaagatgaaggatatcgacataggaaaagagtatatcatccccagtcctgggtatagaagtgtgagggagagaaccagcacttctgggacgcacagagaccgtgaagattccaagttcaggagaactcgaccgttggaatgccaagatgccttggaaacagcagcccgagccgagggcctctctcttgatgcctccatgcattctcagctcagaatcctggatgaggagcatcccaagggaaagtaccatcatggcttgagtgctctgaagcccatccggactacttccaaacaccagcacccagtggacaatgctgggcttttttcctgtatgactttttcgtggctttcttctctggcccgtgtggcccacaagaagggggagctctcaatggaagacgtgtggtctctgtccaagcacgagtcttctgacgtgaactgcagaagactagagagactgtggcaagaagagctgaatgaagttgggccagacgctgcttccctgcgaagggttgtgtggatcttctgccgcaccaggctcatcctgtccatcgtgtgcctgatgatcacgcagctggctggcttcagtggaccaaattttcaggatggctgtattctgcggtcagaatgagagagtcaagctgggcagaatctctcgccaagagttcagccttcctttggagactgctccatcagtgccgaggtgtgtgggaacaggcttcactgcaccgccatcttactgagttgcttcacgtgaggaaaagggggctttggccctgtgactcagttccacattttggattgcatactggaaaagaagccaatcttcttgctagtaaaccagcaacccggctgtatacagtggtgacccaagcaatggatataaacctaaaaatctgagggaggggagaggtggaatacagtagttcttggaatctgaagtctcctatttgatcaggttatttcctgggacttggcaaaaatctgattggtggggatctcctaggacctagtggacatctggtattaatttaatctcaggaaaaacaagaaattaacccagagagagtctgggttttggaattcagcgtagctacctccagaccgtggtgtctggcctccatttttgtctgtcattcagctctgacttacagctgcagtcacctttgctataaggcacctgggtagaagggtggatgggcttcacatcaatttttttcttcctttagggtgggggattggtttggctttcttttgttgtggttttttgttttatttttgtcaagattgatttttagatgcaaggacttgaaaagacccagaaggatgccaccagtttttccttgaggcctaggattttttattctgtcccgagcagaggtaattcctcacaacttagtgcaccagtagcaccagccattttgagcagagtacctctttggggagcttttcgttttgttttgtttttaattctctttccttagcagcaaggtcttttttcctagagaatctactccgttgcagaatcattgcaacctcaggagccctcactgattgagtgctgtcagcctgatatactactttggactctggaaacagatatgggttctattctctatttctactgtgtgtcgttaaacaaccgtcggagaccagatgacctgttagatggctagtcctgtataactcgactctgtatgtttcaatgtatgttactgcaatgcttcacctgctgtacagtgtttgtgagatgctctttgaagatggtacttttatattttttcattttcaataaaagtacattccttccca

SEQ ID NO: 10323 - DNA, 1848 bp, Homo sapiens
ggctcatgctcgggagcgtggttgagcggctggcgcggttgtcctggagcaggggcgcaggaattctgatgtgaaactaacagtctgtgagccctggaacctccactcagagaagatgaaggatatcgacataggaaaagagtatatcatccccagtcctgggtatagaagtgtgagggagagaaccagcacttctgggacgcacagagaccgtgaagattccaagttcaggagaactcgaccgttggaatgccaagatgccttggaaacagcagcccgagccgagggcctctctcttgatgcctccatgcattctcagctcagaatcctggatgaggagcatcccaagggaaagtaccatcatggcttgagtgctctgaagcccatccggactacttccaaacaccagcacccagtggacaatgctgggcttttttcctgtatgactttttcgtggctttcttctctggcccgtgtggcccacaagaagggggagctctcaatggaagacgtgtggtctctgtccaagcacgagtcttctgacgtgaactgcagaagactagagagactgtggcaagaagagctgaatgaagttgggccagacgctgcttccctgcgaagggttgtgtggatcttctgccgcaccaggctcatcctgtccatcgtgtgcctgatgatcacgcagctggctggcttcagtggaccaccttcctttggagactgctccatcagtgccgaggtgtgtgggaacaggcttcactgcaccgccatcttactgagttgcttcacgtgaggaaaagggggctttggccctgtgactcagttccacattttggattgcatactggaaaagaagccaatcttcttgctagtaaaccagcaacccggctgtatacagtggtgacccaagcaatggatataaacctaaaaatctgagggaggggagaggtggaatacagtagttcttggaatctgaagtctcctatttgatcaggttatttcctgggacttggcaaaaatctgattggtggggatctcctaggacctagtggacatctggtattaatttaatctcaggaaaaacaagaaattaacccagagagagtctgggttttggaattcagcgtagctacctccagaccgtggtgtctggcctccatttttgtctgtcattcagctctgacttacagctgcagtcacctttgctataaggcacctgggtagaagggtggatgggcttcacatcaatttttttcttcctttagggtgggggattggtttggctttcttttgttgtggttttttgttttatttttgtcaagattgatttttagatgcaaggacttgaaaagacccagaaggatgccaccagtttttccttgaggcctaggattttttattctgtcccgagcagaggtaattcctcacaacttagtgcaccagtagcaccagccattttgagcagagtacctctttggggagcttttcgttttgttttgtttttaattctctttccttagcagcaaggtcttttttcctagagaatctactccgttgcagaatcattgcaacctcaggagccctcactgattgagtgctgtcagcctgatatactactttggactctggaaacagatatgggttctattctctatttctactgtgtgtcgttaaacaaccgtcggagaccagatgacctgttagatggctagtcctgtataactcgactctgtatgtttcaatgtatgttactgcaatgcttcacctgctgtacagtgtttgtgagatgctctttgaagatggtacttttatattttttcattttcaataaaagtacattccttccca

SEQ ID NO: 10324 - DNA, 4697 bp, Homo sapiens
cggctggcgcggttgtcctggagcaggggcgcaggaattctgatgtgaaactaacagtctgtgagccctggaacctccactcagagaagatgaaggatatcgacataggaaaagagtatatcatccccagtcctgggtatagaagtgtgagggagagaaccagcacttctgggacgcacagagaccgtgaagattccaagttcaggagaactcgaccgttggaatgccaagatgccttggaaacagcagcccgagccgagggcctctctcttgatgcctccatgcattctcagctcagaatcctggatgaggagcatcccaagggaaagtaccatcatggcttgagtgctctgaagcccatccggactacttccaaacaccagcacccagtggacaatgctgggcttttttcctgtatgactttttcgtggctttcttctctggcccgtgtggcccacaagaagggggagctctcaatggaagacgtgtggtctctgtccaagcacgagtcttctgacgtgaactgcagaagactagagagactgtggcaagaagagctgaatgaagttgggccagacgctgcttccctgcgaagggttgtgtggatcttctgccgcaccaggctcatcctgtccatcgtgtgcctgatgatcacgcagctggctggcttcagtggaccagtaagttctaaccatcctttccgacagtctccaggggcccggccacggccagctctaacactcttattctgttgcagaggttgtgctcagctttgggctaggtagcagtcttagagatgccttcaggtctgttgaaaggggtcgatggattttggcaacagctggaaggatgaaagggcagtgttgccagagaagaaatggaactggcttgatttctgggtgggggtgaaatggaactgactccagttctgcacaggactgtgcttctcggttgtgtgttaacatgaactgacagtcggtgcaggcagatgtgtcttgcagtgctatgagtgggtgagagcacgttgtgtggcccgggctggtgagccagcaccgggaacataccaagtgcctggaggcagttatcacatgtttggcaggtctgtggcaaataagccctgagaaaactagaggactgtcgaggattttagagtctgacctggagtccgtttaagtttggcttatagtgtgactgtgtggcaagtgttggggtggcagccgtggttttccccagtctgtactgatgcagagtagacaagagagcctttgacgttcactctgtttcctgggcacctgtttcttacacctgctgtgctgccttacacttgagaccttgattaaatctattctctacacatttgccttgaggcatcggagcagtagtactgcttgtactgtgcgttttccatatgtgggtaagctggaggttcatggttttggtaagtatgtgcctaagatgcatggcaattaggtaaaactaatttgcagttttgtttttgtttttatttttttaacgtttgatgcctcttgttaaagttttgatctcttttctgaagcagagaacactacttttctggtattgggtttctatattattaataattgaccaactaacatactttatataaaagttttaagtaagaaggaccatgtaactgaaatgttgtgttatgtaatttaccaaaatggcaaacattttcatagagccagcttcccccaagaagagcttctgtcattgtttcactacagggctggtggctgctctgatctcatagaattcattcctctgggtagcaccatatgcaggctttgcgaataaagtgatcatgggctttcttgattccatttggccaatgcaagaacttcattggctcccctctaaaaaaaattccatggattgctgggatttttattttttattttttgaaaaaaatggtacctatccgtattcagcttggtggcttcacagtccctcccctgaacatccgtatattccttattctctcatttatggtgcagaacactggggtactaacctctaggaaactgttctagctgccagggaaagctaagagccctcctttaacaggaaagcagcagcatgctttttcttctctctgccgtttcagggaagagcaccttaaggccagtgttatttcatgggattctgccctagagctgagaaagtaatggactcatccataatctcttttatagatttgaaagtgtaaacaatacacacttccttttttggaactccaattctaatatgtttctttttcattggaaattgaaaaaccaggctggttttgagattagtactagcagtgagtaaacctcctgtctgtggacttaaatccttttgaggaacatttcgttttagatttttacaagttttctaatctggcacgactttcaaactagcttaatctgttcttacagaaacctgtgtaaggacagactgcccacatacgggctccccaaataaaatggcatttttatttcttgtccctgctcgggtttcaccgaaccttggtagccataatcagaacaaatgaaacacagtcaagttgttgtgttctgtttgtttttacctgccagccagctgatgctgacatttatacaccaagatgatccaaggttttggtgacgccggtggggactgccgctatatgtgcagggtgcccgggggtcatagtaatgttaatggagtaccagaatctctaacagtgtggtcctgtgtagccacattgctacacttacagagatgctttggggcctttttggattaagacagttctaaaagaccaggcctcacctatgatctgtgtataaagaattagcatcgcactgtagatctgcaagagaaggccgcctcctgcagtgctctctcttggtgaatgctaactctgctcgagggccttttggggaaaggacagtgtaaaacccttagagaggtaagtttcccacccttccaacctctctccacctgcagcttgcttggtgctgtcaggatctggatttggggggagtctctctgtagtggaaccagtgacagaagctgttctttagaattttcaggatggctgtattctgcggtcagaatgagagagtcaagctgggcagaatctctcgccaagagttcaggtaaggtaatgtttattcactgggaatgctttccacagccagacagctatgctaacagtctcaagttttcttccagtttgtttagatttaaatgatacatttgtaactttttaaaaactaaattttggttggatttttcatgaaaacctcttttttctttatcccctaaaaaatggtttgaaatgtcattgttatttaaaaacccgatgtgttggaacttctttaatctgctgtttcctctttttccccccctttgaaagtttcgcatagtgtaaacattcactatgtcttttaccttccctgctcctcccatctgggaggcgctgatgctattacccagtgctgaaaaatggcactctaaaggtatgggaaggaaggagcccaaggcaaccacctgctgtcctttcagccttcctttggagactgctccatcagtgccgaggtgtgtgggaacaggcttcactgcaccgccatcttactgagttgcttcacgtgaggaaaagggggctttggccctgtgactcagttccacattttggattgcatactggaaaagaagccaatcttcttgctagtaaaccagcaacccggctgtatacagtggtgacccaagcaatggatataaacctaaaaatctgagggaggggagaggtggaatacagtagttcttggaatctgaagtctcctatttgatcaggttatttcctgggacttggcaaaaatctgattggtggggatctcctaggacctagtggacatctggtattaatttaatctcaggaaaaacaagaaattaacccagagagagtctgggttttggaattcagcgtagctacctccagaccgtggtgtctggcctccatttttgtctgtcattcagctctgacttacagctgcagtcacctttgctataaggcacctgggtagaagggtggatgggcttcacatcaatttttttcttcctttagggtgggggattggtttggctttcttttgttgtggttttttgttttatttttgtcaagattgatttttagatgcaaggacttgaaaagacccagaaggatgccaccagtttttccttgaggcctaggattttttattctgtcccgagcagaggtaattcctcacaacttagtgcaccagtagcaccagccattttgagcagagtacctctttggggagcttttcgttttgttttgtttttaattctctttccttagcagcaaggtcttttttcctagagaatctactccgttgcagaatcattgcaacctcaggagccctcactgattgagtgctgtcagcctgatatactactttggactctggaaacagatatgggttctattctctatttctactgtgtgtcgttaaacaaccgtcggagaccagatgacctgttagatggctagtcctgtataactcgactctgtatgtttcaatgtatgttactgcaatgcttcacctgctgtacagtgtttgtgagatgctctttgaagatggtacttttatattttttcattttcaataaaagtacattccttccca

SEQ ID NO: 10325 - DNA, 5852 bp, Homo sapiens
ggcgcaggaattctgatgtgaaactaacagtctgtgagccctggaacctccactcagagaagatgaaggatatcgacataggaaaagagtatatcatccccagtcctgggtatagaagtgtgagggagagaaccagcacttctgggacgcacagagaccgtgaagattccaagttcaggagaactcgaccgttggaatgccaagatgccttggaaacagcagcccgagccgagggcctctctcttgatgcctccatgcattctcagctcagaatcctggatgaggagcatcccaagggaaagtaccatcatggcttgagtgctctgaagcccatccggactacttccaaacaccagcacccagtggacaatgctgggcttttttcctgtatgactttttcgtggctttcttctctggcccgtgtggcccacaagaagggggagctctcaatggaagacgtgtggtctctgtccaagcacgagtcttctgacgtgaactgcagaagactagagagactgtggcaagaagagctgaatgaagttgggccagacgctgcttccctgcgaagggttgtgtggatcttctgccgcaccaggctcatcctgtccatcgtgtgcctgatgatcacgcagctggctggcttcagtggaccagccttcatggtgaaacacctcttggagtatacccaggcaacagagtctaacctgcagtacagcttgttgttagtgctgggcctcctcctgacggaaatcgtgcggtcttggtcgcttgcactgacttgggcattgaattaccgaaccggtgtccgcttgcggggggccatcctaaccatggcatttaagaagatccttaagttaaagaacattaaagagaaatccctgggtgagctcatcaacatttgctccaacgatgggcagagaatgtttgaggcagcagccgttggcagcctgctggctggaggacccgttgttgccatcttaggcatgatttataatgtaattattctgggaccaacaggcttcctgggatcagctgtttttatcctcttttacccagcaatgatgtttgcatcacggctcacagcatatttcaggagaaaatgcgtggccgccacggatgaacgtgtccagaagatgaatgaagttcttacttacattaaatttatcaaaatgtatgcctgggtcaaagcattttctcagagtgttcaaaaaatccgcgaggaggagcgtcggatattggaaaaagctgggtacttccagagcatcactgtgggtgtggctcccattgtggtggtgattgccagcgtggtgaccttctctgttcatatgaccctgggcttcgatctgacagcagcacaggctttcacagtggtgacagtcttcaattccatgacttttgctttgaaagtaacaccgttttcagtaaagtccctctcagaagcctcagtggctgttgacagatttaagcttccttccactgtatagcctgatgtgttttgctacgtgagtgtacgccctaggcttgtctccctggtcttgatccagtgtctcatctttgcacctctctcacaactcctatcagagtttgtttctaatggaagaggttcacatgataaagaacaaaccagccagtcctcacatcaagatagagatgaaaaatgccaccttggcatgggactcctcccactccagtatccagaactcgcccaagctgacccccaaaatgaaaaaagacaagagggcttccaggggcaagaaagagaaggtgaggcagctgcagcgcactgagcatcaggcggtgctggcagagcagaaaggccacctcctcctggacagtgacgagcggcccagtcccgaagaggaagaaggcaagcacatccacctgggccacctgcgcttacagaggacactgcacagcatcgatctggagatccaagagggtaaactggttggaatctgtggcagtgtgggaagtggaaaaacctctctcatttcagccattttaggccagatgacgcttctagagggcagcattgcaatcagtggaaccttcgcttatgtggcccagcaggcctggatcctcaatgctactctgagagacaacatcctgtttgggaaggaatatgatgaagaaagatacaactctgtgctgaacagctgctgcctgaggcctgacctggccattcttcccagcagcgacctgacggagattggagagcgaggagccaacctgagcggtgggcagcgccagaggatcagccttgcccgggccttgtatagtgacaggagcatctacatcctggacgaccccctcagtgccttagatgcccatgtgggcaaccacatcttcaatagtgctatccggaaacatctcaagtccaagacagttctgtttgttacccaccagttacagtacctggttgactgtgatgaagtgatcttcatgaaagagggctgtattacggaaagaggcacccatgaggaactgatgaatttaaatggtgactatgctaccatttttaataacctgttgctgggagagacaccgccagttgagatcaattcaaaaaaggaaaccagtggttcacagaagaagtcacaagacaagggtcctaaaacaggatcagtaaagaaggaaaaagcagtaaagccagaggaagggcagcttgtgcagctggaagagaaagggcagggttcagtgccctggtcagtatatggtgtctacatccaggctgctgggggccccttggcattcctggttattatggcccttttcatgctgaatgtaggcagcaccgccttcagcacctggtggttgagttactggatcaagcaaggaagcgggaacaccactgtgactcgagggaacgagacctcggtgagtgacagcatgaaggacaatcctcatatgcagtactatgccagcatctacgccctctccatggcagtcatgctgatcctgaaagccattcgaggagttgtctttgtcaagggcacgctgcgagcttcctcccggctgcatgacgagcttttccgaaggatccttcgaagccctatgaagttttttgacacgacccccacagggaggattctcaacaggttttccaaagacatggatgaagttgacgtgcggctgccgttccaggccgagatgttcatccagaacgttatcctggtgttcttctgtgtgggaatgatcgcaggagtcttcccgtggttccttgtggcagtggggccccttgtcatcctcttttcagtcctgcacattgtctccagggtcctgattcgggagctgaagcgtctggacaatatcacgcagtcacctttcctctcccacatcacgtccagcatacagggccttgccaccatccacgcctacaataaagggcaggagtttctgcacagataccaggagctgctggatgacaaccaagctcctttttttttgtttacgtgtgcgatgcggtggctggctgtgcggctggacctcatcagcatcgccctcatcaccaccacggggctgatgatcgttcttatgcacgggcagattcccccagcctatgcgggtctcgccatctcttatgctgtccagttaacggggctgttccagtttacggtcagactggcatctgagacagaagctcgattcacctcggtggagaggatcaatcactacattaagactctgtccttggaagcacctgccagaattaagaacaaggctccctcccctgactggccccaggagggagaggtgacctttgagaacgcagagatgaggtaccgagaaaacctccctctcgtcctaaagaaagtatccttcacgatcaaacctaaagagaagattggcattgtggggcggacaggatcagggaagtcctcgctggggatggccctcttccgtctggtggagttatctggaggctgcatcaagattgatggagtgagaatcagtgatattggccttgccgacctccgaagcaaactctctatcattcctcaagagccggtgctgttcagtggcactgtcagatcaaatttggaccccttcaaccagtacactgaagaccagatttgggatgccctggagaggacacacatgaaagaatgtattgctcagctacctctgaaacttgaatctgaagtgatggagaatggggataacttctcagtgggggaacggcagctcttgtgcatagctagagccctgctccgccactgtaagattctgattttagatgaagccacagctgccatggacacagagacagacttattgattcaagagaccatccgagaagcatttgcagactgtaccatgctgaccattgcccatcgcctgcacacggttctaggctccgataggattatggtgctggcccagggacaggtggtggagtttgacaccccatcggtccttctgtccaacgacagttcccgattctatgccatgtttgctgctgcagagaacaaggtcgctgtcaagggctgactcctccctgttgacgaagtctcttttctttagagcattgccattccctgcctggggcgggcccctcatcgcgtcctcctaccgaaaccttgcctttctcgattttatctttcgcacagcagttccggattggcttgtgtgtttcacttttagggagagtcatattttgattattgtatttattccatattcatgtaaacaaaatttagtttttgttcttaattgcactctaaaaggttcagggaaccgttattataattgtatcagaggcctataatgaagctttatacgtgtagctatatctatatataattctgtacatagcctatatttacagtgaaaatgtaagctgtttattttatattaaaataagcactgtgctaataacagtgcatattcctttctatcatttttgtacagtttgctgtactagagatctggttttgctattagactgtaggaagagtagcatttcattcttctctagctggtggtttcacggtgccaggttttctgggtgtccaaaggaagacgtgtggcaatagtgggccctccgacagccccctctgccgcctccccacggccgctccaggggtggctggagacgggtgggcggctggagaccatgcagagcgccgtgagttctcagggctcctgccttctgtcctggtgtcacttactgtttctgtcaggagagcagcggggcgaagcccaggccccttttcactccctccatcaagaatggggatcacagagacattcctccgagccggggagtttctttcctgccttcttctttttgctgttgtttctaaacaagaatcagtctatccacagagagtcccactgcctcaggttcctatggctggccactgcacagagctctccagctccaagacctgttggttccaagccctggagccaactgctgctttttgaggtggcactttttcatttgcctattcccacacctccacagttcagtggcagggctcaggatttcgtgggtctgttttcctttctcaccgcagtcgtcgcacagtctctctctctctctcccctcaaagtctgcaactttaagcagctcttgctaatcagtgtctcacactggcgtagaagtttttgtactgtaaagagacctacctcaggttgctggttgctgtgtggtttggtgtgttcccgcaaaccccctttgtgctgtggggctggtagctcaggtgggcgtggtcactgctgtcatcaattgaatggtcagcgttgcatgtcgtgaccaactagacattctgtcgccttagcatgtttgctgaacaccttgtggaagcaaaaatctgaaaatgtgaataaaattattttggattttg

SEQ ID NO: 10326 - DNA, 28872 bp, Homo sapiens
cgggtctgagagaaacgcccacctgggaggctgtgcagcgggtggctcggggcaccctgctcaacccgcagcggagccgccagcgaccttcgaagtaagtcatccccttcgtttttgcaagcgggtaaatggaggtacgtgacataagcacgcgcagcaaagccgtggctgtgccgggaacgcagcccagatctctccacggtcatccagtgctcttttcgcttctgccacacagagccgcgggtggctttgtgtttatcacacaggggccatttggtttctgcacagacggagaggctggaggcaggtgggcacaggaacgacggggaaagtttcaggaggtcttggaggaggagatggctaggttttactgtggtccgcagcgtgtatgaaaggtgaggctgcttggagacgcaacaagtggattacagtgggtgtggtaaatacgtatccctttagcgtggtgtcttcctcgtgcagcttgagggcctggaggtgatggaaacctactcatgagtgttgggatgactgcagcttgcacacaccagtctggtaatcccgtgcaactctcctcctgccatgcagttgaatcagtatcattgtgcagggagagtgtctacacttttatcagtggaaagagaatcttggtaaaaaagggcagctgactaagtggcctcaaccctattgggcacttctttggggttctcccacgttgattattctgcttctacccttgtacatgtctggacaacaggtttgttttttacaaacaaaaatcccttctctttcttcctctcttgatagctgaggcaagtgagcatttaaaaaagatattccaacaactttaaaggaggacacgagaagatagggaaatataaatagtatcagtaaaatggctggcctggggatccatccttgcttgcttgcttgcttcagactggggctttgtttctttccaaacctgtcaggattcccagctcttcgccggcctccacgtggggtgccctcttttatgttccagatacacagacgatggtgtccttatgttcaaggccacagacagtaactttgtgcctactttgggcctgcctgctctcctgattgtgcctctttttccaggaaagtagagatgagtgtgttagagataatggaacactgttccccacacccttcatacatagaataacttagtcccttaggatagtttagcagtgtctaccacagcagtcactgtaggcacaaaacagtcattatttgtgtcataacagggaagtcgttttgtccctgcctctctctgctcctgtgctccactgattctacttcatcctttgaaataaaagtggttgaaagaatctttggttatcatgggtgcttagataattaagattatgttcgtgttcttcttgatgtggcatttcatattgtggatgagttccagtgacctcctctgtttcaaactgctcaccgccccaacccccaccttttaaaaaggtagtactaatcttttcctcttccagataatcagctaagctagggaacccttgaaggggaaggttagaatttcgtgattcccgtaagaaggttactctgatctacagctacagctcaacactggggacactggcagatgccaggtctgtttatagtttagccttaatgaggtctcaatgacgtgattgctgcactctggcttggtgagccgctgttctttatggtgtagtttgtcattggacaaggtgactttttttttttttttaaagataagtaacagctatatcaacttagggtacttgaaccagaattctgaaaggcaagaaatcaagctttctttggactggaaacctgtctttgcataggagatttagtcctttttattcagaggattagtaagtgttctctttttatctgacactttaaaaattgcattataatggttagaattttgtgctgcagaagtagtagttttaagtcacagcgatagccagggatttatggaatccagaaggcgacacggctacacgtctttaatttccgttggaggctagtatgaaaggtgttttctcagcttgtctctgggaggctgtgacccttcttagaggggggaaacattttggagaagtatgtatgtgttttttgtttttaagtgacctgagttgatacagcatattgattagacttagccaggcaagcagtggtttagaatagagtttcaggtaaaaactaggtaagacttagtaatacagggtggagaatttgtttttgttattgttttttactaacagctttgttgccataggatttatatgacatgaaattcactcttttaaagtataaattcagtgtgttttttttcaatgtattcactgcattgtgcaaccattaccactatctagttttagaacattttcagtacccagggaatttgtgtttgaagttaagttataacattgttttaactggataacttcatggagctttaaaataacaccagctaacccattagttaattataaaaaggcagagatggaatatatcattggtagaataagtgtttggtaagtttttatttagtaaaatttagtagaagaaatgatgtccactttaaaattgtggagtttttaatacttgggacaaactgaaattgtttctagaaagtctttaaaaaaaaaaccaacctttctattgtatacactggatttgagcttagttgaagagaatgggtgtctctttactagtgtgtttactgtttctaattttttttcccttagagttgggagaaggtaatttttcttgattctcttatactgaatctttttctttaaaaaaatgaaatcaaaatctttgaactttttttgaaaattaatttttgtagctataacagtagaaagctttagtacttttgccttttttttttttttcctatttttaaggcacttgagcttatggttaagtactgtttaggaaataatctatttcttgatgaatttttaatttcaggaattctgatgtgaaactaacagtctgtgagccctggaacctccactcagagaagatgaaggatatcgacataggaaaagagtatatcatccccagtcctgggtatagaagtgtgagggagagaaccagcacttctgggacgcacagagaccgtgaagattccaagttcaggagaactcgaccggtcagtttcctttcctaagagtctcttacctgcttgttgtactaaaacacatcttttttcgtataatgggtaatttagaaacttattttttggccgggcgcggtggctcacgcctataaacccagcactttgggaggctgaggcgggtggatcatctgaggtcaggagttcgagaccagcctgaccaacatggtgaaaacctgtctctactaaaagtacaaaaattagccaggcgtggtggcgggcgcctataatcccagatacttgcgaggctgaggcacgagaatcgcttgaacccaagaggcggaggttgcagtgagctgggatcatgccactgcactccagcctgggcgatagagcgagactcagtctcaaaaaaaaatgtgtttttctttattggctttaggttactgttaagaatttatggttattgataagtctctggtccatagtaagcactcaataagtggaagagaggctggctgtcaccctctcacccggtctgttctgagcattctcctctttttcacttttattctatgttggtgccttctgaaaaggctatacttaacagaagacaacttattgagggggagggggtcatggggtcaatgacagggaatataaagccaattaagcttcattcatgtacctaaacaaaattggtgttttcttctactttctgtcatgtgtgtttaaaatgtgaacctggccaggcacagtggctcatgcttgtaatcccagcactttgggaggttgaggtgggtgggtcacttgaggtcaggagtttgagaccagcctggccaacacggtgaaaccctgtctctgctaaaaatacaaaaattagtgaggtgtggtggtgggcacctgtactcccagctactcaggagggaggcaggagaattgcttgaatccaggaggcagaggttgcagtgagccaagatcacgccactgcactccagcctgggcaacagagtgagactccgtctccaaaaaaataaaaaataaaataaaatgtgaatcctttggagagactcagatttcagaacaattctagatagttgtgggattatcagtatgtttttcaagcgaattcataagttaagcagtctttagataataatctaatttcctccaagggaaataatgaagatgcgtttttacctcgagaaaatattctttttcctgaggaaaaaaagcattataccttttcttacaaaagtacctaataaggcagaatggactaggtttaggaagttgaggtttttgttggtgtatttgttatgtgaaaatttgagaaagataatggactttgcagctgacactggcctttccttagcctgatactacctttccctctttggttgtgttaaagccattgctttattaatgaacattttcttgctaatgagtcttttctgtaccctactgtgtattatagaatgcttttccattcaggtttaacttcagagaaacaggcttaatgtaatcagtgtcaaatgcttctcgtggtgccagttttataacttcctcatgtccttttgtctagaccttatgttgattaaacatctatccattacatctgagtgctagacacatttagtgtaacagttaagtctggaaaaagtcagaaggtaacattggggcagggccttaaagggtgattaggtggggaggctttttaggcggtacaagtacagacccaaaggtatggaaagagcgtgtgacatattgggactttggataagctacttacgtcatttgtatataaaatggggttgacagtagtacctgactcatgggatcactgaggagtaaatgagataatacatataaaatatttaaaatggtacctggcacatggccagtgctcaataaatgttagctcttagaactagttgttcagggcataggatgtgtaaagagattataggtcgggtgaaattctgcatgccatgctaagaaatatttcactgtgggcattagggaactattggaagttaatgagattaaaaaaaaaaacctttttattttgagctaactgtagatttacatgcaattataaaaaataatatagagatcctatatattcttcatccagtttcccccagtggtaacatcttgcataactatagtccagtatcacaacaggataatgattgacattgatacaatccattgactttaggatttcaccagttttatatgcactcatttgtgtgtgtgtgtgtgtgtgtgtgtgtgtgtgttgtgttctatgcattttttaaaggtgtaaatttgtgtgaccgcttccacagtcaggatgcaaaggttccatcacaaggatctctcgttacccttttatagccacagtcatgtcccctcaaccccagtctctggcaactgctaatcttttctccatttctgtaattttgtcattttaagaatgctatatacattgaatcatatagtatataacctttcgagattgcttttttcactcagctgaactcccttgatagccatctaattttgttgtgtgcatcaatagttctttcctttgtattgctgagtagcattccgtgttatagatgtaccatagcttctttaaccattcatttgttaaaggacatatgggtcatttccagttaatggcaattatacataaaggtgctctgaaccttcagttacaggattttgtgtgaacataagcttttatttctctggattaatgcccaggactgcgcttgctgggtcatatggtaagtgcatatttagtttgtaagaaactgcagtactctttcccagagtgtctgtgccattttacattcccaccagcaatgatccagtttttccacattgttgccagtactcaatgttataatgtttattttagccattcctatagatgtgcctggtatctgattgtggttttaatttgcagttccctaatggctacgatgtttgagagtagatttttatcttagattagtcttgaagcaatgcagaaaaaaacctgtacaggagaaagagaccaaatataaagagcattcaggaagcggctctgcctatccatgtcagagaggccagggttctgttgtaaagcacagaagtgaggatggaggaaaggcgtttctagaagatagggaggcattggggtgtctgggattgatggtaaggatttaaacctattcgtggacataagaaaaggagattggggagatattaagaatgagtttgggccgggcacggtggctcacgcccgtaatcctagcactttgggaggccgaggctggtggattgcctgagctcaggagtttgagaccagcctgggcaacacagtgaaaccccatctacttgggaggttgaggcaggagaatcgcttgaacctgagaggcggaagttgcagtgaaccaagatcgcgccattgcactccagcctgggcaacagagtgagactccatctccaaaaaaaaaaaaaaaagaagaagaatgattttgattttgaagatgttgaatttgaagtgcatatgggtaaaattatcagtaggtagagcatagacaagaagtagtgtaggaaaaaacatttagagcctttagtgtgtccacataggtgaagctgtgagagtgagcaggcttacccaaggatggcttgcagagcaggagaaggtggaggctgtggagctggtgtgtggtcctgtgaaatttctggggatagggtccccagcttgtgagagtagagttgacatcagggtttgcagtggcagcagcgagcttttcctctacgaagtggagaagaacagcaggtaggcaccgctgggctttgagtaccctaaaggatatggagtcagccaccactgtagcaggttttcaacatgccactgaagccttatctcagagaaatatgaaggctaataccacttttataaaatttcaggaatccacatgaattttatgaattttatttttattattctttcatgtttcctaaactttttttttttttttttttttttgagacgaagtctccttctgtcacccaggctggagtgcagtggtgcaatctcagctcactgcaacctccacctcccgggctcaagcaattctcctgcctcagcctcctaaacagcaggtgcctacctgctgttctctgttaccacattggccaggctggtcttgaactcctgagctcaagtgatccgcctgccttggcctcccaaagtactgggattacaggcgtcagccaccacatctggccatgaacttttattttttattaaattttttttgtttgtttttttgtagaggcactctcactgttggccaggctgttgttgaactcccagcttcaagcaagcctcccgcctcagcctcccaaagtgctgggattacaggcatgtggcaccacaccctgcccctaaactttgaaatttgagtactgttttcctgatttttactgtatccttgtaatctctgaacttttttaaaagatttcttttattctactctctttctgttacttagtctagacctagcaaaacaacaacaataagcccataggtttattcaagctatttttgtatatacattaaaatgaatgcatcgctactaagtatttttgtaagttcagacaccatctagaatctgcttgaccgttacctgtcaaaaaacaaaatttctcagatgtatttatctttaacttgtcttcatgttacaagtttgctgacagaagcaaccagcaagatgacaagaaattttgtggtctgagaaaattgtataaatggtataaaatggataatgtaagtagttgggaagcagaattcctgtataagcatatagtttttctttttttaaagtaagcagttaattgggcagagattgcaatttcatgtcacatcatcattaccatcatttttatatttgttagagaggaaatctgggacaggatctcccaggatgccaggtatgcctactatctgtcaaaaatttaaaacaaacaacaaaaaagcctctaagtaacaaaagataaggatacatctatggctcttatgtggaaagcaaggtttcattcagcactattagcctttaacacgtggaattaaccgagaagcaggagacctgtgctgctggtgcctcacgcctgtagtcccagcactgtgggaggccgagggaggaggctcgcttgagcctgggagtgcaagaccaacctgggcatcatggtgagacctgtctctacaaaaaaataaaaataaaaataaattagctgggcacaggggtttgtgcctgtagtcccagctacttgggaggctgaggtgggaggatcacttgagcccaggaggtccaggctacagtaagctgtgattgtgccactgcactccaccctgcgtgacagagcgagaccctgtctcaccaaaaaaaaataaagaaagaaagaaaagaaatggtgtcaaacagaagtcagaagcaaagcaccaaagaataagttctgactttgagcaggccagtgcttttcttcttcaaggtgtaagtgaagatgcagattacatggtttgcccatttctcagtattgtgaccaaatcattcttttggaatatgacttggaaaaattgctctattagtcacatcttcaaatatttataatttctcacgtatgcttagaaataattagggttgaaataaagcattcgcacatctacccactttcttcgggactgtaatgttaatgcttgtggccacacacaatttgaggcttagcaggcatcctttaatcctgaagtgttaataaagtggtggtttctgttgctgttagttctttgagcctgagtactaactttggctggcattaggctggcgttacttcagctaacatgaagttttatacctaggctgctcctaaacactgttcctttgcctgaggcatgattattcaggcatggttcctttttttaatcctatttatatatgcacatgtagatcatatgactccacgagccctgatttttttttaagatgcagtcagtgtttattcatttttttaaatttagcaaatatttgaacactcttcaagatgcatgcacagcactgaaccgagtggtctggtgcagataaagataaattggtgctgggcctgcttgtccaccaatagaagcttaaactcacaacacgtactctacatagatgactgtaatttagatgctgtgggaattagtaaaaggagaaagtgcttctctctcagggaactctttaggaggaggtatcatttggctggaaacttgaggaatggatagaatttggagaaatgaagaacttgccaggcaaaagaaagagttgtgggatagggatacctagtccttgttggtattgagcatcaaatgtgtgaagtcttagctatagtgcaatacctcagtgaatttcacattatgtgtggggtttttttgttttttgttttttgtttttgaggtagagtctcactctgtagcccaggctagagggcagtggtgcgatcttggctcactgcaacctccgcctcccaagttcaagcgattctcctctctcagtctcccaagtagctgggattacaggcacatgcaaccacacccagctaattgtttgtatttttagtagagatggggtttcaccatgttagccaggctggtcttgaactcctgacctcaggtgatccctccgcctcagcctctcaaagtgctgggattacaggtgtgagccactgcgcctgggcatgtgtgttcttgaataataagccaaggagtttggattttaattgctttaaattaatatttaagcaaaagcaagacaaagcttgtcagatgcttttatgagctttattttattgtggtggtggtttgttttcttagtgctctcaggcaaaggtaagggtgccttgtttttcattagcatgtctaatctgggaaagaaggaagaatggaaaaataagcagaagtgggccgggcgtggtggctcacgcctgtaatctcagcactttgggaggccgaggcgggcagatcacaaggtcaggagattgagaccatcctggctaacatggtgaaaccctgcctctactaaaaatacaaaaaattagctgggcatggtggcatgcacctgtagtcccagctactcgggagactgaggcaggagaatcgcttgaacccgggagccagagtttgcagtgagccgagatcgcaccactgcactccagcctggggaacagcaagactctgtctcaaaaaaaaaaaaaaaaaaaaaaaagcagaagtaaactaaagttcatgtaccattattactggcacatgaactttagttattttttccccttctctcaaaagtgtgtcattggtgggattttcttcctaccaaattagaatatcctgtgtctaggaaaggtaacaaagcaagtattcataaaatccagggctcttacttagtatttccttagttctgtggtaggctgaccctttaatcttggttggagttttcataattaatgctttgaaatattttggtgagctcaagttgtatcttagggatcaaagatgtgggtctaatctcttaccagaaatgattcgaagatgtattgttaggaaagaaatatgggctcattatagaaaatgtacaaagtgtgtaaagttgtagaaaaaaagtaaccacccttaattcctctacccagagacagccattgttttcataaaatagttttgtctagtacattgtacttttagagtttgctcctgaaagcttttctttacagactaaggacgtgtgaatttgtctatgcccttgtgttttccaagtcaagagtattacctgtgagtcggcttgctgttaggaaggagagcaggaggaaggagattagcattttgcagctctgcattatttttctcttgattgatactcggtgactcagcagattttctggacagggttaagataagtaagaatacctgcctttttttttttttttttttcttctctccctgtaggcatccataaagctttatgaggcacagtagtctcttaggcgctgctgggtgtgacaccgtatctggtctggtgccaggtgttggtctccaatagcagcccagagatctccggctgaggtaacaacagtgtgcgattggtgtggagcccaggtggctctcatgcttggtaactgcattgacagctcgctggggctcttgaggttgggctgctgccgggatcatcagctctcttatgccgtttgctgcaagactgccgcggctttcctaggaagtgctgcttaagggaaataaatatagcctgttggcatgagttaaaggaactttctgtcaaaggggaagaaaagtgttggaattagcttcctgttttttttttttttaagtacctaaatctttatttggttaagataacttggaagttacaaatggttaatgaaaactttttcaatgaaatattgtttccacagttaggtgggtttccgttaatgctttcttttttttagttattattatactttaagttctagggtacatgtacacaacgtgcaggtttgttacatatgtatacgtgtgccatggtggtgggctgcacccattaactcgtcatttacattaggtatatctcctaatgctatccctcccccctccctgttcatgctttttttaatgtcttaccgtttttccctctcttttagtcaaaaataaaaaggtcaacgcaaagaaacagggactccagaaggctttgcaatggttaaacctgtcattattaaactcacagactaatgtgaagttaatttggtgcactgaagtccactaatgagcagaattaaatttatccttttcctccctgccccccttttaaggagttagcctatttagataattagatgttatatatgttttaactatttaagattattttatgaattagctgttcaaagaatcaattgttactagatatcagatgagaacttccacttaccaaagcctgctcatggaggtagaaagcaagactgacatgtgtactttaaaagatggatggaacctcaaaggccgtcttgcccagtccccatttagcctcacctctctgtaggtgaggcccaggagagacacttactaggcagactatgctggggctgggtgagcttcccaaggatgttctttctggaattcggtggctcagaatacagcacttggctcctctttgaagcatgatggctctgttgcctgtctctggcccagtgtgctgggctgctgaaaagagcatggaaccacccaggagacgccacgacactgacagctgtacctgacctgagggttcaggatatgttttcaaaagcaaatctcgctaaaaaggatttgtatgttattatgaaatctatatttatgtggtggaaatagacacactcaggcttttagagataaactacacagaatgggttacaataaatgcttataattgtttggcttttttaagaatcctgttaacttgacaaccttctgtttacttttctttggtattatgcaggtatgatattgagcagtcacttagttttcttaaatgttgtgtctcacagtagaaaaatagccaaaccactcagcccctgacctttgtgtttgcttctcacggtgatcagcagttctggtctgctctgcagtatggtggtcacatgatggaacccagaaagccttgtactaagcatttaacacacattgtgttaggcactggaggaagtttcatttacaaattatattttggcctttttttttttttttttttttgagacggagtctctgtcacccaggctggagtgcagtggcatggtcttggctcactgcaacctctgccttctaggttcaagcaattctcctgccctcagtctcccaagtacctgggattacaggtgtgcaccaccatgcctggctaatttttgcatttttagtagagacaggatttcaccatgttggccaggctggtctcgagtcctgacctcaagtgatccacctgcctgggcctcccaaagtgctgggattataggtgtgagccactgtacctggcctttttttttttttttagctaaagcctgaaaatcttgttgaagggattttgtcaaatgcaaaagaccaatattcacaactctctaaatcagtggttttcaggccaggctgaatgttaaaatcacttgaagaatgttcaacaaataccagtgttggggtcctattccagaccaattaaatcagtctctgggatagaacccagacattggtattgttttaaaactcctctggtgattctagtaggtaggcagtgctgggaatctctagatctcatggaataaagtctgttctctcccctcactcaatggctccaagtgtttcctgtaaatcccgttttacccctgtgattcattttcagtttaatcctttgaaaccttaccatgctattaacaaagttaatcttagacccaacataacaggaactttgaataagttccttggaatttagcttatgaaacaactgaaagccctcaaattcctggtgattatggagtaatgctagattatcaactgcagacaaatacctgttttactgtggtggtggagatatgtttgtgaattgtattgctagctgatcatcggcttgagagtaacatagcacagctacagataagtgagctgatgctcaagttaattcttttctcagtgtagtatagctgttgagtgataggactgagtttagcagcttccctgacttggaataatagctctttcttttgtattctgcttcttccccatataggttgggttctagaattttgctgatcctcttgactgaaatggctactatttggaagttcttaagggaagagcttaagatggtcagggttgtgataacaacccactggggagtaaggatgtggtgggaattgcagaggaaacgtgcttggtaggtttctttaacttgttggagattaggaagggcgggaaggcctgaagtcagccggtcttgggaggacatcagtttttgatctttttaaatttaaaagtgaattttaattcacttttaaatttaatttctaatattctgagtcccttaagaagtatatctagtggcacaacagttccccttaaaagtttgtctttctagatgtttgtcataaaggctgcgtgggcctgggacatctgtagaaatggttttcttggccagaaggatgtatttgaagaggcgcccattgtcttgtttgtcttaaggtcttgtgaatgaggagaggagaggaagacagtgttgtgagatctgaggcctgttgattccgattgtgccccagataccgctttatttgaggggtgtgccagacaggagcaggcagcctttaacccccttggaaaccgaggtacctctctgttgccagttgacacctgcagtctctgccttcaggaacaacttggttgaatcctcagcccgaggcttattaggcaggctaccctgctgttgtccggcctccaggaagggattggattgttcagacggggaacgatttctggcccctggtatctgtcccagaggcctccgtgcaggggaaaagcccttggttgccctgtcagcaggcatttgctctggcagcctgttaaaatgagatgggacagctggagaagtggtggccatggggtgtgataggtgcgctgattatctgaggcctgaggatggcgttagcgcccgcagaagcgtcttttgcaagagcagatctgtctgcttatgaatcgaatgttacctgtttttcataccagaggtgtctatgaatgtgtgtttccctgatctttgtttgaaccttgacagaatctgaattgctttttgttattgttgtttttgtttttctcttttttttttttttgagacggagtctggctctgttgcccaggctggcgtgcagtggtgcgatcttggctcactgcaccctctgcctccttggttcaagcaattctcctgcctcagcctcctgagtagctgggatgacaggcatgcatcaccatacccggcttatttttgtatttttagtagagaccgggatttcaccatgttggccaggctggtctcgaactcccaaccttaggtgatcctcccaccttggcctcccaaaatgctgggattacaagcataagccaccccacccggcagaatctgaacttcattgtccctctttagcttccctgtgaccttactcctgccccattgccattaccttggtaggaaaaatgctgagtatcctagtcacatagtcatggggaagatataaatggcagtcatacttcctcgtttgatatttttctcagctcctggatctgccagtatttttccctttaagacaaagcagctgctgtgggtgcctttctgtgtggctgggtcgtctggccactgacagcctttcagtgtgctgtgctccttaagagaaatgggtcccctcatcttgtttcaggggaaactttaaaaagttacttgtaaaagggattgaaagcatcataacaaaaaacaaatggcctcataaaatacattcctctaggtcagcctatatcagtactaactgtgttagctcttcagctatctagggttaccttagtacgattgacattttgggccacataattctttgttgtgggggctatcctgtgcattgtaggatgttcagcagcatccctggactttacctgctagagctagtagcacccctcaaacatttccagatattgccacatgtcctctgggcaagcaaaacaccctcacttgtgaactcctgggctgcaccgtgcgacacagtactattgtggctattaagcatttgacctgtggccagtctgaactgagatgtgctgtaagcataaaatacctgatttcagagacttagtacgaaaaaagaaatacctcgtttgtaaaatacctaataatttttcacattgattatatgttaaaaaagataatactttgcattgggttaaatgaaatatattatttaaattaatttaccttttactttttatttttagagtcagagtctcactctgtcacccagactgtagtgcggtggcatgaccatggctcactgcagcgtcaaacacctgggctcctgtgatcctcctgcctcagcctcctgagtagctaggactacaatctcgtgccaccatgcctggctaacttttaaattttttatagtgatggggttttggagggttacacagactagtctcaaactcctggcctgaggccatcctcccacctcagcctcccaaagtgttgtgatgacaggcataagccactgtacactgcctactttttactttttaaatgtggctactagaaaaatttaaattacattatgtggcttacatttgcagcttgcattatatttctattggacagtgctgaactagagtgttgatctactgtaggttagccattgattttgtattaggcatttagatccctgtaagctgttgggtttaatgattttttcctttggaagattttcctttatgcagtaaaattatggagacacagagtatgtagtattacatattaccagtttgctctcctgaatccctgctggtagcatattaaaaatcagtttaatgttcagaccgtgtatgtttgtctatatttctctcctttccatattgcattttcttttccatattagattttatctcttttaaggcttatgtggttgtatcttaaatttaatttgtatttctcgattggtgacattgggtctgtgtgttctctcctgtatctagaacagtgcctggcacatagtaggccctcagtaaggactagttgaatgaatggatgaaaaaatactgtattttactttttcagtacaagtccactactcgaaatatattattatgttagctacttggttacttcttatttttatttatttatttatttatttagagacagggtctcactctgtcacccaggctggagtgcagtggcatgatcttggctcacttcagcccgatggtcctggctcaagcgatcctcccacctcagcttcctgagtagctggggctaacggtgtcccttttttgtatttttttgtacaggcggggtttcatcatgttgcccaggctggtctcaagctcctaggctcaagcgatctgcccgcttgagcctcccagagtgctgggattgtaggtgtgagccgccgcgcccagccacttggtcacttctttagctttatcttcccttctcttaatgctaatttccttacgcaaaaaagtttccttttcatgtttgaacctctcttccctttgatacatttctgcttgttgggtgtaaatggaggctgtcccccatcatagctggactaagtatgctatataatttatgtcatcatttttaatgtaatttttgggaggttaattccagatggattaatgtatgatatgaaacctggatatcaattaattcatctccaatctggttagttggtaggaaggtaggtagtaggtaggatgtgagtgactgtctctgtcacccaggctggggtgcagaggtgcaatcatggctcactgtaccctcgacttaccaggatcaagcgatcctcctgccttagcctctcaggtagctggaccacaggtgtgcaccaccatgcccggctagttttaaaaaatgctgtatatagatgggttctcactttgttgcccaggctggtcttgaactcctgggctcaagcgatcctcccactttggcctcccagtgctgagattacaggtgtgagccagtgcacctggcccaatctggtatttatttgtcccaacaatattcactgactcatgattccctaccttgttatattatttatgcttttgtatagtaagcccttatagcttgaatatattaagtcttttctcttggttcattgccatttttaatccattcaaccttagaatgttgataactcactttatggaatgttaactgtggtagaaaatatttatttttaccttcaaatagacatacttttttttttttcctggcatgcttggccatgtgagcttttttaggaagcctagagaggaagagaagttagacatccaagcatatagttagtttcaagtgggagacatctgtgcagttactggcaggttagtataaagatgctgttattttatgtttctttttttttttcttttttttttttgagacagagtctccctctgtcacacaggctgcggttcagtggcgcgatctcagctcactgcaacctgcacctcccaggttcaagcaattcttctgcctcaccctcccgagtagctgggactataggcatgtgccaccatgcccgcctaatttttgtatttttagtagagatgaggttgcaccatattggccaggctggtctcgaactcttgacctcaggtgatccacccgcctcagccttctaaaatgctgggattacaggcgtgagccactacgcctggccctgagtcattgtttatcttaatctggtattcaccctggggaagagagaagagccatttatgaggtacacctgggatcattttgtacagttatggtttatttgcttggttttgttttttgtttttttgttttttttgacaggcccatagcatagtgatcaagacccttagctcaaggctggattgaaatccctgctgtgacctaacatcggtgtgcctcagtttccttagctgtaaaacagggatactagtacctacctcaaagggttgttatgaggattaaattagttagtatctgtaaaccatttaaaacagtgtctggcacatagtacatgctatgttggtttgttataaatttgtataaattttcttaattacctttaagtgaaaagcttgcctttataaatgcatactagtcgtgagatttggctgtacacaaggaagattgctatagcttcctttatttcttgctaatgtcaagacaacctgaggtccacaaaatagaagtgaaagtactaaagttaatagcaattctcttttgcaataatactggagcacatatcctgtaataaagttaattggggcaaactgggtagaagtctaattgctaggagctacatttttttaatcctgtaaccccagggatagaatttatcctaaataatctagaaggagaaaaataaaactataattgtatattatactattaataataagcaaaagctgggtgtggagactcatacctgtaatcccagcactttccgaagccaagaatggaggattgattgcttgagcccaggagctcaagaccagccttggcaacatagtaagaacccgtctctacaaaaaataaaaaaattagccagacatggtggtagtgcatgcctgtagtcccagctactctggaggctgaggtgggagattgcttgagccagggaggtcaaagctgcagtgagctatgattgtgccactgcattccagcctgggtgacagagcaaaatcctgtctcagacaaaaataataataagcaaaacagctagagaatctaaacagaagtggaatgggtaagatcgcctcagtggtatatcatgtagcattaattgatgatatgtagaatgtaagggaaagaaggtattttgaaggtgttttcattgacgtttgaatactgggtgccaaactctctactatgccagaggccagggatataaacaagaggaagacagcttgccctctaggagctcttaccagaagcattgggctgtggtggtataggtacagggaagacataggaggaaggaagtaagttccccgaccttgaaagagtcagggaaaactaaaggaaagaagaaatcgttgagacagaccctaagatttattggctaagtaaattgggataatatagctaacatgtattgaatgtttattatatacccaatattttgctaagcacttttaattatcccattaattcctctcatccctatgtggtagatgcatgtatcattgtaaaaatgagtaaactgaaacttaaatctgtatctatcttctaaaattcatgtttgaaatcactgtatttactatggcttccagctgtgggaaaattctgcctgtggagatcttcatactttaaggccataagaaaaaatagttttgttggagtaagagaattattttctcttgtttttattttttatttatttatttttcatgttaacatttgaaagttcttgccaacagctgaatatctgttgcttattgttttgagagacctgtctctgaaggaggtaggtgcaaatatggagtaggacagtggttccttcaaaggagaagatcctgtatcatatcctgtatttccatcagatatttcattttcctgacttgggcaatgtgtaaagatatgacaacaagattgacaatttgggaaaacgtttaggaaagaataacagggacaggatgtgacttggaaagttcgttgcttagagtagcaaggtttgattctttttgatcaacaatatagacttttccatcctcttactgtgagaatttctactccatgctttgttacatgagaattctgagattagtgctatttcaaccacttttatgggggtttgttaggataaaattgcactgagtgcctgttctaaaaccaaaggcagcaggagagccctgagtctctgccatcagtagtgccactgcagtactcacgagaaacctggggaatgaagacttgcctggcagctttcatttgaatctttttaaaaagagcctttgattttgatgttttccaatataggaagtaacttactacctaggaggtggtgaaacatgacatagttatatatagtaaaaagaacaaaaaccatgcaatcagaggattttaaaaatattaagtccatttagttttctatgaataggttttagtgaaaactgtcactaggcattttagaaatgaagaaaatgaaatcagtgtgttatacacataggaactggcatttttttggttcccaccatctggaatagtcttacagatcggaggcactcggtaagttatttgtggaaagaatggatgaaagctgtgaagattctggtttcctattaatgctaatatgccatgctcatgtaaacatactgatggattgcttgccaagttttcctcttctgatgcttctcaaacatcaaagatgtttatagaacccttctggccggacacggtggcttacacctgtaatcccaacactttgggaggccgaggcaggcggatcatgaggtcaggagatcgagaccagcctggccaacacggtgaaaccccatctctactaaaaatacaaaaaattagccgggcgtggtggcgggtgcctgtaatcccagctactcgggaggctgaggcaggagaatggagtgaacccgggaggcggagcttgcagtgagcttaggtcgcaccactgcactccagcctgggcgacagagtgagactctgtcttaaaaaaaaacaacaacaagaaaaccccttctaactcttgaacttggttcacctggaaaagcaaaagaactagaatagctaaaacaattttgaaaaggaaggataaagttgaaggcatcacactatccaattttaagacttagtttgtagctacagtaatcaagtcagtagtatcaatgtaggggtagacaaatagatcaatgaaatagagtctagaaatagactcacacaggcatggccaacttttcgacataagtgcagcacacctcactggagaaatggtaatcttttcaacacatggtactggaacaaccggacatctgtaggcaaaaaagtgaacctttgccgaaaccttacactttatacaaaaattaactcaaaatgaaccatagatttaaatataaaatgtaaaactataaagcttttaagagagcacataggagaaaatcttcatgacctgggggttggaagaagagttcttaggcatgacactaaaagcacaattgtaaaagaaaaaaattggtaaattagacttcaaaattacaaacttttgctgcatgaatggccctaattaggaggatgaaacatggccataaaatgggagaaaatatttgcaaatcatatgacaaagaactttaatccagaatatataaggaacttgctaaactcaataataaaaaaaaaaattcacttagaaaataagctgtaatttcagcactttgggaggtcaaggtgggaggatcgcttgagcccaggagttcaagaccggcctgggcaacatagtgctgtctccacaaaataaaaataattagctgggtgtggtagcacgtgcccgtagtcccagctacttgggaggtgggaggatcacttgagcctgggagttcaaggctgcaatgagccgtgatcatgccattgcactcccagcctgggcaacagagcaagaccttgtcttaaaaaaaaaaaaaaaaaaacatagaaaatgggcaaaagacttgaacagatacttcagcaaaaagaatgtaggggtgacatataagtacacatagatgttaaacattattcgttcaccattagggtagtgcaaattaaaaccacaataagataccataccacacctattagaatggctaaaataaaatataatgccaatactggccaggtgcggtggctcacgcctgtaatcccagcactttgggagcccaaggcaggcggatcactaggttaggagttcgagaccagcctgaccaacatggtgaaaccccgtctctactaaaaatagaaaaattagccaggcgtggtggtgggcatctgtaatcccagcaactcaggaggctgaggcaggagaattgcttgaaccctggaggcggaggttgcagtgacccgagattgcaccactgcacaccagtctgggcgacagatcaagactccgtcttgggggtaaaaaaaaaaatgccaataccaagcactggtgaggatgtggggaaactagatttctcatccattgctagtgggaatgtaaaatggtactgtggtcaagtaatttcaatgacaactaatatttgaatcataaataatgtcaagctgctttatatacttcttgtgctatcaaaagttaaacaagaagtgagatctccacttgaagtcaggagtttgagactagcctgggcaaaatggcatctctactaaaaatacaaaaattagacgggttggtggtgggcatttgtaatcccagctacttgggaggctgaggcaagtgaattgctggaacccgggaagcggagattgcagtgagccaagattgcgccactgcactccatcctgggtgacagagcgagatgctgtctcaaaaaaaaaaaaaaaaaaaagtgagatctccattccagtacaaatttgtagtggatatatttttcaaactgaaattacagttctagtagtgatttttagacctcgatgatgtatgaggcaaatttccatatttcaagatccgtgtattttggaaatagtggcaatggttgtatagtattgtgaatataattaatgcctctgaattctatacacttaaaatggctaaaatggcaaattttatgttatatatattttgccacatagaaataatccatttaactgtggcatttagttgcttccacataactttccattgaaagtgattaatctgcagtggggtgcatgcatgtaatgatatgataaaggtaaatgtcaagagaggaatctaatagaattctataatgtcttccatgagataaaaggctcaattaaaaatgtgtattcctggatttagctcagtatttggaagttcctgtctttttttttttttttttttttgagacagggtcttgctctgtcacccaggctggagtgcagtggcacaatcttaactcattgcaatctctgcctccctggttcaagagatcctcctacctcagcctcctgagtatctgggactataggtgtgtgccaccacgccctgctaatttttgtatttttggtagagatggggattcaccatgttgaccaggctggtttcagactcctgacctaaggagtctgcctgcctttgcctcccaaagtgctgggcttacaggtgtgagccactgcgcccagcccggcagtaccttcacgaagacatttgcaaaagtggaattgtagactctcattgcaaatcagcattcatagatgaagatttgcaatcaattttgatgaaagggaaaactattttaaaccccagttaagtgaaatgttattcccccataaaagaatttcattcttctcatcagtagacctgcattacaaaaaattgtactcaattattataatctgaattgtgtcaacattttgtggagatttgttttctcttgtaataggagtacctacttaatatctttgattttgcctcttagcccacaaaactgaaaatatttacctctggccttttacagaaaatgtttgtcaacccctagcttaaagcattgatttttctctttttcttcttttatttttttattttttattttttttttgagacggagtctcgctctttcgctcaggccggagtgcagtggcgctatcttggctcactgcaagctccgcctcccaggttcacaccgttctcctgcttcagcctcccgagtagctgggactataggtgcctgccatggcgcccagctaattttttgtatttttttttagtagagacggggtttcaccgtgttagccaggatggtctcgatctcctgacctcgtgatccgcccaccttggcctcccaaagtgctaggattacaggcgtatatgctttgaaagcgatgaaaatctcaccttattctctgttttagctgcatcccagagatgttgatgtattgcagtttcatactgtttagcacagaatatgttctggtttccatttaatgccttctttttatttattaatttaaagagatagagtcttgttctgttgcccagtctggagtgtagtggtgagatcaaagttcactgcagcctcaaactcctgagctcaagcaatcctcccacctcagcctcctgagtagttgagattatataggtacaaattgtcatgcccgtttgatgttttctttcacttacattacttagaagtatattgcataatttctgaacattcagatattttaaaaatctttgttactgaactctaattaaatcctaaagtggtcagagtgcatgtatacatgatgtcagtcttgagatttgttgaggtttgctttatagcccaatgtatagtccattttggcaatgtatttgaagtgacatttttcagatcttttgtcatcttctgaagctttggatatccaaataaggctggtccctgtaacattctgtacctactctgtacagattcccagtttctactcacttaaagtaggtgtgcttgtatttttagtgtatctttctctctcaatccaggaggttttttccttccccttgtgattatatgcagctcataggtaagaaaaacctttgtaatgtacttaaatctcagcagtcctcagctcattatcaagtgccgtagtccctaaccactaaattaagtgttgaccttatacataaggacttcatttaagagcgagttcgttcttgttgttgactcctgtcatgttgtaccattattctcttgaaactggtctgacttgcctttgacaaaaggaaaggagtgtgctttgcagggctatgtgctttcctaataccagaagttatctaaagatacttaactgtgctgtgaactaaagctattgtgtttgatctgcccaggcatccagctgactcctgtatacaaaattctacccgttcagttctgttaatgtttaagttcccgctgttctttggtgggaaaggaggtgatgtataaaaatcaactgctttgtataaggcttggtgtgttaggtgctaaaccacttaactttttcttgatttggggatctattctccttgtttttttgtttgtttgtttgttttttgttttttttttccttcttttagagacagagtcttgctctgtcacccaggctggagtgcagtggtacgatcatagctcattgcagcctccaactcctgggctgaagtcatcctcctgcctccatctcccaagtagctggtactgcaggcacgcatcaccatgcctggctgattttttttttttactttttgtagagatggtgtgttgctgtgttgcccagggtggtcttgaactcctgagctcaaccgatccttccaaagtgtcaggattacaggcgcgagccaccatgcccagctgagatctgttttttactgtttcacaataattgctggaaatatttgtaataatgtgactttcactgctaagacagaaaaggaagataaggaaattgaggaaaatgaagcttctgcttctacaacaggaaagcataaacgtttgagttacttttagagtaaacgggggataagtgtgtctagattcttgacccaccctcttctgccacagtcagacttagaatgcacttttgcatgcacttttgttaatctaatgaacgaacatttatacactttctagttagtaaatacgtgtaactttatatttcagctcatgagatcctttgctgcgtgctgcagggaagtgtagagctcttcagctgtgcagccaggataagaactcacgttctgttctccctgctgctgctgtgacaggggaggcacgtgtacatccaggctctttctgtgtggcagggctgtttaattggggctgatggaaatttttgtcataggaaatgggcaatcagattttcagttagtagtgaaataattgactctcaatccatattgggaaacagaagataaaacatttggtaataaaaatgtaaattttagaacatagaacacaaagagtggtccataagctgggcgcggcagctcacacctataatcccaacactttgggaggctgaggtgggcggatcacgaggtcaagagatcaagaccatcctggccaacatggtgaaaccccgtgtctactaaaaatacaaaaattagctgggcatggtggtgcacgcctgtaacccccctactcggaggctgagacatgagaattgcttgaaccggggaggctgagattgcagtgatccaagatcatgccactgcactccggcctgggcaacagagcgagactccatctcaaaaataaaataaaataaaaacagggccgggcgcggtggctcatgcctgtaatcccagcactttgggaggccaaggcaggtggatcatgaggtcaggagttcgaaaccagcctgaccaacatggtgaaaccccacctctactaaaaatacaaaaattagccaggcatggtggcacatccctgtaatcccagctactcaggaggctgaggcaggagaattgcttgaacccgggaggtggaggttgcaatgagccgagattgcgccactgcactccagcctgggtgacagagggagactctatctcaaaaaaacccaaaaaaacaaagagcggaccctaatgtaacctatggacttcagttaataatgaatctgtattggctcatcaattgtaacaaaggtaccacactaatggaagatgttaataataggaaaaacagatgaggaggacgggagaggtacagaggtatatgggagcattctgtactatctgattagtttttctgtaaaacctaaagatgctaaaaaaaaaaaaaagaaaactgtttaaaatttttaaatatctagcttaatgttccccaatgggttcaaatcatacaaagttagtgtttaacctcctgacccttgcttggaatttctcagttaagatgagtccagtttgcagtttgagctgtttcatcagttccgtttgcctctcgcctgtgtattaactgtgctcttgcctttctccctatctgctggaacagttggaatgccaagatgccttggaaacagcagcccgagccgagggcctctctcttgatgcctccatgcattctcagctcagaatcctggatgaggagcatcccaagggaaagtaccatcatggcttgagtgctctgaagcccatccggactacttccaagtaagatgccgtgctgagtgatgacagtgaagcatcaaaggcctttttttttttttttttttttttttgagatggagtcttgctctgtcgccagtggcatgatctcggctcactgcaacctccgcctcctgggttcaagtgattctcctgcctctcagcctcctgagtagctgggactacaggcgtgcaccaccaccaagcccagctaatttttttgtatttttagtagagacggggttacaccatattggccaggatagtctcaatctcctgacctcatgatctgcccgcctcggcctcccaaagtgctgggattacaggtgtgagccaccgcgcccggcccatcaaagccgttttagaacattcaggctaagattagatcatctggggagactggtctttagctaagagctgtgttcactaaacagtgtccattaaacacgggctgccctctccgtgcgtgttgatagctttgtgatttcggttttctctccttagacaccagcacccagtggacaatgctgggcttttttcctgtatgactttttcgtggctttcttctctggcccgtgtggcccacaagaagggggagctctcaatggaagacgtgtggtctctgtccaagcacgagtcttctgacgtgaactgcagaa

SEQ ID NO: 10327 - DNA, 591 bp, Homo sapiens
cgggtctgagagaaacgcccacctgggaggctgtgcagcgggtggctcggggcaccctgctcaacccgcagcggagccgccagcgaccttcgaagaattctgatgtgaaactaacagtctgtgagccctggaacctccactcagagaagatgaaggatatcgacataggaaaagagtatatcatccccagtcctgggtatagaagtgtgagggagagaaccagcacttctgggacgcacagagaccgtgaagattccaagttcaggagaactcgaccgttggaatgccaagatgccttggaaacagcagcccgagccgagggcctctctcttgatgcctccatgcattctcagctcagaatcctggatgaggagcatcccaagggaaagtaccatcatggcttgagtgctctgaagcccatccggactacttccaaacaccagcacccagtggacaatgctgggcttttttcctgtatgactttttcgtggctttcttctctggcccgtgtggcccacaagaagggggagctctcaatggaagacgtgtggtctctgtccaagcacgagtcttctgacgtgaactgcagaa

SEQ ID NO: 10328 - DNA, 821 bp, Homo sapiens
ccgctataaaggcttgttttgctgcagggctcatgctcgggagcgtggttgagcggctggcgcggttgtcctggagcaggggcgcaggaattctgatgtgaaactaacagtctgtgagccctggaacctccactcagagaagatgaaggatatcgacataggaaaagagtatatcatccccagtcctgggtatagaagtgtgagggagagaaccagcacttctgggacgcacagagaccgtgaagattccaagttcaggagaactcgaccgaggcactctcactgttggccaggctgttgttgaactcccagcttcaagcaagcctcccgcctcagcctcccaaagtgctgggattacagttggaatgccaagatgccttggaaacagcagcccgagccgagggcctctctcttgatgcctccatgcattctcagctcagaatcctggatgaggagcatcccaagggaaagtaccatcatggcttgagtgctctgaagcccatccggactacttccaaacaccagcacccagtggacaatgctgggcttttttcctgtatgactttttcgtggctttcttctctggcccgtgtggcccacaagaagggggagctctcaatggaagacgtgtggtctctgtccaagcacgagtcttctgacgtgaactgcagaagactagagagactgtggcaagaagagctgaatgaagttgggccagacgctgcttccctgcgaagggttgtgtggatcttctgccgcaccaggctcatcctgtccatcgtgtgcctgatgatcacgcagctggctggcttcagtggacc

SEQ ID NO: 10329 - DNA, 2000 bp, Homo sapiens
ggctcatgctcgggagcgtggttgagcggctggcgcggttgtcctggagcaggggcgcaggaattctgatgtgaaactaacagtctgtgagccctggaacctccactcagagaagatgaaggatatcgacataggaaaagagtatatcatccccagtcctgggtatagaagtgtgagggagagaaccagcacttctgggacgcacagagaccgtgaagattccaagttcaggagaactcgaccgttggaatgccaagatgccttggaaacagcagcccgagccgagggcctctctcttgatgcctccatgcattctcagctcagaatcctggatgaggagcatcccaagggaaagtaccatcatggcttgagtgctctgaagcccatccggactacttccaaacaccagcacccagtggacaatgctgggcttttttcctgtatgactttttcgtggctttcttctctggcccgtgtggcccacaagaagggggagctctcaatggaagacgtgtggtctctgtccaagcacgagtcttctgacgtgaactgcagaagactagagagactgtggcaagaagagctgaatgaagttgggccagacgctgcttccctgcgaagggttgtgtggatcttctgccgcaccaggctcatcctgtccatcgtgtgcctgatgatcacgcagctggctggcttcagtggaccacttgcttggtgctgtcaggatctggatttggggggagtctctctgtagtggaaccagtgacagaagctgttctttagaattttcaggatggctgtattctgcggtcagaatgagagagtcaagctgggcagaatctctcgccaagagttcagccttcctttggagactgctccatcagtgccgaggtgtgtgggaacaggcttcactgcaccgccatcttactgagttgcttcacgtgaggaaaagggggctttggccctgtgactcagttccacattttggattgcatactggaaaagaagccaatcttcttgctagtaaaccagcaacccggctgtatacagtggtgacccaagcaatggatataaacctaaaaatctgagggaggggagaggtggaatacagtagttcttggaatctgaagtctcctatttgatcaggttatttcctgggacttggcaaaaatctgattggtggggatctcctaggacctagtggacatctggtattaatttaatctcaggaaaaacaagaaattaacccagagagagtctgggttttggaattcagcgtagctacctccagaccgtggtgtctggcctccatttttgtctgtcattcagctctgacttacagctgcagtcacctttgctataaggcacctgggtagaagggtggatgggcttcacatcaatttttttcttcctttagggtgggggattggtttggctttcttttgttgtggttttttgttttatttttgtcaagattgatttttagatgcaaggacttgaaaagacccagaaggatgccaccagtttttccttgaggcctaggattttttattctgtcccgagcagaggtaattcctcacaacttagtgcaccagtagcaccagccattttgagcagagtacctctttggggagcttttcgttttgttttgtttttaattctctttccttagcagcaaggtcttttttcctagagaatctactccgttgcagaatcattgcaacctcaggagccctcactgattgagtgctgtcagcctgatatactactttggactctggaaacagatatgggttctattctctatttctactgtgtgtcgttaaacaaccgtcggagaccagatgacctgttagatggctagtcctgtataactcgactctgtatgtttcaatgtatgttactgcaatgcttcacctgctgtacagtgtttgtgagatgctctttgaagatggtacttttatattttttcattttcaataaaagtacattccttccca

SEQ ID NO: 10330 - DNA, 17121 bp, Homo sapiens
ccttcacgatcaaacctaaagagaagattggcattgtggggcggacaggatcaggtaaggatgtgcaaagccttctttgaatccattggaacgtagcagtttatgaaatatcactttcacccctttaaaccggatccttgtttgtttgatgagcaattagtgtctcagccccctactgaaaccaattttctaggtttattgttgaccccactttgatgacattgagtgcttttcacagtcataaatgtgcacattctcaatgcagaacactggggcacacagccaagtacgaaagaggagcagcacccacaactctgctacccagagagaagcactggtaacattttggtagctatcttgttaggcttcctctagtaatatgtaggtttacaaaaatgaggtcattgacacatgctgtttcatggccttcttttaaaactatcagtaggctgggcgcagtggctcatgcctgtaatcccagcactttgggagggcgaggcgggtggatcacctgaggagttcaacaccagccagaacaacatggtgaaaccccgtctctactaaaagtccaaaattagccaggtgtggtggcacatgcttgtaatcccagctacttgggaggctgaggcaggagaatggcgtgaacctgggaggcggaggttgcagtgagccaagatcacgccactacactccaacctgggtgacagagcgagactccgtctcaaaaaaaaaagaaaagaaatgcgtaactgtagatcctttagatttctagggtcaggacttgagtaatttacttctttttttttttgagacaaagtctcactctgttgccaggctggagtgcagtagcacgatctcagctcactgtaacctccacctcccaggttcaagcgattctcctgcctcagcctctcacgtagctgggactacaggggcgccagctaatttttttgtatttttagtagagacagggtttcaccatgttggccaggacggtctcgatttcctgacctcatgatccacccgcctcagcctctgaaagtgctgggattacaggtgtgagccatcgcacccggccccttttttctcactttcgttcctgaattgcattccaaagactgaacttgtcttcttttactgtcctttttatccttgtataagaggtatctttgattcagttttcattagttttctaggctccatgcttctttggcatcaaaactcttctagcttttttccttgccattaaaaaaaaaaaaaccttttgtcttttctggccaattgattttaaagaactttctaaggaagaaaaggaaaaagccatttcctgctttctgtttgagggaattacttcacgtcaaaacaagacattgctccaggtctttcatgctggaagggaatctttagccaagcagggtgactctccccaagcctttttactgttctctcccttgagcccatctgctgcattcgtccccaggggtacactgctcccctgaaagctgactgatgtcctttgttatgatttccctttaacacaggtgagataggccaaaacaagcaccacaacttcattaaacagtagttagtgacagaagagaaacaagaaaaagaacatagtggccaggtgcagtggctcacgcctgtaatcccagcactctgggaggcccaggctggtggatcacctgacgtcaggagttcaagaccagcctggccaacatggtgaaacctcatctctactaaaaatacagaaagttagctgggcgtggtggtggatgcctgtaattccagctactcgggaggctgaagcaggagaatctcttgaacccaggaggcggaggttgcagtgagctgagattgcgctattgccctccagcctgagcaacaagagcgaaactccatctcaaataataataataataataataataacctgatttacactccggttctaatagggcttcttccaagtttcacgggtaacttggaaactctcctgtggtcatgtcagtcaaggacaccatcttgaggacttcactgcctttcttaccagcacattccatcagtgcaaaggtagtcagattcagaggactctaaagtcttccagtccaggtggtccaaacctaggcaccttttgttaaactggaacaacttgacccattgtttcgggcaccattccttccttagcttagatcttaaagccctgcctcggcccagagggaatgtctcctcccctcctatctgggaaaggggccagtaactgagtcccccaaccctgaacagagtcattcattttttttttttttttttttttttttcctgagacagagtctcagtctgttgcccaggctagagtgcagtggtgcaatctcggctctggagtagctgggattacaggcacatgccaccatgcccagctaatttttttttttttttgtattttttagtagagacagggttttgccatgtttgccaggctggtctcaaactcctggcctcaagtaatccacccaccttggcctcccaaagtgctgggattacaggtgtgaaccgctgcgcccaccggcctggagtcactcatttctaggaggagaactatcctgctagacggaccaggtttcctaactcgtttctggtagaaggatgtgaggattgttgcattaggaagatgggtcctaatacagctttttccaagtttcctgggcgttacttcttccaagtcttatgggtgtttttcaggttcccattaggctgttagacagaggtatgcccagggggtagatcccgacagtggggtcgtggctgtagacactggggcaaggcaggctgtttgcgccctccatgagtgctgaagagacagcatcgtggtgatctcgatgaggccctcacaagaggtctttcatgacatggtggcacgagaaaggtaggagggtcaagaaccaggcgtacagccaaggaaaagtgattcaacagctaaaaccctgtagttctaaatctaaaccatggaaccaagttgcagaaaggtagacaggactatggcaaacttcttttctttttggctctgtagagagagcaccttttaaatgtttatatcctttgacacagtaatttcagttctaagattctttcccaaggaaattgtctgaggtggcagtaaagtttcagcactaagataataggacataacattattataagttttacataaactaaatgttgacccttagagggctggctgaacaagaatacatgcacatgatggaatgcaaccactaaaattttatcttgaaaatttttttaaaagatggttgactgagtgttatacaatgcttttgttttgttttgtttgaaacagagtctcgttctgtcgcccaggctggagtgcaatgatacgatcttggctcactgcaacctccgcctcccaggttcaagtgattctcctgccttagcttcccaagtacctgggattacaggcactcgccatcttgcccagctaatttttgtatttatagtagagacagggtttcaccatgttggccaggttggtctcgaactcctgacctcaggtgatctgcccgcctcagcctcccaaagtgctgggattacaggcatgagccaccgtgcccggccaatgcagtgttaagtgaaaaaagcaattacaatattgcatttctgatatgatctcaactctgaggaaagaccgaaaggaagtgtgcctaaaatgatagaagtgagattatgggagattgatgatgtcatctcgtattacttatgtaaacttttcaaatgaagatttggttaacctgttctgctgattactgtaataacactgatcccccaaacctgcttctctgccatagtttcctatcacagtagggccattgacagctactcattgagtcgaggcaaaacctccttcccgtatgtgtttatttatccctggaacttcttcaattccccagctgctgctgtggcaacaggaggccttgtcttagtctctctctcagccctaataagggggtagggagaaaaaagacatcttgtcctctggtttgcccctcaactgcttgctgtaagatctctgttctcctaactttgcctaagaagcattcagctctgtgcacctgttcctaaggtgaccaggaggcatttttccattttactctcatgaaaatggaatggtcagccaggcgcggtggctcacgcctgtaatcccagcattttgggaggccaaggtgggcggatcacgagatcaggagtttgagaccaacctggccaatatggtgaaaccccatctctactaaaaatacaaaaattatctgggcatggtgacgcgtgcctgtagttccagctacttgagaggctgaggcagaagaatcacttgaacccaggaggcagaggttgcagtgagccgagatcgcaccaccgcactccagcctgggcagcagagtgagactccgtctcaaaaaaaaaaatgaaaatggaatggtcccttcccttccttctcaggctgaagctgtgtaatttgaaggtgtctgcctggtatctcaggaaagttaattgcatttttctatcattttatacattatctcagttaatcagttgaaataacaactgaatagaaatggaaaaatagttggcattgccctgaggctaaaccagcattgtcctcacagactttgctaacagctcctctcttgcatgtcttctgactcatcagggaagtcctcgctggggatggccctcttccgtctggtggagttatctggaggctgcatcaagattgatggagtgagaatcagtgatattggccttgccgacctccgaagcaaactctctatcattcctcaagagccggtgctgttcagtggcactgtcaggtgaggacctgagcacctgcatgtctcgtgcgtcacttagaggccagatgagcatgtgggaccacatgatgctagcaccgccccctgggaccatgagctcaccatctctagtctggtgcttttcccactgcaccatgtgcttgctggtgcagaagggagaggcagcaccactcacaatgccacttggttgactgaagggtgcagggaggcctgcaacacagtgctgaagaggccagagaggtctgggcccagggctctgctccgtgacttcggacaagttatttaaccactcctgtgcctgtttcctcaaccataagatggggatgctttaaagacctgttgctgtgaaggttgaataagttcatgtaaattatataagcacagggcctggcaaatggtaagcattcagcaaatggtggctgctgtcatcagcctcattgacatcatcctcatctgccccccactccattctgtcatctctcctaggtgcgctgaaagttgcagtttttttgttctgtttgtttgagatggagtctcactctgtcacccaggctgaagtgcagtggcacgatcttgactcacggcaacctccgcctcctgggttcaagtgattctcctgccacagcctcccgaatagctgggattacaggcgccctcccccaggcccagctaatttttgtatttttagtagagatgaggtttcaccatgttggccaggctggccttgaacgcctgacctcaagtgatccacccgcctcggcctcccaaagtgctgggattacaggcgcgagccactgcacctggccaaaagttccagttccaatggtggctttcaggcattattactactcatgttatttcattttctactatcttcccctacctttgatactctggaattatgtcactttttgaaatctgccaggttgccagagataaaatccttcttcttggcctattaaaacagtccaaggagaaagcatcacattatctttcctaagcttacctgatcctacccttagccttaagcttcagcctcctgaaaacagtggatttccatcatttgtgtccctgtctattaaaaaatcattctggcctggcacggtggctcacgcctgtaatcccaacactttgggaggccaatgcgggcggatcacgaggtcaggagattgagatcatcctggctaacacggtgaaaccccgtctctactaaaaaatacaaaaaattagccgggcgtggtggtgggcgcctgtagtcccagctacttgggaggctgaggcaggagaatggtgtgaacccgggaggcagagcttgcagtgagctgagatcatgccactgcactgtagccagggtgacagagtgagactccatctcaaaaaaaaaaaaatcattctaaaagtaatttttagcagttttcagaaaaattggtaccaacctaatttcaaataatcataggcagtgttcagacttgttttaaaactatcccctccacctttggaaatggcattttgaactcaaggaactttggtagatatcttagtctgctcaggctgctgtatataccaacataccatagactgggtggcttaaacaacagaaatttatttctctcagttctggaggctgggaaggccggggatgggtgtctgctgagggccgtcttcctggtttgcagatggttgtcttgttctgtcctcatgtggcctttcctcggtgtgtgcctgtggtgcatgcctgtggtgtgtgcccgcggaaaggagagctcttgtgtctcctcttcttgaggccccaccctcatgatctcatctaaacctaatctcctccttacagccccacctccaaacaccatcacattggggtcagtgtttcaacagtttaattctaggggcacacaaacctgtagtccatagcagtaaatcagcagaattctcacctgtgtttgtgtagtgtcaacaccctagagtatgtttattttggtgtttctgtaattgaatctggacagcatgcactgtatctgtggttgataataaaccattctctttgggtattgaggtaataaggtcagacaagcaatatcagaagaaaattagaatttattggtcaggcgtggtggctcacgcctgtaatgccagcactttgggagggctaggtgggcggatcacctgaggtcaggagttcgagaccagcctggccaacatggcgaaaccctgtctctactaaattagccaggtgtggtggcccatgcttgtggtcccagctactccagagctccagaggctgaggcaagagaatcacttgaacctgggaggcggaggtggcagtgagctgagatcgtcccactgcactccagcctaggtgacagagcgagactctgtctcaaaagaaaattagaatttattgaagatgaaagcctaaaaataggccgagtgcggtggctcacacctgtaatcccagcactttgggaggctgaggcgggcggatcacgaggtcaggagtaccagaccagcctggccaatatgctgaaaccccgtctctactaaaaaatacaaaaattagccagtcttggtggcacacacctgtagtcccagctacacgggaggctgaggcaggagaattgctggaacctgggaggtggaggttacagtgtgccgagatcatgccactgcactccagcctggacgacagagcgagactccatctcaaaaaaagaagccattgcttggccaggcgtggtggctcatgcctgtaatcccagcactttgggaggccgaggagggcggatcacctgaggtcaggagtttgagaccagcctggctcttcccataaatctccctatttttagatgccacaggaacaccttgaaaaaaaaaattggccttacaatatttggctttggccataagaactagttttttaaatcatcatttggaagagaattaagaaataaagcacgttaaacttgagatttcttttgaaactgctgccaccaagaagcctcagttttaatttaacaattttatagcatttcatttgggtttgtgaaatgggggcttctagagttagtggttaacaactgaccatgaggccaggtgcggtggcttatgcctataatcccagcactttgggaggccgagacggaaggatcacttgagctcaggagttcgagaccaccctgggcaacatcgtgagacgtcgtctctgcttttttaaattatataaaatgttaaaagaaaaagaattgaccatgggcgcgtgcagctggtgtgggtagaacatcgtgcgcctgtagctttagtagaattggaaccatttgtctccagagaaagaaatgttgactgctttgtggctagctcagtagttggtacactgctgtcctgggtttgtagctactgagcttaggtgcagcttaggaagtcagctgtgcaaagtgagaaaatcatttcagttaaatttttgccagctctaattttggctttttagtctgtagtagacactgaggaagaattaaatgctggacttgtcttttatcccctaaggtttccttttatcctctcaggtttgttacggatcccagagaatgttcagctcttggtattcttttgtttttgagacagagtctcgctctgttgcccaggctggagtttcagctcactgcaacctctgcctcctgggttcaagtgatttgcgtgcctcagcctcctgagtcgctgggaccacaggcatgggccaccatgcccagctaatttttgtatttttagtagagacggggtttcaccatgttggccaggctggtctcgaactcctgacctcaggtgatctgcccacctcagcctcccaaagtgctgggattacaggtgtgagccaccgcgcccagccagtattcttttgctttagttagaagatagaaagcctatgatgagtttcccaaggcacaggcaggataaataagctgtttcctcagctgcctcctagagactctgaatctggaaaccgcgcctccaccaccattagccagtattgagggtgggtacctcttcttgagatacctgtaaacaattaaaacttgaaaggaattcttagaggaaaagcaaggtaaaaccaaaatcaaaccaacaaaactcagaaagtcacaagataaaaattgttgagttgttctgtgtacaaatataatctaatctaaatcataggccagataatttgggaccacaccccttccttagattagccagaatgtcattctagtacctgcatcctggccctcctttatctgcctgtgtgggcttgagctctccagcctgtgtttctgcagctccctattgttttgccctcatgattgcctccaagaagagaggccccttttcatccaggccttaaaacacttttgctggcctctgtctcatggccctagctttccccaccttctcccagagctccctgtgcttcctggacccaggaaacccagccctggcctctgtcctatcccccgcagctggagtgtttttcatcctgaggactgtctggagcctggctaggctgacagtgagctgtccccagctgtcactctggtatgtctcttgagtcttcgtcccctgtgagtgatgggtaccttgtctacccggagcacttctgcctggtgcccattcattagcaagaaacagtgttctcatttcttcttcttcaggtgccttctccttttgatctgctcattaaatttttttttttttttttttttttgagacagtctcgctttgtcacctgggttggagtgcagtgacatgatctctgctcactgcagcctccacctcccaggttcaagcagttctcctgcctcagcttccccagtagctgggattacaggcacctactaccacacctggctaatttctgtatttttagtagagatggggtttcacatagttggccaggctggtggtcttgaactcctgacctcaggtgatctgcccacctcggccttccaaagtgctgggattacagccatgagccaccattccccacctgtcataaccatcttaattgtatttaacaaatgctcaaaacttcataagacagacaccattgttatgcatattttattttaccaaatagtgaggtttcactatattgcccaggctagtcttaaactcctgagctcaagagattctcccacctctgcctcccaaagtgctgggattataggcatgagatgccgcccttggccattattcctgttttatatagatgatgaaactgaaatccagagagtgagagtaatttgcccaaagacacacagctaaaagtggcagagctaggatttgaacccaggctggccggctggctctactcattacactcactgcattgcctcctgaagcgtgtgtcacgaccccactgttaaccacgaccttgatattccatctctccaaaaaacagttagacgtgcctctttgtggatcttgacctttagttacatttcttttcccagcatcttcaaagtctcatctgccttcctcatctcaaaaacgaaaaaagaaagtcacacaatctatgccgttctctctagtatttttcatttgctctactttttcctcttaacttttttcacctaatctgactcttaacaactaaaagccaaaatcagtccgtatttctgcatacctcagaataagatttccttttgcttcctgatagaagaaggtatgtgagtcccaaaatctcctgctctgaaaaccaaggctactatgaagcacccagcacagatgacagggcagcatggtttactgcagtgttttctactataccgagggtgaattgctgtgttgtctcacactttgggagatattcttggcttcatttagcagtggtcaatgttgactattgctaaaaataaaatatgaagaaccaaagatgaaaatgtacctttggcaagatcaggactccaggggttctgattgttaaaaataattgccctcatgttcagacacttttctatccaatcacttaactgaatccttttgattaagtggatgcataactttgctttcatttctgtctgtgggtcagacccaggaccatctggcttctctaatgaggggagatatttttccattcctgattgagctccctgttgaggttggtctggtctgccttactgtgtaccacctacgagtgtatgcaaatattcattttctatctggaacccattgtttagtggtctgaggctccttcagctggtgtgatggacctgggtgaattgaatgttaagcctgggctgggcacagtggctcacgcctgtaatcccaacactttgggaagccaaggcggatggatcacctgagacctggagttcaagaccagcctggccaacatggcaaaaccctatctctaccaaaaaatacaaaagttagccaggtgtggtggcgcacacctgtagtcccagctacttgggaggctgaggcatgagaattgcttgaacctggcggggcagggcaggggttgcagtgagctgagatcatgccactgcactccagcctgggtgacagagcaagattctgtctcaaaaaaaaaaaaaaaaaaaagttaagcctgttgtcgtatttgcccatagaaaatctgatagggccggctactcagtgggcaggagaccgcgcttttgtgtacagcagttctcgcttctccatggtttcactttctgcagtttcagttacccatgatcaaccagggtccaaaaatattacatactatattttgcaagagacagaccacagtcaaataatgttcattacagcatattgttataattgcttgatttcattattgttaatctcttactgtgcctaatttataaattaaactttatcataggtatgtatatataggggaaaaaaacatagcatttatacggttcagtactatttgtggtttgaggcatccaccggggctccctggagcatatccttgtggatgaaagggggctccatgcctgctctttgatccagaggcatctgatggacttacttgctgtatgtgtttcctggggctgtcataaacagtttaagccacaaactggatggcttcaaacaacagaaatgtactatctcacagttccgggggctggaagtctaaaatcaaagtgtcatttgggccatgctgccactgaaccctatagggaaggacgcttccttgcctcttccagcttctggtagttgtggccatctttggcattccttggctttggatgcatccctctggcctctgcctccattgtcacatgatgccctcccagtgtttctctgccttcacgtggccatctctcataaggaccagtcatatgggattaagggcccacccttctctattactctggtatgacctcatcttaactaattacatctgcaaattaccctatttccaaataaggtcacattcttaggtacttaggtgtcttttggggagacacaggtcaacccattaaactgtaccatattaaacaacacttcctgggccaagggtagtgagaagcgagcatgttccaagcgggaaaaacgccgtgcaaagggcaagaggcgctggagagcaaggcgggtcagaatctcccaggagatcgagagatgcccagatagcaggaatgaggcggtgccggcctgctgtcctctcactagagttctgtgataatgacgtgattgtatttgcatgcctgtaattagtaaccccagatatggagacaggtgtgtggcatagagtaaaagtccatgtttctcccagagagtttcctgtttcccacatgccaggcataattttatgagcaaagcaaatatacttttcagattactagacctccaaatgttatgtgtagatcaagacaagccgtccaaaattactgtaacatcccagttttccaccaaatacctgttccaccaccaattctccaccctcatcctcagtggcaaagataattttctcctgtcctaaacatttctagtcctggccgggcacagtggctcatgcctgtaatcccagcattttgggaggcccaggtaggctcatcacttgagcttgagcactggaatttgagaccagcctgggcaacatggcaaaaccccatctctacaaaaaacacaaaaattacgtggcatgcgcctgtaaaaaaaaaaatttctagtctcgttcttttggtatcaactctgatttccttgaggtagatactgttggcacagtaagcaaaaatggtccccaaactggtcttctgtgccaggaaaattcctttttcttgacttgtcctttattctttctctccttcttcctcttcccttctactggatcagtttctttccctggtcaggccagctgtcctggagccccatactcaattacagggttgtgaaccaggtaaaccaagagaaagagggtgcatttctaagtttgtacgtatggagagatttattttttattttattttattttatttattgagatggagtctcactctgtcgcccaggctagagtgcagtggtgtgatctcagctcactgcaaccactgcctcctgggttcaagcaattctcctgcctcagctttctgagtagctgggattacaggtgcccaccaccacacctggctaatttttgtatttttagtagagacagggattcaccatgttggccaggctggtcctgaactcctgacctcaagtaatccacccgcctcggcctcccaaagtgctgggattacaaacatgagccattgcacccagccgaaagatgtattttaacaaatacacgcacaggaaaaaatctagaaggatatttgccgatatttgcatttataaattgttctataactagtattatttacatagtaaaaatagtaaaagaataaatcaagttttatggagctgaggaggtggcccagtgtgctgtcagagctcccatctgtctggttgtggaatgagccgtctgtgaccatcagggtttggagtcttctctccctatgcatgtgtgttaaacatcttccacagacagcctttgccaatgggtcgcttagggtgggaccactgagaaattcctgtgtttctccctagatcaaatttggaccccttcaaccagtacactgaagaccagatttgggatgccctggagaggacacacatgaaagaatgtgtaagtgaagagcttaggggaagccgtgctgagatggtgagggtggaagcacagcagtgcccttgccacaccccgtctgctctggccgtgcctccaggatgcctgtggacaaaggcttcgtggcagggctctccaagtctttcagatacctgggaaaagctgatccctctcaaccccaccgcccacactgcctacggtcatattggccttgcactatccattgattgaagatagtaatgacaactacttagaattaagtgatgcttttaatttattagtcataacagtgtaacatactttgaagcgtccacatatacgcaaaagatatataacgtggccgggcgcagtggctctcgcctgtaatcccagcactttgggaggccgaggcaggtggatcacctgaggtcaggagttcgagaccagcctgaccaatatgatgaaaccctgtccctactaaaaatacaaaaattagccgggtgtggtggcatgcacctgtaatcccagctactcaggaggctgagacaggagaatcgcttgagcccaggagacagaggttgcagtgagcgagagcgcaccactgcactccagcctgggcaacaagagcaaaactctgtctcaaaaaaaaaaaaaaaaagatacataacatattgagtctgcagaaagcacacagtgtgcatatggaccatggaccacagacattttgggacaactcagtaggccctcacaggccctcacgagcagctgcagtctacaggttgataccactggcctagggtgaggcttctgttatgcctgggttgagtcaggatccaggatcccctgccctaattcaactattagtagatgagttctgttttttcctctgctctatcgggattcttctcatttgaagaataagttctgcagcttacaaaaaatgtttcacaggcacgggcctacggctttggacttcagaaggagagtacttttccttactatactatttcctattgcaagaccatattttcagaaccaaaacttaaggcccactatgtgactggattttggggacatgaaagcgttgggatttctgggatgttttaatggtataaagctaacagaatagtctattggaatcagggactgccttggaagtgggtcctagcacgcatgatcagtacacctgcaccttcattccagatgagacaggttcttggctaatagttctttcatcgctttcagaatcatttctttctgtccttggattttcaggaaattcagcttagtttcttacccctctgatctctagtttctttctccctagattgctcagctacctctgaaacttgaatctgaagtgatggagaatggggataacttctcagtgggggaacggcagctcttgtgcatagctagagccctgctccgccactgtaaggtaaggcagtttggggttggcagcagcagagaatgggaatgttttagtgcagccttgccctgacacactggggtccaaaggtattcctggctctgatccctgttggcactttctaagagcatgaccagagataactctaaccctgacacaatttgggtatattggttctggggagggagaacagggttgctttgtttttaccttcatccaagaccaacttttgtttctggccattgagtagttgtacgactgcaaaccatagacatagaagattttttttttttttgagacggagtcttgctctgtctccaggctggagtgtagtggccaaatctcggctcactgcaacctccacctcccaggttcaagtgattctcctgcctcagcctcccgagtagctgggattacaggcgtgcgccaccatgcccagctaatttttgcatttttagtagagatggggtttcaccatgttggccaggatagtctcgatctcttgacctcgtgatctgcccgctttggcctcccaaagtgctgggattacaggcgtgagccaccgtgtctggccgacatagattttaaaattgcaagagactttaaggtcatccaatccagccccttcattttataaacaggaaaagaatgtccttttgtccagtatgttaccagccatattggattcaagggaaaaaaagaattaattgtacatgctcactgtcacagagcatgtaggggcaagtatttgattaaatccgtggttttgttttgttttgttttgtttttgagacagagtctcactctgccacccaggctggagtgcagtggtgtgatctcggctcactgcaacctccacctcctggattcgcgcgattctcttgcctccgcctcccgagtagctgggactacaggtgcgcgtcaccacgcccggctaatttttgtatttttagtagagacaggttttcaccatattggccaggatggtctcgatctcttgacctcgtgatccgcctgcctcggcctctcaaagtgctgggattacaggcatgagccactgcgctcagcctagatcagtattttacaaatatgctgttttggaaatcaaggcaaacatggttttgaaattgtatcacttctaagcaaaaggatgtttttacatatatgcgtgctttcttagaaaaaaaaaaaaaaaacaataggctgggcacggtggctcaagcctgtaatcccagcactttgggaggccgaggcaggtggatcgcaaggtcaggaggtcgagaccatcctggctaacatggtgaaaccccgtctctactaaaaatacaaaaaattagctgggcgtggtggcgggcgcctgtagtcccagctactcaggcggctgaggcaggagaatggcgtgaacccgggaggcggagcttgcagtgagccgagattgcgccactgcactccagcctgggcgacagagcaagactccgtctcaaaaaaaaaaaaaaaagaaagaaaagaaaacaatagatagtgtaaaacttaaatgaaatacattttagtaaaatctagattaaccagaatgctaaaggaatttaatcgagtttctttctcctctgcttctctggcagattctgattttagatgaagccacagctgccatggacacagagacagacttattgattcaa

SEQ ID NO: 10331 - DNA, 550 bp, Homo sapiens
ccttcacgatcaaacctaaagagaagattggcattgtggggcggacaggatcagaacactggggcacacagccaagtacgaaagaggagcagcacccacaactctgctacccagagagaagcactggtaacattttgggaagtcctcgctggggatggccctcttccgtctggtggagttatctggaggctgcatcaagattgatggagtgagaatcagtgatattggccttgccgacctccgaagcaaactctctatcattcctcaagagccggtgctgttcagtggcactgtcagatcaaatttggaccccttcaaccagtacactgaagaccagatttgggatgccctggagaggacacacatgaaagaatgtattgctcagctacctctgaaacttgaatctgaagtgatggagaatggggataacttctcagtgggggaacggcagctcttgtgcatagctagagccctgctccgccactgtaagattctgattttagatgaagccacagctgccatggacacagagacagacttattgattcaa

SEQ ID NO: 10332 - DNA, 17277 bp, Homo sapiens
cttgcgcggtgtggcggccgatgccgctataaaggcttgttttgctgcagggctcatgctcgggagcgtggttgagcggctggcgcggttgtcctggagcaggggcgcaggtaggtgatggctgctgccgcacccctgccctccagctcggttgtcacggggatcacccctttgcatttcctcggggcgtggcgggatgtggccagggctgcgagcagttcgggggacactggagacttggggaacggcgtatggcctccccctggtctcctgccgccgcctcctaggcctgtgagcccggggtctggtgacggggtcgtgtgctggaagacaggcaggtaggatcgggatgagcgggcagggacgcgggctacgtccctggccgcggccgccagggggcgctgcgcccgcgggccgtgggtgtgggtcgcgctcgcctgggcaggccggagcgggctgtgggaacgccctagggcccgggcatcccaggcgaagcgggtctgagagaaacgcccacctgggaggctgtgcagcgggtggctcggggcaccctgctcaacccgcagcggagccgccagcgaccttcgaagtaagtcatccccttcgtttttgcaagcgggtaaatggaggtacgtgacataagcacgcgcagcaaagccgtggctgtgccgggaacgcagcccagatctctccacggtcatccagtgctcttttcgcttctgccacacagagccgcgggtggctttgtgtttatcacacaggggccatttggtttctgcacagacggagaggctggaggcaggtgggcacaggaacgacggggaaagtttcaggaggtcttggaggaggagatggctaggttttactgtggtccgcagcgtgtatgaaaggtgaggctgcttggagacgcaacaagtggattacagtgggtgtggtaaatacgtatccctttagcgtggtgtcttcctcgtgcagcttgagggcctggaggtgatggaaacctactcatgagtgttgggatgactgcagcttgcacacaccagtctggtaatcccgtgcaactctcctcctgccatgcagttgaatcagtatcattgtgcagggagagtgtctacacttttatcagtggaaagagaatcttggtaaaaaagggcagctgactaagtggcctcaaccctattgggcacttctttggggttctcccacgttgattattctgcttctacccttgtacatgtctggacaacaggtttgttttttacaaacaaaaatcccttctctttcttcctctcttgatagctgaggcaagtgagcatttaaaaaagatattccaacaactttaaaggaggacacgagaagatagggaaatataaatagtatcagtaaaatggctggcctggggatccatccttgcttgcttgcttgcttcagactggggctttgtttctttccaaacctgtcaggattcccagctcttcgccggcctccacgtggggtgccctcttttatgttccagatacacagacgatggtgtccttatgttcaaggccacagacagtaactttgtgcctactttgggcctgcctgctctcctgattgtgcctctttttccaggaaagtagagatgagtgtgttagagataatggaacactgttccccacacccttcatacatagaataacttagtcccttaggatagtttagcagtgtctaccacagcagtcactgtaggcacaaaacagtcattatttgtgtcataacagggaagtcgttttgtccctgcctctctctgctcctgtgctccactgattctacttcatcctttgaaataaaagtggttgaaagaatctttggttatcatgggtgcttagataattaagattatgttcgtgttcttcttgatgtggcatttcatattgtggatgagttccagtgacctcctctgtttcaaactgctcaccgccccaacccccaccttttaaaaaggtagtactaatcttttcctcttccagataatcagctaagctagggaacccttgaaggggaaggttagaatttcgtgattcccgtaagaaggttactctgatctacagctacagctcaacactggggacactggcagatgccaggtctgtttatagtttagccttaatgaggtctcaatgacgtgattgctgcactctggcttggtgagccgctgttctttatggtgtagtttgtcattggacaaggtgactttttttttttttttaaagataagtaacagctatatcaacttagggtacttgaaccagaattctgaaaggcaagaaatcaagctttctttggactggaaacctgtctttgcataggagatttagtcctttttattcagaggattagtaagtgttctctttttatctgacactttaaaaattgcattataatggttagaattttgtgctgcagaagtagtagttttaagtcacagcgatagccagggatttatggaatccagaaggcgacacggctacacgtctttaatttccgttggaggctagtatgaaaggtgttttctcagcttgtctctgggaggctgtgacccttcttagaggggggaaacattttggagaagtatgtatgtgttttttgtttttaagtgacctgagttgatacagcatattgattagacttagccaggcaagcagtggtttagaatagagtttcaggtaaaaactaggtaagacttagtaatacagggtggagaatttgtttttgttattgttttttactaacagctttgttgccataggatttatatgacatgaaattcactcttttaaagtataaattcagtgtgttttttttcaatgtattcactgcattgtgcaaccattaccactatctagttttagaacattttcagtacccagggaatttgtgtttgaagttaagttataacattgttttaactggataacttcatggagctttaaaataacaccagctaacccattagttaattataaaaaggcagagatggaatatatcattggtagaataagtgtttggtaagtttttatttagtaaaatttagtagaagaaatgatgtccactttaaaattgtggagtttttaatacttgggacaaactgaaattgtttctagaaagtctttaaaaaaaaaaccaacctttctattgtatacactggatttgagcttagttgaagagaatgggtgtctctttactagtgtgtttactgtttctaattttttttcccttagagttgggagaaggtaatttttcttgattctcttatactgaatctttttctttaaaaaaatgaaatcaaaatctttgaactttttttgaaaattaatttttgtagctataacagtagaaagctttagtacttttgccttttttttttttttcctatttttaaggcacttgagcttatggttaagtactgtttaggaaataatctatttcttgatgaatttttaatttcaggaattctgatgtgaaactaacagtctgtgagccctggaacctccactcagagaagatgaaggatatcgacataggaaaagagtatatcatccccagtcctgggtatagaagtgtgagggagagaaccagcacttctgggacgcacagagaccgtgaagattccaagttcaggagaactcgaccggtcagtttcctttcctaagagtctcttacctgcttgttgtactaaaacacatcttttttcgtataatgggtaatttagaaacttattttttggccgggcgcggtggctcacgcctataaacccagcactttgggaggctgaggcgggtggatcatctgaggtcaggagttcgagaccagcctgaccaacatggtgaaaacctgtctctactaaaagtacaaaaattagccaggcgtggtggcgggcgcctataatcccagatacttgcgaggctgaggcacgagaatcgcttgaacccaagaggcggaggttgcagtgagctgggatcatgccactgcactccagcctgggcgatagagcgagactcagtctcaaaaaaaaatgtgtttttctttattggctttaggttactgttaagaatttatggttattgataagtctctggtccatagtaagcactcaataagtggaagagaggctggctgtcaccctctcacccggtctgttctgagcattctcctctttttcacttttattctatgttggtgccttctgaaaaggctatacttaacagaagacaacttattgagggggagggggtcatggggtcaatgacagggaatataaagccaattaagcttcattcatgtacctaaacaaaattggtgttttcttctactttctgtcatgtgtgtttaaaatgtgaacctggccaggcacagtggctcatgcttgtaatcccagcactttgggaggttgaggtgggtgggtcacttgaggtcaggagtttgagaccagcctggccaacacggtgaaaccctgtctctgctaaaaatacaaaaattagtgaggtgtggtggtgggcacctgtactcccagctactcaggagggaggcaggagaattgcttgaatccaggaggcagaggttgcagtgagccaagatcacgccactgcactccagcctgggcaacagagtgagactccgtctccaaaaaaataaaaaataaaataaaatgtgaatcctttggagagactcagatttcagaacaattctagatagttgtgggattatcagtatgtttttcaagcgaattcataagttaagcagtctttagataataatctaatttcctccaagggaaataatgaagatgcgtttttacctcgagaaaatattctttttcctgaggaaaaaaagcattataccttttcttacaaaagtacctaataaggcagaatggactaggtttaggaagttgaggtttttgttggtgtatttgttatgtgaaaatttgagaaagataatggactttgcagctgacactggcctttccttagcctgatactacctttccctctttggttgtgttaaagccattgctttattaatgaacattttcttgctaatgagtcttttctgtaccctactgtgtattatagaatgcttttccattcaggtttaacttcagagaaacaggcttaatgtaatcagtgtcaaatgcttctcgtggtgccagttttataacttcctcatgtccttttgtctagaccttatgttgattaaacatctatccattacatctgagtgctagacacatttagtgtaacagttaagtctggaaaaagtcagaaggtaacattggggcagggccttaaagggtgattaggtggggaggctttttaggcggtacaagtacagacccaaaggtatggaaagagcgtgtgacatattgggactttggataagctacttacgtcatttgtatataaaatggggttgacagtagtacctgactcatgggatcactgaggagtaaatgagataatacatataaaatatttaaaatggtacctggcacatggccagtgctcaataaatgttagctcttagaactagttgttcagggcataggatgtgtaaagagattataggtcgggtgaaattctgcatgccatgctaagaaatatttcactgtgggcattagggaactattggaagttaatgagattaaaaaaaaaaacctttttattttgagctaactgtagatttacatgcaattataaaaaataatatagagatcctatatattcttcatccagtttcccccagtggtaacatcttgcataactatagtccagtatcacaacaggataatgattgacattgatacaatccattgactttaggatttcaccagttttatatgcactcatttgtgtgtgtgtgtgtgtgtgtgtgtgtgtgtgttgtgttctatgcattttttaaaggtgtaaatttgtgtgaccgcttccacagtcaggatgcaaaggttccatcacaaggatctctcgttacccttttatagccacagtcatgtcccctcaaccccagtctctggcaactgctaatcttttctccatttctgtaattttgtcattttaagaatgctatatacattgaatcatatagtatataacctttcgagattgcttttttcactcagctgaactcccttgatagccatctaattttgttgtgtgcatcaatagttctttcctttgtattgctgagtagcattccgtgttatagatgtaccatagcttctttaaccattcatttgttaaaggacatatgggtcatttccagttaatggcaattatacataaaggtgctctgaaccttcagttacaggattttgtgtgaacataagcttttatttctctggattaatgcccaggactgcgcttgctgggtcatatggtaagtgcatatttagtttgtaagaaactgcagtactctttcccagagtgtctgtgccattttacattcccaccagcaatgatccagtttttccacattgttgccagtactcaatgttataatgtttattttagccattcctatagatgtgcctggtatctgattgtggttttaatttgcagttccctaatggctacgatgtttgagagtagatttttatcttagattagtcttgaagcaatgcagaaaaaaacctgtacaggagaaagagaccaaatataaagagcattcaggaagcggctctgcctatccatgtcagagaggccagggttctgttgtaaagcacagaagtgaggatggaggaaaggcgtttctagaagatagggaggcattggggtgtctgggattgatggtaaggatttaaacctattcgtggacataagaaaaggagattggggagatattaagaatgagtttgggccgggcacggtggctcacgcccgtaatcctagcactttgggaggccgaggctggtggattgcctgagctcaggagtttgagaccagcctgggcaacacagtgaaaccccatctacttgggaggttgaggcaggagaatcgcttgaacctgagaggcggaagttgcagtgaaccaagatcgcgccattgcactccagcctgggcaacagagtgagactccatctccaaaaaaaaaaaaaaaagaagaagaatgattttgattttgaagatgttgaatttgaagtgcatatgggtaaaattatcagtaggtagagcatagacaagaagtagtgtaggaaaaaacatttagagcctttagtgtgtccacataggtgaagctgtgagagtgagcaggcttacccaaggatggcttgcagagcaggagaaggtggaggctgtggagctggtgtgtggtcctgtgaaatttctggggatagggtccccagcttgtgagagtagagttgacatcagggtttgcagtggcagcagcgagcttttcctctacgaagtggagaagaacagcaggtaggcaccgctgggctttgagtaccctaaaggatatggagtcagccaccactgtagcaggttttcaacatgccactgaagccttatctcagagaaatatgaaggctaataccacttttataaaatttcaggaatccacatgaattttatgaattttatttttattattctttcatgtttcctaaactttttttttttttttttttttttgagacgaagtctccttctgtcacccaggctggagtgcagtggtgcaatctcagctcactgcaacctccacctcccgggctcaagcaattctcctgcctcagcctcctaaacagcaggtgcctacctgctgttctctgttaccacattggccaggctggtcttgaactcctgagctcaagtgatccgcctgccttggcctcccaaagtactgggattacaggcgtcagccaccacatctggccatgaacttttattttttattaaattttttttgtttgtttttttgtagaggcactctcactgttggccaggctgttgttgaactcccagcttcaagcaagcctcccgcctcagcctcccaaagtgctgggattacaggcatgtggcaccacaccctgcccctaaactttgaaatttgagtactgttttcctgatttttactgtatccttgtaatctctgaacttttttaaaagatttcttttattctactctctttctgttacttagtctagacctagcaaaacaacaacaataagcccataggtttattcaagctatttttgtatatacattaaaatgaatgcatcgctactaagtatttttgtaagttcagacaccatctagaatctgcttgaccgttacctgtcaaaaaacaaaatttctcagatgtatttatctttaacttgtcttcatgttacaagtttgctgacagaagcaaccagcaagatgacaagaaattttgtggtctgagaaaattgtataaatggtataaaatggataatgtaagtagttgggaagcagaattcctgtataagcatatagtttttctttttttaaagtaagcagttaattgggcagagattgcaatttcatgtcacatcatcattaccatcatttttatatttgttagagaggaaatctgggacaggatctcccaggatgccaggtatgcctactatctgtcaaaaatttaaaacaaacaacaaaaaagcctctaagtaacaaaagataaggatacatctatggctcttatgtggaaagcaaggtttcattcagcactattagcctttaacacgtggaattaaccgagaagcaggagacctgtgctgctggtgcctcacgcctgtagtcccagcactgtgggaggccgagggaggaggctcgcttgagcctgggagtgcaagaccaacctgggcatcatggtgagacctgtctctacaaaaaaataaaaataaaaataaattagctgggcacaggggtttgtgcctgtagtcccagctacttgggaggctgaggtgggaggatcacttgagcccaggaggtccaggctacagtaagctgtgattgtgccactgcactccaccctgcgtgacagagcgagaccctgtctcaccaaaaaaaaataaagaaagaaagaaaagaaatggtgtcaaacagaagtcagaagcaaagcaccaaagaataagttctgactttgagcaggccagtgcttttcttcttcaaggtgtaagtgaagatgcagattacatggtttgcccatttctcagtattgtgaccaaatcattcttttggaatatgacttggaaaaattgctctattagtcacatcttcaaatatttataatttctcacgtatgcttagaaataattagggttgaaataaagcattcgcacatctacccactttcttcgggactgtaatgttaatgcttgtggccacacacaatttgaggcttagcaggcatcctttaatcctgaagtgttaataaagtggtggtttctgttgctgttagttctttgagcctgagtactaactttggctggcattaggctggcgttacttcagctaacatgaagttttatacctaggctgctcctaaacactgttcctttgcctgaggcatgattattcaggcatggttcctttttttaatcctatttatatatgcacatgtagatcatatgactccacgagccctgatttttttttaagatgcagtcagtgtttattcatttttttaaatttagcaaatatttgaacactcttcaagatgcatgcacagcactgaaccgagtggtctggtgcagataaagataaattggtgctgggcctgcttgtccaccaatagaagcttaaactcacaacacgtactctacatagatgactgtaatttagatgctgtgggaattagtaaaaggagaaagtgcttctctctcagggaactctttaggaggaggtatcatttggctggaaacttgaggaatggatagaatttggagaaatgaagaacttgccaggcaaaagaaagagttgtgggatagggatacctagtccttgttggtattgagcatcaaatgtgtgaagtcttagctatagtgcaatacctcagtgaatttcacattatgtgtggggtttttttgttttttgttttttgtttttgaggtagagtctcactctgtagcccaggctagagggcagtggtgcgatcttggctcactgcaacctccgcctcccaagttcaagcgattctcctctctcagtctcccaagtagctgggattacaggcacatgcaaccacacccagctaattgtttgtatttttagtagagatggggtttcaccatgttagccaggctggtcttgaactcctgacctcaggtgatccctccgcctcagcctctcaaagtgctgggattacaggtgtgagccactgcgcctgggcatgtgtgttcttgaataataagccaaggagtttggattttaattgctttaaattaatatttaagcaaaagcaagacaaagcttgtcagatgcttttatgagctttattttattgtggtggtggtttgttttcttagtgctctcaggcaaaggtaagggtgccttgtttttcattagcatgtctaatctgggaaagaaggaagaatggaaaaataagcagaagtgggccgggcgtggtggctcacgcctgtaatctcagcactttgggaggccgaggcgggcagatcacaaggtcaggagattgagaccatcctggctaacatggtgaaaccctgcctctactaaaaatacaaaaaattagctgggcatggtggcatgcacctgtagtcccagctactcgggagactgaggcaggagaatcgcttgaacccgggagccagagtttgcagtgagccgagatcgcaccactgcactccagcctggggaacagcaagactctgtctcaaaaaaaaaaaaaaaaaaaaaaaagcagaagtaaactaaagttcatgtaccattattactggcacatgaactttagttattttttccccttctctcaaaagtgtgtcattggtgggattttcttcctaccaaattagaatatcctgtgtctaggaaaggtaacaaagcaagtattcataaaatccagggctcttacttagtatttccttagttctgtggtaggctgaccctttaatcttggttggagttttcataattaatgctttgaaatattttggtgagctcaagttgtatcttagggatcaaagatgtgggtctaatctcttaccagaaatgattcgaagatgtattgttaggaaagaaatatgggctcattatagaaaatgtacaaagtgtgtaaagttgtagaaaaaaagtaaccacccttaattcctctacccagagacagccattgttttcataaaatagttttgtctagtacattgtacttttagagtttgctcctgaaagcttttctttacagactaaggacgtgtgaatttgtctatgcccttgtgttttccaagtcaagagtattacctgtgagtcggcttgctgttaggaaggagagcaggaggaaggagattagcattttgcagctctgcattatttttctcttgattgatactcggtgactcagcagattttctggacagggttaagataagtaagaatacctgcctttttttttttttttttttcttctctccctgtaggcatccataaagctttatgaggcacagtagtctcttaggcgctgctgggtgtgacaccgtatctggtctggtgccaggtgttggtctccaatagcagcccagagatctccggctgaggtaacaacagtgtgcgattggtgtggagcccaggtggctctcatgcttggtaactgcattgacagctcgctggggctcttgaggttgggctgctgccgggatcatcagctctcttatgccgtttgctgcaagactgccgcggctttcctaggaagtgctgcttaagggaaataaatatagcctgttggcatgagttaaaggaactttctgtcaaaggggaagaaaagtgttggaattagcttcctgttttttttttttttaagtacctaaatctttatttggttaagataacttggaagttacaaatggttaatgaaaactttttcaatgaaatattgtttccacagttaggtgggtttccgttaatgctttcttttttttagttattattatactttaagttctagggtacatgtacacaacgtgcaggtttgttacatatgtatacgtgtgccatggtggtgggctgcacccattaactcgtcatttacattaggtatatctcctaatgctatccctcccccctccctgttcatgctttttttaatgtcttaccgtttttccctctcttttagtcaaaaataaaaaggtcaacgcaaagaaacagggactccagaaggctttgcaatggttaaacctgtcattattaaactcacagactaatgtgaagttaatttggtgcactgaagtccactaatgagcagaattaaatttatccttttcctccctgccccccttttaaggagttagcctatttagataattagatgttatatatgttttaactatttaagattattttatgaattagctgttcaaagaatcaattgttactagatatcagatgagaacttccacttaccaaagcctgctcatggaggtagaaagcaagactgacatgtgtactttaaaagatggatggaacctcaaaggccgtcttgcccagtccccatttagcctcacctctctgtaggtgaggcccaggagagacacttactaggcagactatgctggggctgggtgagcttcccaaggatgttctttctggaattcggtggctcagaatacagcacttggctcctctttgaagcatgatggctctgttgcctgtctctggcccagtgtgctgggctgctgaaaagagcatggaaccacccaggagacgccacgacactgacagctgtacctgacctgagggttcaggatatgttttcaaaagcaaatctcgctaaaaaggatttgtatgttattatgaaatctatatttatgtggtggaaatagacacactcaggcttttagagataaactacacagaatgggttacaataaatgcttataattgtttggcttttttaagaatcctgttaacttgacaaccttctgtttacttttctttggtattatgcaggtatgatattgagcagtcacttagttttcttaaatgttgtgtctcacagtagaaaaatagccaaaccactcagcccctgacctttgtgtttgcttctcacggtgatcagcagttctggtctgctctgcagtatggtggtcacatgatggaacccagaaagccttgtactaagcatttaacacacattgtgttaggcactggaggaagtttcatttacaaattatattttggcctttttttttttttttttttttgagacggagtctctgtcacccaggctggagtgcagtggcatggtcttggctcactgcaacctctgccttctaggttcaagcaattctcctgccctcagtctcccaagtacctgggattacaggtgtgcaccaccatgcctggctaatttttgcatttttagtagagacaggatttcaccatgttggccaggctggtctcgagtcctgacctcaagtgatccacctgcctgggcctcccaaagtgctgggattataggtgtgagccactgtacctggcctttttttttttttttagctaaagcctgaaaatcttgttgaagggattttgtcaaatgcaaaagaccaatattcacaactctctaaatcagtggttttcaggccaggctgaatgttaaaatcacttgaagaatgttcaacaaataccagtgttggggtcctattccagaccaattaaatcagtctctgggatagaacccagacattggtattgttttaaaactcctctggtgattctagtaggtaggcagtgctgggaatctctagatctcatggaataaagtctgttctctcccctcactcaatggctccaagtgtttcctgtaaatcccgttttacccctgtgattcattttcagtttaatcctttgaaaccttaccatgctattaacaaagttaatcttagacccaacataacaggaactttgaataagttccttggaatttagcttatgaaacaactgaaagccctcaaattcctggtgattatggagtaatgctagattatcaactgcagacaaatacctgttttactgtggtggtggagatatgtttgtgaattgtattgctagctgatcatcggcttgagagtaacatagcacagctacagataagtgagctgatgctcaagttaattcttttctcagtgtagtatagctgttgagtgataggactgagtttagcagcttccctgacttggaataatagctctttcttttgtattctgcttcttccccatataggttgggttctagaattttgctgatcctcttgactgaaatggctactatttggaagttcttaagggaagagcttaagatggtcagggttgtgataacaacccactggggagtaaggatgtggtgggaattgcagaggaaacgtgcttggtaggtttctttaacttgttggagattaggaagggcgggaaggcctgaagtcagccggtcttgggaggacatcagtttttgatctttttaaatttaaaagtgaattttaattcacttttaaatttaatttctaatattctgagtcccttaagaagtatatctagtggcacaacagttccccttaaaagtttgtctttctagatgtttgtcataaaggctgcgtgggcctgggacatctgtagaaatggttttcttggccagaaggatgtatttgaagaggcgcccattgtcttgtttgtcttaaggtcttgtgaatgaggagaggagaggaagacagtgttgtgagatctgaggcctgttgattccgattgtgccccagataccgctttatttgaggggtgtgccagacaggagcaggcagcctttaacccccttggaaaccgaggtacctctctgttgccagttgacacctgcagtctctgccttcaggaacaacttggttgaatcctcagcccgaggcttattaggcaggctaccctgctgttgtccggcctccaggaagggattggattgttcagacggggaacgatttctggcccctggtatctgtcccagaggcctccgtgcaggggaaaagcccttggttgccctgtcagcaggcatttgctctggcagcctgttaaaatgagatgggacagctggagaagtggtggccatggggtgtgataggtgcgctgattatctgaggcctgaggatggcgttagcgcccgcagaagcgtcttttgcaagagcagatctgtctgcttatgaatcgaatgttacctgtttttcataccagaggtgtctatgaatgtgtgtttccctgatctttgtttgaaccttgacagaatctgaattgctttttgttattgttgtttttgtttttctcttttttttttttttgagacggagtctggctctgttgcccaggctggcgtgcagtggtgcgatcttggctcactgcaccctctgcctccttggttcaagcaattctcctgcctcagcctcctgagtagctgggatgacaggcatgcatcaccatacccggcttatttttgtatttttagtagagaccgggatttcaccatgttggccaggctggtctcgaactcccaaccttaggtgatcctcccaccttggcctcccaaaatgctgggattacaagcataagccaccccacccggcagaatctgaacttcattgtccctctttagcttccctgtgaccttactcctgccccattgccattaccttggtaggaaaaatgctgagtatcctagtcacatagtcatggggaagatataaatggcagtcatacttcctcgtttgatatttttctcagctcctggatctgccagtatttttccctttaagacaaagcagctgctgtgggtgcctttctgtgtggctgggtcgtctggccactgacagcctttcagtgtgctgtgctccttaagagaaatgggtcccctcatcttgtttcaggggaaactttaaaaagttacttgtaaaagggattgaaagcatcataacaaaaaacaaatggcctcataaaatacattcctctaggtcagcctatatcagtactaactgtgttagctcttcagctatctagggttaccttagtacgattgacattttgggccacataattctttgttgtgggggctatcctgtgcattgtaggatgttcagcagcatccctggactttacctgctagagctagtagcacccctcaaacatttccagatattgccacatgtcctctgggcaagcaaaacaccctcacttgtgaactcctgggctgcaccgtgcgacacagtactattgtggctattaagcatttgacctgtggccagtctgaactgagatgtgctgtaagcataaaatacctgatttcagagacttagtacgaaaaaagaaatacctcgtttgtaaaatacctaataatttttcacattgattatatgttaaaaaagataatactttgcattgggttaaatgaaatatattatttaaattaatttaccttttactttttatttttagagtcagagtctcactctgtcacccagactgtagtgcggtggcatgaccatggctcactgcagcgtcaaacacctgggctcctgtgatcctcctgcctcagcctcctgagtagctaggactacaatctcgtgccaccatgcctggctaacttttaaattttttatagtgatggggttttggagggttacacagactagtctcaaactcctggcctgaggccatcctcccacctcagcctcccaaagtgttgtgatgacaggcataagccactgtacactgcctactttttactttttaaatgtggctactagaaaaatttaaattacattatgtggcttacatttgcagcttgcattatatttctattggacagtgctgaactagagtgttgatctactgtaggttagccattgattttgtattaggcatttagatccctgtaagctgttgggtttaatgattttttcctttggaagattttcctttatgcagtaaaattatggagacacagagtatgtagtattacatattaccagtttgctctcctgaatccctgctggtagcatattaaaaatcagtttaatgttca

SEQ ID NO: 10333 - DNA, 883 bp, Homo sapiens
cttgcgcggtgtggcggccgatgccgctataaaggcttgttttgctgcagggctcatgctcgggagcgtggttgagcggctggcgcggttgtcctggagcaggggcgcaggaattctgatgtgaaactaacagtctgtgagccctggaacctccactcagagaagatgaaggatatcgacataggaaaagagtatatcatccccagtcctgggtatagaagtgtgagggagagaaccagcacttctgggacgcacagagaccgtgaagattccaagttcaggagaactcgaccgagtcagagtctcactctgtcacccagactgtagtgcggtggcatgaccatggctcactgcagcgtcaaacacctgggctcctgtgatcctcctgcctcagcctcctgagtagctaggactacaatctcgtgccaccatgcctggctaacttttaaattttttatagtgatggggttttggagggttacacagactagtctcaaactcctggcctgaggccatcctcccacctcagcctcccaaagtgttgtgatgacaggcataagccactgtacactgcctactttttactttttaaatgtggctactagaaaaatttaaattacattatgtggcttacatttgcagcttgcattatatttctattggacagtgctgaactagagtgttgatctactgtaggttagccattgattttgtattaggcatttagatccctgtaagctgttgggtttaatgattttttcctttggaagattttcctttatgcagtaaaattatggagacacagagtatgtagtattacatattaccagtttgctctcctgaatccctgctggtagcatattaaaaatcagtttaatgttca

SEQ ID NO: 10334 - DNA, 4528 bp, Homo sapiens
catgggactcctcccactccagtatccagaactcgcccaagctgacccccaaaatgaaaaaagacaagagggcttccaggggcaagaaagagaaggtgaggcagctgcagcgcactgagcatcaggcggtgctggcagagcagaaaggccacctcctcctggacagtgacgagcggcccagtcccgaagaggaagaaggcaagcacatccacctgggccacctgcgcttacagaggacactgcacagcatcgatctggagatccaagaggtaagtggtccgccccctgcctccctgcccgcaccccaccaccccatgctgatctgccaccaataggcggctgctgttccttttcacaaagtgctttgtggctaggagtgattttgaactaaagagcaaattagaccagctctaactctaaaaaaaaaccaactaagcatttagcaacagaaatgaataacaactaatcttatgaggtgatcattttataagcaaggaaatgaaacattcaagaggattttccaggatttttccccaaagaggattctattttagttgtatgtgagctgtgacaattatttctgattgttacaagtctgtgagcgcccttgtgcactaggctgtgcatcatacctggcacatgataggtattctcagtgctactgtgacaacatttgtgttgtaatgatttattcttaatataagttaaggatcgttaacggtagatgatgtcacagcccaggtagcacaagattagtctcagagggcctcctatagggaatggtggaacagagatgccaggttcaaggcttttaaaatacagactatgtatttcggaaccagcaccatattcacaggtccgtgtcattagagggccccggatgtgtatatattcattcattcaacagccatttcatgagtatcaaactccatgccagatgctgtgatagggctgggcacagagccacaaaaacccaaacagacaaaaatcccgtccttcttggagtttacattctagcaggcacagacaggtcgtgagcaaatacaatatattgcatatcagatggtgataagggctatgacagaaggggacagaggctgggcatggtggctcatgcctgtaatcccagcactttgggaggccaaggtgggcagatcacttgagcccaggagttcaagaccagcctggccaatatgttgaacccctgtctctacaacaactaggaaaattagccagctgtacgcctatagttccagctacttgggaggctgaggcaggagaattgcttgagcccaggaggtgtaggttacagtgagctgagatcgcgctactgcactccagcctgggtggcacagtgtgagactcagagtgagtctcaaaaaaaaaaaaaaaggtgggtgaggagagagtgtgctggggcagggagcaggtgtggttacaacttgaataggctgcctgagggaatgccttatttaaaaagtagtatttgggcaaagatcaaaggagatgagggagagagctacctgggtatgggatgggtggggaagaacattccgggccaaaggaacagaaacacagaggccgcaagtggtgagtgtgtctgttattggagtggaatgagcatgggagagagtagtggatgccaagggcagaggtggtgcctgccagagcctctggtgagacttcagctttactccaagtgggaagaggagcctttggaggattcacagcagaatgacatgattggacttatgtatgaagaggatcattctggttgctgcaggggagacaaggaagcaaggagaacagtcaaggctctgttaccacagtaaccgggagaaagatgaggatgtcttagatcaaggttgctggtgggaggtagtaagaaatgtttgtccatgtaactggaagtagggaggaggtttgaatgcagtgtatatgaaaatcagcaactgaccagaggcatggtaagccaatccagaactagactgagaagaggacaaaaagcttccagcccttaaaagctatgagcaagaaggggacacagtctttagtgacaccacttgaaactatgagtgtcattgaagggcatgcaagtcaggtttttacttcagttaactttttttttttttttttttttgagacagagtctggctctgttgcccaggctagagtgcagtagcacgatctcggctcactgcaacctctgcctcccgggttcaagtgattctcctgcctcagcctcccgagtagctgggattataggcacgtgccactgtgcctggctaatttttgtatttttagtagagacggggtttcaccatgttggccaggctggtctcgaactcctcacctcaggtggtctgcctgcctggcctttcaaagtgtggggattataggcgtgagctgctgcatctggccttacttcagttaacgcctaacaggctttttatttagtaactattagcttgattattgaggcagctctaatacattgctatcagctctattagaaaatgattccacacgtgcagctaaaatgtattcttttgctttgtatgttgaccctcattttgcccttcagagcccacagacaatgggagacctttagccatttgaagagagatgccttaattctccctgggcctttgctttagggaagagaaggggaggtaatgtttgccaagtgtcttctgtgcaccaggcatttttctcatttttgatgtctcatttagtcatcatttaatcataagaatagcatttttctcatgtaaatctaactggcctgagcagaggttgaacctgtgacttgacctccttgttgccaccaggcagtaaaccattcagtactcgtggaccatgtcaaaaactatttgttcaactatcagacactgtacttagttttatgaggatactgcctttcctcaaggtgctcagagtccaaagaaggagacagacacagtattaggttaagtcacggggcctggatcacacagttagcaagtgctagtgaagttgggatttagataaagacccatctgcctccagaatccatgctccgtccacactaccactctcccttccttcctggggacacttgaactggcacggggttgtaaacaagtgacccttttgaagtcatctgtctgtcccttgaaaactttcaacaccactttgagaactctttatcttgcctaaggatactcagttaatcatagacttggtgttctacttttttgtgggattgatggtataaatattcctcagatttttggaaatgttttgcatgcaacagtgtccatggtttttattgaaaattaattatgtatacaccctggagaaaaatcataataaaatgatttttaagagtcctgccctctcttctggcaaacaacaaaaacaagtaaataaagaatatgggtggccaggcgtggtggctcatgcctgtaatcccagcactttgggaggccgaggtgggtggatcacttgaggccaggagtttgagacgagcgtgaccaacatggcgaaaccctgtctctactaaaaatataaaaattagctgggtgtagtggtgcatgcctgtaaccccaacaggagaattgcttgaacccggaagcggaagctgcagtgagccaagatcgcaccactgtactccagcctggttgacagagcaagactccatctcaaaataataataataataataaaatgatttttaaaagccctaccctgtcttctaaaaaatgacaaaaacaagtaaatgaagaacatgggttagcagcagaataggaaagaggctgggcctaagaatgacggtgggatactggaatgtgtgcggcatatttactttccccaaagggcttccattcctgttatctcaggtgtctccacagaaacccatgagataggcagctaatgagtgagaaaacaggtaagtggcctgctgagtcatcagggtgacagttctgtatgggtagactacagttaatgtgtttttcctcaagtccttagcgatgagtggttagtagtctctaaatgaccctcctctctgtgtgccttgtccagggtaaactggttggaatctgtggcagtgtgggaagtggaaaaacctctctcatttcagccattttaggccaggtaagatttttgttattgtccttttctgctgctttctctggtttgcaagagtctcaggaaaaacgaacaaatttcctggagagtcaggaaaggtggaaacaaatgaaccctcagcctgcattgtatgcccccaatcccccgcagttccccccagttctcccccttcacagccttctgcctggaaggaggcctggtgggcgcctgatggatgactgactgttgtcccagctggaaccatttggtctcatgccttctttcattcagcatgtatctattgagtgccacaggtatgcccgtgtattgaaaatgtcagagataagagatgagcagacaccctacactgcagcgctgccaacagagttaacctgtaaagaagcagggcggccagcac

SEQ ID NO: 10335 - DNA, 732 bp, Homo sapiens
catgggactcctcccactccagtatccagaactcgcccaagctgacccccaaaatgaaaaaagacaagagggcttccaggggcaagaaagagaaggtgaggcagctgcagcgcactgagcatcaggcggtgctggcagagcagaaaggccacctcctcctggacagtgacgagcggcccagtcccgaagaggaagaaggcaagcacatccacctgggccacctgcgcttacagaggacactgcacagcatcgatctggagatccaagagggtaaactggttggaatctgtggcagtgtgggaagtggaaaaacctctctcatttcagccattttaggccaggtaagatttttgttattgtccttttctgctgctttctctggtttgcaagagtctcaggaaaaacgaacaaatttcctggagagtcaggaaaggtggaaacaaatgaaccctcagcctgcattgtatgcccccaatcccccgcagttccccccagttctcccccttcacagccttctgcctggaaggaggcctggtgggcgcctgatggatgactgactgttgtcccagctggaaccatttggtctcatgccttctttcattcagcatgtatctattgagtgccacaggtatgcccgtgtattgaaaatgtcagagataagagatgagcagacaccctacactgcagcgctgccaacagagttaacctgtaaagaagcagggcggccagcac

SEQ ID NO: 10336 - DNA, 6059 bp, Homo sapiens
tcgggagtggggcgggcccatgggagggtctctggatttttgatagcctgctttgtttgctctcttctgtactattaaactgctgatgtttattttcaggaatgttttgcaaatgcacttctcactcttccccagtacaactgtaggtacactgttcctttttatcaaataagcacgtttgaaacgatccaaaaaaaaggtcttaatttcatgtaaacaaatgtatccatgtgtggagatactggaataaggtcaaagctatacttttgaatgaccatgtgtttagagttaatttcagctcattgataggtttatgttacattagaaagagtaatggttttgatgatgtcctgtaaggaagaaagtttgcaattagacctagctcctgcagaatgccctgagtaagttactgcaggcagcttgtaataattgggtcttccaaagttttgctttgcttgcgcactggtccctgagtggagctgcctactctttctaacttaacataaaactatggcattgtgtgtgagtgccgtggagatgttgacagtggtgtgtgtctctccctgtaggccttcatggtgaaacacctcttggagtatacccaggcaacagagtctaacctgcagtacagcttgttgttagtgctgggcctcctcctgacggaaatcgtgcggtcttggtcgcttgcactgacttgggcattgaattaccgaaccggtgtccgcttgcggggggccatcctaaccatggcatttaagaagatccttaagttaaagaacattaaagagaaatccctgggtgaggtgagtgaggggtgtttgcttcacagcagagagcaacttcctagcttgaggttcattcctctagggccctgccttatcctttatcttcctcctgagacaaatgaaccgtgtccttgcagggtcccctcactactctttgtatcttatagctcatcaacatttgctccaacgatgggcagagaatgtttgaggcagcagccgttggcagcctgctggctggaggacccgttgttgccatcttaggcatgatttataatgtaattattctgggaccaacaggcttcctgggatcagctgtttttatcctcttttacccagcaatggtgagtaagcctcccagctgaatcctggcagcttctccttaggagatgagttacttccattgggttatagtaggcattgctgaggtctcacagctctgattggaaatttcctcaaagcaggttcaatctagagctcgatagtgcttgctctatagggacagaattttgacttgagaggaggtaaggtgtcacttgcatgaaagagagtctgaatgagaaggtcagctggtgaaccctgtcccacttgacataggagtgtttgagtcactgcgttggagttggtgctaagtgatagggccctcctgcctcccctttggaagcactcagtctctgtggtcactattgagaataaatactttcttgtcttcattgccttataaagagataagaattcagtaatgttttattacaattcaataggtcacttttattaaagacagtacgattacataacatttggcccatcctagcaagcaggattatatgctcattttattgagaatgaccttaagcagattaggtagttctcaagtttgaatgagctttaatttggcgtggcatcgcttttcctttcagatgtttgcatcacggctcacagcatatttcaggagaaaatgcgtggccgccacggatgaacgtgtccagaagatgaatgaagttcttacttacattaaatttatcaaaatgtatgcctgggtcaaagcattttctcagagtgttcaaagtgagtttaaagattttgtatgtgcatgtggtagaaggaccttggattctttgggtcttataattcacacactttgctttctgagcacattacgtactaggactagtgtctagtatcgtaggacataatatcatagaatctttgtgttcaaaagggatcttagaggtttgaacccataacctcatctcactgatgaggaaattgagacctgggaaaatgttgatttttcccagttaaaacacagctagttaggaataatccagtttcgaagccccctgtgtatattctcatcctgcccatgattttccagcctggtcatgaggctttcacagaagacaatatcaaattactactgagagcatcacctttgcccactctactctgtggtttcacgggaaatagtttgtggcccttgaggtaaactgggagtcaggatggctggatgctggtcctagctctgtcaaacgtgtaagtgcccacaaagctaggagaaatggcacagatggggcattcagaaagatctcaacacaaattgaaccagtgtgccttgaaacaggtgaaatttaagtagtagataattaaaaacaaacacatagatacttaatttaaataaaagagatgaggctgttggtggaccataacctcatcaggagctgagtccagtgctgtgaaacagtcaatgcattatagttggagtagaaatacagtgttcaggccaggcgccagtggctcacgcctgtaatcccagcagtttgggaggctgagttacgtggatcacctgagttcaggagttcaagaccagcctggccaatatagtgaaaccccgtctgtactaaaaatacaaaaataagctgggtgtggtggtgcatgcctgtaatcccagctattcgtgaggcagagacaggagaatcgcttgaacccaagaggcggaggttgcagtgagctgagatcacaccattacactccagcctgggtgtcgcagcgagactgtctcaaaaaaaaaaaaaaaaaacaaaacagtgttcagagcaaggcagctgttgttttcctttcattgagtaaccttcaggaacatgatgtccaattctggaatctacatttgatttatgagggctgttaagctaagaagcatccagaggagatgagcactcaagaggtgcccagcagtggacggggctgccttgttaagcagtgagtttgtttctactagagtggaacaaatggattctgaatggacatctgccagcaggttgatggcaggatggctgccactggtcccttctggctctctgattctgtagttttatgatcttttttctgaaatttccctcatccatcagcccctgactggttatctttacctgtatgtattaatttgaaaagagtgttcttactcattatagacatggccaaggtgtataatacatgttcaagtaaggagttcagtgtttttatgtgacttacaagctagctgtgaagatagttcccaatgccttaggcagtggtaatacctttaaggtcagtgtataccctcttagaagaattaagtatttgccaggtacagtggtacatgcctgtaatcccagcactttgggaggcctaggcgagtagatcacctaaggtcaggagttcaagagcagcctggccaaaatggcaaaaccccgtctctactaaaaatacaaaaattagctaggcgtggtggcacagcctgtaatcctagctactcaagaggccgaggcaggaggatcacttgaacccaggaggcagaggttgcagtgagctgagatcacaccactgcactccagcctcggcaacagagtgagactcccgtcttaaaaaaaaaaaaagtattggccgggcgaggtggctcatgcctttagtctccacgctttggaaggagagacaggatcactagagcccaggagttcaagaccagcctggacaacgtactgagacctcctctctacaaaaaataaaacataactgggcatggtagtgcacatctgtggtcccagctacttgggaggctaagatgggaggatcacttgagccatggaggttgaggctgcggtgagccgtgattgtgccactgcactccagcctgagcaacagagcgagacctcgtctgaaaaaaaagtatcttattgttctgcttcctgctccacggtcttcagtacactatggttgctttgctaatatgggggttgattttgcaaatatttaagaaaaatcattctgcctatagaaattgtatttcacctatcttcttccggttgtcattactgcatttttatatggaagcttctatcccactgccaacatacagcaggcactctgggaaatgttagttccctccccactgccccttttttttttttttttgagataaggcctggctttgtcacccagtctggaatacagcggtgcaatctcggtgcactgcaacttccacctcccaggttcaggcaattctccggcctcagcctcccaagtagctgggatcataggcgtgtactaccacacccggctaatttttgtatttttagcagggacggggttttgccgtgttggccaggctggtctcgaacacctgacctcaggtgattccccctgctttgggcctcccaaagtactgggattataggcatgagccaccgcacctggcctcttagtccctccctttttaattctccagtgccattgtgttgtctttcctattaattccttaggcaaaaagtcaacaacaaccaggtaagcaaacacaactgccaattatagatacaattaatgtgttcattccttctcaacctaagaaatttacaagaagaatcagaaaaaggtatcatagaagatgatgattgagttcatacatagtgactgctttctgttagattcattcctgtcacttgatccatttcaaacctcagccttttataccagctttagtggtagagttgatagtcataggtgttgaagggtggctggagacctacagagtcttgtttggaggtggaggaacaacatccctaggcttcttttaacttgctttgaaattggcttgctttttattcatagaaatccgcgaggaggagcgtcggatattggaaaaagctgggtacttccagagcatcactgtgggtgtggctcccattgtggtggtgattgccagcgtggtgaccttctctgttcatatgaccctgggcttcgatctgacagcagcacaggtcagggaaccctcagggatggggaacattttagaaataccacatttgctggaggctgaggcaggaaaatcacttgaacccaggtggtggaggttacagtgagccaagatcatgccattgcactccagcctgggggacagagcaagactccatctcaaaacaaaacaaacaaacaaacaaaaaaaaaataccacatatggagatgatgctgtggtcctctccttactggacctggaggttcccccaagaattagtaggtattttttcattcatgggattaagctgagaagcagaagagtggggagccagcccttatgcacaaatagtgtatgagttgtttttagtcaacataagtttgagtttaattctgaaattacagatcatcctgtggttcatatttactgacaattttaattgaaggtctcaaaaactctacttaaaaaaaaatgtggccaggcatggtggctcacgcctgtaatcccagcactttgggaggccgaggcgggcggatcacttgaggtcagaagtttgagaccagcctggccaacatggtgaaaccctgtctctactaaaaatacaaaaattagctgggcatagtggtgcatgcctgtaatcccagctactcgggaggctgaggcaggagaattgcttgaacctgggaggtggaagttgcagtgagccaagatcgtgtcactgcactccagcctgggcgacagagcgagactccgtctcaaaaaaaaaaaaatgtaattgacttgtaataacagctgaccgtgaagttgcagccttcctagcgcctgagaggaaattcatggtgtcaggttacttcagttgcatagcatcattaggcacagtttcttctcttctcctattttcaggctttcacagtggtgacagtcttcaattccatgacttttgctttgaaagtaacaccgttttcagtaaagtccctctcagaagcctcagtggctgttgacagatttaa

SEQ ID NO: 10337 - DNA, 954 bp, Homo sapiens
tcgggagtggggcgggcccatgggagggtctctggatttttgatagcctgctttgtttgctctcttctgtactattaaactgctgatgtttattttcaggaatgttttgcaaatgcacttctcactcttccccagtacaactgccttcatggtgaaacacctcttggagtatacccaggcaacagagtctaacctgcagtacagcttgttgttagtgctgggcctcctcctgacggaaatcgtgcggtcttggtcgcttgcactgacttgggcattgaattaccgaaccggtgtccgcttgcggggggccatcctaaccatggcatttaagaagatccttaagttaaagaacattaaagagaaatccctgggtgagctcatcaacatttgctccaacgatgggcagagaatgtttgaggcagcagccgttggcagcctgctggctggaggacccgttgttgccatcttaggcatgatttataatgtaattattctgggaccaacaggcttcctgggatcagctgtttttatcctcttttacccagcaatgatgtttgcatcacggctcacagcatatttcaggagaaaatgcgtggccgccacggatgaacgtgtccagaagatgaatgaagttcttacttacattaaatttatcaaaatgtatgcctgggtcaaagcattttctcagagtgttcaaaaaatccgcgaggaggagcgtcggatattggaaaaagctgggtacttccagagcatcactgtgggtgtggctcccattgtggtggtgattgccagcgtggtgaccttctctgttcatatgaccctgggcttcgatctgacagcagcacaggctttcacagtggtgacagtcttcaattccatgacttttgctttgaaagtaacaccgttttcagtaaagtccctctcagaagcctcagtggctgttgacagatttaa

SEQ ID NO: 10338 - DNA, 4924 bp, Homo sapiens
agaggcgcggcaggcgcgcggagccagcggagccagctgagcccgagcccagcccgcgcccgcgccgccatgcccctggccttctgcggcagcgagaaccactcggccgcctaccgggtggaccagggggtcctcaacaacggctgctttgtggacgcgctcaacgtggtgccgcacgtcttcctactcttcatcaccttccccatcctcttcattggatggggaagtcagagctccaaggtgcacatccaccacagcacatggcttcatttccctgggcacaacctgcggtggatcctgaccttcatgctgctcttcgtcctggtgtgtgagattgcagagggcatcctgtctgatggggtgaccgaatcccaccatctgcacctgtacatgccagccgggatggcgttcatggctgctgtcacctccgtggtctactatcacaacatcgagacttccaacttccccaagctgctaattgccctgctggtgtattggaccctggccttcatcaccaagaccatcaagtttgtcaagttcttggaccacgccatcggcttctcgcagctacgcttctgcctcacagggctgctggtgatcctctatgggatgctgctcctcgtggaggtcaatgtcatcagggtgaggagatacatcttcttcaagacaccgagggaggtgaagcctcccgaggacctgcaagacctgggggtacgcttcctgcagcccttcgtgaatctgctgtccaaaggcacctactggtggatgaacgccttcatcaagactgcccacaagaagcccatcgacttgcgagccatcgggaagctgcccatcgccatgagggccctcaccaactaccaacggctctgcgaggcctttgacgcccaggtgcggaaggacattcagggcactcaaggtgcccgggccatctggcaggcactcagccatgccttcgggaggcgcctggtcctcagcagcactttccgcatcttggccgacctgctgggcttcgccgggccactgtgcatctttgggatcgtggaccaccttgggaaggagaacgacgtcttccagcccaagacacaatttctcggggtttactttgtctcatcccaagagttccttgccaatgcctacgtcttagctgtgcttctgttccttgccctcctactgcaaaggacatttctgcaagcatcctactatgtggccattgaaactggaattaacttgagaggagcaatacagaccaagatttacaataaaattatgcacctgtccacctccaacctgtccatgggagaaatgactgctggacagatctgtaatctggttgccatcgacaccaatcagctcatgtggtttttcttcttgtgcccaaacctctgggctatgccagtacagatcattgtgggtgtgattctcctctactacatactcggagtcagtgccttaattggagcagctgtcatcattctactggctcctgtccagtacttcgtggccaccaagctgtctcaggcccagcggagcacactggagtattccaatgagcggctgaagcagaccaacgagatgctccgcggcatcaagctgctgaagctgtacgcctgggagaacatcttccgcacgcgggtggagacgacccgcaggaaggagatgaccagcctcagggcctttgccatctatacctccatctccattttcatgaacacggccatccccattgcagctgtcctcataactttcgtgggccacgtcagcttcttcaaagaggccgacttctcgccctccgtggcctttgcctccctctccctcttccatatcttggtcacaccgctgttcctgctgtccagtgtggtccgatctaccgtcaaagctctagtgagcgtgcaaaagctaagcgagttcctgtccagtgcagagatccgtgaggagcagtgtgccccccatgagcccacacctcagggcccagccagcaagtaccaggcggtgcccctcagggttgtgaaccgcaagcgtccagcccgggaggattgtcggggcctcaccggcccactgcagagcctggtccccagtgcagatggcgatgctgacaactgctgtgtccagatcatgggaggctacttcacgtggaccccagatggaatccccacactgtccaacatcaccattcgtatcccccgaggccagctgactatgatcgtggggcaggtgggctgcggcaagtcctcgctccttctagccgcactgggggagatgcagaaggtctcaggggctgtcttctggagcagcagccttcctgacagcgagataggagaggaccccagcccagagcgggagacagcgaccgacttggatatcaggaagagaggccccgtggcctatgcttcgcagaaaccatggctgctaaatgccactgtggaggagaacatcatctttgagagtcccttcaacaaacaacggtacaagatggtcattgaagcctgctctctgcagccagacatcgacatcctgccccatggagaccagacccagattggggaacggggcatcaacctgtctggtggtcaacgccagcgaatcagtgtggcccgagccctctaccagcacgccaacgttgtcttcttggatgaccccttctcagctctggatatccatctgagtgaccacttaatgcaggccggcatccttgagctgctccgggacgacaagaggacagtggtcttagtgacccacaagctacagtacctgccccatgcagactggatcattgccatgaaggatggcaccatccagagggagggtaccctcaaggacttccagaggtctgaatgccagctctttgagcactggaagaccctcatgaaccgacaggaccaagagctggagaaggagactgtcacagagagaaaagccacagagccaccccagggcctatctcgtgccatgtcctcgagggatggccttctgcaggatgaggaagaggaggaagaggaggcagctgagagcgaggaggatgacaacctgtcgtccatgctgcaccagcgtgctgagatcccatggcgagcctgcgccaagtacctgtcctccgccggcatcctgctcctgtcgttgctggtcttctcacagctgctcaagcacatggtcctggtggccatcgactactggctggccaagtggaccgacagcgccctgaccctgacccctgcagccaggaactgctccctcagccaggagtgcaccctcgaccagactgtctatgccatggtgttcacggtgctctgcagcctgggcattgtgctgtgcctcgtcacgtctgtcactgtggagtggacagggctgaaggtggccaagagactgcaccgcagcctgctaaaccggatcatcctagcccccatgaggttttttgagaccacgccccttgggagcatcctgaacagattttcatctgactgtaacaccatcgaccagcacatcccatccacgctggagtgcctgagccgctccaccctgctctgtgtctcagccctggccgtcatctcctatgtcacacctgtgttcctcgtggccctcttgcccctggccatcgtgtgctacttcatccagaagtacttccgggtggcgtccagggacctgcagcagctggatgacaccacccagcttccacttctctcacactttgccgaaaccgtagaaggactcaccaccatccgggccttcaggtatgaggcccggttccagcagaagcttctcgaatacacagactccaacaacattgcttccctcttcctcacagctgccaacagatggctggaagtccgaatggagtacatcggtgcatgtgtggtgctcatcgcagcggtgacctccatctccaactccctgcacagggagctctctgctggcctggtgggcctgggccttacctacgccctaatggtctccaactacctcaactggatggtgaggaacctggcagacatggagctccagctgggggctgtgaagcgcatccatgggctcctgaaaaccgaggcagagagctacgaggggctcctggcaccatcgctgatcccaaagaactggccagaccaagggaagatccagatccagaacctgagcgtgcgctacgacagctccctgaagccggtgctgaagcacgtcaatgccctcatcgcccctggacagaagatcgggatctgcggccgcaccggcagtgggaagtcctccttctctcttgccttcttccgcatggtggacacgttcgaagggcacatcatcattgatggcattgacatcgccaaactgccgctgcacaccctgcgctcacgcctctccatcatcctgcaggaccccgtcctcttcagcggcaccatccgatttaacctggaccctgagaggaagtgctcagatagcacactgtgggaggccctggaaatcgcccagctgaagctggtggtgaaggcactgccaggaggcctcgatgccatcatcacagaaggcggggagaatttcagccagggacagaggcagctgttctgcctggcccgggccttcgtgaggaagaccagcatcttcatcatggacgaggccacggcttccattgacatggccacggaaaacatcctccaaaaggtggtgatgacagccttcgcagaccgcactgtggtcaccatcgcgcatcgagtgcacaccatcctgagtgcagacctggtgatcgtcctgaagcggggtgccatccttgagttcgataagccagagaagctgctcagccggaaggacagcgtcttcgcctccttcgtccgtgcagacaagtgacctgccagagcccaagtgccatcccacattcggaccctgcccatacccctgcctgggttttctaactgtaaatcacttgtaaataaatagatttgattatttccta

SEQ ID NO: 10339 - DNA, 4921 bp, Homo sapiens
agaggcgcggcaggcgcgcggagccagcggagccagctgagcccgagcccagcccgcgcccgcgccgccatgcccctggccttctgcggcagcgagaaccactcggccgcctaccgggtggaccagggggtcctcaacaacggctgctttgtggacgcgctcaacgtggtgccgcacgtcttcctactcttcatcaccttccccatcctcttcattggatggggaagtcagagctccaaggtgcacatccaccacagcacatggcttcatttccctgggcacaacctgcggtggatcctgaccttcatgctgctcttcgtcctggtgtgtgagattgcagagggcatcctgtctgatggggtgaccgaatcccaccatctgcacctgtacatgccagccgggatggcgttcatggctgctgtcacctccgtggtctactatcacaacatcgagacttccaacttccccaagctgctaattgccctgctggtgtattggaccctggccttcatcaccaagaccatcaagtttgtcaagttcttggaccacgccatcggcttctcgcagctacgcttctgcctcacagggctgctggtgatcctctatgggatgctgctcctcgtggaggtcaatgtcatcagggtgaggagatacatcttcttcaagacaccgagggaggtgaagcctcccgaggacctgcaagacctgggggtacgcttcctgcagcccttcgtgaatctgctgtccaaaggcacctactggtggatgaacgccttcatcaagactgcccacaagaagcccatcgacttgcgagccatcgggaagctgcccatcgccatgagggccctcaccaactaccaacggctctgcgaggcctttgacgcccaggtgcggaaggacattcagggcactcaaggtgcccgggccatctggcaggcactcagccatgccttcgggaggcgcctggtcctcagcagcactttccgcatcttggccgacctgctgggcttcgccgggccactgtgcatctttgggatcgtggaccaccttgggaaggagaacgacgtcttccagcccaagacacaatttctcggggtttactttgtctcatcccaagagttccttgccaatgcctacgtcttagctgtgcttctgttccttgccctcctactgcaaaggacatttctgcaagcatcctactatgtggccattgaaactggaattaacttgagaggagcaatacagaccaagatttacaataaaattatgcacctgtccacctccaacctgtccatgggagaaatgactgctggacagatctgtaatctggttgccatcgacaccaatcagctcatgtggtttttcttcttgtgcccaaacctctgggctatgccagtacagatcattgtgggtgtgattctcctctactacatactcggagtcagtgccttaattggagcagctgtcatcattctactggctcctgtccagtacttcgtggccaccaagctgtctcaggcccagcggagcacactggagtattccaatgagcggctgaagcagaccaacgagatgctccgcggcatcaagctgctgaagctgtacgcctgggagaacatcttccgcacgcgggtggagacgacccgcaggaaggagatgaccagcctcagggcctttgccatctatacctccatctccattttcatgaacacggccatccccattgcagctgtcctcataactttcgtgggccacgtcagcttcttcaaagaggccgacttctcgccctccgtggcctttgcctccctctccctcttccatatcttggtcacaccgctgttcctgctgtccagtgtggtccgatctaccgtcaaagctctagtgagcgtgcaaaagctaagcgagttcctgtccagtgcagagatccgtgaggagcagtgtgccccccatgagcccacacctcagggcccagccagcaagtaccaggcggtgcccctcagggttgtgaaccgcaagcgtccagcccgggaggattgtcggggcctcaccggcccactgcagagcctggtccccagtgcagatggcgatgctgacaactgctgtgtccagatcatgggaggctacttcacgtggaccccagatggaatccccacactgtccaacatcaccattcgtatcccccgaggccagctgactatgatcgtggggcaggtgggctgcggcaagtcctcgctccttctagccgcactgggggagatgcagaaggtctcaggggctgtcttctggagcagccttcctgacagcgagataggagaggaccccagcccagagcgggagacagcgaccgacttggatatcaggaagagaggccccgtggcctatgcttcgcagaaaccatggctgctaaatgccactgtggaggagaacatcatctttgagagtcccttcaacaaacaacggtacaagatggtcattgaagcctgctctctgcagccagacatcgacatcctgccccatggagaccagacccagattggggaacggggcatcaacctgtctggtggtcaacgccagcgaatcagtgtggcccgagccctctaccagcacgccaacgttgtcttcttggatgaccccttctcagctctggatatccatctgagtgaccacttaatgcaggccggcatccttgagctgctccgggacgacaagaggacagtggtcttagtgacccacaagctacagtacctgccccatgcagactggatcattgccatgaaggatggcaccatccagagggagggtaccctcaaggacttccagaggtctgaatgccagctctttgagcactggaagaccctcatgaaccgacaggaccaagagctggagaaggagactgtcacagagagaaaagccacagagccaccccagggcctatctcgtgccatgtcctcgagggatggccttctgcaggatgaggaagaggaggaagaggaggcagctgagagcgaggaggatgacaacctgtcgtccatgctgcaccagcgtgctgagatcccatggcgagcctgcgccaagtacctgtcctccgccggcatcctgctcctgtcgttgctggtcttctcacagctgctcaagcacatggtcctggtggccatcgactactggctggccaagtggaccgacagcgccctgaccctgacccctgcagccaggaactgctccctcagccaggagtgcaccctcgaccagactgtctatgccatggtgttcacggtgctctgcagcctgggcattgtgctgtgcctcgtcacgtctgtcactgtggagtggacagggctgaaggtggccaagagactgcaccgcagcctgctaaaccggatcatcctagcccccatgaggttttttgagaccacgccccttgggagcatcctgaacagattttcatctgactgtaacaccatcgaccagcacatcccatccacgctggagtgcctgagccgctccaccctgctctgtgtctcagccctggccgtcatctcctatgtcacacctgtgttcctcgtggccctcttgcccctggccatcgtgtgctacttcatccagaagtacttccgggtggcgtccagggacctgcagcagctggatgacaccacccagcttccacttctctcacactttgccgaaaccgtagaaggactcaccaccatccgggccttcaggtatgaggcccggttccagcagaagcttctcgaatacacagactccaacaacattgcttccctcttcctcacagctgccaacagatggctggaagtccgaatggagtacatcggtgcatgtgtggtgctcatcgcagcggtgacctccatctccaactccctgcacagggagctctctgctggcctggtgggcctgggccttacctacgccctaatggtctccaactacctcaactggatggtgaggaacctggcagacatggagctccagctgggggctgtgaagcgcatccatgggctcctgaaaaccgaggcagagagctacgaggggctcctggcaccatcgctgatcccaaagaactggccagaccaagggaagatccagatccagaacctgagcgtgcgctacgacagctccctgaagccggtgctgaagcacgtcaatgccctcatcgcccctggacagaagatcgggatctgcggccgcaccggcagtgggaagtcctccttctctcttgccttcttccgcatggtggacacgttcgaagggcacatcatcattgatggcattgacatcgccaaactgccgctgcacaccctgcgctcacgcctctccatcatcctgcaggaccccgtcctcttcagcggcaccatccgatttaacctggaccctgagaggaagtgctcagatagcacactgtgggaggccctggaaatcgcccagctgaagctggtggtgaaggcactgccaggaggcctcgatgccatcatcacagaaggcggggagaatttcagccagggacagaggcagctgttctgcctggcccgggccttcgtgaggaagaccagcatcttcatcatggacgaggccacggcttccattgacatggccacggaaaacatcctccaaaaggtggtgatgacagccttcgcagaccgcactgtggtcaccatcgcgcatcgagtgcacaccatcctgagtgcagacctggtgatcgtcctgaagcggggtgccatccttgagttcgataagccagagaagctgctcagccggaaggacagcgtcttcgcctccttcgtccgtgcagacaagtgacctgccagagcccaagtgccatcccacattcggaccctgcccatacccctgcctgggttttctaactgtaaatcacttgtaaataaatagatttgattatttccta

SEQ ID NO: 10340 - DNA, 4447 bp, Homo sapiens
cctcagagggatggaaatgtgtagccacagagtgggttcttgcggcctgcagaggaggcagctgagagcgaggaggatgacaacctgtcgtccatgctgcaccagcgtgctgagatcccatggcgagcctgcgccaagtacctgtcctccgccggcatcctgctcctgtcgttgctggtcttctcacagctgctcaagcacatggtcctggtggccatcgactactggctggccaagtggaccgacagcgccctgaccctgacccctgcagccaggaactgctccctcagccaggtgtgactggcggcccatggcagaggttgggagtggggatgggggaagggctgagcccatgggcaccctggaactccaaatcactctctgcctgtgaaggagtgcaccctcgaccagactgtctatgccatggtgttcacggtgctctgcagcctgggcattgtgctgtgcctcgtcacgtctgtcactgtggagtggacagggctgaaggtggccaagagactgcaccgcagcctgctaaaccggatcatcctagcccccatgaggtacccgtctcccctggccaggctgggactgtgagcaagtcactgttctctgagccttagtcttcccatctataaaatggggatatacaacctgtcacaagcttgtgggggtgactcaaggagacagtgtgtgtaaaagtgccctccttgtgcaagaagcagggagaaactggcatttactcagccagatactgtgataggcattgtgtgtggttagctcatttaattgttaccatggccctttaaagtgagcgtctgcacatccaagtaaagattgttttctcctccctaagtgggtgtaatttgcccatccccacccatgagttcagctccctgccctcccctcactctctctccctcagccagcctcaggttttgacactgggggaacaggtagctgttctattaataatttcctgtaatgggatggataaaaatctcaaaggccacttgatgtcaaagaggtttaaagttgtccctgcccaattggttggccaacttggcttaaaaacacaacaggcaaacagattttctggccccttgtcgaggctagacctcacaatctaactgcactttttactttccagcctcatgagttttctgtggcccacagatatggcctccaagtttatttacttttactctctatttgccccagctctgtagttctgaaactccctggttggggttgggctgactctgggtcagccagccggcaggctgtccccagggccctgttcctcttggcaggttgtccctctggagaggactctgtgtcccaggaggacagctgctgagtcaggccgagccggcagctgagaaaggcggcagtcgtcagatgggcttgagaaactgaaaggctaacgaaaggccagcgcccctttgggcagctgcaggaattcacggggatacaggccagatgtctacaaattggcagaggatgccagacccatgaatgactccagagacacttacatgaaataattaactatctcattcagtaaacaggaagtaaatcaatggacaaatgagtaactcttcctctggctgcctcttaggttttttgagaccacgccccttgggagcatcctgaacagattttcatctgactgtaacaccatcgaccaggtacagaggaccgtgccacactatccccccttccagagacacctcggacccctgggggcttctcctgtctgaggctgggttccccagatcaggtgatcacagccctctgggaagaagccagtgtccccgatccgattataatgctgcttcagggctggggcctccctcgtgggagcctcacagtaaggctgagggaaaccagatccctttagcttccacctgagatcccactggctttctctagtaaagttccagcatattctgaaccaaggtggctgattgtatggagaatattcattttgattcagcctgtgttctttatttaccattgtaccagatggtgtgaaaacaaaatcttgattcctacctcagggagtttaccttgtagctggagagatgagatacgtgcctataataaagggagagcaaggccgggctcagtggctcactcctgtaaccccagcactttgggaggcggaggcaggcggatcacttgaggccaggtgttcaagaccagcctgatggccaacatgatgaaaccccttctctattaaaaatacaaaaattagccaggtgtggtggcaggtgcctgtaatcccaactacttgggaagctgaggcaggagaatcatttgaacccaaggggcagaggctgccgtgaaccgagattacgctgctgcactcaagtctgggcaacagtgagactcagtctcaaaaaaataaaggatcaaaaaataaagtgagagcaaaacatggcggccagtagcactctaaacacagtcaataccaaaattcacctcactctctccccctcgtctccctcagcacatcccatccacgctggagtgcctgagccgctccaccctgctctgtgtctcagccctggccgtcatctcctatgtcacacctgtgttcctcgtggccctcttgcccctggccatcgtgtgctacttcatccagaagtacttccgggtggcgtccaggtgatggcctcaggggtgaggggtgggaggtgctttgcaatgtgcagtttggtgtacttgctagactcatcgttatgagagtaatagggtcgtgttccctccaaaaaataaaaacaaaaaacagaaatgaaggaaatagaaatatccacatcttattccaccgccctaatataatagtctgccaacacacgcacacactgaggttgacatctgaattatttccttgggcgatatggtcaggactggaattgctaggtcatgataaatgcacattttatgcccttcattcattttgccaacatgcttcccaggagggttgcatcattctagtggtcaggctgattgctgatgcatgaaatcggcgggcacctgattcaagcagtgttatgataacacctcccagcccacgtgagtccagagtgtagctgtaagccttgacttgagggagcctctcacagccattctcatggatcacatttgccctcatgagctttggatccatgcacgcctctttcctcctcaaaattttctaagaatgttctctagggagttctttctgggagtgattctcccagattcatagaaactcatagattcaaaaaattgtaggaaaaaatttaaagaacgtctaggccagtgtttctcaaactgccaattacagcccatcagtgggtcatgaaatcaatatcatggatcacaaccagcatttttttaaaaatgaaaaaaacatcagactgtattcatagagtaaagcaagctttgcttcatgaaacctttgtgttggtcatggaggtgtgtgagtactgatttgtgagataaaatatatttctgactgcaggttgtggtcagaaaggttaagtacctttcccaagtgcacatagttggctagaaactagagttgagatacttattagcaataataaaatttagatgcattttggacacaattacctgccccaaaggatcaacatttgtataaatggctttttgcttggatgatccagaatggcccgacacccacacgaacaacatagctttttgacactcaaaaaattcaaagtgctgcacaagctgttctacaaagttcatttcttctgccagagaaacagcccagtctctgtggcacccagtctgaccctggagatggtttatcagggaaatcaacttcctgcatcccaaactggcctccctggcactgatgtgcttgtcgaggtgcagctttggggagcaggaggcaattctgttgccatggaaacctctggccttaccccgagacgaaacctatcatttcagcacatcactggccagggtctaaagagctccttgatggggtaagcggaagacggggttgaacgctttgagtttggtcttctgttcctttggccagctgtctcaaggttcagattgttcacctgtaaaatggaactagcactgcctgcccagccttagctcagctccaggctgtgcagcagaagtacagggacagatggcgacctggggttgacaatgcccaggacagcagtaattgtgccccacatcaggctgtgtctaagcattgtacataaacgatctcattcagtgctcacaaaagctcaatgggctggtggcattgtcttcccccttcacggggtaagaagctgaggcctagagaggtaaggccattcacccacacagcggtagcaggtggagctaggcttcaggcccaggccgagccctgagcctgccctcttaactgttccactctgttccccgccacagggacctgcagcagctggat

SEQ ID NO: 10341 - DNA, 708 bp, Homo sapiens
cctcagagggatggaaatgtgtagccacagagtgggttcttgcggcctgcagaggaggcagctgagagcgaggaggatgacaacctgtcgtccatgctgcaccagcgtgctgagatcccatggcgagcctgcgccaagtacctgtcctccgccggcatcctgctcctgtcgttgctggtcttctcacagctgctcaagcacatggtcctggtggccatcgactactggctggccaagtggaccgacagcgccctgaccctgacccctgcagccaggaactgctccctcagccaggagtgcaccctcgaccagactgtctatgccatggtgttcacggtgctctgcagcctgggcattgtgctgtgcctcgtcacgtctgtcactgtggagtggacagggctgaaggtggccaagagactgcaccgcagcctgctaaaccggatcatcctagcccccatgaggttttttgagaccacgccccttgggagcatcctgaacagattttcatctgactgtaacaccatcgaccagcacatcccatccacgctggagtgcctgagccgctccaccctgctctgtgtctcagccctggccgtcatctcctatgtcacacctgtgttcctcgtggccctcttgcccctggccatcgtgtgctacttcatccagaagtacttccgggtggcgtccagggacctgcagcagctggat

SEQ ID NO: 10342 - DNA, 2875 bp, Homo sapiens
cgcaccggcagtgggaagtcctccttctctcttgccttcttccgcatggtggacacgttcgaaggtgagttgtaaggcgggcaccccacgtgtacccacagccaccagatgaggcctcagccctggcacgtggtcagacatgacaggaggcccagcagtcaccgccttcccctgcaccctcactgggacccatgcagggcacatcatcattgatggcattgacatcgccaaactgccgctgcacaccctgcgctcacgcctctccatcatcctgcaggaccccgtcctcttcagcggcaccatccggtgagccccaccacccctcaggcccacccagccccaggccggctcagttccatcagatctggagcacaaagaggagggggttgggggagaccaggatcccagaggtgtttcctgctcatgcccttctccatcccatcaggcccaggcagcctctggaaggggatcccccacccatgggtctaagatgctgtcccccacccactgccaccacctcggtgcttctcccagccagacctccaactcagtctgctctcgctcactgccctctttgccgcctggggatgcaggcaggaccctgctccctccctactggggctttctgtgccacttccagatttaacctggaccctgagaggaagtgctcagatagcacactgtgggaggccctggaaatcgcccagctgaagctggtggtgaaggcactgccaggaggcctcggtaactactcctggctatgcagctgggttggttgggcactcaaggaccctgtaaggatggcagacagaagcccgtgtctcaggtttgccccaagtttggagtctgaagcctggcaggaccatttagtcctacttctcactatacgggggcccagagaggtcaggtgtcttgccccaggtcacacaactggtcagttcagggtctggctcctcctgcagggtacagcgggtacagtcagggatccttgtgagacagagattgcgagtcccccatgccaagggggcatcttcagccctgccctgccccatccacctgcatgcccagttctgccttaggggaggagaagatggactgggcaatcatagacacgggtcactcatcaaggccaccggtgattggcaaagccttggtatatttgctgcagctcctggagcattgggggtggccaagccttggtttcaatgaatcaccctaccaaggccctacatacacactcagtgcacccctcagtgcacacgccccctcccagaactgcccagggccacagcagcacacacctccaggggtgcccttctcgttgcagtccttgcagacggcctccacattgttgtgtcaggtgcaccagccctgcacacgcctgtgctcttggacacacacccacctatttgcccccatgcacacattttccaacagccccccaagccatcccatctgctccactcacagcacaagattaactcagtcctacttcatctccccgggctgttttcagatgccatcatcacagaaggcggggagaatttcagccagggacagaggcagctgttctgcctggcccgggccttcgtgaggaagaccagcatcttcatcatggacgaggccacggcttccattgacatggccacggttggtcctgggcccctccatgggaccatggtcttggaaagggtttagtgggatgctagggagaaatttgcacgaagtagtcctgaggctcaagttgcctctaacatcaaatgctatgtgttgcagaaaatgaaaagagctggggggaccctgactctgtctagtcttagggaatgttacacacacacacgcacacacaaaaacactatgcaaacacacacataagctgcacacacagacccacacagacttcacactgtcacctatcacaacagcacacacacagccacaaccacaacctacatacacacacagagctgagctcccaacaggctgagtccagtccctgagtgccgggaacctgttcagtcctgtggggtgggggtgggactaggatcggggtcagatgggagctgagccacagacctgggctccacatcccccaagccaggccagaccccatccactgggcaggtgagccaacagctgttgcccccacttggcaggaaaacatcctccaaaaggtggtgatgacagccttcgcagaccgcactgtggtcaccatcgcggtaaggggcccattgatggggtgcagagggacacccagggacaggactggcctgttgtggccgtcatcagtgcacagcccctgggcttgcctggtcccagtaatcaagaaagaaccctgaagcaggcagttcagggcaaggggcctggagggcatgcagggagcctgggttgcaggatttggggtggggggttttgcccctgtgcttccctcagacctcccctctccttctccaggttccaaggcctgcccctgtcccaaggccttatatgttaggctggcgttacttctccataggaagtgggggaggggttgtggagggtctctgagccttgaagcctggaggtggggtagagttgggacttggagaggagagaagggtggtattagcagatggagagcttgtagtcacatccaccccaggaaagtgcagtccccacagtgacaggacattctggccacatgcctcatcctcctcctccaagccgcaggagggccaccctcagctgtggcccccaccgcgggtggtattcccaccatcctgacccgccccctcctgccctgcccagcatcgagtgcacaccatcctgagtgcagacctggtgatcgtcctgaagcggggtgccatccttgagttcgataagccagagaagctgc

SEQ ID NO: 10343 - DNA, 675 bp, Homo sapiens
cgcaccggcagtgggaagtcctccttctctcttgccttcttccgcatggtggacacgttcgaaggtgagttgtaaggcgggcaccccacgtgtacccacagccaccagatgaggcctcagccctggcacgtggtcagacatgacaggaggcccagcagtcaccgccttcccctgcaccctcactgggacccatgcagggcacatcatcattgatggcattgacatcgccaaactgccgctgcacaccctgcgctcacgcctctccatcatcctgcaggaccccgtcctcttcagcggcaccatccgatgccatcatcacagaaggcggggagaatttcagccagggacagaggcagctgttctgcctggcccgggccttcgtgaggaagaccagcatcttcatcatggacgaggccacggcttccattgacatggccacggaaaacatcctccaaaaggtggtgatgacagccttcgcagaccgcactgtggtcaccatcgcgccgcaggagggccaccctcagctgtggcccccaccgcgggtggtattcccaccatcctgacccgccccctcctgccctgcccagcatcgagtgcacaccatcctgagtgcagacctggtgatcgtcctgaagcggggtgccatccttgagttcgataagccagagaagctgc

SEQ ID NO: 10344 - DNA, 12612 bp, Homo sapiens
ggaaacctgggcaccaaggcttgtcccactctaggggactggggaaacagggattttgccagcacctcctggcagggcaaccatcaggtcaaagggacctgacccatgaccccttcctcagatcattgtgggtgtgattctcctctactacatactcggagtcagtgccttaattggagcagctgtcatcattctactggctcctgtccagtacttcgtggccaccaagctgtctcaggcccagcggagcacactggtgagtgcccaaaggtgtgtgtgttttgtccctcttcccctccttccctcgacagcagcaggtctcctcccacacacccacactgtcattgactttgactttgactttgagtaggccacttcacctgtccaggcctcagcttctttgtctgggaaatggagtcaatgggggaggaggctgcctcccggtgaggacaggaggcgggcatggcagtgacagtattgacactcaggccttcctctcgggtgggagacggagcagaagcctctcccctctgactcggggacccctgcaggagtattccaatgagcggctgaagcagaccaacgagatgctccgcggcatcaagctgctgaagctgtacgcctgggagaacatcttccgcacgcgggtggagacgacccgcaggaaggagatgaccagcctcagggcctttgccatctatacctccatctccagtgagttcaccccacacagccagccctgggtgctgctgcgtacatgcaaggagagggtgtcagagctcgggtaagagggggtgcagggacagaagcaggaggccttgagattatccgactcagtaggggagcctcaaactggctctgatagctaagctcccagaaatcaaagtactcttcattcatttatccaacaaacatgcatggaaagcctgctatgtgctggacactgtgctggccctcaggatacagtgatgaggaagagagatgaagtttcattcctcatggaactgatatgttattgacagacagcagcaagtaagtaaatgaccacagttttgaactctcctaagaatgaagactttttagtaagtcagactgagctgtcattgccctggggaagctacaagaaagcttccatccacttggggctatgcaaaagaaaaagactagttatccttaaatatcagaagcccaggctgaaggtactcacaggtgtagggactgaatttatattaaccaagtagtttgggaaccccaagccaaggaagaagaaaaagaccaaaactggtaaaagtcctagagtcccatatacttgaaaccattttactgagaatgtaaaacttttttttctttttttgagatggagtctcgctctgtcacccaggctggagtgcagtggcaaaatctcggctcactgcaacctccacatcccaggttcaagtgattctcctgcctcagcctcccatgtagctgggactacaggcacacaccaccacacccgactaatttttgtatttttagtagagacagagtttcaccatattggccaggctagtcttgaactcctgacctcgtgatccacccgcctcagcctcccaaagtgctggaattacatgcatgagccactgtgcccagcccaaaagattttttagaaattgaaattttagttatggaaattaattcagtgaacaatggtcccctggtcagagtgagggcttacggaggtcaggtgatccatggagtcctggcccaagtttatctcacagttggtctcgtggctccgtggacccatcccatggtggttacttcccaagtgcataattgggatgtagatatttagcaaccagctgacttcacactagttccctgacctgtccagtctaagagtcattatggccaagtggaagcccctggaaagaagaaaacaaaaaagaaaccaaaacttactcagtgcacaggttacatgaatgagtatagctgaagagagaatttttgaattagaagacagatgagtggggattacacagaacgtggcaaggagagtaagttggtagaaccattttacagatgggaaattaaggccagaggggagtgtgttcctgagatccctcctgaggttagtagcatggctcggactagatcctccaaagtctcttaactcctggtctcaggctattttccacaaagagctgggggcctctgtggggtgaagaagacttaggacaccatggggcaccattatgaggccatttcctcctaggagaaaaaaaatctctgggctctgaaaggagtagaattagggtaggaaattaagagaggctaccgaccacctcctccaactaaaattggttcttttggtgccaggaagagacacacctggtgggggagggaaggtggtaatggagggggtgctggtagtgtctcccagatagacccatccaacaagtctcatggagaatgagacggtcactcaggtcatctgcgtattcttggcattcttgctgcctagagagagagtctgatggagctaggtggccaccaagctgtcccactccccaagacagtttggaaacatgggcaccaaggcatgtccctgtctaggggactggggaaatatcccatagcagtgttctcacagtatggggctggccatgaataccccaggagtccaacctccctttgtccagctagaccatggtgtcctatgcctcaggcagggaatgtggtccagtcatcagtggctgggccgtctgccatacatggtgcaagccatggcgttttatgcagaaagtcctgctagcatttgattttctcagaatggagctgtgagcatggcaggcaaccactgtttcctggattcttcaccaagacaccccaagttcctggtctctccccgttatcctcatccctgaccctgtggttctcagagcctccaaacacactcaggctaagcactccatagacaggggaaatttggaaggaacatctagggagctcagaaaagccaatgtccctagccccaggcccacttcaaccttctctctgtcagtcctgcctgcccctggaggctggttacatgaagagtaaccccctgcttgtgtatagccccccagttttgtacaggtttagagacagttcccagcagtaggaacagctgccgaggtgggagagggcttctcccgatagccgggggacttcctctcccaggaacaacagggtggggtagagcaggcttgtcgttgctgagatagagagagggaagggaaacaacaaggaaagtgggggcactgggtccccaaggttcctggcacagcaagcagtgaagttggggcagcctcaggtcatgtagtgggggcaggtgacatctgctttgactgctcctaagagatatgtactcatctcctggattccaaactgcagcctgggacatgttttcttatataaacagcatcaaaagatgtgtgagttcccaggctagcccactgaaccctacctagtgggtgctcattgtcccccagagcccccagaagacaagccgtggctttgtgatgggcctggggccaggaggacctagggatatgttgtgaagagctgagaagactctggaaaaaaggggctctggagccaagcaggagcccgcccaggactcctcacgtgtccaagtcacctagggagagaaacagagcagcccaggttggtccctggaagagagcagcggaggaggggaaaggggagagcccctggggagagctttgaaagtcaagtgctgtttgctcagtgtgtttgcctttccgaggatgtgtttttttttccctccgttagtcagcagtgggagggggagagagacgggtggtagggtgcagggtacctcctggctgcaggcatatgctttgagtgcgtgttcatttacctcctctggacttcctgccttctgttaccagggatcaagacacaggtcattaggcgtgaggtaatggggcatctcttgttctgacccctggcgccagtcttggagtcctgacgctgcagaggagccccagagtcacatttcctgttggggcccatcctgctcatatgcggcaccatcagacttctgggcaggcaagattacctgtgactctgtctgatggtctcgccatcaatatcactgagagtagctgtgtatggagtcccgaactggtacaggataaaacagggggctgaaaagggaatgaatgggcacagtttctctggcatcaaaagtcacatccagaattgatatttcctgttgagtaaaaatagaaatataagttgctcagtggatgttgagtgagccctattcatgtgccccactctgtgccaagcaccaggaaggagggaagggaaaaatgataagatgttctccccgttctccaggagtttatgctccactaagaagtcagagctaacatgcacagaacagtgtggcagcgagagcagaaccgtgtggccagctccatgcttgccgcctagcaagcgtgattgcacttcatcctcataacaacttggtgaggtgtgttgctctgttgtcccattttacagcagagaggactgactctcagtgaattgaaatgtctcagtgaggtcttccacagcaaaaggcgaagcacagagaaggaagtccatgtgggctgggagttcacccagagattcatgtaggggcaatgtgggctgtaccttgcaagatggtgggatttcaatgaggagaagacaaagtgggaggaagctggagacaaggactgtggtctcttcctttagaagtcagttcaatctttttttccttgtggaagcagcataactctaggtggttcctctgtatctgaggacaagctttgtagaggtgacaaaggggtcctaggtcctatcaggcaagcactcgatatgctgccagttcattctgtccattgtgagatacccattccagagcgcttcctctgtgccaggctctacggaggttctggatgttaaagaggaagcaggcatggccctggccctcccagtcttgtgggagattgatcatgcccatgaatagtgaccatgtggtcagagccacagggtcaattccaaatgcccctgtttctcttttgtgttactcacctgactctgggtctttcgtttcttccattcattttttttaaacaaatatttcctgcccaccttctgtgtgccaggcctggggatgcagtgggagaagcctctgtcctcctcagtggaggcgctaactcagaacaggcagtggagaaaaacaacatgacctggagacctggtgccccttccttccccagcatctttgaaattcttttggttgttgttgttttgagatggagtctcactctgttgtcaggctggagtgcagtggcgcgatctcaactcactgcaacctctgcctcccaggttcaagtaattctccctgcctcagcctcccaagtagctgggattacaggtgctctctaccatgcccagtaatattttttgtatttttagtagagacagggtttcgccatgttggccagcctggtctcaaactcctgacctcaggtgatccacctgccttggcctcccaaaatgctgggattacaagcatgagccactgtgcctggcctgaaattcttcaatatctacctgcccttctgccagttggtgcagccacagtgggctgcttatgcatatcctggcctggcttggtggggagcatggctgagggagagccggggcacccatcaattaaggaggtaaagatcagtctgactgagatgcctcctgccacacttcctcagctgccagcaactgacaccattaacctgatttccttccccctctgttgactgcactgactattggactgaatgggaaacagccccgtgcacctcaaaatgcacttcccctcctgcagatgcatcttgcaattaggcccaaactgtgagcctgcatgctcctcccctggccctgcacaggcaacaaagctgaagttaatcagaggtacaaatggctggctatgcctctctgacacgtaacttctggaacatgtatcaatgctttggaaatgaaaagctcctggtattgcaatgccaggctggtgcccataagggccagaaaacattccttgggcaaagccagggggagtgggtgatctgatcccagctcaggtttgttgatttgttgttttgtttgtttcgttttgtatggggcaagggttgagggtatgaaaaacttacactatcatttactaccgtagtccccagaacccagcacaccagcacaaggcctggaacagggataccttttttgaatgaataagtctttttttttttttttttttttttttttgagacagagtttcactcttgttgcccaggctggagtgcagtggcgcgatctcggctcactgcaacctccgcctcctgggttcaagcgattctcctgcctcagcctctcgagtagctaggattacaggtatgcgccaccacgcctggctaatattttggtatttttagtagagatggggtttcaccatgttggccaggctggtctcaaactcctgacctcaggtgatccacccaccttggcctcccagagtgctgggattacaggcgtgagccactgtgcccagccttgaatggataagtcttaagggatatttttggaaaggatattctaaaaaatacccatgtctctacactattgcagaagggctttcagttttgatggcagcctttcaggccagcctacacgcaactaaacttttccataacagcatcacacttacacaagaagaaggttttataatccacttgccattatttaacatagttcttcctccttaactttcaagatctgagcactataatgttcttctttttgtttttgtttttttctaaatcaaattaaggtgagtcacctcaccttgggcctgagttggacagaaatctattcttggctatattccccacccctccaccaccttggaaccttatagaactttatgtggttcaggaaaatgagggcgaggcctcagatcttcaacccatgacagctgtatgcccagctccctgccttcctgtcttacccccagctagggcacaggactgactattgtgcccagagaggtgccagagcctgtaacaaccccagacttcccaggtccagccacatccaccccagagccccaaaagatgatcttcagagagacctttaaaacacaagtagctggtcacttccatccagaccagaacccaagatggctgtgctcttgctgagacatgttggttgtcattgcctccgagcccactttagccctcagctctgtaccagaaatgctgttcctttgggaatcacagccaaagaagagatggagcagttctggaataagaacacaagttcaaactgtcccatatctccccacatcactatctacagttggtctcttcccatggcgatgtccatctgccaccgtggcactggtattgctttgagtgcaggggtctctctttttggcatgttggccctgttactccctgggaactttgagtcttatttggaatgcgtgaagtccctgtgtccggggccagcactgatccacacagctaagtttgcactcatcttccctctcatgtatcatatctggaatggggtctgacacttgatgtgggacctaggaaaaggcctgaagattccccagctataccaatctggagtggttgtcccggttcttactgtactgtcctctgtagggctggcagccatgtgaagaacagaggttcccagcatcatcttcctacacattattacattcacccatctttctgtttctcacttttatctccagcctgggaaaagttctccttatttgtttaaatccttttgtgcttttagatccccttggagcagtagagtaccttgtagaccataagagtggaaaagggtctagttttctccttgtttctaaagatggggtggctgaaaaaactccccttttttgcctacagcttgcctctctgggcctagaagtggttattctgtctccatattggcctttgatttgtgctgagggtcagcttttggctccttcttcctgagacagtggaaacaatgccagctgtgtggcttctgccctgggggctgggggtgaggctttgggtgccactgcctgtgggttgctggcttaaaggacaattctgttcattggtgagagcccaggccattaacacctacgcagtgttattgaaagaagagaggcgggggtggaggggaattagtctatcccagctagagggagataaagagggctagttagttcttggagcagctgctttgaggagaaaatgtatagcttttgacacaacaggaagatccagaaaattatcattgaacatattaaaggttatttctttttcttgcaaaacacacacacacacacacacacacacacacacacgcgaacacacgcagctgatgattctactctcccagccccagccctgaaggggacccagaactccctgcacaaaggctgtccttcaaggggagggtgaaagaagtggaaaatcacattttcattctttagcgtctccatacaacagccagaactgggcagaagctaattatatcagaagcatactccatgttgctgcatcagctttgggatgttcatttttaaatttatttatagcttgtctcattcctcaaaggagttcagggagctacaaaaataaagacaataaaattgaaaaaaattaaattaaaaaaaccatgaccagggaaaatgtgcagtagaatgaagtgtcaattatcacgttttctgactgcaaaatctcccccacggctgatgcaccatcatttactacaacagcccctcttgttggacatttccagtttatttcgtttgggatggtttgttgctgttgctgtggttgtggttttgttttattgaattttgtgttagctgcagctaataccatcttgctgatggctttgcgctgctcttgaatgattactcaggataaatttcctggagacggattataggatcagaaggtctgaacttctgtgtggctctagctacaaagcaccagattgctttccaagagcgttgtagcaatttataatccaacactcagcctattttttggctgggagtcaagccccagaatgtgaaggaggggtcttggcctggagcaggggctgagggatgggtgcacaggacccctccttattggttatttatggggatgggccaggaggagcagaatagaggcccctgccctcccagttgctccttggagtgactgaccccataggggaggggcgaggctacctcacatttagaactatgtagttggtgatggtcaaggtcctaggtctgatgggcatcctcctccctctcctcctcagccagtaatggctgcactatgtcgtatgtcctagatctgggtcccttttgctgtgggaacaccaataatacttacgctgtttcctgccggaaacggtgcaggagggctgtggcatggtagtgggccctggaaaccatctagccttcatgaggaagggcagttaaagcacaggcatgtatgatgttggtattgattaaaagcctcacgggcagagaaattcgccatctgccagggccccagccatacgagggctccagccatacatcctccaggagactgggacctctccaattgcaggagccttgccttccccatcagattaggaattccccgaggatggggacaatgtccttcccacctgcttgagaactcctaaggggcatgtactctgtctccccattgtatctggaacttcctgggagcatagctcctgtctccgtcctcagactgggaatcccctaagggcagaggccatgtccttccacccacttgggattccctgaagttggggaccacatctctgatgtacaatgctttgtatgtactgactgctgcaggattcttggagtaaatgggcagtcaacttcttggactggtattgaccatctggacttcatcagagtgtccaagactttgccattcattagacaggggccatgtgcacaggcagagccctggcctctggcttctggctcctgactcctggtccctctgctttaatttggctaatggcagaaccagactcctttctgggctgccctggaaggggatccttgaatgaaagaggatagatgggaaggtggcagctgacatggttacctcttatgccatgggggggctgctctctctggaaatttaggcctggggtcagggcactgttgagcattttacaccctaggccagaggaggggtgacctgtggagcagggctaagctagtagcccatgaggtatgatgtgtaggcagcacctggggctcacagagcctgttacccatgttatctcctctgaccttggaaagagctggggtgtatgaacaagtatttataagtttacaaaaatcatatgaggaaactgaggcacggggaaggtaaatgacatgccctaggttacacagcttataagtagcagggattctgcccttctgtcacaccaagtcccactgtcttttcttcctggagtccctgtgactgatctaaaggccacatgtttaacagaataaggaggaggcctctgttgcagcaaaccagctaccccacccgcacacagactctaagggacatcctgctttaagctgtccttagttactaatacctcagtgagaatgagtttgaaattttctcaagagccatgggagactaggaagtctctaagcttcatagagagcctggcttggggggacacaggagccaaaggcagaggaagaagtggcagctttgtgcccccagaaacacgtgctcctgacctcacagttggccacagccagccaactctcccatccttctcccaccactttcccgtggggctaacttcaccctgtccacacggagtgacttaacagtttaagccccagagtcgggggccggggtacctgggacaagagtcctgagggaaatggggtgaggaactggaagtgccacagggctagagttctgcccctagcctactggagctgtgccccacaggctggccccactggactgcgctgcctccaagccatcctgggcatctccatgtgtagctgtcacgctcctcccactaaacgcctccctgtgcttcctctgcagttttcatgaacacggccatccccattgcagctgtcctcatagtaagtggatcctttctccatctcttgggggtagggtggagggggagggcgtctgcagtgacaggctgcccagatttggcctttctgcacaggggcctcagaagacaggctccacagccagactgaaaataggatcgaaagtttatagagggtgtggcccctccccaactccagccgaacaggggcctctgcctccaggcctggaagaccggaggcttagtatttagagaaattaaactttcttttaaaaaatagctatccaaatttttaatttttaaagtgaaacatgtgtattgtagaagtgatgggaaatccagaacagaaagctcaaagagaattaaaatcacccataatcccactggtaacatttttaatgtgtttctttccagtctttttttaaggcctatgatatgtcattttctacaaaaataggaatgtgctatgcatgcagttttgcaacctgctcttttaaatttaggaatatgccacacacaattctccatgccactgaatattatgatggtggctttctaaagcaattttgataaaagctgtgtgtgagctgagccatgggggtcaagcagcatgctcctacagaaaggcctgggcccctacgagcctgcagccccctcacccagcctcccatccccatcttctgtgatggctgcagttccttaaaaagatctgcttatttcccccggggccagtgtccctgagctgtgtagagttcacagcctgtcggatacacttgggaattcacttccaatgtgatgtattgagctggttcctggcctggctcctgggggaactgtgggtaacagaggccactgagccagccaggtggctggggcaaagcactgtgcagtttcgtaatcactctgtttacgttatcccgatgaggactggggagatgagcaccccgcctgctgtctgcagagggggccgtgctgacctaacccgagatctcctccctgcttattcccagccaagactgggcaggacagggagtcttggccaggacagggagggagcagcccctgctctccagcttgaagtcctgaacttgttggggacgtttccatgagatgactgtggggatgatgaaggtgtctccaactaaaagatcctcttaggagcctgctccctgacagccctctcatttcccttccagtgctgagcgtttccagtgtgggagggacccacaccctgggccaccctggcctcacttgtgcctctgtccacagactttcgtgggccacgtcagcttcttcaaagaggccgacttctcgccctccgtggcctttgcctccctctccctcttccatatcttggtcacaccgctgttcctgctgtccagtgtggtccgatctaccgtcaaagct

SEQ ID NO: 10345 - DNA, 598 bp, Homo sapiens
ggaaacctgggcaccaaggcttgtcccactctaggggactggggaaacagggattttgccagcacctcctggcagggcaaccatcaggtcaaagggacctgacccatgaccccttcctcagatcattgtgggtgtgattctcctctactacatactcggagtcagtgccttaattggagcagctgtcatcattctactggctcctgtccagtacttcgtggccaccaagctgtctcaggcccagcggagcacactggagtattccaatgagcggctgaagcagaccaacgagatgctccgcggcatcaagctgctgaagctgtacgcctgggagaacatcttccgcacgcgggtggagacgacccgcaggaaggagatgaccagcctcagggcctttgccatctatacctccatctccattttcatgaacacggccatccccattgcagctgtcctcataactttcgtgggccacgtcagcttcttcaaagaggccgacttctcgccctccgtggcctttgcctccctctccctcttccatatcttggtcacaccgctgttcctgctgtccagtgtggtccgatctaccgtcaaagct

SEQ ID NO: 10346 - DNA, 2896 bp, Homo sapiens
agacatgacaggaggcccagcagtcaccgccttcccctgcaccctcactgggacccatgcagggcacatcatcattgatggcattgacatcgccaaactgccgctgcacaccctgcgctcacgcctctccatcatcctgcaggaccccgtcctcttcagcggcaccatccggtgagccccaccacccctcaggcccacccagccccaggccggctcagttccatcagatctggagcacaaagaggagggggttgggggagaccaggatcccagaggtgtttcctgctcatgcccttctccatcccatcaggcccaggcagcctctggaaggggatcccccacccatgggtctaagatgctgtcccccacccactgccaccacctcggtgcttctcccagccagacctccaactcagtctgctctcgctcactgccctctttgccgcctggggatgcaggcaggaccctgctccctccctactggggctttctgtgccacttccagatttaacctggaccctgagaggaagtgctcagatagcacactgtgggaggccctggaaatcgcccagctgaagctggtggtgaaggcactgccaggaggcctcggtaactactcctggctatgcagctgggttggttgggcactcaaggaccctgtaaggatggcagacagaagcccgtgtctcaggtttgccccaagtttggagtctgaagcctggcaggaccatttagtcctacttctcactatacgggggcccagagaggtcaggtgtcttgccccaggtcacacaactggtcagttcagggtctggctcctcctgcagggtacagcgggtacagtcagggatccttgtgagacagagattgcgagtcccccatgccaagggggcatcttcagccctgccctgccccatccacctgcatgcccagttctgccttaggggaggagaagatggactgggcaatcatagacacgggtcactcatcaaggccaccggtgattggcaaagccttggtatatttgctgcagctcctggagcattgggggtggccaagccttggtttcaatgaatcaccctaccaaggccctacatacacactcagtgcacccctcagtgcacacgccccctcccagaactgcccagggccacagcagcacacacctccaggggtgcccttctcgttgcagtccttgcagacggcctccacattgttgtgtcaggtgcaccagccctgcacacgcctgtgctcttggacacacacccacctatttgcccccatgcacacattttccaacagccccccaagccatcccatctgctccactcacagcacaagattaactcagtcctacttcatctccccgggctgttttcagatgccatcatcacagaaggcggggagaatttcagccagggacagaggcagctgttctgcctggcccgggccttcgtgaggaagaccagcatcttcatcatggacgaggccacggcttccattgacatggccacggttggtcctgggcccctccatgggaccatggtcttggaaagggtttagtgggatgctagggagaaatttgcacgaagtagtcctgaggctcaagttgcctctaacatcaaatgctatgtgttgcagaaaatgaaaagagctggggggaccctgactctgtctagtcttagggaatgttacacacacacacgcacacacaaaaacactatgcaaacacacacataagctgcacacacagacccacacagacttcacactgtcacctatcacaacagcacacacacagccacaaccacaacctacatacacacacagagctgagctcccaacaggctgagtccagtccctgagtgccgggaacctgttcagtcctgtggggtgggggtgggactaggatcggggtcagatgggagctgagccacagacctgggctccacatcccccaagccaggccagaccccatccactgggcaggtgagccaacagctgttgcccccacttggcaggaaaacatcctccaaaaggtggtgatgacagccttcgcagaccgcactgtggtcaccatcgcggtaaggggcccattgatggggtgcagagggacacccagggacaggactggcctgttgtggccgtcatcagtgcacagcccctgggcttgcctggtcccagtaatcaagaaagaaccctgaagcaggcagttcagggcaaggggcctggagggcatgcagggagcctgggttgcaggatttggggtggggggttttgcccctgtgcttccctcagacctcccctctccttctccaggttccaaggcctgcccctgtcccaaggccttatatgttaggctggcgttacttctccataggaagtgggggaggggttgtggagggtctctgagccttgaagcctggaggtggggtagagttgggacttggagaggagagaagggtggtattagcagatggagagcttgtagtcacatccaccccaggaaagtgcagtccccacagtgacaggacattctggccacatgcctcatcctcctcctccaagccgcaggagggccaccctcagctgtggcccccaccgcgggtggtattcccaccatcctgacccgccccctcctgccctgcccagcatcgagtgcacaccatcctgagtgcagacctggtgatcgtcctgaagcggggtgccatccttgagttcgataagccagagaagctgctcagccggaaggacagcgtcttcgcctccttcgtccgtgcagacaagtgacctgccagagcccaagtgccatcccacattcggaccctgcccatacccctgcctgggttttctaactgtaaatcacttgtaaataaatagatttgattatttccta

SEQ ID NO: 10347 - DNA, 612 bp, Homo sapiens
agacatgacaggaggcccagcagtcaccgccttcccctgcaccctcactgggacccatgcagggcacatcatcattgatggcattgacatcgccaaactgccgctgcacaccctgcgctcacgcctctccatcatcctgcaggaccccgtcctcttcagcggcaccatccgatgccatcatcacagaaggcggggagaatttcagccagggacagaggcagctgttctgcctggcccgggccttcgtgaggaagaccagcatcttcatcatggacgaggccacggcttccattgacatggccacggaaaacatcctccaaaaggtggtgatgacagccttcgcagaccgcactgtggtcaccatcgcgcatcgagtgcacaccatcctgagtgcagacctggtgatcgtcctgaagcggggtgccatccttgagttcgataagccagagaagctgctcagccggaaggacagcgtcttcgcctccttcgtccgtgcagacaagtgacctgccagagcccaagtgccatcccacattcggaccctgcccatacccctgcctgggttttctaactgtaaatcacttgtaaataaatagatttgattatttccta

SEQ ID NO: 10348 - DNA, 2930 bp, Homo sapiens
gccgcaccggcagtgggaagtcctccttctctcttgccttcttccgcatggtggacacgttcgaaggtgagttgtaaggcgggcaccccacgtgtacccacagccaccagatgaggcctcagccctggcacgtggtcagacatgacaggaggcccagcagtcaccgccttcccctgcaccctcactgggacccatgcagggcacatcatcattgatggcattgacatcgccaaactgccgctgcacaccctgcgctcacgcctctccatcatcctgcaggaccccgtcctcttcagcggcaccatccggtgagccccaccacccctcaggcccacccagccccaggccggctcagttccatcagatctggagcacaaagaggagggggttgggggagaccaggatcccagaggtgtttcctgctcatgcccttctccatcccatcaggcccaggcagcctctggaaggggatcccccacccatgggtctaagatgctgtcccccacccactgccaccacctcggtgcttctcccagccagacctccaactcagtctgctctcgctcactgccctctttgccgcctggggatgcaggcaggaccctgctccctccctactggggctttctgtgccacttccagatttaacctggaccctgagaggaagtgctcagatagcacactgtgggaggccctggaaatcgcccagctgaagctggtggtgaaggcactgccaggaggcctcggtaactactcctggctatgcagctgggttggttgggcactcaaggaccctgtaaggatggcagacagaagcccgtgtctcaggtttgccccaagtttggagtctgaagcctggcaggaccatttagtcctacttctcactatacgggggcccagagaggtcaggtgtcttgccccaggtcacacaactggtcagttcagggtctggctcctcctgcagggtacagcgggtacagtcagggatccttgtgagacagagattgcgagtcccccatgccaagggggcatcttcagccctgccctgccccatccacctgcatgcccagttctgccttaggggaggagaagatggactgggcaatcatagacacgggtcactcatcaaggccaccggtgattggcaaagccttggtatatttgctgcagctcctggagcattgggggtggccaagccttggtttcaatgaatcaccctaccaaggccctacatacacactcagtgcacccctcagtgcacacgccccctcccagaactgcccagggccacagcagcacacacctccaggggtgcccttctcgttgcagtccttgcagacggcctccacattgttgtgtcaggtgcaccagccctgcacacgcctgtgctcttggacacacacccacctatttgcccccatgcacacattttccaacagccccccaagccatcccatctgctccactcacagcacaagattaactcagtcctacttcatctccccgggctgttttcagatgccatcatcacagaaggcggggagaatttcagccagggacagaggcagctgttctgcctggcccgggccttcgtgaggaagaccagcatcttcatcatggacgaggccacggcttccattgacatggccacggttggtcctgggcccctccatgggaccatggtcttggaaagggtttagtgggatgctagggagaaatttgcacgaagtagtcctgaggctcaagttgcctctaacatcaaatgctatgtgttgcagaaaatgaaaagagctggggggaccctgactctgtctagtcttagggaatgttacacacacacacgcacacacaaaaacactatgcaaacacacacataagctgcacacacagacccacacagacttcacactgtcacctatcacaacagcacacacacagccacaaccacaacctacatacacacacagagctgagctcccaacaggctgagtccagtccctgagtgccgggaacctgttcagtcctgtggggtgggggtgggactaggatcggggtcagatgggagctgagccacagacctgggctccacatcccccaagccaggccagaccccatccactgggcaggtgagccaacagctgttgcccccacttggcaggaaaacatcctccaaaaggtggtgatgacagccttcgcagaccgcactgtggtcaccatcgcggtaaggggcccattgatggggtgcagagggacacccagggacaggactggcctgttgtggccgtcatcagtgcacagcccctgggcttgcctggtcccagtaatcaagaaagaaccctgaagcaggcagttcagggcaaggggcctggagggcatgcagggagcctgggttgcaggatttggggtggggggttttgcccctgtgcttccctcagacctcccctctccttctccaggttccaaggcctgcccctgtcccaaggccttatatgttaggctggcgttacttctccataggaagtgggggaggggttgtggagggtctctgagccttgaagcctggaggtggggtagagttgggacttggagaggagagaagggtggtattagcagatggagagcttgtagtcacatccaccccaggaaagtgcagtccccacagtgacaggacattctggccacatgcctcatcctcctcctccaagccgcaggagggccaccctcagctgtggcccccaccgcgggtggtattcccaccatcctgacccgccccctcctgccctgcccagcatcgagtgcacaccatcctgagtgcagacctggtgatcgtcctgaagcggggtgccatccttgagttcgataagccagagaagctgctcagccggaaggacagcgtcttcgcctccttcgtccgtgcagacaagtgacct

SEQ ID NO: 10349 - DNA, 537 bp, Homo sapiens
gccgcaccggcagtgggaagtcctccttctctcttgccttcttccgcatggtggacacgttcgaaggaccccgtcctcttcagcggcaccatccgatttaacctggaccctgagaggaagtgctcagatagcacactgtgggaggccctggaaatcgcccagctgaagctggtggtgaaggcactgccaggaggcctcgatgccatcatcacagaaggcggggagaatttcagccagggacagaggcagctgttctgcctggcccgggccttcgtgaggaagaccagcatcttcatcatggacgaggccacggcttccattgacatggccacggaaaacatcctccaaaaggtggtgatgacagccttcgcagaccgcactgtggtcaccatcgcgcatcgagtgcacaccatcctgagtgcagacctggtgatcgtcctgaagcggggtgccatccttgagttcgataagccagagaagctgctcagccggaaggacagcgtcttcgcctccttcgtccgtgcagacaagtgacct

SEQ ID NO: 10350 - DNA, 6876 bp, Homo sapiens
atgaccctctgcaagtgctcgggccaactctgaccaggctgaccagctgcatcccctgcctctacccacgccaggtacaagatggtcattgaagcctgctctctgcagccagacatcgacatcctgccccatggagaccagacccagattggggaacgggttagtagcagcctctgaggggttttttcaaagccaggacccccaacctaccatgccctgagacactactcaggacaatgggtaactaggaaataggagacattgaaggctgaagagttgcctgcagtaaggtcaaacatgttgttcttgatgatgtcctttgacaggttttcagtcctgcttggagggcaaggtcagcttagtgccctcccaggctggggatcttcttcatttgcaccccaggtatacactgagagcccacacagcactgtgctcagcctggggttgtattgttcctgttcatcctccagatggggtcccctccacaagcttagacgaacaggattctcctgtgactgtcctccttttgtgtgattttaatccctgctgcctctgtctttgtttgtactggtcagatggtccctagcgcctacacaatgaatctttaaagacttggggctcatgctgccctcttctgaatgaattcagtaaacacgtgcaagttccttctctatgcaaggtgagaagcaggcaaagaagtggatagagccaggcctccatcccaaagagctcatagtccagtagggtacaggacagtgtctcctgaatggctgagggcatgatgtgttcctcctctttggtgacagggcatcaacctgtctggtggtcaacgccagcgaatcagtgtggcccgagccctctaccagcacgccaacgttgtcttcttggtgagtgcaagttcccttggggtcctggtctctggctgcctcccaggcctaactgcccacctccacctccccgcaaccccaccatcatccaacaatctccctctccaggagtaaatccctcctgccagagatattgccttatcatcctagtgatagggaaactgaggcaggcaaggatagcacaaatgacccattgcagacttcagatggagctctgcagtagccaatgaggagaggcaagctgtagttataggctgcctgtctgtgggacagcccaacccctcaacacttatgcagcccgactataagaatggctgataacagaatgtgtgctgccacttcccatcttatgcccagtgcagacattgctaattgttcacagcattatttcccatggaacttaactcatcctcagaatccttctcaacacagcactccaggtaaccactagccatcaaacatgagataaaactaggccaggcgcggtggctcacgcctgttattccagcactttgggaggccgaggcaggcggatcacgaggtcgggagatcgagaccatcctggccaacacggtgaaaccccgtctctactaaaaatacaaaaaattagctgggtgcggtggcgggcgcctgtagtcccagctactccggaggctgaggcaggagaatggcgtgaacccgggaggcggagcttgcagcgagccgagatcgcaccactgcactccagcctggggacaaaccgagactttgtctcaaaaaaaaaaaaaaaaaaaagaacgtattcgcaatccttacactacttcatgtcaagttctgttgtgtcaggtgccttgactgacactgaagaattctaagaaccagtccttggcctcaaagatttagaatctgattagggagacagagctcacccagttcaagaggcccagcccggttcaaatccaaactgtgcggcataaactatgagggggccttgtccagggagacaactgtgagggctggagtaatcagggagggcttcctggaggagagcctcaaagggagagtcaattaaacagaaggaaagagggaggccatttgcacagtgagttggaagaaggaagctcaagtctctgattccagctttattccctcccctctccctacaccacacgcacaagcactcctttactaaagacacttcacagtgggaagattcagtctccgttaccgtctgacacacacacagcgttttacaaagcatgggtgcattcgcgatctctcatgagatttaaacaaccctgctagagaaaagtgaagtggacattttatttcagtaaacgtttatgaagcgtctactctgtgccaggcactaaacgtttatgaagcgtctactctgtgccaggcacaggcacaagaagtctcagttcttgggagtgccataatcaggaatggacaaacaatgatcagatctggctttgcgccagtgtcacgggaatagggaggaaggaagggtaggcgtgggggtcaggacaggatgcaggaggaactggtgcttaggtgagcgaaggatgggtgggagttcacaaggcagacaaaaggcagagcagcactccaggcagaggaacagctcaggagaaggcccagacggcaggcttcctgggaacctggaatgcagagtgctgggaaagcacagatgaagcatgagtctagaagggaaagcgagaggttataaagcacctggaacaccagcccacagggtttgactttagagatgatggggagccgttgaaggtccaggagtcaggcagtgaagtgattagatctgtttgagagtgatatctgacaactgccccattttaaatgaggtaaccaaggcccagagaggttgggtgagttgtccaaagccacacagctaactagcttcagtccctagagcagagttgatagaactctaatgggttttatactcattgtcacccctccccaccatgcctttccctaccctctactctcttcctctcccttctgcccaggatgaccccttctcagctctggatatccatctgagtgaccacttaatgcaggccggcatccttgagctgctccgggacgacaagaggacagtggtcttagtgacccacaagctacagtacctgccccatgcagactgggtgagggggaacaagggggtcaggctatagggggcagggctggggaggctgtcaggcatcttggcaggaaccaatccgttgtcttggtagcaactgctgagggccacaaagcataagagaccagcactggatggctttatgcatgctgggcatttcagggagaccctgtacaggccaggggtttggtatcacctagacccacagacactccccatcctggcccgggccccccatggtacactcaaggctggcaccaagaagtctcaggaataatcaagtgctcacttctcaccttctgattcctgcccttttgatgacccatccccgcagtcatggggagtgcccatttggatggaaaagccctcttcccaccctatgaccttcccggggtggatggatgcaccaccccgggaatcatatgggaaatatggaaccaaacaatagcagtagtaatagaaacttcaggctgggcgcaggggctcacacctgtaatcccagcactttgggaggccaggacaagaggatcacttgagcccagaagtttaaggctgctgtgaaccatgatcatgccactgcactccactacagcctgggcgacagagccttgtctctgaaaatttgaaaaaggaaagaaagaaagaaagaaacttcaatattatcagtagagtccaatgttgtgaaacccctcattaactaaatttccatactcttcagtaggtagaaaataattactttttgattcattagaaagcacttaatttttaagatggagatcatgtaattttgaactctaggtcttgcctactcctatataaattctcctctaaacaacagccaaaattgaggccctctttgagcttcaggctggtgccaaatggctctgcttattttccccaaaataaatcttccttccatgtatgatgagaccccctccagtataaagaagacccaaagaaaatcacccaaagaaaaaaggcccaaagataagacccaaagacctaaagatttaaatatatatacagatacagaaggtttgtttctgagtttctgtagtgaccttggcaataccttgtagttcaggacaatcctgaggaacacagaagtgctggcttccttgaggaatcagtgatcaggactctcgagccccttgaaccccagcatagggcgggagggggtgagggcagcaggggtgggtgtctgaattaatgtcaggtctacgtgatggtgtcatcaagtgttccagataaaaagttttattgagccgggcgcggtggctaatgcctgtaatcccagcaccttgggaggccaaggcgggtggattgcttgagcccaggagttcgagaccagcttggggcaacatggtgaaaccctatctctataaaaaaaaaaaaaaaaattagccaggtatggtggcgtgcacctgtggtcccagctactcaggaggctgaggcaggaggatggcttgagccaggaagcagagattgcagtgagctgagatggtgccattgcaccccagcctaggcaacagagtgagaccctgtctcaaaaaaaaaaaaaaaaaaagatttattgattccaaagaggcatggccacacacacttagaccagcaggtgctttgctaagccctgatggaggctgccagacccgccgtcaagaggagctaagggtagtgtacaatgagcccacttagtgtatgacggccgctgccgtgggtggagtccttgtgagtaaccagccagcttgagcaggatgcactaatttgctctgcaaacccagccattgagaaatacgcctcagatgtaccgaactctaggtcctaggagtatgttggttggggtaggttatcaataccagcccacttgcagtggatgagctggtggccatttgtagtgaggaaagggatgtgtcaacctccatcttagactccacaattgagggatgtgaccaccattcctccccagccagcccccaaaccacgtttgttgctgcctttccagatcattgccatgaaggatggcaccatccagagggagggtaccctcaaggacttccagaggtctgaatgccagctctttgagcactggaagaccctcatgaaccgacaggaccaagagctggagaaggtgggtatatccagggatggccaagcagccacccctggatgcaaaggttctgctagaacctgaactcataaaggtcttcctgtccttagtgccccaggaagccccctaaagggcagatgtgggagctgggcatgaactggctcctaccagaggagagacagtacctgtgccaggtgcccagggcagaatcaggtgggcaccttcgccttatcctgaggtagtcagatactatttagttgcaaagtttcagaaaatcaactcaaactggcaaagaaaactaagcaaagaaaacaagagggaattaaggatttattgacccatgaaaccaaaaagtccaggtgtgtcatagctttaagtgtgctggatccaggtagtcagtgtaatcagaaatctgtttctcccatctcttgactctgctcccctcaaattggctcagctcccctcaaattggctccattctcatggtatcagtgagggccaccagcagtcttaggtttacattctcccagctcaacaactctgccagaaaaaaagtgcctctttccccatagttcagcaaaagtcccagggctgagtctcactggtccagtttggtcatgtgcccacccctgaacaaatcactgtggccagcggtgtggaatgtgaggattggcctgtcctgggtcacgtgccactttgggagccagatccacctgaatcacagagactaaaaacaggggaagagtggttccccacagggatatgggggtgctattatctgatgaaggggaaggactaaatcctggcaagatgaatgtgtgtctgtctgcccctccctcaggcagggacaaagtagaaatctgacattggtcatcaccagagtagttaccccttaacttccccttcccccaccaaccatatatcctgaagacattgcccaggccacatctgtcttttaggagactgtcacagagagaaaagccacagagccaccccagggcctatctcgtgccatgtcctcgagggatggccttctgcaggatgaggaagaggaggaaggtacaggcaatgggactgggagtgaaattatggcctgaggtctgatcagccacagagaggctaaggtttggggttctgggtgtggtgcagtagtgtgcctttgattaaatggcttccctctgtgtgcccccgttgtcccctcagtaagtggggataaaatgccctgattcaccctcagagggatggaaatgtgtagccacagagtgggttcttgcggcctgcagaggaggcagctgagagcgaggaggatgacaacctgtcgtccatgctgcaccagcgtgctgagatcccatggcgagcctgcgccaagtacctgtcctccgccggcatcctgctcctgtcgttgctggtcttctcacagctgctcaagcacatggtcctggtggccatcgactactggctggccaagtggaccgacagcgccctgaccctgacccctgcagccaggaactgctccctcagccaggtgtgactggcggcccatggcagaggttgggagtggggatgggggaagggctgagcccatgggcaccctggaactccaaatcactctctgcctgtgaaggagtgcaccctcgaccagactgtctatgccatggtgttcacggtgctctgcagcctgggcattgtgctgtgcctcgtcacgtctgtcactgtggagtggacagggctgaagg

SEQ ID NO: 10351 - DNA, 958 bp, Homo sapiens
atgaccctctgcaagtgctcgggccaactctgaccaggctgaccagctgcatcccctgcctctacccacgccaggtacaagatggtcattgaagcctgctctctgcagccagacatcgacatcctgccccatggagaccagacccagattggggaacggggcatcaacctgtctggtggtcaacgccagcgaatcagtgtggcccgagccctctaccagcacgccaacgttgtcttcttggatgaccccttctcagctctggatatccatctgagtgaccacttaatgcaggccggcatccttgagctgctccgggacgacaagaggacagtggtcttagtgacccacaagctacagtacctgccccatgcagactggatcattgccatgaaggatggcaccatccagagggagggtaccctcaaggacttccagaggtctgaatgccagctctttgagcactggaagaccctcatgaaccgacaggaccaagagctggagaaggagactgtcacagagagaaaagccacagagccaccccagggcctatctcgtgccatgtcctcgagggatggccttctgcaggatgaggaagaggaggaagaggaggcagctgagagcgaggaggatgacaacctgtcgtccatgctgcaccagcgtgctgagatcccatggcgagcctgcgccaagtacctgtcctccgccggcatcctgctcctgtcgttgctggtcttctcacagctgctcaagcacatggtcctggtggccatcgactactggctggccaagtggaccgacagcgccctgaccctgacccctgcagccaggaactgctccctcagccaggagtgcaccctcgaccagactgtctatgccatggtgttcacggtgctctgcagcctgggcattgtgctgtgcctcgtcacgtctgtcactgtggagtggacagggctgaagg

SEQ ID NO: 10352 - DNA, 4283 bp, Homo sapiens
gcggagccagctgagcccgagcccagcccgcgcccgcgccgccatgcccctggccttctgcggcagcgagaaccactcggccgcctaccgggtggaccagggggtcctcaacaacggctgctttgtggacgcgctcaacgtggtgccgcacgtcttcctactcttcatcaccttccccatcctcttcattggatggggaagtcagagctccaaggtgcacatccaccacagcacatggcttcatttccctgggcacaacctgcggtggatcctgaccttcatgctgctcttcgtcctggtgtgtgagattgcagagggcatcctgtctgatggggtgaccgaatcccaccatctgcacctgtacatgccagccgggatggcgttcatggctgctgtcacctccgtggtctactatcacaacatcgagacttccaacttccccaagctgctaattgccctgctggtgtattggaccctggccttcatcaccaagaccatcaagtttgtcaagttcttggaccacgccatcggcttctcgcagctacgcttctgcctcacagggctgctggtgatcctctatgggatgctgctcctcgtggaggtcaatgtcatcagggtgaggagatacatcttcttcaagacaccgagggaggtgaagcctcccgaggacctgcaagacctgggggtacgcttcctgcagcccttcgtgaatctgctgtccaaaggcacctactggtggatgaacgccttcatcaagactgcccacaagaagcccatcgacttgcgagccatcgggaagctgcccatcgccatgagggccctcaccaactaccaacggctctgcgaggcctttgacgcccaggtgcggaaggacattcagggcactcaaggtgcccgggccatctggcaggcactcagccatgccttcgggaggcgcctggtcctcagcagcactttccgcatcttggccgacctgctgggcttcgccgggccactgtgcatctttgggatcgtggaccaccttgggaaggagaacgacgtcttccagcccaagacacaatttctcggggtttactttgtctcatcccaagagttccttgccaatgcctacgtcttagctgtgcttctgttccttgccctcctactgcaaaggacatttctgcaagcatcctactatgtggccattgaaactggaattaacttgagaggagcaatacagaccaagatttacaataaaattatgcacctgtccacctccaacctgtccatgggagaaatgactgctggacagatctgtaatctggttgccatcgacaccaatcagctcatgtggtttttcttcttgtgcccaaacctctgggctatgccagtacagatcattgtgggtgtgattctcctctactacatactcggagtcagtgccttaattggagcagctgtcatcattctactggctcctgtccagtacttcgtggccaccaagctgtctcaggcccagcggagcacactggagtattccaatgagcggctgaagcagaccaacgagatgctccgcggcatcaagctgctgaagctgtacgcctgggagaacatcttccgcacgcgggtggagacgacccgcaggaaggagatgaccagcctcagggcctttgccatctatacctccatctccattttcatgaacacggccatccccattgcagctgtcctcataactttcgtgggccacgtcagcttcttcaaagaggccgacttctcgccctccgtggcctttgcctccctctccctcttccatatcttggtcacaccgctgttcctgctgtccagtgtggtccgatctaccgtcaaagctctagtgagtgcagagatccgtgaggagcagtgtgccccccatgagcccacacctcagggcccagccagcaagtaccaggcggtgcccctcagggttgtgaaccgcaagcgtccagcccgggaggattgtcggggcctcaccggcccactgcagagcctggtccccagtgcagatggcgatgctgacaactgctgtgtccagatcatgggaggctacttcacgtggaccccagatggaatccccacactgtccaacatcaccattcgtatcccccgaggccagctgactatgatcgtggggcaggtgggctgcggcaagtcctcgctccttctagccgcactgggggagatgcagaaggtctcaggggctgtcttctggagcagccttcctgacagcgagataggagaggaccccagcccagagcgggagacagcgaccgacttggatatcaggaagagaggccccgtggcctatgcttcgcagaaaccatggctgctaaatgccactgtggaggagaacatcatctttgagagtcccttcaacaaacaacggtacaagatggtcattgaagcctgctctctgcagccagacatcgacatcctgccccatggagaccagacccagattggggaacggggcatcaacctgtctggtggtcaacgccagcgaatcagtgtggcccgagccctctaccagcacgccaacgttgtcttcttggatgaccccttctcagctctggatatccatctgagtgaccacttaatgcaggccggcatccttgagctgctccgggacgacaagaggacagtggtcttagtgacccacaagctacagtacctgccccatgcagactggatcattgccatgaaggatggcaccatccagagggagggtaccctcaaggacttccagaggtctgaatgccagctctttgagcactggaagaccctcatgaaccgacaggaccaagagctggagaagaggaggcagctgagagcgaggaggatgacaacctgtcgtccatgctgcaccagcgtgctgagatcccatggcgagcctgcgccaagtacctgtcctccgccggcatcctgctcctgtcgttgctggtcttctcacagctgctcaagcacatggtcctggtggccatcgactactggctggccaagtggaccgacagcgccctgaccctgacccctgcagccaggaactgctccctcagccaggagtgcaccctcgaccagactgtctatgccatggtgttcacggtgctctgcagcctgggcattgtgctgtgcctcgtcacgtctgtcactgtggagtggacagggctgaaggtggccaagagactgcaccgcagcctgctaaaccggatcatcctagcccccatgaggttttttgagaccacgccccttgggagcatcctgaacagattttcatctgactgtaacaccatcgaccagcacatcccatccacgctggagtgcctgagccgctccaccctgctctgtgtctcagccctggccgtcatctcctatgtcacacctgtgttcctcgtggccctcttgcccctggccatcgtgtgctacttcatccagaagtacttccgggtggcgtccagggacctgcagcagctggatgacaccacccagcttccacttctctcacactttgccgaaaccgtagaaggactcaccaccatccgggccttcaggtatgaggcccggttccagcagaagcttctcgaatacacagactccaacaacattgcttccctcttcctcacagctgccaacagatggctggaagtccgaatggagtacatcggtgcatgtgtggtgctcatcgcagcggtgacctccatctccaactccctgcacagggagctctctgctggcctggtgggcctgggccttacctacgccctaatggtctccaactacctcaactggatggtgaggaacctggcagacatggagctccagctgggggctgtgaagcgcatccatgggctcctgaaaaccgaggcagagagctacgaggggctcctgggtgagaggctcagggagaggggtggggaagagtccaaggaggagtgtgtctgggttgggggccacaagggagcctggggatggggtggcactttcggatactagctgtggcccatgcctggtggctgagcccagcccggcccccagcaccatcgctgatcccaaagaactggccagaccaagggaagatccagatccagaacctgagcgtgcgctacgacagctccctgaagccggtgctgaagcacgtcaatgccctcatcgcccctggacagaaggtcagagcacgggcccaacccaatgctgcaggacaggcgtgagcaggggatggggcatgcacggagctggatggcttcgcagtcacctcgtggccctccagggcc

SEQ ID NO: 10353 - DNA, 12195 bp, Homo sapiens
cgcgggtggagacgacccgcaggaaggagatgaccagcctcagggcctttgccatctatacctccatctccagtgagttcaccccacacagccagccctgggtgctgctgcgtacatgcaaggagagggtgtcagagctcgggtaagagggggtgcagggacagaagcaggaggccttgagattatccgactcagtaggggagcctcaaactggctctgatagctaagctcccagaaatcaaagtactcttcattcatttatccaacaaacatgcatggaaagcctgctatgtgctggacactgtgctggccctcaggatacagtgatgaggaagagagatgaagtttcattcctcatggaactgatatgttattgacagacagcagcaagtaagtaaatgaccacagttttgaactctcctaagaatgaagactttttagtaagtcagactgagctgtcattgccctggggaagctacaagaaagcttccatccacttggggctatgcaaaagaaaaagactagttatccttaaatatcagaagcccaggctgaaggtactcacaggtgtagggactgaatttatattaaccaagtagtttgggaaccccaagccaaggaagaagaaaaagaccaaaactggtaaaagtcctagagtcccatatacttgaaaccattttactgagaatgtaaaacttttttttctttttttgagatggagtctcgctctgtcacccaggctggagtgcagtggcaaaatctcggctcactgcaacctccacatcccaggttcaagtgattctcctgcctcagcctcccatgtagctgggactacaggcacacaccaccacacccgactaatttttgtatttttagtagagacagagtttcaccatattggccaggctagtcttgaactcctgacctcgtgatccacccgcctcagcctcccaaagtgctggaattacatgcatgagccactgtgcccagcccaaaagattttttagaaattgaaattttagttatggaaattaattcagtgaacaatggtcccctggtcagagtgagggcttacggaggtcaggtgatccatggagtcctggcccaagtttatctcacagttggtctcgtggctccgtggacccatcccatggtggttacttcccaagtgcataattgggatgtagatatttagcaaccagctgacttcacactagttccctgacctgtccagtctaagagtcattatggccaagtggaagcccctggaaagaagaaaacaaaaaagaaaccaaaacttactcagtgcacaggttacatgaatgagtatagctgaagagagaatttttgaattagaagacagatgagtggggattacacagaacgtggcaaggagagtaagttggtagaaccattttacagatgggaaattaaggccagaggggagtgtgttcctgagatccctcctgaggttagtagcatggctcggactagatcctccaaagtctcttaactcctggtctcaggctattttccacaaagagctgggggcctctgtggggtgaagaagacttaggacaccatggggcaccattatgaggccatttcctcctaggagaaaaaaaatctctgggctctgaaaggagtagaattagggtaggaaattaagagaggctaccgaccacctcctccaactaaaattggttcttttggtgccaggaagagacacacctggtgggggagggaaggtggtaatggagggggtgctggtagtgtctcccagatagacccatccaacaagtctcatggagaatgagacggtcactcaggtcatctgcgtattcttggcattcttgctgcctagagagagagtctgatggagctaggtggccaccaagctgtcccactccccaagacagtttggaaacatgggcaccaaggcatgtccctgtctaggggactggggaaatatcccatagcagtgttctcacagtatggggctggccatgaataccccaggagtccaacctccctttgtccagctagaccatggtgtcctatgcctcaggcagggaatgtggtccagtcatcagtggctgggccgtctgccatacatggtgcaagccatggcgttttatgcagaaagtcctgctagcatttgattttctcagaatggagctgtgagcatggcaggcaaccactgtttcctggattcttcaccaagacaccccaagttcctggtctctccccgttatcctcatccctgaccctgtggttctcagagcctccaaacacactcaggctaagcactccatagacaggggaaatttggaaggaacatctagggagctcagaaaagccaatgtccctagccccaggcccacttcaaccttctctctgtcagtcctgcctgcccctggaggctggttacatgaagagtaaccccctgcttgtgtatagccccccagttttgtacaggtttagagacagttcccagcagtaggaacagctgccgaggtgggagagggcttctcccgatagccgggggacttcctctcccaggaacaacagggtggggtagagcaggcttgtcgttgctgagatagagagagggaagggaaacaacaaggaaagtgggggcactgggtccccaaggttcctggcacagcaagcagtgaagttggggcagcctcaggtcatgtagtgggggcaggtgacatctgctttgactgctcctaagagatatgtactcatctcctggattccaaactgcagcctgggacatgttttcttatataaacagcatcaaaagatgtgtgagttcccaggctagcccactgaaccctacctagtgggtgctcattgtcccccagagcccccagaagacaagccgtggctttgtgatgggcctggggccaggaggacctagggatatgttgtgaagagctgagaagactctggaaaaaaggggctctggagccaagcaggagcccgcccaggactcctcacgtgtccaagtcacctagggagagaaacagagcagcccaggttggtccctggaagagagcagcggaggaggggaaaggggagagcccctggggagagctttgaaagtcaagtgctgtttgctcagtgtgtttgcctttccgaggatgtgtttttttttccctccgttagtcagcagtgggagggggagagagacgggtggtagggtgcagggtacctcctggctgcaggcatatgctttgagtgcgtgttcatttacctcctctggacttcctgccttctgttaccagggatcaagacacaggtcattaggcgtgaggtaatggggcatctcttgttctgacccctggcgccagtcttggagtcctgacgctgcagaggagccccagagtcacatttcctgttggggcccatcctgctcatatgcggcaccatcagacttctgggcaggcaagattacctgtgactctgtctgatggtctcgccatcaatatcactgagagtagctgtgtatggagtcccgaactggtacaggataaaacagggggctgaaaagggaatgaatgggcacagtttctctggcatcaaaagtcacatccagaattgatatttcctgttgagtaaaaatagaaatataagttgctcagtggatgttgagtgagccctattcatgtgccccactctgtgccaagcaccaggaaggagggaagggaaaaatgataagatgttctccccgttctccaggagtttatgctccactaagaagtcagagctaacatgcacagaacagtgtggcagcgagagcagaaccgtgtggccagctccatgcttgccgcctagcaagcgtgattgcacttcatcctcataacaacttggtgaggtgtgttgctctgttgtcccattttacagcagagaggactgactctcagtgaattgaaatgtctcagtgaggtcttccacagcaaaaggcgaagcacagagaaggaagtccatgtgggctgggagttcacccagagattcatgtaggggcaatgtgggctgtaccttgcaagatggtgggatttcaatgaggagaagacaaagtgggaggaagctggagacaaggactgtggtctcttcctttagaagtcagttcaatctttttttccttgtggaagcagcataactctaggtggttcctctgtatctgaggacaagctttgtagaggtgacaaaggggtcctaggtcctatcaggcaagcactcgatatgctgccagttcattctgtccattgtgagatacccattccagagcgcttcctctgtgccaggctctacggaggttctggatgttaaagaggaagcaggcatggccctggccctcccagtcttgtgggagattgatcatgcccatgaatagtgaccatgtggtcagagccacagggtcaattccaaatgcccctgtttctcttttgtgttactcacctgactctgggtctttcgtttcttccattcattttttttaaacaaatatttcctgcccaccttctgtgtgccaggcctggggatgcagtgggagaagcctctgtcctcctcagtggaggcgctaactcagaacaggcagtggagaaaaacaacatgacctggagacctggtgccccttccttccccagcatctttgaaattcttttggttgttgttgttttgagatggagtctcactctgttgtcaggctggagtgcagtggcgcgatctcaactcactgcaacctctgcctcccaggttcaagtaattctccctgcctcagcctcccaagtagctgggattacaggtgctctctaccatgcccagtaatattttttgtatttttagtagagacagggtttcgccatgttggccagcctggtctcaaactcctgacctcaggtgatccacctgccttggcctcccaaaatgctgggattacaagcatgagccactgtgcctggcctgaaattcttcaatatctacctgcccttctgccagttggtgcagccacagtgggctgcttatgcatatcctggcctggcttggtggggagcatggctgagggagagccggggcacccatcaattaaggaggtaaagatcagtctgactgagatgcctcctgccacacttcctcagctgccagcaactgacaccattaacctgatttccttccccctctgttgactgcactgactattggactgaatgggaaacagccccgtgcacctcaaaatgcacttcccctcctgcagatgcatcttgcaattaggcccaaactgtgagcctgcatgctcctcccctggccctgcacaggcaacaaagctgaagttaatcagaggtacaaatggctggctatgcctctctgacacgtaacttctggaacatgtatcaatgctttggaaatgaaaagctcctggtattgcaatgccaggctggtgcccataagggccagaaaacattccttgggcaaagccagggggagtgggtgatctgatcccagctcaggtttgttgatttgttgttttgtttgtttcgttttgtatggggcaagggttgagggtatgaaaaacttacactatcatttactaccgtagtccccagaacccagcacaccagcacaaggcctggaacagggataccttttttgaatgaataagtctttttttttttttttttttttttttttgagacagagtttcactcttgttgcccaggctggagtgcagtggcgcgatctcggctcactgcaacctccgcctcctgggttcaagcgattctcctgcctcagcctctcgagtagctaggattacaggtatgcgccaccacgcctggctaatattttggtatttttagtagagatggggtttcaccatgttggccaggctggtctcaaactcctgacctcaggtgatccacccaccttggcctcccagagtgctgggattacaggcgtgagccactgtgcccagccttgaatggataagtcttaagggatatttttggaaaggatattctaaaaaatacccatgtctctacactattgcagaagggctttcagttttgatggcagcctttcaggccagcctacacgcaactaaacttttccataacagcatcacacttacacaagaagaaggttttataatccacttgccattatttaacatagttcttcctccttaactttcaagatctgagcactataatgttcttctttttgtttttgtttttttctaaatcaaattaaggtgagtcacctcaccttgggcctgagttggacagaaatctattcttggctatattccccacccctccaccaccttggaaccttatagaactttatgtggttcaggaaaatgagggcgaggcctcagatcttcaacccatgacagctgtatgcccagctccctgccttcctgtcttacccccagctagggcacaggactgactattgtgcccagagaggtgccagagcctgtaacaaccccagacttcccaggtccagccacatccaccccagagccccaaaagatgatcttcagagagacctttaaaacacaagtagctggtcacttccatccagaccagaacccaagatggctgtgctcttgctgagacatgttggttgtcattgcctccgagcccactttagccctcagctctgtaccagaaatgctgttcctttgggaatcacagccaaagaagagatggagcagttctggaataagaacacaagttcaaactgtcccatatctccccacatcactatctacagttggtctcttcccatggcgatgtccatctgccaccgtggcactggtattgctttgagtgcaggggtctctctttttggcatgttggccctgttactccctgggaactttgagtcttatttggaatgcgtgaagtccctgtgtccggggccagcactgatccacacagctaagtttgcactcatcttccctctcatgtatcatatctggaatggggtctgacacttgatgtgggacctaggaaaaggcctgaagattccccagctataccaatctggagtggttgtcccggttcttactgtactgtcctctgtagggctggcagccatgtgaagaacagaggttcccagcatcatcttcctacacattattacattcacccatctttctgtttctcacttttatctccagcctgggaaaagttctccttatttgtttaaatccttttgtgcttttagatccccttggagcagtagagtaccttgtagaccataagagtggaaaagggtctagttttctccttgtttctaaagatggggtggctgaaaaaactccccttttttgcctacagcttgcctctctgggcctagaagtggttattctgtctccatattggcctttgatttgtgctgagggtcagcttttggctccttcttcctgagacagtggaaacaatgccagctgtgtggcttctgccctgggggctgggggtgaggctttgggtgccactgcctgtgggttgctggcttaaaggacaattctgttcattggtgagagcccaggccattaacacctacgcagtgttattgaaagaagagaggcgggggtggaggggaattagtctatcccagctagagggagataaagagggctagttagttcttggagcagctgctttgaggagaaaatgtatagcttttgacacaacaggaagatccagaaaattatcattgaacatattaaaggttatttctttttcttgcaaaacacacacacacacacacacacacacacacacacgcgaacacacgcagctgatgattctactctcccagccccagccctgaaggggacccagaactccctgcacaaaggctgtccttcaaggggagggtgaaagaagtggaaaatcacattttcattctttagcgtctccatacaacagccagaactgggcagaagctaattatatcagaagcatactccatgttgctgcatcagctttgggatgttcatttttaaatttatttatagcttgtctcattcctcaaaggagttcagggagctacaaaaataaagacaataaaattgaaaaaaattaaattaaaaaaaccatgaccagggaaaatgtgcagtagaatgaagtgtcaattatcacgttttctgactgcaaaatctcccccacggctgatgcaccatcatttactacaacagcccctcttgttggacatttccagtttatttcgtttgggatggtttgttgctgttgctgtggttgtggttttgttttattgaattttgtgttagctgcagctaataccatcttgctgatggctttgcgctgctcttgaatgattactcaggataaatttcctggagacggattataggatcagaaggtctgaacttctgtgtggctctagctacaaagcaccagattgctttccaagagcgttgtagcaatttataatccaacactcagcctattttttggctgggagtcaagccccagaatgtgaaggaggggtcttggcctggagcaggggctgagggatgggtgcacaggacccctccttattggttatttatggggatgggccaggaggagcagaatagaggcccctgccctcccagttgctccttggagtgactgaccccataggggaggggcgaggctacctcacatttagaactatgtagttggtgatggtcaaggtcctaggtctgatgggcatcctcctccctctcctcctcagccagtaatggctgcactatgtcgtatgtcctagatctgggtcccttttgctgtgggaacaccaataatacttacgctgtttcctgccggaaacggtgcaggagggctgtggcatggtagtgggccctggaaaccatctagccttcatgaggaagggcagttaaagcacaggcatgtatgatgttggtattgattaaaagcctcacgggcagagaaattcgccatctgccagggccccagccatacgagggctccagccatacatcctccaggagactgggacctctccaattgcaggagccttgccttccccatcagattaggaattccccgaggatggggacaatgtccttcccacctgcttgagaactcctaaggggcatgtactctgtctccccattgtatctggaacttcctgggagcatagctcctgtctccgtcctcagactgggaatcccctaagggcagaggccatgtccttccacccacttgggattccctgaagttggggaccacatctctgatgtacaatgctttgtatgtactgactgctgcaggattcttggagtaaatgggcagtcaacttcttggactggtattgaccatctggacttcatcagagtgtccaagactttgccattcattagacaggggccatgtgcacaggcagagccctggcctctggcttctggctcctgactcctggtccctctgctttaatttggctaatggcagaaccagactcctttctgggctgccctggaaggggatccttgaatgaaagaggatagatgggaaggtggcagctgacatggttacctcttatgccatgggggggctgctctctctggaaatttaggcctggggtcagggcactgttgagcattttacaccctaggccagaggaggggtgacctgtggagcagggctaagctagtagcccatgaggtatgatgtgtaggcagcacctggggctcacagagcctgttacccatgttatctcctctgaccttggaaagagctggggtgtatgaacaagtatttataagtttacaaaaatcatatgaggaaactgaggcacggggaaggtaaatgacatgccctaggttacacagcttataagtagcagggattctgcccttctgtcacaccaagtcccactgtcttttcttcctggagtccctgtgactgatctaaaggccacatgtttaacagaataaggaggaggcctctgttgcagcaaaccagctaccccacccgcacacagactctaagggacatcctgctttaagctgtccttagttactaatacctcagtgagaatgagtttgaaattttctcaagagccatgggagactaggaagtctctaagcttcatagagagcctggcttggggggacacaggagccaaaggcagaggaagaagtggcagctttgtgcccccagaaacacgtgctcctgacctcacagttggccacagccagccaactctcccatccttctcccaccactttcccgtggggctaacttcaccctgtccacacggagtgacttaacagtttaagccccagagtcgggggccggggtacctgggacaagagtcctgagggaaatggggtgaggaactggaagtgccacagggctagagttctgcccctagcctactggagctgtgccccacaggctggccccactggactgcgctgcctccaagccatcctgggcatctccatgtgtagctgtcacgctcctcccactaaacgcctccctgtgcttcctctgcagttttcatgaacacggccatccccattgcagctgtcctcatagtaagtggatcctttctccatctcttgggggtagggtggagggggagggcgtctgcagtgacaggctgcccagatttggcctttctgcacaggggcctcagaagacaggctccacagccagactgaaaataggatcgaaagtttatagagggtgtggcccctccccaactccagccgaacaggggcctctgcctccaggcctggaagaccggaggcttagtatttagagaaattaaactttcttttaaaaaatagctatccaaatttttaatttttaaagtgaaacatgtgtattgtagaagtgatgggaaatccagaacagaaagctcaaagagaattaaaatcacccataatcccactggtaacatttttaatgtgtttctttccagtctttttttaaggcctatgatatgtcattttctacaaaaataggaatgtgctatgcatgcagttttgcaacctgctcttttaaatttaggaatatgccacacacaattctccatgccactgaatattatgatggtggctttctaaagcaattttgataaaagctgtgtgtgagctgagccatgggggtcaagcagcatgctcctacagaaaggcctgggcccctacgagcctgcagccccctcacccagcctcccatccccatcttctgtgatggctgcagttccttaaaaagatctgcttatttcccccggggccagtgtccctgagctgtgtagagttcacagcctgtcggatacacttgggaattcacttccaatgtgatgtattgagctggttcctggcctggctcctgggggaactgtgggtaacagaggccactgagccagccaggtggctggggcaaagcactgtgcagtttcgtaatcactctgtttacgttatcccgatgaggactggggagatgagcaccccgcctgctgtctgcagagggggccgtgctgacctaacccgagatctcctccctgcttattcccagccaagactgggcaggacagggagtcttggccaggacagggagggagcagcccctgctctccagcttgaagtcctgaacttgttggggacgtttccatgagatgactgtggggatgatgaaggtgtctccaactaaaagatcctcttaggagcctgctccctgacagccctctcatttcccttccagtgctgagcgtttccagtgtgggagggacccacaccctgggccaccctggcctcacttgtgcctctgtccacagactttcgtgggccacgtcagcttcttcaaagaggccgacttctcgccctccgtggcctttgcctccctctccctcttccatatcttggtcacaccgctgttcctgctgtccagtgtggtccgatctaccgtcaaagctctagtgaggtgaggggagggtccgggcgagggcactgggcaggcaggtcctgtgtcagcctcaaggcttgctcgagtgatggccaaaccacagctgtttggtcccggaacacacccccattgctgggccttgctgtagctggtcctggttggtcagagggacattggcctgtatggtttcccagctcgccatccctgagcaaggacttgcttacatacctcccag

SEQ ID NO: 10354 - DNA, 549 bp, Homo sapiens
cgcgggtggagacgacccgcaggaaggagatgaccagcctcagggcctttgccatctatacctccatctccattttcatgaacacggccatccccattgcagctgtcctcatatgctgagcgtttccagtgtgggagggacccacaccctgggccaccctggcctcacttgtgcctctgtccacagactttcgtgggccacgtcagcttcttcaaagaggccgacttctcgccctccgtggcctttgcctccctctccctcttccatatcttggtcacaccgctgttcctgctgtccagtgtggtccgatctaccgtcaaagctctagtgaggtgaggggagggtccgggcgagggcactgggcaggcaggtcctgtgtcagcctcaaggcttgctcgagtgatggccaaaccacagctgtttggtcccggaacacacccccattgctgggccttgctgtagctggtcctggttggtcagagggacattggcctgtatggtttcccagctcgccatccctgagcaaggacttgcttacatacctcccag

SEQ ID NO: 10355 - DNA, 8618 bp, Homo sapiens
ccagaagtacttccgggtggcgtccaggtgatggcctcaggggtgaggggtgggaggtgctttgcaatgtgcagtttggtgtacttgctagactcatcgttatgagagtaatagggtcgtgttccctccaaaaaataaaaacaaaaaacagaaatgaaggaaatagaaatatccacatcttattccaccgccctaatataatagtctgccaacacacgcacacactgaggttgacatctgaattatttccttgggcgatatggtcaggactggaattgctaggtcatgataaatgcacattttatgcccttcattcattttgccaacatgcttcccaggagggttgcatcattctagtggtcaggctgattgctgatgcatgaaatcggcgggcacctgattcaagcagtgttatgataacacctcccagcccacgtgagtccagagtgtagctgtaagccttgacttgagggagcctctcacagccattctcatggatcacatttgccctcatgagctttggatccatgcacgcctctttcctcctcaaaattttctaagaatgttctctagggagttctttctgggagtgattctcccagattcatagaaactcatagattcaaaaaattgtaggaaaaaatttaaagaacgtctaggccagtgtttctcaaactgccaattacagcccatcagtgggtcatgaaatcaatatcatggatcacaaccagcatttttttaaaaatgaaaaaaacatcagactgtattcatagagtaaagcaagctttgcttcatgaaacctttgtgttggtcatggaggtgtgtgagtactgatttgtgagataaaatatatttctgactgcaggttgtggtcagaaaggttaagtacctttcccaagtgcacatagttggctagaaactagagttgagatacttattagcaataataaaatttagatgcattttggacacaattacctgccccaaaggatcaacatttgtataaatggctttttgcttggatgatccagaatggcccgacacccacacgaacaacatagctttttgacactcaaaaaattcaaagtgctgcacaagctgttctacaaagttcatttcttctgccagagaaacagcccagtctctgtggcacccagtctgaccctggagatggtttatcagggaaatcaacttcctgcatcccaaactggcctccctggcactgatgtgcttgtcgaggtgcagctttggggagcaggaggcaattctgttgccatggaaacctctggccttaccccgagacgaaacctatcatttcagcacatcactggccagggtctaaagagctccttgatggggtaagcggaagacggggttgaacgctttgagtttggtcttctgttcctttggccagctgtctcaaggttcagattgttcacctgtaaaatggaactagcactgcctgcccagccttagctcagctccaggctgtgcagcagaagtacagggacagatggcgacctggggttgacaatgcccaggacagcagtaattgtgccccacatcaggctgtgtctaagcattgtacataaacgatctcattcagtgctcacaaaagctcaatgggctggtggcattgtcttcccccttcacggggtaagaagctgaggcctagagaggtaaggccattcacccacacagcggtagcaggtggagctaggcttcaggcccaggccgagccctgagcctgccctcttaactgttccactctgttccccgccacagggacctgcagcagctggatgacaccacccagcttccacttctctcacactttgccgaaaccgtagaaggactcaccaccatccgggccttcaggtacgagtccacattcccccaaggtaggagtggaacaggggtggggccagggggcacaggccatgagatttgattctcaggactccacttgggaaggccaaggacacgttctctctcaagctgcctcaggtcccaaggcccaagggatatccaccagcagggacaggccaggtgggctcccactgaatgttctagagaggaaaattccagctctgtagacaagcccaggacctctgtgaggcagagcatgaaaagagacaaagctgggacaagtcttcatgtatcaacgctagaaagggccttaggtgcgggccaccctaagcccttcttttattaaggagcccctgtgtgccaaacactatgctgagtactgtacaggccaatcccactcattctgcactgcaaccctcggtgctgagaatggtcatttccattgcacagacaaggaaactgaggcacagagacgttctataacctctctgtgtaaggtgccacaaagcccagacttgaacctatttgttcatgcaacaaacatttactaagccccgactatgtgctaagccccatgccaggcactaaaaagatgagtcaaataagccgctgccctgcaggcgtttacagcccagactttgagcaggccaggataaatccacgtgacaagtattctgaaaaaagcggattcaagggctgtgggagcatagaagagagacagtccgggaaggtttttgtaccagaggtgtcatcagaactaggactcaaaggaggggcaggagttcaccaggctgaggaattcctgaaaacttcagtgcccctgccatcgtctcactaccctgagtggtgatgttggggtggacaggagcatctgaggttgcctggggaatgagggaagctgttgtttcccactccccaagagtctgtctgatctccagaggcatctctcttccagtcaggcaggccagagacccctgacacacaaagttgggctcttttctcatcttcatccagagagtgataataggttatttttagggtggcacagctgcacgaagtatgacagtaaccatgagacaccaagcactgtgtccaggagtaaccatagggcacaaggaccagccaagggccagagaggcttacatctcctccccccaacccctgaagtccagcttcagccctggagaggtatccaggcccctctgcccaccctggagcacctagggccagtggaaatccacctcttagggatcttgtctaagtaaagaagagcagagcaaagctctgccctggccttggcgctgctccctggacatcccttgcccctggacaagcctatgctgtgtcttccacaaagaagcttgctggggactggattatgactctagagtctcctcccagcctcctcttctcaagcctgaacttctcccgttccttcaacttccaggtccctcgacattactgagcctagcctttgctctaagttttggtgatttccctctctcaattggtgtctcagagggccctggggtagagagatggtgactcttctagagtgggccacagccccttgtgtgcagatcccagcttcctgtaaacagcctcagatcaggccaaacctgtggtcagccagagccactgctacccagtgaggtcttccacaccctactgacacggtgaatgatttttaaatttgaatgaaaggctttttaatcaaccccatacacatttaatgcattggctttaatccagcagcctgttgagagctattagcacttattgattgcccacttactgtatgccaggcaccgtgctaagtgttgtatgtgcattattacatttaatcctcacaaggaccacataacataggtacgaatcgccacattctccagatgcagaagcgagacccagagaggctgggtaatcaatccaaggtcacacagactgcgggggctggcgctgagcttggaacccaggtttgcctgaccttctgggctttcctaagagatcttattttttcccaaaagagtttcaagagtgcccagcactgggctcagtggcgggctcggaggttgttttcgttcatgtaggaactatcacttccccatttttttcataagaaaactgagtctcagtcctgatacacagccaggaagttgtgatgttcaggctccaacctgggtttacatggctccgaggctggggctcttttctagtcctcagacacactgtcgcacgcctgtggcagaagctcccatctcacacttgccgaccctcaactcacacagtcctgagacccacatacgctgagcgcctcacactcctataacacgcacatgccctgatgcacacacattttcaacacgcacttactctacccttcaggcatggtttcacactcactgcagacacgtcaccctcccacacgtctccaccctgggggtgtgcagtagcatgctctctcccacctcagaacctcccttcagtcccctcagacacatgccctctctccacgcagagacaatcaaagctgaactaacaccttccagggtgaaaagcaaatgcccagtaaggtacgtcttgggtgcctccgtgtcccctgagtttggtcctatcaaaccagcgatgatgaggcagcttttctttcgttccttcctccatcatcaaacaagtgctcctgcatctcctctgggccgggcctacgtcagcaaggtctgagggaagcggccaaggagagtgatgacggcagcccaggttgatcagagaaaggaggcaggtccatgcgcagtaactcagggaaaacatgatgaggacctaaggatgagaaagaagcctccagagttccctgtgcagagagattccatcaatttcagagggtcaggggagtgccatgcattcatccaacaaatatttattgatagtgccaggtgctggggtatattggtgaataaaacatcttcatggaatttgcagtctattgagggagatgattataaatagctagagaaatgcatgtacagcagatactgtggagcaaacaggttgcagacaataataggggaaacctactttatagtaaggtagtagccaggaagagcctctctgaggaggcagcatttaaggcaagccctgaaggttgagttgagccagccttatgaagagcaagggcaaaagccttccaggaaaagggaatagtgtgtgcaaaggccctggggtagggaagactttagtattgtcacagagcttttaaaaagctgagtggctgcagcatagtgtgtggggtgtttgtggcaggaattaggttggcaggagggggttcttcatcctataagcagtggaaggtcattaatattcttttttatttgtttttttttttttttttttttttttttttgaggcagagtctcactttgtcacccaggctggagtgcagtgaggtgatcttggctcactgcaacctccacctcccgggttcaagcaattatcctggcttcctcagcctcccaagtagctgggattacaggtgtgcaccaccatgcccagctactaatttttgtattattagtagagacagaattccaccatgttggccaggctggtcttgaactcttgacctcaggtgatccgcccgcctcagcctcccaaagtgctgggattacaggggtgagtcaccgcatccggccggagatcattaatattctaaacagtgggggagaggacacagtttgcgatttagatagattaagccagccactgtgtggagcatggactgtagggagacagcaggtagacgtattcaggaagctgatgcagtagtccaggtgagagtttgtggtgggcaggaagcaggatagagggggagggaggcaaggactcttttagagagagacataagaggacttgccaaggggctgaatgtgaatccaggtgattcctgggtgagaaactgggtaaagggaggtgccccttattataatgggaaagacctagagaaaatggatcttggggtgaaaacaagagtttggaggaggtggggattctggacaggtttgaataagcagaaaggagtggggtggacattccagagagggatagcttacatgaagtggccacggtggcatgtctggggactggaggggccctggagcctccctctgcaggtagggagactcctaggagctatgtggaccaacactgttcccttaggagcttctcatcctccctccaggtatgaggcccggttccagcagaagcttctcgaatacacagactccaacaacattgcttccctcttcctcacagctgccaacagatggctggaagtccgaatggcaagtgctattcccctctaccctggcctctgataggagggtggggccagagcaagagcacacaggtacctggggatgaaagagaggataggataccagatcgtgtggacaccaagccttcctgcttcccccagccctggtggtcctcctagtgtctagcctgtgctccttttccccatatcactgcctggaggcttgtgtatctgaggtgtgtgccagtggcaagaacagttgtggtgaatgtgtatctgcagtgggtcatatgacacccacattgtgtgtgtttgtgggccagctgaggcgtgcatgttaaagggtgtgcaggggctagggggtaggggagcatgagcttgtgggacatgttggctcctggggctccagccttcgcagcccttgtgtgtgtctggtgacgtgtgcatgagttgcagggctggagtggaggcctggctgagctgctctctgccccgaaaaggagtgaggtagaacaggggcctgtggctctaacccctgagcgcccaggtcagctcctctccctccccaggagtacatcggtgcatgtgtggtgctcatcgcagcggtgacctccatctccaactccctgcacagggagctctctgctggcctggtgggcctgggccttacctacgccctaatggtgagcggcagtgggctagggcagaggaggggtcagacaccagcactcccggagcaccttcgtcactggagacatgagacactcccaggccttaccccaatttcatttgcatctgatgccagagggacagtgcgggcaggaaggctgaccagcaggccccagggcccaggccccagacaggtggaggttggggagccacatgactgaccctccctgtgcctccagggagggctgctctgagcaggcagtggatggcagcaaaaggaatctggggccctggcccctctccagccttaagaagagccattctggtggctgaggacagaactaagcgaccatggagtgtgcgccactggcttgctccccacaggtctccaactacctcaactggatggtgaggaacctggcagacatggagctccagctgggggctgtgaagcgcatccatgggctcctgaaaaccgaggcagagagctacgaggggctcctgggtgagaggctcagggagaggggtggggaagagtccaaggaggagtgtgtctgggttgggggccacaagggagcctggggatggggtggcactttcggatactagctgtggcccatgcctggtggctgagcccagcccggcccccagcaccatcgctgatcccaaagaactggccagaccaagggaagatccagatccagaacctgagcgtgcgctacgacagctccctgaagccggtgctgaagcacgtcaatgccctcatcgcccctggacagaaggtcagagcacgggcccaacccaatgctgcaggacaggcgtgagcaggggatggggcatgcacggagctggatggcttcgcagtcacctcgtggccctccagggccgaggcctctcactattcagacatcgcagtctcctgccctgggcctgtgggggcccatctttcctctccttctattgccttcccccagtgctgccctcaggccttgtcttctcactcatccaccaaggagaccgacactctggactcccccagctcacacgggctttgtcagggcctccctctctgcgaatggtcaggggctttccctagggcactgccccgagcttcagggcagggacctgggggcagacagcgaggccacccttgtattgagggtgagcccctgcctatggccctggcccagctctcctctcgtttcccactctgtctctttgtctctgtctcactttgctgtggctgtccatgtcattctctgaccttgggatgtacctctgtccctgcctctctcatccttctatgtcactatctgtctccgtattgtaatttctgttggtacccaagtgccaggaagcaacgggatcagaggtggctccattgtagggcggggcacacagacacatccatgcataccactctcagctgcccctgtgtcctcctgccacacccatgcccatagagacacaccactgccccccagctctccttcagccaagtacccggcacacccagacccacaccaaggcccaggcaaatggacatccatgcctgcacttgcgtgccggtccctgtgtaagccctctctggacccactgcaggaaacaagcccaaacctgtggtgtccaaagagaaactagtcagaaaaccaggccaaaaagataccctgtgacctcccacacctgcacacacacccagagctagcatagaggctattcccagcagccccagagtcccagtggcggtgcctgcttctctctttccagatcgggatct

SEQ ID NO: 10356 - DNA, 611 bp, Homo sapiens
ccagaagtacttccgggtggcgtccagggacctgcagcagctggatgacaccacccagcttccacttctctcacactttgccgaaaccgtagaaggactcaccaccatccgggccttcaggtatgaggcccggttccagcagaagcttctcgaatacacagactccaacaacattgcttccctcttcctcacagctgccaacagatggctggaagtccgaatggagtacatcggtgcatgtgtggtgctcatcgcagcggtgacctccatctccaactccctgcacagggagctctctgctggcctggtgggcctgggccttacctacgccctaatggtctccaactacctcaactggatggtgaggaacctggcagacatggagctccagctgggggctgtgaagcgcatccatgggctcctgaaaaccgaggcagagagctacgaggggctcctggcccggcccccagcaccatcgctgatcccaaagaactggccagaccaagggaagatccagatccagaacctgagcgtgcgctacgacagctccctgaagccggtgctgaagcacgtcaatgccctcatcgcccctggacagaagatcgggatct

SEQ ID NO: 10357 - DNA, 7688 bp, Homo sapiens
ctgctaaatgccactgtggaggagaacatcatctttgagagtcccttcaacaaacaacggtaaaagcctgtcggagggaggcaggatgtggaggggaggaactgtctctggccagcctgccccagttccgggcccctccatcgatcacccacacccagccatctcactccccaggtgcttacctgcactccagcctctccatatggtgcacctggagaggggccaggtgtgcctgagcattggggcaatccagctcccataggggagagggcaggaatggagggaagggagagagccccgctgccttttctctagctggtgggagggctagctagctctctctgtgagtctccattcgcctggctcctgcactattttccctccaatgataatagttagggctagcatcgactgcgctcttactacataccaggcacagtgccgagctctttgtacacggaatttcctctcatgcttacaacaacctcagtaggtagatattattgttattcccactctacagatgaagaaccaagtttcagaaaggtcccaaggccacccagccagtaagtgaccaagatgggtctcaaatccaaagctgcctaacacctaagtacatgtttgtcaccaacatactctgatgcctccatgaactctggctggcacctgcccaggctaagggctggctggggaagtatgagaggaacaggctgggcaaatatttgaccagccatcatcattactgcctaaaccaaccagcagtggttttccctgcagtgccccaagcacgggttccggctgcagcttttcccactgcacagagatcatgagcgccctttcatcacttactctgcatatttgttcccaaccaattccatccttctagtatttaacctgcccaaacgctgtgtgaagtgctgacctcagctcttttcaagctcacacggtgtttgcttgcacccaagcgggaggcctattaaagccattgctcaccctgggcatagctacccagagactaatgaccctctgcaagtgctcgggccaactctgaccaggctgaccagctgcatcccctgcctctacccacgccaggtacaagatggtcattgaagcctgctctctgcagccagacatcgacatcctgccccatggagaccagacccagattggggaacgggttagtagcagcctctgaggggttttttcaaagccaggacccccaacctaccatgccctgagacactactcaggacaatgggtaactaggaaataggagacattgaaggctgaagagttgcctgcagtaaggtcaaacatgttgttcttgatgatgtcctttgacaggttttcagtcctgcttggagggcaaggtcagcttagtgccctcccaggctggggatcttcttcatttgcaccccaggtatacactgagagcccacacagcactgtgctcagcctggggttgtattgttcctgttcatcctccagatggggtcccctccacaagcttagacgaacaggattctcctgtgactgtcctccttttgtgtgattttaatccctgctgcctctgtctttgtttgtactggtcagatggtccctagcgcctacacaatgaatctttaaagacttggggctcatgctgccctcttctgaatgaattcagtaaacacgtgcaagttccttctctatgcaaggtgagaagcaggcaaagaagtggatagagccaggcctccatcccaaagagctcatagtccagtagggtacaggacagtgtctcctgaatggctgagggcatgatgtgttcctcctctttggtgacagggcatcaacctgtctggtggtcaacgccagcgaatcagtgtggcccgagccctctaccagcacgccaacgttgtcttcttggtgagtgcaagttcccttggggtcctggtctctggctgcctcccaggcctaactgcccacctccacctccccgcaaccccaccatcatccaacaatctccctctccaggagtaaatccctcctgccagagatattgccttatcatcctagtgatagggaaactgaggcaggcaaggatagcacaaatgacccattgcagacttcagatggagctctgcagtagccaatgaggagaggcaagctgtagttataggctgcctgtctgtgggacagcccaacccctcaacacttatgcagcccgactataagaatggctgataacagaatgtgtgctgccacttcccatcttatgcccagtgcagacattgctaattgttcacagcattatttcccatggaacttaactcatcctcagaatccttctcaacacagcactccaggtaaccactagccatcaaacatgagataaaactaggccaggcgcggtggctcacgcctgttattccagcactttgggaggccgaggcaggcggatcacgaggtcgggagatcgagaccatcctggccaacacggtgaaaccccgtctctactaaaaatacaaaaaattagctgggtgcggtggcgggcgcctgtagtcccagctactccggaggctgaggcaggagaatggcgtgaacccgggaggcggagcttgcagcgagccgagatcgcaccactgcactccagcctggggacaaaccgagactttgtctcaaaaaaaaaaaaaaaaaaaagaacgtattcgcaatccttacactacttcatgtcaagttctgttgtgtcaggtgccttgactgacactgaagaattctaagaaccagtccttggcctcaaagatttagaatctgattagggagacagagctcacccagttcaagaggcccagcccggttcaaatccaaactgtgcggcataaactatgagggggccttgtccagggagacaactgtgagggctggagtaatcagggagggcttcctggaggagagcctcaaagggagagtcaattaaacagaaggaaagagggaggccatttgcacagtgagttggaagaaggaagctcaagtctctgattccagctttattccctcccctctccctacaccacacgcacaagcactcctttactaaagacacttcacagtgggaagattcagtctccgttaccgtctgacacacacacagcgttttacaaagcatgggtgcattcgcgatctctcatgagatttaaacaaccctgctagagaaaagtgaagtggacattttatttcagtaaacgtttatgaagcgtctactctgtgccaggcactaaacgtttatgaagcgtctactctgtgccaggcacaggcacaagaagtctcagttcttgggagtgccataatcaggaatggacaaacaatgatcagatctggctttgcgccagtgtcacgggaatagggaggaaggaagggtaggcgtgggggtcaggacaggatgcaggaggaactggtgcttaggtgagcgaaggatgggtgggagttcacaaggcagacaaaaggcagagcagcactccaggcagaggaacagctcaggagaaggcccagacggcaggcttcctgggaacctggaatgcagagtgctgggaaagcacagatgaagcatgagtctagaagggaaagcgagaggttataaagcacctggaacaccagcccacagggtttgactttagagatgatggggagccgttgaaggtccaggagtcaggcagtgaagtgattagatctgtttgagagtgatatctgacaactgccccattttaaatgaggtaaccaaggcccagagaggttgggtgagttgtccaaagccacacagctaactagcttcagtccctagagcagagttgatagaactctaatgggttttatactcattgtcacccctccccaccatgcctttccctaccctctactctcttcctctcccttctgcccaggatgaccccttctcagctctggatatccatctgagtgaccacttaatgcaggccggcatccttgagctgctccgggacgacaagaggacagtggtcttagtgacccacaagctacagtacctgccccatgcagactgggtgagggggaacaagggggtcaggctatagggggcagggctggggaggctgtcaggcatcttggcaggaaccaatccgttgtcttggtagcaactgctgagggccacaaagcataagagaccagcactggatggctttatgcatgctgggcatttcagggagaccctgtacaggccaggggtttggtatcacctagacccacagacactccccatcctggcccgggccccccatggtacactcaaggctggcaccaagaagtctcaggaataatcaagtgctcacttctcaccttctgattcctgcccttttgatgacccatccccgcagtcatggggagtgcccatttggatggaaaagccctcttcccaccctatgaccttcccggggtggatggatgcaccaccccgggaatcatatgggaaatatggaaccaaacaatagcagtagtaatagaaacttcaggctgggcgcaggggctcacacctgtaatcccagcactttgggaggccaggacaagaggatcacttgagcccagaagtttaaggctgctgtgaaccatgatcatgccactgcactccactacagcctgggcgacagagccttgtctctgaaaatttgaaaaaggaaagaaagaaagaaagaaacttcaatattatcagtagagtccaatgttgtgaaacccctcattaactaaatttccatactcttcagtaggtagaaaataattactttttgattcattagaaagcacttaatttttaagatggagatcatgtaattttgaactctaggtcttgcctactcctatataaattctcctctaaacaacagccaaaattgaggccctctttgagcttcaggctggtgccaaatggctctgcttattttccccaaaataaatcttccttccatgtatgatgagaccccctccagtataaagaagacccaaagaaaatcacccaaagaaaaaaggcccaaagataagacccaaagacctaaagatttaaatatatatacagatacagaaggtttgtttctgagtttctgtagtgaccttggcaataccttgtagttcaggacaatcctgaggaacacagaagtgctggcttccttgaggaatcagtgatcaggactctcgagccccttgaaccccagcatagggcgggagggggtgagggcagcaggggtgggtgtctgaattaatgtcaggtctacgtgatggtgtcatcaagtgttccagataaaaagttttattgagccgggcgcggtggctaatgcctgtaatcccagcaccttgggaggccaaggcgggtggattgcttgagcccaggagttcgagaccagcttggggcaacatggtgaaaccctatctctataaaaaaaaaaaaaaaaattagccaggtatggtggcgtgcacctgtggtcccagctactcaggaggctgaggcaggaggatggcttgagccaggaagcagagattgcagtgagctgagatggtgccattgcaccccagcctaggcaacagagtgagaccctgtctcaaaaaaaaaaaaaaaaaaagatttattgattccaaagaggcatggccacacacacttagaccagcaggtgctttgctaagccctgatggaggctgccagacccgccgtcaagaggagctaagggtagtgtacaatgagcccacttagtgtatgacggccgctgccgtgggtggagtccttgtgagtaaccagccagcttgagcaggatgcactaatttgctctgcaaacccagccattgagaaatacgcctcagatgtaccgaactctaggtcctaggagtatgttggttggggtaggttatcaataccagcccacttgcagtggatgagctggtggccatttgtagtgaggaaagggatgtgtcaacctccatcttagactccacaattgagggatgtgaccaccattcctccccagccagcccccaaaccacgtttgttgctgcctttccagatcattgccatgaaggatggcaccatccagagggagggtaccctcaaggacttccagaggtctgaatgccagctctttgagcactggaagaccctcatgaaccgacaggaccaagagctggagaaggtgggtatatccagggatggccaagcagccacccctggatgcaaaggttctgctagaacctgaactcataaaggtcttcctgtccttagtgccccaggaagccccctaaagggcagatgtgggagctgggcatgaactggctcctaccagaggagagacagtacctgtgccaggtgcccagggcagaatcaggtgggcaccttcgccttatcctgaggtagtcagatactatttagttgcaaagtttcagaaaatcaactcaaactggcaaagaaaactaagcaaagaaaacaagagggaattaaggatttattgacccatgaaaccaaaaagtccaggtgtgtcatagctttaagtgtgctggatccaggtagtcagtgtaatcagaaatctgtttctcccatctcttgactctgctcccctcaaattggctcagctcccctcaaattggctccattctcatggtatcagtgagggccaccagcagtcttaggtttacattctcccagctcaacaactctgccagaaaaaaagtgcctctttccccatagttcagcaaaagtcccagggctgagtctcactggtccagtttggtcatgtgcccacccctgaacaaatcactgtggccagcggtgtggaatgtgaggattggcctgtcctgggtcacgtgccactttgggagccagatccacctgaatcacagagactaaaaacaggggaagagtggttccccacagggatatgggggtgctattatctgatgaaggggaaggactaaatcctggcaagatgaatgtgtgtctgtctgcccctccctcaggcagggacaaagtagaaatctgacattggtcatcaccagagtagttaccccttaacttccccttcccccaccaaccatatatcctgaagacattgcccaggccacatctgtcttttaggagactgtcacagagagaaaagccacagagccaccccagggcctatctcgtgccatgtcctcgagggatggccttctgcaggatgaggaagaggaggaaggtacaggcaatgggactgggagtgaaattatggcctgaggtctgatcagccacagagaggctaaggtttggggttctgggtgtggtgcagtagtgtgcctttgattaaatggcttccctctgtgtgcccccgttgtcccctcagtaagtggggataaaatgccctgattcaccctcagagggatggaaatgtgtagccacagagtgggttcttgcggcctgcagaggaggcagctgagagcgaggaggatgacaacctgtcgtccatgctgcaccagcgtgctgagatcccatggcgagcctgcgccaagtacctgtcctccgccggcatcctgctcctgtcgttgctggtcttctcacagctgctcaagcacatggtcctggtggccatcgactactggctggccaagtggaccgacagcgccctgaccctgacccctgcagccaggaactgctccctcagccaggtgtg

SEQ ID NO: 10358 - DNA, 836 bp, Homo sapiens
ctgctaaatgccactgtggaggagaacatcatctttgagagtcccttcaacaaacaacggtacaagatggtcattgaagcctgctctctgcagccagacatcgacatcctgccccatggagaccagacccagattggggaacggggcatcaacctgtctggtggtcaacgccagcgaatcagtgtggcccgagccctctaccagcacgccaacgttgtcttcttggatgaccccttctcagctctggatatccatctgagtgaccacttaatgcaggccggcatccttgagctgctccgggacgacaagaggacagtggtcttagtgacccacaagctacagtacctgccccatgcagactggatcattgccatgaaggatggcaccatccagagggagggtaccctcaaggacttccagaggtctgaatgccagctctttgagcactggaagaccctcatgaaccgacaggaccaagagctggagaaggagactgtcacagagagaaaagccacagagccaccccagggcctatctcgtgccatgtcctcgagggatggccttctgcaggatgaggaagaggaggaagaggaggcagctgagagcgaggaggatgacaacctgtcgtccatgctgcaccagcgtgctgagatcccatggcgagcctgcgccaagtacctgtcctccgccggcatcctgctcctgtcgttgctggtcttctcacagctgctcaagcacatggtcctggtggccatcgactactggctggccaagtggaccgacagcgccctgaccctgacccctgcagccaggaactgctccctcagccaggtgtg

SEQ ID NO: 10359 - DNA, 3291 bp, Homo sapiens
gctcgggccaactctgaccaggctgaccagctgcatcccctgcctctacccacgccaggtacaagatggtcattgaagcctgctctctgcagccagacatcgacatcctgccccatggagaccagacccagattggggaacgggttagtagcagcctctgaggggttttttcaaagccaggacccccaacctaccatgccctgagacactactcaggacaatgggtaactaggaaataggagacattgaaggctgaagagttgcctgcagtaaggtcaaacatgttgttcttgatgatgtcctttgacaggttttcagtcctgcttggagggcaaggtcagcttagtgccctcccaggctggggatcttcttcatttgcaccccaggtatacactgagagcccacacagcactgtgctcagcctggggttgtattgttcctgttcatcctccagatggggtcccctccacaagcttagacgaacaggattctcctgtgactgtcctccttttgtgtgattttaatccctgctgcctctgtctttgtttgtactggtcagatggtccctagcgcctacacaatgaatctttaaagacttggggctcatgctgccctcttctgaatgaattcagtaaacacgtgcaagttccttctctatgcaaggtgagaagcaggcaaagaagtggatagagccaggcctccatcccaaagagctcatagtccagtagggtacaggacagtgtctcctgaatggctgagggcatgatgtgttcctcctctttggtgacagggcatcaacctgtctggtggtcaacgccagcgaatcagtgtggcccgagccctctaccagcacgccaacgttgtcttcttggtgagtgcaagttcccttggggtcctggtctctggctgcctcccaggcctaactgcccacctccacctccccgcaaccccaccatcatccaacaatctccctctccaggagtaaatccctcctgccagagatattgccttatcatcctagtgatagggaaactgaggcaggcaaggatagcacaaatgacccattgcagacttcagatggagctctgcagtagccaatgaggagaggcaagctgtagttataggctgcctgtctgtgggacagcccaacccctcaacacttatgcagcccgactataagaatggctgataacagaatgtgtgctgccacttcccatcttatgcccagtgcagacattgctaattgttcacagcattatttcccatggaacttaactcatcctcagaatccttctcaacacagcactccaggtaaccactagccatcaaacatgagataaaactaggccaggcgcggtggctcacgcctgttattccagcactttgggaggccgaggcaggcggatcacgaggtcgggagatcgagaccatcctggccaacacggtgaaaccccgtctctactaaaaatacaaaaaattagctgggtgcggtggcgggcgcctgtagtcccagctactccggaggctgaggcaggagaatggcgtgaacccgggaggcggagcttgcagcgagccgagatcgcaccactgcactccagcctggggacaaaccgagactttgtctcaaaaaaaaaaaaaaaaaaaagaacgtattcgcaatccttacactacttcatgtcaagttctgttgtgtcaggtgccttgactgacactgaagaattctaagaaccagtccttggcctcaaagatttagaatctgattagggagacagagctcacccagttcaagaggcccagcccggttcaaatccaaactgtgcggcataaactatgagggggccttgtccagggagacaactgtgagggctggagtaatcagggagggcttcctggaggagagcctcaaagggagagtcaattaaacagaaggaaagagggaggccatttgcacagtgagttggaagaaggaagctcaagtctctgattccagctttattccctcccctctccctacaccacacgcacaagcactcctttactaaagacacttcacagtgggaagattcagtctccgttaccgtctgacacacacacagcgttttacaaagcatgggtgcattcgcgatctctcatgagatttaaacaaccctgctagagaaaagtgaagtggacattttatttcagtaaacgtttatgaagcgtctactctgtgccaggcactaaacgtttatgaagcgtctactctgtgccaggcacaggcacaagaagtctcagttcttgggagtgccataatcaggaatggacaaacaatgatcagatctggctttgcgccagtgtcacgggaatagggaggaaggaagggtaggcgtgggggtcaggacaggatgcaggaggaactggtgcttaggtgagcgaaggatgggtgggagttcacaaggcagacaaaaggcagagcagcactccaggcagaggaacagctcaggagaaggcccagacggcaggcttcctgggaacctggaatgcagagtgctgggaaagcacagatgaagcatgagtctagaagggaaagcgagaggttataaagcacctggaacaccagcccacagggtttgactttagagatgatggggagccgttgaaggtccaggagtcaggcagtgaagtgattagatctgtttgagagtgatatctgacaactgccccattttaaatgaggtaaccaaggcccagagaggttgggtgagttgtccaaagccacacagctaactagcttcagtccctagagcagagttgatagaactctaatgggttttatactcattgtcacccctccccaccatgcctttccctaccctctactctcttcctctcccttctgcccaggatgaccccttctcagctctggatatccatctgagtgaccacttaatgcaggccggcatccttgagctgctccgggacgacaagaggacagtggtcttagtgacccacaagctacagtacctgccccatgcagactgggtgagggggaacaagggggtcaggctatagggggcagggctggggaggctgtcaggcatcttggcaggaaccaatccgttgtcttggtagcaactgctgagggccacaaagcataagagaccagcactggatggctttatgcatgctgggcatttcagggagaccctgtacaggccaggggtttggtatcacctagacccacagacactccccatcctggcccgggccccccatggtacactcaaggctggcaccaagaagtctcaggaa

SEQ ID NO: 10360 - DNA, 547 bp, Homo sapiens
gctcgggccaactctgaccaggctgaccagctgcatcccctgcctctacccacgccagggcatcaacctgtctggtggtcaacgccagcgaatcagtgtggcccgagccctctaccagcacgccaacgttgtcttcttggatgaccccttctcagctctggatatccatctgagtgaccacttaatgcaggccggcatccttgagctgctccgggacgacaagaggacagtggtcttagtgacccacaagctacagtacctgccccatgcagactgggtgagggggaacaagggggtcaggctatagggggcagggctggggaggctgtcaggcatcttggcaggaaccaatccgttgtcttggtagcaactgctgagggccacaaagcataagagaccagcactggatggctttatgcatgctgggcatttcagggagaccctgtacaggccaggggtttggtatcacctagacccacagacactccccatcctggcccgggccccccatggtacactcaaggctggcaccaagaagtctcaggaa

SEQ ID NO: 10361 - DNA, 7627 bp, Homo sapiens
ctggccatcgtgtgctacttcatccagaagtacttccgggtggcgtccaggtgatggcctcaggggtgaggggtgggaggtgctttgcaatgtgcagtttggtgtacttgctagactcatcgttatgagagtaatagggtcgtgttccctccaaaaaataaaaacaaaaaacagaaatgaaggaaatagaaatatccacatcttattccaccgccctaatataatagtctgccaacacacgcacacactgaggttgacatctgaattatttccttgggcgatatggtcaggactggaattgctaggtcatgataaatgcacattttatgcccttcattcattttgccaacatgcttcccaggagggttgcatcattctagtggtcaggctgattgctgatgcatgaaatcggcgggcacctgattcaagcagtgttatgataacacctcccagcccacgtgagtccagagtgtagctgtaagccttgacttgagggagcctctcacagccattctcatggatcacatttgccctcatgagctttggatccatgcacgcctctttcctcctcaaaattttctaagaatgttctctagggagttctttctgggagtgattctcccagattcatagaaactcatagattcaaaaaattgtaggaaaaaatttaaagaacgtctaggccagtgtttctcaaactgccaattacagcccatcagtgggtcatgaaatcaatatcatggatcacaaccagcatttttttaaaaatgaaaaaaacatcagactgtattcatagagtaaagcaagctttgcttcatgaaacctttgtgttggtcatggaggtgtgtgagtactgatttgtgagataaaatatatttctgactgcaggttgtggtcagaaaggttaagtacctttcccaagtgcacatagttggctagaaactagagttgagatacttattagcaataataaaatttagatgcattttggacacaattacctgccccaaaggatcaacatttgtataaatggctttttgcttggatgatccagaatggcccgacacccacacgaacaacatagctttttgacactcaaaaaattcaaagtgctgcacaagctgttctacaaagttcatttcttctgccagagaaacagcccagtctctgtggcacccagtctgaccctggagatggtttatcagggaaatcaacttcctgcatcccaaactggcctccctggcactgatgtgcttgtcgaggtgcagctttggggagcaggaggcaattctgttgccatggaaacctctggccttaccccgagacgaaacctatcatttcagcacatcactggccagggtctaaagagctccttgatggggtaagcggaagacggggttgaacgctttgagtttggtcttctgttcctttggccagctgtctcaaggttcagattgttcacctgtaaaatggaactagcactgcctgcccagccttagctcagctccaggctgtgcagcagaagtacagggacagatggcgacctggggttgacaatgcccaggacagcagtaattgtgccccacatcaggctgtgtctaagcattgtacataaacgatctcattcagtgctcacaaaagctcaatgggctggtggcattgtcttcccccttcacggggtaagaagctgaggcctagagaggtaaggccattcacccacacagcggtagcaggtggagctaggcttcaggcccaggccgagccctgagcctgccctcttaactgttccactctgttccccgccacagggacctgcagcagctggatgacaccacccagcttccacttctctcacactttgccgaaaccgtagaaggactcaccaccatccgggccttcaggtacgagtccacattcccccaaggtaggagtggaacaggggtggggccagggggcacaggccatgagatttgattctcaggactccacttgggaaggccaaggacacgttctctctcaagctgcctcaggtcccaaggcccaagggatatccaccagcagggacaggccaggtgggctcccactgaatgttctagagaggaaaattccagctctgtagacaagcccaggacctctgtgaggcagagcatgaaaagagacaaagctgggacaagtcttcatgtatcaacgctagaaagggccttaggtgcgggccaccctaagcccttcttttattaaggagcccctgtgtgccaaacactatgctgagtactgtacaggccaatcccactcattctgcactgcaaccctcggtgctgagaatggtcatttccattgcacagacaaggaaactgaggcacagagacgttctataacctctctgtgtaaggtgccacaaagcccagacttgaacctatttgttcatgcaacaaacatttactaagccccgactatgtgctaagccccatgccaggcactaaaaagatgagtcaaataagccgctgccctgcaggcgtttacagcccagactttgagcaggccaggataaatccacgtgacaagtattctgaaaaaagcggattcaagggctgtgggagcatagaagagagacagtccgggaaggtttttgtaccagaggtgtcatcagaactaggactcaaaggaggggcaggagttcaccaggctgaggaattcctgaaaacttcagtgcccctgccatcgtctcactaccctgagtggtgatgttggggtggacaggagcatctgaggttgcctggggaatgagggaagctgttgtttcccactccccaagagtctgtctgatctccagaggcatctctcttccagtcaggcaggccagagacccctgacacacaaagttgggctcttttctcatcttcatccagagagtgataataggttatttttagggtggcacagctgcacgaagtatgacagtaaccatgagacaccaagcactgtgtccaggagtaaccatagggcacaaggaccagccaagggccagagaggcttacatctcctccccccaacccctgaagtccagcttcagccctggagaggtatccaggcccctctgcccaccctggagcacctagggccagtggaaatccacctcttagggatcttgtctaagtaaagaagagcagagcaaagctctgccctggccttggcgctgctccctggacatcccttgcccctggacaagcctatgctgtgtcttccacaaagaagcttgctggggactggattatgactctagagtctcctcccagcctcctcttctcaagcctgaacttctcccgttccttcaacttccaggtccctcgacattactgagcctagcctttgctctaagttttggtgatttccctctctcaattggtgtctcagagggccctggggtagagagatggtgactcttctagagtgggccacagccccttgtgtgcagatcccagcttcctgtaaacagcctcagatcaggccaaacctgtggtcagccagagccactgctacccagtgaggtcttccacaccctactgacacggtgaatgatttttaaatttgaatgaaaggctttttaatcaaccccatacacatttaatgcattggctttaatccagcagcctgttgagagctattagcacttattgattgcccacttactgtatgccaggcaccgtgctaagtgttgtatgtgcattattacatttaatcctcacaaggaccacataacataggtacgaatcgccacattctccagatgcagaagcgagacccagagaggctgggtaatcaatccaaggtcacacagactgcgggggctggcgctgagcttggaacccaggtttgcctgaccttctgggctttcctaagagatcttattttttcccaaaagagtttcaagagtgcccagcactgggctcagtggcgggctcggaggttgttttcgttcatgtaggaactatcacttccccatttttttcataagaaaactgagtctcagtcctgatacacagccaggaagttgtgatgttcaggctccaacctgggtttacatggctccgaggctggggctcttttctagtcctcagacacactgtcgcacgcctgtggcagaagctcccatctcacacttgccgaccctcaactcacacagtcctgagacccacatacgctgagcgcctcacactcctataacacgcacatgccctgatgcacacacattttcaacacgcacttactctacccttcaggcatggtttcacactcactgcagacacgtcaccctcccacacgtctccaccctgggggtgtgcagtagcatgctctctcccacctcagaacctcccttcagtcccctcagacacatgccctctctccacgcagagacaatcaaagctgaactaacaccttccagggtgaaaagcaaatgcccagtaaggtacgtcttgggtgcctccgtgtcccctgagtttggtcctatcaaaccagcgatgatgaggcagcttttctttcgttccttcctccatcatcaaacaagtgctcctgcatctcctctgggccgggcctacgtcagcaaggtctgagggaagcggccaaggagagtgatgacggcagcccaggttgatcagagaaaggaggcaggtccatgcgcagtaactcagggaaaacatgatgaggacctaaggatgagaaagaagcctccagagttccctgtgcagagagattccatcaatttcagagggtcaggggagtgccatgcattcatccaacaaatatttattgatagtgccaggtgctggggtatattggtgaataaaacatcttcatggaatttgcagtctattgagggagatgattataaatagctagagaaatgcatgtacagcagatactgtggagcaaacaggttgcagacaataataggggaaacctactttatagtaaggtagtagccaggaagagcctctctgaggaggcagcatttaaggcaagccctgaaggttgagttgagccagccttatgaagagcaagggcaaaagccttccaggaaaagggaatagtgtgtgcaaaggccctggggtagggaagactttagtattgtcacagagcttttaaaaagctgagtggctgcagcatagtgtgtggggtgtttgtggcaggaattaggttggcaggagggggttcttcatcctataagcagtggaaggtcattaatattcttttttatttgtttttttttttttttttttttttttttttgaggcagagtctcactttgtcacccaggctggagtgcagtgaggtgatcttggctcactgcaacctccacctcccgggttcaagcaattatcctggcttcctcagcctcccaagtagctgggattacaggtgtgcaccaccatgcccagctactaatttttgtattattagtagagacagaattccaccatgttggccaggctggtcttgaactcttgacctcaggtgatccgcccgcctcagcctcccaaagtgctgggattacaggggtgagtcaccgcatccggccggagatcattaatattctaaacagtgggggagaggacacagtttgcgatttagatagattaagccagccactgtgtggagcatggactgtagggagacagcaggtagacgtattcaggaagctgatgcagtagtccaggtgagagtttgtggtgggcaggaagcaggatagagggggagggaggcaaggactcttttagagagagacataagaggacttgccaaggggctgaatgtgaatccaggtgattcctgggtgagaaactgggtaaagggaggtgccccttattataatgggaaagacctagagaaaatggatcttggggtgaaaacaagagtttggaggaggtggggattctggacaggtttgaataagcagaaaggagtggggtggacattccagagagggatagcttacatgaagtggccacggtggcatgtctggggactggaggggccctggagcctccctctgcaggtagggagactcctaggagctatgtggaccaacactgttcccttaggagcttctcatcctccctccaggtatgaggcccggttccagcagaagcttctcgaatacacagactccaacaacattgcttccctcttcctcacagctgccaacagatggctggaagtccgaatggcaagtgctattcccctctaccctggcctctgataggagggtggggccagagcaagagcacacaggtacctggggatgaaagagaggataggataccagatcgtgtggacaccaagccttcctgcttcccccagccctggtggtcctcctagtgtctagcctgtgctccttttccccatatcactgcctggaggcttgtgtatctgaggtgtgtgccagtggcaagaacagttgtggtgaatgtgtatctgcagtgggtcatatgacacccacattgtgtgtgtttgtgggccagctgaggcgtgcatgttaaagggtgtgcaggggctagggggtaggggagcatgagcttgtgggacatgttggctcctggggctccagccttcgcagcccttgtgtgtgtctggtgacgtgtgcatgagttgcagggctggagtggaggcctggctgagctgctctctgccccgaaaaggagtgaggtagaacaggggcctgtggctctaacccctgagcgcccaggtcagctcctctccctccccaggagtacatcggtgcatgtgtggtgctcatcgcagcggtgacctccatctccaactccctgcacagggagctctctgctggcctggtgggcctgggccttacctacgccctaatggtgagcggcagtgggctagggcagaggaggggtcagacaccagcactcccggagcaccttcgtcactggagacatgagacactcccaggccttaccccaatttcatttgcatctgatgccagagggacagtgcgggcaggaaggctgaccagcaggccccagggcccaggccccagacaggtggaggttggggagccacatgactgaccctccctgtgcctccagggagggctgctctgagcaggcagtggatggcagcaaaaggaatctggggccctggcccctctccagccttaagaagagccattctggtggctgaggacagaactaagcgaccatggagtgtgcgccactggcttgctccccacaggtctccaactacctcaactggatggtgaggaacctggcagacatggagctccagctgggggctgtgaagcgcatccatgggctcctgaaaaccgaggcagagagctacgaggggctcctgggtgagaggctcagggagaggggtggggaagagtccaaggaggagtgtgtctgggttgggggccacaagggagcctggggatggggtggcactttcggatactagctgtggcccatgcctggtggctgagcccagcccggcccccagcaccatcgctgatcccaaagaactggccagaccaagggaagatccagatccagaacctgagcgtgcgctacgacagctccctgaagccggtgctgaagcacgtcaatgccct

SEQ ID NO: 10362 - DNA, 665 bp, Homo sapiens
ctggccatcgtgtgctacttcatccagaagtacttccgggtggcgtccagggacctgcagcagctggatgacaccacccagcttccacttctctcacactttgccgaaaccgtagaaggactcaccaccatccgggccttcagctgccaacagatggctggaagtccgaatggagtacatcggtgcatgtgtggtgctcatcgcagcggtgacctccatctccaactccctgcacagggagctctctgctggcctggtgggcctgggccttacctacgccctaatggtctccaactacctcaactggatggtgaggaacctggcagacatggagctccagctgggggctgtgaagcgcatccatgggctcctgaaaaccgaggcagagagctacgaggggctcctgggtgagaggctcagggagaggggtggggaagagtccaaggaggagtgtgtctgggttgggggccacaagggagcctggggatggggtggcactttcggatactagctgtggcccatgcctggtggctgagcccagcccggcccccagcaccatcgctgatcccaaagaactggccagaccaagggaagatccagatccagaacctgagcgtgcgctacgacagctccctgaagccggtgctgaagcacgtcaatgccct

SEQ ID NO: 10363 - DNA, 3001 bp, Homo sapiens
cttgccttcttccgcatggtggacacgttcgaaggtgagttgtaaggcgggcaccccacgtgtacccacagccaccagatgaggcctcagccctggcacgtggtcagacatgacaggaggcccagcagtcaccgccttcccctgcaccctcactgggacccatgcagggcacatcatcattgatggcattgacatcgccaaactgccgctgcacaccctgcgctcacgcctctccatcatcctgcaggaccccgtcctcttcagcggcaccatccggtgagccccaccacccctcaggcccacccagccccaggccggctcagttccatcagatctggagcacaaagaggagggggttgggggagaccaggatcccagaggtgtttcctgctcatgcccttctccatcccatcaggcccaggcagcctctggaaggggatcccccacccatgggtctaagatgctgtcccccacccactgccaccacctcggtgcttctcccagccagacctccaactcagtctgctctcgctcactgccctctttgccgcctggggatgcaggcaggaccctgctccctccctactggggctttctgtgccacttccagatttaacctggaccctgagaggaagtgctcagatagcacactgtgggaggccctggaaatcgcccagctgaagctggtggtgaaggcactgccaggaggcctcggtaactactcctggctatgcagctgggttggttgggcactcaaggaccctgtaaggatggcagacagaagcccgtgtctcaggtttgccccaagtttggagtctgaagcctggcaggaccatttagtcctacttctcactatacgggggcccagagaggtcaggtgtcttgccccaggtcacacaactggtcagttcagggtctggctcctcctgcagggtacagcgggtacagtcagggatccttgtgagacagagattgcgagtcccccatgccaagggggcatcttcagccctgccctgccccatccacctgcatgcccagttctgccttaggggaggagaagatggactgggcaatcatagacacgggtcactcatcaaggccaccggtgattggcaaagccttggtatatttgctgcagctcctggagcattgggggtggccaagccttggtttcaatgaatcaccctaccaaggccctacatacacactcagtgcacccctcagtgcacacgccccctcccagaactgcccagggccacagcagcacacacctccaggggtgcccttctcgttgcagtccttgcagacggcctccacattgttgtgtcaggtgcaccagccctgcacacgcctgtgctcttggacacacacccacctatttgcccccatgcacacattttccaacagccccccaagccatcccatctgctccactcacagcacaagattaactcagtcctacttcatctccccgggctgttttcagatgccatcatcacagaaggcggggagaatttcagccagggacagaggcagctgttctgcctggcccgggccttcgtgaggaagaccagcatcttcatcatggacgaggccacggcttccattgacatggccacggttggtcctgggcccctccatgggaccatggtcttggaaagggtttagtgggatgctagggagaaatttgcacgaagtagtcctgaggctcaagttgcctctaacatcaaatgctatgtgttgcagaaaatgaaaagagctggggggaccctgactctgtctagtcttagggaatgttacacacacacacgcacacacaaaaacactatgcaaacacacacataagctgcacacacagacccacacagacttcacactgtcacctatcacaacagcacacacacagccacaaccacaacctacatacacacacagagctgagctcccaacaggctgagtccagtccctgagtgccgggaacctgttcagtcctgtggggtgggggtgggactaggatcggggtcagatgggagctgagccacagacctgggctccacatcccccaagccaggccagaccccatccactgggcaggtgagccaacagctgttgcccccacttggcaggaaaacatcctccaaaaggtggtgatgacagccttcgcagaccgcactgtggtcaccatcgcggtaaggggcccattgatggggtgcagagggacacccagggacaggactggcctgttgtggccgtcatcagtgcacagcccctgggcttgcctggtcccagtaatcaagaaagaaccctgaagcaggcagttcagggcaaggggcctggagggcatgcagggagcctgggttgcaggatttggggtggggggttttgcccctgtgcttccctcagacctcccctctccttctccaggttccaaggcctgcccctgtcccaaggccttatatgttaggctggcgttacttctccataggaagtgggggaggggttgtggagggtctctgagccttgaagcctggaggtggggtagagttgggacttggagaggagagaagggtggtattagcagatggagagcttgtagtcacatccaccccaggaaagtgcagtccccacagtgacaggacattctggccacatgcctcatcctcctcctccaagccgcaggagggccaccctcagctgtggcccccaccgcgggtggtattcccaccatcctgacccgccccctcctgccctgcccagcatcgagtgcacaccatcctgagtgcagacctggtgatcgtcctgaagcggggtgccatccttgagttcgataagccagagaagctgctcagccggaaggacagcgtcttcgcctccttcgtccgtgcagacaagtgacctgccagagcccaagtgccatcccacattcggaccctgcccatacccctgcctgggttttctaactgtaaatcacttgtaaataaatagatttgattatttccta

SEQ ID NO: 10364 - DNA, 883 bp, Homo sapiens
cttgccttcttccgcatggtggacacgttcgaagggcacatcatcattgatggcattgacatcgccaaactgccgctgcacaccctgcgctcacgcctctccatcatcctgcaggaccccgtcctcttcagcggcaccatccggcccaggcagcctctggaaggggatcccccacccatgggtctaagatgctgtcccccacccactgccaccacctcggtgcttctcccagccagacctccaactcagtctgctctcgctcactgccctctttgccgcctggggatgcaggcaggaccctgctccctccctactggggctttctgtgccacttccagatttaacctggaccctgagaggaagtgctcagatagcacactgtgggaggccctggaaatcgcccagctgaagctggtggtgaaggcactgccaggaggcctcgatgccatcatcacagaaggcggggagaatttcagccagggacagaggcagctgttctgcctggcccgggccttcgtgaggaagaccagcatcttcatcatggacgaggccacggcttccattgacatggccacggaaaacatcctccaaaaggtggtgatgacagccttcgcagaccgcactgtggtcaccatcgcgcatcgagtgcacaccatcctgagtgcagacctggtgatcgtcctgaagcggggtgccatccttgagttcgataagccagagaagctgctcagccggaaggacagcgtcttcgcctccttcgtccgtgcagacaagtgacctgccagagcccaagtgccatcccacattcggaccctgcccatacccctgcctgggttttctaactgtaaatcacttgtaaataaatagatttgattatttccta

SEQ ID NO: 10365 - DNA, 5746 bp, Homo sapiens
caccatccgggccttcaggtacgagtccacattcccccaaggtaggagtggaacaggggtggggccagggggcacaggccatgagatttgattctcaggactccacttgggaaggccaaggacacgttctctctcaagctgcctcaggtcccaaggcccaagggatatccaccagcagggacaggccaggtgggctcccactgaatgttctagagaggaaaattccagctctgtagacaagcccaggacctctgtgaggcagagcatgaaaagagacaaagctgggacaagtcttcatgtatcaacgctagaaagggccttaggtgcgggccaccctaagcccttcttttattaaggagcccctgtgtgccaaacactatgctgagtactgtacaggccaatcccactcattctgcactgcaaccctcggtgctgagaatggtcatttccattgcacagacaaggaaactgaggcacagagacgttctataacctctctgtgtaaggtgccacaaagcccagacttgaacctatttgttcatgcaacaaacatttactaagccccgactatgtgctaagccccatgccaggcactaaaaagatgagtcaaataagccgctgccctgcaggcgtttacagcccagactttgagcaggccaggataaatccacgtgacaagtattctgaaaaaagcggattcaagggctgtgggagcatagaagagagacagtccgggaaggtttttgtaccagaggtgtcatcagaactaggactcaaaggaggggcaggagttcaccaggctgaggaattcctgaaaacttcagtgcccctgccatcgtctcactaccctgagtggtgatgttggggtggacaggagcatctgaggttgcctggggaatgagggaagctgttgtttcccactccccaagagtctgtctgatctccagaggcatctctcttccagtcaggcaggccagagacccctgacacacaaagttgggctcttttctcatcttcatccagagagtgataataggttatttttagggtggcacagctgcacgaagtatgacagtaaccatgagacaccaagcactgtgtccaggagtaaccatagggcacaaggaccagccaagggccagagaggcttacatctcctccccccaacccctgaagtccagcttcagccctggagaggtatccaggcccctctgcccaccctggagcacctagggccagtggaaatccacctcttagggatcttgtctaagtaaagaagagcagagcaaagctctgccctggccttggcgctgctccctggacatcccttgcccctggacaagcctatgctgtgtcttccacaaagaagcttgctggggactggattatgactctagagtctcctcccagcctcctcttctcaagcctgaacttctcccgttccttcaacttccaggtccctcgacattactgagcctagcctttgctctaagttttggtgatttccctctctcaattggtgtctcagagggccctggggtagagagatggtgactcttctagagtgggccacagccccttgtgtgcagatcccagcttcctgtaaacagcctcagatcaggccaaacctgtggtcagccagagccactgctacccagtgaggtcttccacaccctactgacacggtgaatgatttttaaatttgaatgaaaggctttttaatcaaccccatacacatttaatgcattggctttaatccagcagcctgttgagagctattagcacttattgattgcccacttactgtatgccaggcaccgtgctaagtgttgtatgtgcattattacatttaatcctcacaaggaccacataacataggtacgaatcgccacattctccagatgcagaagcgagacccagagaggctgggtaatcaatccaaggtcacacagactgcgggggctggcgctgagcttggaacccaggtttgcctgaccttctgggctttcctaagagatcttattttttcccaaaagagtttcaagagtgcccagcactgggctcagtggcgggctcggaggttgttttcgttcatgtaggaactatcacttccccatttttttcataagaaaactgagtctcagtcctgatacacagccaggaagttgtgatgttcaggctccaacctgggtttacatggctccgaggctggggctcttttctagtcctcagacacactgtcgcacgcctgtggcagaagctcccatctcacacttgccgaccctcaactcacacagtcctgagacccacatacgctgagcgcctcacactcctataacacgcacatgccctgatgcacacacattttcaacacgcacttactctacccttcaggcatggtttcacactcactgcagacacgtcaccctcccacacgtctccaccctgggggtgtgcagtagcatgctctctcccacctcagaacctcccttcagtcccctcagacacatgccctctctccacgcagagacaatcaaagctgaactaacaccttccagggtgaaaagcaaatgcccagtaaggtacgtcttgggtgcctccgtgtcccctgagtttggtcctatcaaaccagcgatgatgaggcagcttttctttcgttccttcctccatcatcaaacaagtgctcctgcatctcctctgggccgggcctacgtcagcaaggtctgagggaagcggccaaggagagtgatgacggcagcccaggttgatcagagaaaggaggcaggtccatgcgcagtaactcagggaaaacatgatgaggacctaaggatgagaaagaagcctccagagttccctgtgcagagagattccatcaatttcagagggtcaggggagtgccatgcattcatccaacaaatatttattgatagtgccaggtgctggggtatattggtgaataaaacatcttcatggaatttgcagtctattgagggagatgattataaatagctagagaaatgcatgtacagcagatactgtggagcaaacaggttgcagacaataataggggaaacctactttatagtaaggtagtagccaggaagagcctctctgaggaggcagcatttaaggcaagccctgaaggttgagttgagccagccttatgaagagcaagggcaaaagccttccaggaaaagggaatagtgtgtgcaaaggccctggggtagggaagactttagtattgtcacagagcttttaaaaagctgagtggctgcagcatagtgtgtggggtgtttgtggcaggaattaggttggcaggagggggttcttcatcctataagcagtggaaggtcattaatattcttttttatttgtttttttttttttttttttttttttttttgaggcagagtctcactttgtcacccaggctggagtgcagtgaggtgatcttggctcactgcaacctccacctcccgggttcaagcaattatcctggcttcctcagcctcccaagtagctgggattacaggtgtgcaccaccatgcccagctactaatttttgtattattagtagagacagaattccaccatgttggccaggctggtcttgaactcttgacctcaggtgatccgcccgcctcagcctcccaaagtgctgggattacaggggtgagtcaccgcatccggccggagatcattaatattctaaacagtgggggagaggacacagtttgcgatttagatagattaagccagccactgtgtggagcatggactgtagggagacagcaggtagacgtattcaggaagctgatgcagtagtccaggtgagagtttgtggtgggcaggaagcaggatagagggggagggaggcaaggactcttttagagagagacataagaggacttgccaaggggctgaatgtgaatccaggtgattcctgggtgagaaactgggtaaagggaggtgccccttattataatgggaaagacctagagaaaatggatcttggggtgaaaacaagagtttggaggaggtggggattctggacaggtttgaataagcagaaaggagtggggtggacattccagagagggatagcttacatgaagtggccacggtggcatgtctggggactggaggggccctggagcctccctctgcaggtagggagactcctaggagctatgtggaccaacactgttcccttaggagcttctcatcctccctccaggtatgaggcccggttccagcagaagcttctcgaatacacagactccaacaacattgcttccctcttcctcacagctgccaacagatggctggaagtccgaatggcaagtgctattcccctctaccctggcctctgataggagggtggggccagagcaagagcacacaggtacctggggatgaaagagaggataggataccagatcgtgtggacaccaagccttcctgcttcccccagccctggtggtcctcctagtgtctagcctgtgctccttttccccatatcactgcctggaggcttgtgtatctgaggtgtgtgccagtggcaagaacagttgtggtgaatgtgtatctgcagtgggtcatatgacacccacattgtgtgtgtttgtgggccagctgaggcgtgcatgttaaagggtgtgcaggggctagggggtaggggagcatgagcttgtgggacatgttggctcctggggctccagccttcgcagcccttgtgtgtgtctggtgacgtgtgcatgagttgcagggctggagtggaggcctggctgagctgctctctgccccgaaaaggagtgaggtagaacaggggcctgtggctctaacccctgagcgcccaggtcagctcctctccctccccaggagtacatcggtgcatgtgtggtgctcatcgcagcggtgacctccatctccaactccctgcacagggagctctctgctggcctggtgggcctgggccttacctacgccctaatggtgagcggcagtgggctagggcagaggaggggtcagacaccagcactcccggagcaccttcgtcactggagacatgagacactcccaggccttaccccaatttcatttgcatctgatgccagagggacagtgcgggcaggaaggctgaccagcaggccccagggcccaggccccagacaggtggaggttggggagccacatgactgaccctccctgtgcctccagggagggctgctctgagcaggcagtggatggcagcaaaaggaatctggggccctggcccctctccagccttaagaagagccattctggtggctgaggacagaactaagcgaccatggagtgtgcgccactggcttgctccccacaggtctccaactacctcaactggatggtgaggaacctggcagacatggagctccagctgggggctgtgaagcgcatccatgggctcctgaaaaccgaggcagagagctacgaggggctcctgggtgagaggctcagggagaggggtggggaagagtccaaggaggagtgtgtctgggttgggggccacaagggagcctggggatggggtggcactttcggatactagctgtggcccatgcctggtggctgagcccagcccggcccccagcaccatcgctgatcccaaagaactggccagaccaagggaagatccagatccagaacctgagcgtgcgctacgacagctccctgaagccggtgctgaagcacgtcaatgccctca

SEQ ID NO: 10366 - DNA, 440 bp, Homo sapiens
caccatccgggccttcaggtatgaggcccggttccagcagaagcttctcgaatacacagactccaacaacattgcttccctcttcctcacagctgccaacagatggctggaagtccgaatggagtacatcggtgcatgtgtggtgctcatcgcagcggtgacctccatctccaactccctgcacagggagctctctgctggcctggtgggcctgggccttacctacgccctaatggtctccaactacctcaactggatggtgaggaacctggcagacatggagctccagctgggggctgtgaagcgcatccatgggctcctgaaaaccgaggcagagagctacgaggggctcctggaccaagggaagatccagatccagaacctgagcgtgcgctacgacagctccctgaagccggtgctgaagcacgtcaatgccctca

SEQ ID NO: 10367 - DNA, 17497 bp, Homo sapiens
ggccagtctcccactcccctgctctggaagtgatccaggggctggaatcagtgtcttttggctttcatggaggaggggaagccagagactattcactgggaactggctgcctttctgttctctcctgggcggtgggacacgcctaatgaagatcatgggaggctacttcacgtggaccccagatggaatccccacactgtccaacatcaccattcgtatcccccgaggtatggcccagtccacccctccagcatgcccctccccatgtcccactgaataacatagagataaaaagacaaagctgcatttattgagcacctactctctgctcattcttggtgtatgccctgggtatattatagaaggggaaggctacattctagaggcttccgtgtgctgggtgggagtgaagcactaaggacagggtaaaattgccagccttaatgtcaaaccatccattgcagacagtataggtaatgcacaaaaagatcagaagtgggtagccaaggaacgcaagtggaagtgatggggtttctgagaatggacaaaggccctgaggccatgaggcaggaggattttctggcagaggcagccatgagcaaagtatggaggtgggttggaggtgggacccaggatggtgtttcttgggaccacaaggagcctgggctcatactaggagcatgggaaaggagaagcgagtgcttaggaagggtggcggggcaggaaatcagagagggggaaggacctggggagccagaggaggatgttgatttccagaaggaaaggattaaagagggagaggacttgctggggattctaggtaggaagaaagaaaacaggggccccagggttgggtgcatctgtctgtctgtctttctgggtaatggttgttcagactcccccggccccactcacatctgccaccctccctccctgcaggccagctgactatgatcgtggggcaggtgggctgcggcaagtcctcgctccttctagccgcactgggggagatgcagaaggtctcaggggctgtcttctggagcaggtaatacatgtatcctcagggcccagtggaggggaaatctccttttaaccatcctcctcagttgaggatgcacacacatttattggagggcccactctgtgttcagtgaggactcaataaatgctgctaatggatattctcatcatcatcactagtacgtattcacctcttactatgcgcaggttctttgctaagtcctttgcatgcattatttcatttaatttttatgataactaacaaggtccatactgttctcaattctcatttatagaggaaggttaaactatttgtcctaattcacacagctaataagtggcagagctggaattgaaactcagttctgtcagactctgaatcccatggttactcagatgcacggcagtaatttcccagtgtgggaaattgcaacaccaacattggtttccagcttggtcctgagctgcactgacctacacaccataagtgggtgttctgaagatccagatgtaaccaataaatgttggtttctgggcaaagatcactgtcttaattaaagagccagaaccccaggctcagtcaatcacgaatctgttatttatacccacctacttccaagaagcacttgaaactagttgatgaaagattcatgtaaaaatcaaaaccacaatgagataccatctcacacccgttagaatggtgatcgttaaaaagtcaggaaacaacaaatgctggagaggatgtggagaaataggaacgcttttacactgttggtgggagtgtaaattagttcaaccattgtggaagacagtgcggtgattcctcaaggatctagaaccagaaataccatttgacccagcaattccattactgggtatatacccaaaggattataaatcattctactataaagacacatgcagacgtatgtttattgcagcactattcacaatagcaaagacttggaaacaacccaaatgcccatcaatgatagactggataaagaaaatgtggcacatatacaccatggaatactatgcagacataaaaaaggttgagttcgtgtcctttgcagggacatggatgaagctggaaactatcattctcagcaaactcacacaggaacagaaaagcaaataccacatgttctcactcataagtgggagttgaacaatgagaacacatggacacagggaggggaacatcacacactggggcctgtctgggggtggggggcaaggggagggatagcattaggagaaatacttaatgtagatgaagggttgatgggtgcagcaaaccaccatggcatgtgtatacctatgtaacaaacctgcacgttctgcacgtatatcccagaacttgaagtataataaaaaaagatgcatgtaaaataaaaccctttaaaaaggtaagaaaataggaactgagaaatgaagagggtaaaaagatgttcagcaacctgggcagaggacaactacagccatcaacataaaacctggctctgtgccctctggtagccaagggaaaaagggatctctgggctttggagtattcatttaggaataaaagttgcagccaatcagcagaagggcaagctttccctaccaatcatttctaggggaaaattattgaaggtgtcaggtttttcataagcatgagtacagaactgagcagggagaaagactttgggcccaatgtctgaatatcaacatgcacccccgtttcctgcatttccaagatgtccctgaatggtgtatccaaaagatggcaaatttccctcctcagtggggtcgtgggctagcagatgagccccttgggtttcccatcacctcccatcagggactgtgatgtctttgggggcagaggggtctttgcctccattcgccattttatttgggagatttttcaacatagcctgactgggaaggcccaggtattcggtttgagatcatattgccttattccgactgcctctccagcctttggagggaggagcccttttctgctgtccaactgcatgcctgcagcaagaagacaagagtccccagtgcactgtgagctgaagaaagtaaccaatatttattgggtacctcctatgggccatgccctttgctaagtgcattgtcaacatgatctcatcaagcctcctactaagtttaggaggggagtgttgttaccccatttcacagaagcagaaactcaggctcagagaagttgggtgacttactagtcagtgtgtggagcagagactctgcccatgttctttccctcaaacctggtcactgctggggcccccagggcctagtcctaagggttattgtccaagccccatgtagtggtcaggctggatctgggctctcctccaaggcagggcttttccagaaggattgcagggctcagacactggagctgcccctgccttgacctgctcagcatggatgtcaaaacccactctgaacctggtccctttgccctgctttcttctcctcccccaccctcatgccctcatgtggcatcgtgcctgcctcaggagctctccttgtcctatgtagatgaagcaggcatgattggcaggggtctgctctgccctgcctcagtccccacctcttctccaagctgtgccaaccctccgggtctgactgctgcccctctctcttaggaaacctctgccccagcccagggaacacaaggagcctctccaaggcagaggaccctaagcacttcttttttttattattttttattttattttaggttctgagatacatgtgcagagtgtgcaggtttgttacatagctatacatgtgccatggtgctttgctgcacctatcaacctgtcatctttttaagccccacatgtattaggtatttgtcctaatgctctccctcctcttgcctcccaccccccgacaggctcggtatgtgatgttcccctccctgtgtccacgtgttctcattgttcaactcccacttatagtgagcacatgtggtggttggttttctgttcctgcctaagcacttattataggccaggcactgtgcaggcacctcatcatctcagtcagtctgcaccgaactctgtgcagtagatattattatatcctcatttatcagattaggaaactgaggtgaagcaagttgtccaaggccacccagctgttaaatggcagaagtgggatttgcacctaggtgctcaagtgcattggtttgccaccatgtgctcaaagagaaggggcacaagagcctcatgaagaaggcatagctagcctgacagtccaaaggccagcagccgctgtggccatgactcacacacacctgcctcctcccagaactgccacgtgggtcctcacagctctgtccttatcaacacttactctcctttacaggtagcctaggccccagctcccagctctgttcgaggctcgcagaggggcggtagtgaaggggtctcatttctccaggatcctctttgctctctcgcccggtcctggtccagcttccctttcaagcatagtgaagtgcatttgttagcttgcagccaaccctgggaaatcatgagaatttgttcccaagtcaactcattctccagcgtccacagtgacgtattcactcacccagttgagcgcctagtgtatactagaccctgtgacagcaacaggagtgcaaaggtgactaagacgtggcccctgctttttttttttttttttttttttgagacggagtctcgccctgttgcccaggctggagtgcagtggtgcgatctcagctcctcacaagctctgcctcctaggttcaagcgattctcctgcttcagcctcccaagtagctgggactacaggtgtacaccaccatgccggctaattttttgtatttttagtagagacggggtttcactatgttggccagggtaatctcgaactcctgacctcatgatccgcccgcctcagcctcccaaagtgctgggattacaggcatgagccaccacccctggccggccccgcttttaagagaggggagagaagacctgggccttagaagagctcagaggaaccacaattgactctgcagtcaaggagaggaggctcactgcggatgtggtatttgagccttgaaggatgagtgtggtttcatcaagtagaaaaggcagggatgggaaagggaggtggtccaggcaggggtgatggtgtgggcaaagccttgctgatattaaagaacatagttctgtgcacctggaacactggatgcatggggtgcattatgaaagatgggactgaagaagtgaacttggcttagatcccatgtagtaggtctgagaagtaagatttaacccaaaggttgcaaaagaaccatgcttgtgataaaggatgatggattggggaaacagagaaaaagacagacagactgtaggaagggaggtattagcaaataatcataacacagtgtgaggtgtgcattaatattcactcattccaagtattgatcaagaagagaggtaggtactgggttaggaaacagcttgggcaaatgcatggggaaatgagagatgtcaagatgcattctaatggcagcctcttgaagatcttaagttgtttttggttcactcatttcgcaaatgaattcatttagcaaaagcactatggatacagtgcttacctctaggaagtaagttttagcccaaatgctgcagaaggatcatgcttatgacaaaggatgatggactggggagagagaaaaagaaaagacagacagactccaggaaggaaggtcagtctgcagctccttatagtggctaggagaaggagtctaggcagatacgactcaattagcttcatctgctgtttgtctctcaaaatctagacatgtgcactgctctggctggcccacctatcctgggcattgagttaagtgtgggggctgtgtgttgagagtccccctccattactggcaggaactccacacctcagacattgagccccaggtctgcagggagaagacgtgcttgcaaagtgagctaaaagcaaaacagcctctgacctggcaagcattcccaagtctgcacgcctgcagccagaggagagggtgatgccaggctgctgctcagatgcttttcagccatacccaggccaagacctggtgaccaggcagccagaaggagttccaggaggcacaaggcaggaagttgggggattaggaggtgtagaatggagaatgctctggggagatgggtgctttgttggtgcaactattcgtttattcctccagtgaccacgtgagcagtatggctgcacacacaggctctgcagccaagctgcctgggttcacatttggtctctgtgctttggaaaatttcataagctttctctaccagtttcccttattacccatgagattgatgtgaggattaacctagcatgtagtaaatatcctataaatattattattcaatagtgtacttctttgccaggaacaaaattcacctgttcctctttaaatgtcctccagtctgtctcctgggaaagattcttgtgagctccctggggacagggaccatattttgtttgtctcactgtatccgtagtgctttttgctaaacgaattcacttgctaaatgaatgaaccaggaacaacttaagaccttcaagaggctgccattataatgcatcttgacatctctctcctttccacatgcctttgtccgagctgtttcctaacccagtatttcactacccctcttctccatcaatatttggaatgagcaaataccgttagtgcatacctcacatggtattataattatttgctaatgcgtctgtctcctccatgactctgagctccttgagggattattccatgttgtaccccaggtgccccatgcagatgtgtattttgtgcactgttctgtgtaggctacaaaggaaaaggcctagcacctgcccttggggagctcacccacccaggatggacagaggtgtgcagacagagctgcagggtgggcacaaagggtccatctgctgaagtcctgcagatgcagccccgagcttgtccctcacgtcagcagcctggctcctggtctcagagagaactgtgtggttcccaagcattcactttaggaagaatcacttgcccctccctggctctctgcttcaaggaactgtgacaaccttgggatttgcaaactctctctttaatccttaagaggaaaatgttttggtaaaaagtcaagattagcagatacactcgggtgaaattctttccctggaaataaagaatagagccattaatatccacagtagagtgactttaaatgcccccggggggtcagcaggaaccagggccctgaggaaaggatcagcgtggggaagaggctcccacttccctgtgaggagctgcacatgcagtctcactggagctccctgctgcaatgctgttgcctgtggtggttggtgtggatgctgcctgccaagagccctgattccccaggaagagagaaaaaggcttctctcaggacggccctggtcgcatctgcctgtacaattcctggagcctttggggagctgaagtcaggggctcaagtgcccctgggtttcctggaggaggcaggtgtggtgagacagctgacagacaggagaagggatgctctgaggaagtgactgtccagccatgggaaccagatggcccctggctgtagtcctgatgctgccacttgctagctctgtgaccttgagcaggttacttcacctctctgagacagactcactgtctggacaatgagtaaaaccctacctttcctgtctcagagatttggcaatgggacccaatgacatcaattggaaaggatgctgtgggtgaaaggtaacctttcaggacagcgacaagcctgtctgggcaggatgaatgggctgtggagccctgtatatcctagctcactctttgaacctcagtttccacttcttccctttttatttattgccggggtcttaaatgagtgttgggggtatctgattctccctctgcctgtacttttggggccaagcactgagctgaaaagacaattcctcctagttctccaagcctacaacctgccccctaaccagctgtgagctgtaatacattctccagtgtcactgtgaggtttgtgccttcacccccattttatagatcaggaaacagaggctcctccaagtaaaggagcttgcctcagatttcacagccaatgagtggaaaagcctctgggattcaaatgtcagagcccatatttttcctacttctcgcacctgttatcatatgctgcctcttcctttaacctgcagttccctcccttcacctccaccgtctcaatccttcccactctttaaggttcagttcagctatgacttcttctatgaggctctactcattttctcagatttcttcctcctccaaatttcttgtaaaaattatgttttttctctgattctaaaagaatgcacattacattagaaaagatacacaagcatacagaagataaaaaccacctaatatcccatcacccagaagcttccagtttttctttatgcatttgcatatgcatttgtgtttacttttccccaaaagttctccgatactttgtcctacttttcttttgacccttataacttcctgacttcggtacctttctgatttgccctaccagagtgtgagcccctggaaggcagcctctgcaccctgattcaggttgccacacatatgccagctcctagtgggctggagggaaggacatgcggttggggaactggaagactcatgctttcagctgtgtgcttcctccctagagtgcaggcagaggaggaatcgaatcccctcagcactcttgtaaagaccacagcaatgagtgagagatggtgcctgccagacataccattctttacttttcagcttaaaacagatacaaagtttggggaggctcactggaggaggcttggggctacactggaaagagaagaacttggattcacaccccagcttcccctcttcccagctctgtcacatttgcaaactctgagtctcagtatcctcatgtgtaaaatggggatagggtttatagggttgtaaggatgagatgatgagttgtttgcaaacaacttctcacagtgcacagtgaaggtcagcaatgagagccagccccgccctttcttctttccaaatgattaatatatctgttaccagcctccattcattatatagctctgtcatgtgctaagcaccatgggggctgaaaaagatgttcttcctgccttaaaattccactggggatgaacaaattacacgggagctgatcagagaggaaggcagtccattatgagggctaattgagcagtgcagaccatgttgcaaactgagttagggcctggagagcttactgtgtgctggggtcctcaggaatgccacagatgcatcaataaccacctctgctactctggaagtagtcacatcaggaagactccagagataagcttatctgggctgtggccacagagctggaatttgtaagctttaggtttctatgtctcatgttaccagcttgtctataaattgtaaattacagccatctgatggttagggaatatgaagtttggttaagagaatgaaatgagaccacgaagattagagaacaggaaaagaggggactggggactacatacccatcagaatcttcattcagtcctgaccctcagcaggagggggatttcatcaggctcatttccatccttgatttcgtccatcctggttctcctgacaaggggcatttatcagagttatggcatgggaaatcacaggggagtaatgtaccatggcatttaagagtatgaacgttggagtcggagctattttctccgctacttactagctgtgtgactttgggcaagttacttagcctttctctgagcctcactttctttatctgtaaagtgagggcgatcagaataaacctccttcatatggttattttgagctttataaagagacaatactggctgagcacggtggctcactgccagtaatcccagcactttaggaggccaaagctggaggatcgcttgagcccaggagttggagaccagcctgggcaacatagggaatgagactcctgtctctacaaaaaatatacaaaaattagtcaggcatggtggtacgtgcctgtaatcccatctactcaggaggctaaggcaggaggatcgcttgagcccaggaggtggaggttgcagtgagccaagatcacgccattgtactccagcctgggcaacaggagtgaaaccctgtctgagagagagagagagagagaaaatactactatggtgcttataaaagttcaataaattttagctgttgttagtattattaaagtaagatctgtatgaaaataaagcagattttttcccccaaatgttcatgtcagaagtatatatttcattggcaaggggctgcttctggaaggttgagaggtatcctgggggaggggatagagcactggcaaaattggcatcacaattcaagtcacctcactcagtgttttttaagttatcaaaatccacagtatgaaaagcatttgacattacagtccactatatttatgcatttataaacaagagaaaaaatcacgaaaaatacagtaccacgtgcagtacacactgattccatctattctttttttttctttttcctcaaatgcacttgccgcctacttattccagacccaatgattgggtccctatccacagtttggaaaacactataagaaatgattgtgtcctctcactttccctctctgggatttagttttccaactataaaatgctcctgatgcccagccagcctcaccgctgctccgagtcaatgccaggaacgctgatttagcacatgctatttggagggtacccatccaggtgctgtgggagggacagagattgagaagagtgctttctgaccccacagaggccatttggaaaccctgggaatgggtgggagggttggaggtggggattgcttctcccctaagactcagcgtgatggaaaggcaatggggtgggaactaactggtgttggtctgtcccatttgtgtcccagcagccttcctgacagcgagataggagaggaccccaggtacagccttgggactgggtcagaagtgggtctcaacaaagggaaggggtagggtgggggtggaggacttgtgggtgggtaatgctgagtatggattcagggatgtgcagcctacatattttcagagacatggggctaaggcctgcattctcaatgagggcaaaatttggttcttggggacagaaaacacttagacattgcaatgctttgtggctgtccaaagtaccaaacagatgccagtatatctgtggtgctgaaatttcatggtgaatggagtcagaaaatagactagcgattgccagggtctggtgggagagagagggaagggactgccaatgtgtatgggatttgttttggggaagataaaaatgttttggaattagatagtggagatagttgcacaacctggtgaacgtacttttagtttcagaggttttctaaacctctgatttttttttaagtgacaggaaagacagaaaaaagtatatctaaaaaggctctaggggtgatcatggaaaagaaagttaagaaatatgactgtaaggaaaggagatgggtgtccctcaggccaggcagaaaattcagtcttgttgctttatgttcatgtgcaaatctaaaaaatccaagtgatatagattaatgaggctctgagtccctcaaaaccttccctccccttacctctccaaaaaacacttgagataccctagaggtggtatgaagtcaggatgggaaggttggctcagctttgcaaataagtttaagcctctggcctttgctctccaacaccaaagaggcttcactttggtatattttctctgccctttctccctccttgtccccaactgtcagtatgtgatgacaggctcagcctctgtaatggtagtgatcatatttcttgagccaaaaatcagacctcatggcatgtgacaagtttgcatatgtggatgagaacagagtggcagaatatttgacacgggagcagcttgggcagtccagggcacatggcactgcacctgacatccctggcagatcccccacattccgtggttgtcttctgatggggccatatggggctgcagatcatgcctggagccctcgcagctccagggctgcgggttcccagccccagagtgcaggtgctggtgtcagcctgcctggcctggcctggctctgtccagagcactccttgccccagctgtttgtgcagctgtatcagcctcagacctcagcctattcattccaacctgaatgcagaggctgggtctggaggagccacattgcgggcttcatactcctgatctgacaagttttccccccagagcctgcaccaatggcacctctccccattctccctcttaactgggtcctccagggccctcctcacacacccacgtggtcaggcagcagaggcttccccaagatgggcacaccccactctccacacctctctatgcagcatttgtggctacagactgggtccaggggattgtaaaggcatgctcatgttgggttggagggagctcaggatcttcctggaggatatggttcactcccatgagagctcagtatgcctttcctcccctgctgcagcccagagcgggagacagcgaccgacttggatatcaggtactgcgtcctgggaacattgccccccagggtcaactccctccagggtgctctcaggcccaagggagccacatcaccctgctgggcagcccccagaccccagccccagtgttgggggaggccagggagggcccctgtgctccaccaggtggctcgggagctgctgctgtttctgtgcatccatttactcccttcacataagatcatttttatctgggatctctttttcttttttcttcaaaaaccacatcactcaaaatgtggcttccttggctctgcttttaaaaaaaaaaaaaaaagttcttccatttggagaattacctgctgacttcaaagtccagtggcttgagggctacccaaagagggaggaagccagaagttgagtgttcccttggtttggtcacacttttgggctcctccctgactaaggaacaacagactgcagggctggggcaggctgggtgtagggcagggaggggatgaggtcctgctgccccagtcagttgagacccagacctctcaaacctgcctgggggaaggcaaggccaccagaggccacactaagcagatttctaccaactgcacctccccatccccttgcctccatctgagccatcagcttgacaactgcctctgagaacaagcccctgagaatgccttccgcaccccctactcccgccctgctttttccaggaagagaggccccgtggcctatgcttcgcagaaaccatggctgctaaatgccactgtggaggagaacatcatctttgagagtcccttcaacaaacaacggtaaaagcctgtcggagggaggcaggatgtggaggggaggaactgtctctggccagcctgccccagttccgggcccctccatcgatcacccacacccagccatctcactccccaggtgcttacctgcactccagcctctccatatggtgcacctggagaggggccaggtgtgcctgagcattggggcaatccagctcccataggggagagggcaggaatggagggaagggagagagccccgctgccttttctctagctggtgggagggctagctagctctctctgtgagtctccattcgcctggctcctgcactattttccctccaatgataatagttagggctagcatcgactgcgctcttactacataccaggcacagtgccgagctctttgtacacggaatttcctctcatgcttacaacaacctcagtaggtagatattattgttattcccactctacagatgaagaaccaagtttcagaaaggtcccaaggccacccagccagtaagtgaccaagatgggtctcaaatccaaagctgcctaacacctaagtacatgtttgtcaccaacatactctgatgcctccatgaactctggctggcacctgcccaggctaagggctggctggggaagtatgagaggaacaggctgggcaaatatttgaccagccatcatcattactgcctaaaccaaccagcagtggttttccctgcagtgccccaagcacgggttccggctgcagcttttcccactgcacagagatcatgagcgccctttcatcacttactctgcatatttgttcccaaccaattccatccttctagtatttaacctgcccaaacgctgtgtgaagtgctgacctcagctcttttcaagctcacacggtgtttgcttgcacccaagcgggaggcctattaaagccattgctcaccctgggcatagctacccagagactaatgaccctctgcaagtgctcgggccaactctgaccaggctgaccagctgcatcccctgcctctacccacgccaggtacaagatggtcattgaagcctgctctctgcagccagacatcgacatcctgccccatggagaccagacccagattggggaacgggttagtagcagcctctgaggggttttttcaaagccaggacccccaacctaccatgccctgagacactactcaggacaatgggtaactaggaaataggagacattgaaggctgaagagttgcctgcagtaaggtcaaacatgttgttcttgatgatgtcctttgacaggttttcagtcctgcttggagggcaaggtcagcttagtgccctcccaggctggggatcttcttcatttgcaccccaggtatacactgagagcccacacagcactgtgctcagcctggggttgtattgttcctgttcatcctccagatggggtcccctccacaagcttagacgaacaggattctcctgtgactgtcctccttttgtgtgattttaatccctgctgcctctgtctttgtttgtactggtcagatggtccctagcgcctacacaatgaatctttaaagacttggggctcatgctgccctcttctgaatgaattcagtaaacacgtgcaagttccttctctatgcaaggtgagaagcaggcaaagaagtggatagagccaggcctccatcccaaagagctcatagtccagtagggtacaggacagtgtctcctgaatggctgagggcatgatgtgttcctcctctttggtgacagggcatcaacctgtctggtggtcaacgccagcgaatcagtgtggcccgagccctctaccagcacgccaacgttgtcttcttggtgagtgcaagttcccttggggtcctggtctctggctgcctcccaggcctaactgcccacctccacctccccgcaaccccaccatcatccaacaatctccctctccaggagtaaatccctcctgccagagatattgccttatcatcctagtgatagggaaactgaggcaggcaaggatagcacaaatgacccattgcagacttcagatggagctctgcagtagccaatgaggagaggcaagctgtagttataggctgcctgtctgtgggacagcccaacccctcaacacttatgcagcccgactataagaatggctgataacagaatgtgtgctgccacttcccatcttatgcccagtgcagacattgctaattgttcacagcattatttcccatggaacttaactcatcctcagaatccttctcaacacagcactccaggtaaccactagccatcaaacatgagataaaactaggccaggcgcggtggctcacgcctgttattccagcactttgggaggccgaggcaggcggatcacgaggtcgggagatcgagaccatcctggccaacacggtgaaaccccgtctctactaaaaatacaaaaaattagctgggtgcggtggcgggcgcctgtagtcccagctactccggaggctgaggcaggagaatggcgtgaacccgggaggcggagcttgcagcgagccgagatcgcaccactgcactccagcctggggacaaaccgagactttgtctcaaaaaaaaaaaaaaaaaaaagaacgtattcgcaatccttacactacttcatgtcaagttctgttgtgtcaggtgccttgactgacactgaagaattctaagaaccagtccttggcctcaaagatttagaatctgattagggagacagagctcacccagttcaagaggcccagcccggttcaaatccaaactgtgcggcataaactatgagggggccttgtccagggagacaactgtgagggctggagtaatcagggagggcttcctggaggagagcctcaaagggagagtcaattaaacagaaggaaagagggaggccatttgcacagtgagttggaagaaggaagctcaagtctctgattccagctttattccctcccctctccctacaccacacgcacaagcactcctttactaaagacacttcacagtgggaagattcagtctccgttaccgtctgacacacacacagcgttttacaaagcatgggtgcattcgcgatctctcatgagatttaaacaaccctgctagagaaaagtgaagtggacattttatttcagtaaacgtttatgaagcgtctactctgtgccaggcactaaacgtttatgaagcgtctactctgtgccaggcacaggcacaagaagtctcagttcttgggagtgccataatcaggaatggacaaacaatgatcagatctggctttgcgccagtgtcacgggaatagggaggaaggaagggtaggcgtgggggtcaggacaggatgcaggaggaactggtgcttaggtgagcgaaggatgggtgggagttcacaaggcagacaaaaggcagagcagcactccaggcagaggaacagctcaggagaaggcccagacggcaggcttcctgggaacctggaatgcagagtgctgggaaagcacagatgaagcatgagtctagaagggaaagcgagaggttataaagcacctggaacaccagcccacagggtttgactttagagatgatggggagccgttgaaggtccaggagtcaggcagtgaagtgattagatctgtttgagagtgatatctgacaactgccccattttaaatgaggtaaccaaggcccagagaggttgggtgagttgtccaaagccacacagctaactagcttcagtccctagagcagagttgatagaactctaatgggttttatactcattgtcacccctccccaccatgcctttccctaccctctactctcttcctctcccttctgcccaggatgaccccttctcagctctggatatccatctgagtgaccacttaatgcaggccggc

SEQ ID NO: 10368 - DNA, 727 bp, Homo sapiens
ggccagtctcccactcccctgctctggaagtgatccaggggctggaatcagtgtcttttggctttcatggaggaggggaagccagagactattcactgggaactggctgcctttctgttctctcctgggcggtgggacacgcctaatgaagatcatgggaggctacttcacgtggaccccagatggaatccccacactgtccaacatcaccattcgtatcccccgaggccagctgactatgatcgtggggcaggtgggctgcggcaagtcctcgctccttctagccgcactgggggagatgcagaaggtctcaggggctgtcttctggagcagcagccttcctgacagcgagataggagaggaccccagcccagagcgggagacagcgaccgacttggatatcaggaagagaggccccgtggcctatgcttcgcagaaaccatggctgctaaatgccactgtggaggagaacatcatctttgagagtcccttcaacaaacaacggtacaagatggtcattgaagcctgctctctgcagccagacatcgacatcctgccccatggagaccagacccagattggggaacggggcatcaacctgtctggtggtcaacgccagcgaatcagtgtggcccgagccctctaccagcacgccaacgttgtcttcttggatgaccccttctcagctctggatatccatctgagtgaccacttaatgcaggccggc

SEQ ID NO: 10369 - DNA, 1596 bp, Homo sapiens
gacaggtggaggttggggagccacatgactgaccctccctgtgcctccagggagggctgctctgagcaggcagtggatggcagcaaaaggaatctggggccctggcccctctccagccttaagaagagccattctggtggctgaggacagaactaagcgaccatggagtgtgcgccactggcttgctccccacaggtctccaactacctcaactggatggtgaggaacctggcagacatggagctccagctgggggctgtgaagcgcatccatgggctcctgaaaaccgaggcagagagctacgaggggctcctgggtgagaggctcagggagaggggtggggaagagtccaaggaggagtgtgtctgggttgggggccacaagggagcctggggatggggtggcactttcggatactagctgtggcccatgcctggtggctgagcccagcccggcccccagcaccatcgctgatcccaaagaactggccagaccaagggaagatccagatccagaacctgagcgtgcgctacgacagctccctgaagccggtgctgaagcacgtcaatgccctcatcgcccctggacagaaggtcagagcacgggcccaacccaatgctgcaggacaggcgtgagcaggggatggggcatgcacggagctggatggcttcgcagtcacctcgtggccctccagggccgaggcctctcactattcagacatcgcagtctcctgccctgggcctgtgggggcccatctttcctctccttctattgccttcccccagtgctgccctcaggccttgtcttctcactcatccaccaaggagaccgacactctggactcccccagctcacacgggctttgtcagggcctccctctctgcgaatggtcaggggctttccctagggcactgccccgagcttcagggcagggacctgggggcagacagcgaggccacccttgtattgagggtgagcccctgcctatggccctggcccagctctcctctcgtttcccactctgtctctttgtctctgtctcactttgctgtggctgtccatgtcattctctgaccttgggatgtacctctgtccctgcctctctcatccttctatgtcactatctgtctccgtattgtaatttctgttggtacccaagtgccaggaagcaacgggatcagaggtggctccattgtagggcggggcacacagacacatccatgcataccactctcagctgcccctgtgtcctcctgccacacccatgcccatagagacacaccactgccccccagctctccttcagccaagtacccggcacacccagacccacaccaaggcccaggcaaatggacatccatgcctgcacttgcgtgccggtccctgtgtaagccctctctggacccactgcaggaaacaagcccaaacctgtggtgtccaaagagaaactagtcagaaaaccaggccaaaaagataccctgtgacctcccacacctgcacacacacccagagctagcatagaggctattcccagcagccccagagtcccagtggcggtgcctgcttctctctttccagatcgggatctgcggccgc

SEQ ID NO: 10370 - DNA, 611 bp, Homo sapiens
gacaggtggaggttggggagccacatgactgaccctccctgtgcctccagggagggctgctctgagcaggcagtggatggcagcaaaaggaatctggggccctggcccctctccagccttaagaagagccattctggtggctgaggacagaactaagcgaccatggagtgtgcgccactggcttgctccccacaggtctccaactacctcaactggatggtgaggaacctggcagacatggagctccagctgggggctgtgaagcgcatccatgggctcctgaaaaccgaggcagagagctacgaggggctcctgggtgagaggctcagggagaggggtggggaagagtccaaggaggagtgtgtctgggttgggggccacaagggagcctggggatggggtggcactttcggatactagctgtggcccatgcctggtggctgagcccagcccggcccccagcaccatcgctgatcccaaagaactggccagaccaagggaagatccagatccagaacctgagcgtgcgctacgacagctccctgaagccggtgctgaagcacgtcaatgccctcatcgcccctggacagaagatcgggatctgcggccgc

SEQ ID NO: 10371 - DNA, 1678 bp, Homo sapiens
tcatcaccttccccatcctcttcattggatggggaagtcagagctccaaggtgcacatccaccacagcacatggcttcatttccctgggcacaacctgcggtggatcctgaccttcatgctgctcttcgtcctggtgtgtgagattgcagagggcatcctgtctgatggggtgaccgaatcccaccatctgcacctgtacatgccagccgggatggcgttcatggctgctgtcacctccgtggtctactatcacaacatcgagacttccaacttccccaagctgctaattgccctgctggtgtattggaccctggccttcatcaccaagaccatcaagtttgtcaagttcttggaccacgccatcggcttctcgcagctacgcttctgcctcacagggctgctggtgatcctctatgggatgctgctcctcgtggaggtcaatgtcatcagggtgaggagatacatcttcttcaagacaccgagggaggtgaagcctcccgaggacctgcaagacctgggggtacgcttcctgcagcccttcgtgaatctgctgtccaaaggcacctactggtggatgaacgccttcatcaagactgcccacaagaagcccatcgacttgcgagccatcgggaagctgcccatcgccatgagggccctcaccaactaccaacggctctgcgaggcctttgacgcccagcggaaggacattcagggcactcaaggtgcccgggccatctggcaggcactcagccatgccttcgggaggcgcctggtcctcagcagcactttccgcatcttggccgacctgctgggcttcgccgggccactgtgcatctttgggatcgtggaccaccttgggaaggagaacgacgtcttccagcccaagacacaatttctcggggtttactttgtctcatcccaagagttccttgccaatgcctacgtcttagctgtgcttctgttccttgccctcctactgcaaaggacatttctgcaagcatcctactatgtggccattgaaactggaattaacttgagaggagcaatacagaccaagatttacaataaaattatgcacctgtccacctccaacctgtccatgggagaaatgactgctggacagatctgtaatctggttgccatcgacaccaatcagctcatgtggtttttcttcttgtgcccaaacctctgggctatgccagtacagatcattgtgggtgtgattctcctctactacatactcggagtcagtgccttaattggagcagctgtcatcattctactggctcctgtccagtacttcgtggccaccaagctgtctcaggcccagcggagcacactggtgagtgcccaaagttttcatgaacacggccatccccattgcagctgtcctcatacgtgcaaaagctaagcgagttcctgtccagtgcagagatccgtgaggagcagtgtgccccccatgagcccacacctcagggcccagccagcaagtaccaggcggtgcccctcagggttgtgaaccgcaagcgtccagcccgggaggattgtcggggcctcaccggcccactgcagagcctggtccccagtgcagatggcgatgctgacaactgctgtgtccagatcatgggaggctacttcacgtggaccccagatggaatccccacactgtccaacatc

SEQ ID NO: 10372 - DNA, 6589 bp, Homo sapiens
ccatgcccctggccttctgcggcagcgagaaccactcggccgcctaccgggtggaccagggggtcctcaacaacggctgctttgtggacgcgctcaacgtggtgccgcacgtcttcctactcttcatcaccttccccatcctcttcattggtgagtgcgcgcagcgagccgcggaggaggggacgggagagcagggagggaggaggaggcgctgcgcgccgcaccgctcggcgtccccttccggcccgcgaccgccgtccgcctcgttcccggggtcccctgccctgtgtcctgcccgccggtccccgcactcgcacaccagctcatcccttcactcccccggtgcccccgatcccgcgccaaacacagcggacgtttgtgacccatgggatcaccaagttttgcttctgcagggccaagagctgggatggggaaaagggaaagaggaggtctcagcacgcagtgggaaactggagaggggtcgggcctcaccctccgtggcgcagcttagggagccgggtcacccctcccgcaaggcagcctccctgtcagccgcagctgggcctagggaagagggaagcctgtgctttggagtctgggatggaggcccagctaacccctatgctttcaccgggctgagccgcgcagtggtccgtgatctctgacagtcccaggcccgcgccctgggcgaggagaggcgagagctagggacttggattcccttcccccgccaccccacccgggcatgtgtctccagagcgcaacttctcaggctctgcgcaaagtagctccgactcgccgacgcagcgaccccggcgcccttgcttgcaaagttgggcgccacggccgggacaatcgtgcgtgcctctccactgaggtcccccccatctctctccaagaccttgactcttccagaccagtcaagtctatcaactcatagggtgtcccctgcatccccaaaacgtgttcattcactttaagaaaacaagcaaatcttaaaattcatatacagctttggggaagaaaggaaagattgtcacaaaattagatttacaagaggttgctgcagaagcagagttgctagttattaacaaagacagttagatagaaatagaaataaaacatacaaaatatgtgctcatatgtgcatcaaaaatcaaaaaagaacagcatttacacttctgttctcagccaaacggtttattaacctgatgacttgtcacacaagaagttagtatgtataatggggtaccttggcagggcacagtggcttacatctgtaatctcagcattttggtgggctgtgacaggaagactgcttgagtccaggagttcgagaccagcctgggcaacatagtgagaccccccccgccctttctacaaaaaattaaaaattagctgagcatggtgatgtgcgcctgtagtcccagctactcaggaggctgaggcgggaggatcacttgagcctaggagatcaaggctgtagtgagccgtgatcgtggcactgcactccagcagaggcaacagagcaagaccctgtctcagtaaaaaggtgtggtgggggaggtaccagcataggaccaggctgaatgagttggacgtttagtttgtgtgtaccagccttggggatcctcatgtgtaggtgtcaccctcaccatggacccaatgcccaagcacctttctggggttcatgcaccctcttcctcctccaagtgggcaggcatcctgcctctgactgtctctccctgcaggatggggaagtcagagctccaaggtgcacatccaccacagcacatggcttcatttccctgggcacaacctgcggtggatcctgaccttcatgctgctcttcgtcctggtgtgtgagattgcagagggcatcctgtctgatgggtgagtgactgtctgaggactcaggaaagtgaatctgctccagggtacttcctgaaaggcccaaggagatcctagctcacctatattccacaagcccatgtcttttgttactacatccagcagctcagtgtcttctatgtgccaacctctctgagctgggcactggacgcaagtgagtcccaggccctgccatcagtccaggagagcagagggaacacggacctgcatgccaagtcccagtgaaataatgctagagcctattagaatgccacaactccagtgaaaaatgtctggcctcttctacaacctgccggagttaccttcttggaaaaaaaaaaaaatctaaccatgccacccactcttgcataagacctttccttggttctcagctgttttgaagatgtggtctcagatcctcagcccaccattcaaggtcttcacagtcagccccacctatctctggcctcattccccatgcccaccttccgtttgggcctcacagcacactcctcacacctctgctacagcacagatcacactgtatgttaaagtttatgtctatttgcaaaactgtcttcagagtcagaaaggcctaagagttagaatctgagtcttgttcatctttgtgttcacagtgcaaggcatgtgataaacataaacattattcagtccataaacatttattgggtccttaggagaatgaatgaaaccatgttacaaataagtactctgggaggtgagaggaaggcagaattgggcaagctccatggttgagagggctttggagcggagtctggaagggtgactaggcttcagacacacagaggaggaaggagagagagaactggtggtgcctgagggaagggaaaaggcaccaaagagaaaagcaggtagggctagggagcagcgcaggggctggagcattaaacacaggctggggagcgatggaggctgaggctgggaacccaggttggggcatctcaggaggactgtgaatcccagcctgcatgtttgggtcggatttggtcagcagtttggaacagaagagagatgtcatcagcataacacttttaggtgggaacctgaggtgttcagcgcaggctggaggcagggagaatctagaggtataatagaagcaggacttagcattgactgcagtagtctaggtgagcaataactgcagacagaaatggtgtgtcagcagtcagggacagaagaggagcgggagcagccatctcactaaggaagaatccagtaaccagcaaggatgagagactgccaggagagggagtggtggaggagagggatatttggcttgagtatctgaggtccagcgccccctgagctggaatcagattatacccagactgcactcctgcagtgctgcctggctcctgtagttggatggcaggggataggctccctcatcctccctcccgttccccaccttcccttccccaatgtccctgcatcctggcttcagcagtgatctctaaaatacctgcttgacttggaggcagcagctctgcctgcttattaaagtccctagaccagcaagaagaccagaaggcatactgctacacaagcacgtgacaagtccgcctccacccccacccctacaccccttccaaagtagcacaaatgccacagtgagccctcagatgggaaatactcaccagatggtgacagagaaagacacctccgcccttggagaaggaagacctgggtcttcagtgagcactgctgctgtgtaccagctatgggactttgcacaagtcattcaggctttctgggcctcataagcatttataaacatacgataaaacattttagttgccaacttaaaaatgtgtgagaaagtataaggtgtttcaaaattatttcaaggagtaaagaggcaagagttttgaagatccctgggcagggtgttggctgttcccagtgtggccattcatgactgctctctggccttatgaaacaagcatcatagtccctggcttgcctgcttcatggggctgtggagggtgaaattcgagcatggacagggtgcagagcccggagtggcagagcactgggtagactgtgtattcccagaatgtgggaaactggaatgaatcggtccagggatgccctcctgctggctgtcagcagcccctcctgtgtgtggctgtactgcttcagctcagtgcaaagggccatctcctccccagggcacagatcagctcaagctgagtaattgtcatctggtctttgtgagctcctacccccaggcctgagtgaggggcaggaaaagagcagacaggagaagtcacagacccttgtgatacctccagtctaatccagcctgggttttcagagctgtctggaaatttagggggcaggtgggagggggctgattaaggcagccctgatttgatttagagtgagcctcatttagtgactaattaagccatcttaaacctgtagggcttcccctcttcctttgggtattatttctttctgtgatgttctgaattcagaacaatcaaaacagtataagttagtgaagaagatattttttaataactacaatattttcccagaccaccatacactggataaagcctgtatataaaactttacctaatttcttaactaattgaatgtgtattatttaacaaagcagctaaaaactattctatgaagccatgtcatgaaatatttagttcaattatggttaatcctcatcttatttcgtcttataaaattttaacatttctacctcctattgcaaaaaaaagcatttatatcagcatataataaaacatgtctagatgtcagcttaaaaatgtgtgagagagtagagggtgtttcaaaattatttcaaggagtaaagaggcaagagttttgaagatccccaggaagggtgttggctgtgcccagtgttgccattcatgactgctctctggccttgtctgtcttgtaccttctatattagtttgaagaccttttttggagaatattcactaaagaatatcaatatctaccatttcattaaaaaagaaatgtggagtttgccttttcaagttggtttgatgcttattgatgttttcagggacccagcctcttcccatctttccataccatcctgtgtgtgtgtgtcagcctatcttccccatggtcacaaggtggctgcctagctccgggtattgcttagcatgagcagagagggcatgctgccgacatgcctctcctttatgacagagatcattctttctttgacatctcactggccagaatacgtggaccaacactggcaaaggagtatggaattgcatggctgcttaaaccaatcaccatccattccctggggctgggtatattgctgctggagcaaacctgtggtcctcctggcacagaataaggggaagatactctttggtggacagcccacattgcctctacacttgcacctcagtcccaccagacccactgaggtcacaggatagctctcctcatgtccttcctccttctctgttgaactcttatgtatccttcaaagtccagcctggtgccacctcctctgggaagctgtccttggttgcccaccccctcctttgtgctctctcagtctctgtccatcggcagtatcacttccctagcctgctgactccaacagttagctctgagcatggcagccccctccataccatcagcttctcaagggcagggacccttggcacactggatagaagtagcctggtgggcaacagcagcactgaggcagcaagctgtagcaggccatctgggaatggagtgggtaccacagggctggagcagaaagggcaggctgggcagatctgataaagtggctggaggccacatagcctgggcctttcgttccaggctgagcagagtgggttttgctgtctgcaggagggagctgtggaagggcatgatcacgaccaactaaggtgaccctcctcaccaggcccagggaagactgaggcctggaaggaggctctggctgcctctgggtcttacccccaggccacagtccacccacttagaggcctctgtgagttaaggtggagagactatgagctggtattgactgctccattccccatcccgagagaggagacaaaatcagtgaccttggaaatgcctcttcgtgcctcagtttcctcaccccataaaatgggagactaagagtacccactcgatggggtttaatgaagattaaatgggttaacatatatcgcatgcttagaacagtgcctggcacagagtaaatgctccataaatactgactctcatcagtttgttatcacagcctctggggagggcgccagtgctgacttatgctgttcgtgttaaatggggctgtcactgggtgagttgtggcatacaggcccctgcactgttcaagagaccccagcaacccttgtgcttagggctcagcacatagtaaggcctccagatcatatacccagctctactccatgtactggcagctctgcccagcccataccccaaatacgcccattaactaaagggccctgcagcctataaagtgatgctataaaggttcagtgttcagcctttgaaattcaaggcctgggctgctctattgcagtacttagcatgtccccatcctgtctgtttctctctcccatctcagggtgaccgaatcccaccatctgcacctgtacat

SEQ ID NO: 10373 - DNA, 183 bp, Homo sapiens
ccatgcccctggccttctgcggcagcgagaaccactcggccgcctaccgggtggaccagggggtcctcaacaacggctgctttgtggacgcgctcaacgtggtgccgcacgtcttcctactcttcatcaccttccccatcctcttcattgggtgaccgaatcccaccatctgcacctgtacat

SEQ ID NO: 10374 - DNA, 2011 bp, Homo sapiens
gagcccgagcccagcccgcgcccgcgccgccatgcccctggccttctgcggcagcgagaaccactcggccgcctaccgggtggaccagggggtcctcaacaacggctgctttgtggacgcgctcaacgtggtgccgcacgtcttcctactcttcatcaccttccccatcctcttcattggatggggaagtcagagctccaaggtgcacatccaccacagcacatggcttcatttccctgggcacaacctgcggtggatcctgaccttcatgctgctcttcgtcctggtgtgtgagattgcagagggcatcctgtctgatggggtgaccgaatcccaccatctgcacctgtacatgccagccgggatggcgttcatggctgctgtcacctccgtggtctactatcacaacatcgagacttccaacttccccaagctgctaattgccctgctggtgtattggaccctggccttcatcaccaagaccatcaagtttgtcaagttcttggaccacgccatcggcttctcgcagctacgcttctgcctcacagggctgctggtgatcctctatgggatgctgctcctcgtggaggtcaatgtcatcagggtgaggagatacatcttcttcaagacaccgagggaggtgaagcctcccgaggacctgcaagacctgggggtacgcttcctgcagcccttcgtgaatctgctgtccaaaggcacctactggtggatgaacgccttcatcaagactgcccacaagaagcccatcgacttgcgagccatcgggaagctgcccatcgccatgagggccctcaccaactaccaacggctctgcgaggcctttgacgcccagcggaaggacattcagggcactcaaggtgcccgggccatctggcaggcactcagccatgccttcgggaggcgcctggtcctcagcagcactttccgcatcttggccgacctgctgggcttcgccgggccactgtgcatctttgggatcgtggaccaccttgggaaggagaacgacgtcttccagcccaagacacaatttctcggggtttactttgtctcatcccaagagttccttgccaatgcctacgtcttagctgtgcttctgttccttgccctcctactgcaaaggacatttctgcaagcatcctactatgtggccattgaaactggaattaacttgagaggagcaatacagaccaagatttacaataaaattatgcacctgtccacctccaacctgtccatgggagaaatgactgctggacagatctgtaatctggttgccatcgacaccaatcagctcatgtggtttttcttcttgtgcccaaacctctgggctatgccagtacagatcattgtgggtgtgattctcctctactacatactcggagtcagtgccttaattggagcagctgtcatcattctactggctcctgtccagtacttcgtggccaccaagctgtctcaggcccagcggagcacactggagtattccaatgagcggctgaagcagaccaacgagatgctccgcggcatcaagctgctgaagctgtacgcctgggagaacatcttccgcacgcgggtggagacgacccgcaggaaggagatgaccagcctcagggcctttgccatctatacctccatctccattttcatgaacacggccatccccattgcagctgtcctcataactttcgtgggccacgtcagcttcttcaaagaggccgacttctcgccctccgtggcctttgcctccctctccctcttccatatcttggtcacaccgctgttcctgctgtccagtgtggtccgatctaccgtcaaagctctagtgaggtgaggggagggtccgggcgagggcactgggcaggcaggtcctgtgtcagcctcaaggcttgctcgagtgatggccaaaccacagctgtttggtcccggaacacacccccattgctgggccttgctgtagctggtcctggttggtcagagggacattggcctgtat

SEQ ID NO: 10375 - DNA, 4866 bp, Homo sapiens
agctgagcccgagcccagcccgcgcccgcgccgccatgcccctggccttctgcggcagcgagaaccactcggccgcctaccgggtggaccagggggtcctcaacaacggctgctttgtggacgcgctcaacgtggtgccgcacgtcttcctactcttcatcaccttccccatcctcttcattggatggggaagtcagagctccaaggtgcacatccaccacagcacatggcttcatttccctgggcacaacctgcggtggatcctgaccttcatgctgctcttcgtcctggtgtgtgagattgcagagggcatcctgtctgatggggtgaccgaatcccaccatctgcacctgtacatgccagccgggatggcgttcatggctgctgtcacctccgtggtctactatcacaacatcgagacttccaacttccccaagctgctaattgccctgctggtgtattggaccctggccttcatcaccaagaccatcaagtttgtcaagttcttggaccacgccatcggcttctcgcagctacgcttctgcctcacagggctgctggtgatcctctatgggatgctgctcctcgtggaggtcaatgtcatcagggtgaggagatacatcttcttcaagacaccgagggaggtgaagcctcccgaggacctgcaagacctgggggtacgcttcctgcagcccttcgtgaatctgctgtccaaaggcacctactggtggatgaacgccttcatcaagactgcccacaagaagcccatcgacttgcgagccatcgggaagctgcccatcgccatgagggccctcaccaactaccaacggctctgcgaggcctttgacgcccagcggaaggacattcagggcactcaaggtgcccgggccatctggcaggcactcagccatgccttcgggaggcgcctggtcctcagcagcactttccgcatcttggccgacctgctgggcttcgccgggccactgtgcatctttgggatcgtggaccaccttgggaaggagaacgacgtcttccagcccaagacacaatttctcggggtttactttgtctcatcccaagagttccttgccaatgcctacgtcttagctgtgcttctgttccttgccctcctactgcaaaggacatttctgcaagcatcctactatgtggccattgaaactggaattaacttgagaggagcaatacagaccaagatttacaataaaattatgcacctgtccacctccaacctgtccatgggagaaatgactgctggacagatctgtaatctggttgccatcgacaccaatcagctcatgtggtttttcttcttgtgcccaaacctctgggctatgccagtacagatcattgtgggtgtgattctcctctactacatactcggagtcagtgccttaattggagcagctgtcatcattctactggctcctgtccagtacttcgtggccaccaagctgtctcaggcccagcggagcacactggagtattccaatgagcggctgaagcagaccaacgagatgctccgcggcatcaagctgctgaagctgtacgcctgggagaacatcttccgcacgcgggtggagacgacccgcaggaaggagatgaccagcctcagggcctttgccatctatacctccatctccattttcatgaacacggccatccccattgcagctgtcctcataactttcgtgggccacgtcagcttcttcaaagaggccgacttctcgccctccgtggcctttgcctccctctccctcttccatatcttggtcacaccgctgttcctgctgtccagtgtggtccgatctaccgtcaaagctctagtgagcgtgcaaaagctaagcgagttcctgtccagtgcagagatccgtgaggagcagtgtgccccccatgagcccacacctcagggcccagccagcaagtaccaggcggtgcccctcagggttgtgaaccgcaagcgtccagcccgggaggattgtcggggcctcaccggcccactgcagagcctggtccccagtgcagatggcgatgctgacaactgctgtgtccagatcatgggaggctacttcacgtggaccccagatggaatccccacactgtccaacatcaccattcgtatcccccgaggccagctgactatgatcgtggggcaggtgggctgcggcaagtcctcgctccttctagccgcactgggggagatgcagaaggtctcaggggctgtcttctggagcagccttcctgacagcgagataggagaggaccccagcccagagcgggagacagcgaccgacttggatatcaggaagagaggccccgtggcctatgcttcgcagaaaccatggctgctaaatgccactgtggaggagaacatcatctttgagagtcccttcaacaaacaacggtacaagatggtcattgaagcctgctctctgcagccagacatcgacatcctgccccatggagaccagacccagattggggaacggggcatcaacctgtctggtggtcaacgccagcgaatcagtgtggcccgagccctctaccagcacgccaacgttgtcttcttggatgaccccttctcagctctggatatccatctgagtgaccacttaatgcaggccggcatccttgagctgctccgggacgacaagaggacagtggtcttagtgacccacaagctacagtacctgccccatgcagactggatcattgccatgaaggatggcaccatccagagggagggtaccctcaaggacttccagaggtctgaatgccagctctttgagcactggaagaccctcatgaaccgacaggaccaagagctggagaaggagactgtcacagagagaaaagccacagagccaccccagggcctatctcgtgccatgtcctcgagggatggccttctgcaggatgaggaagaggaggaagaggaggcagctgagagcgaggaggatgacaacctgtcgtccatgctgcaccagcgtgctgagatcccatggcgagcctgcgccaagtacctgtcctccgccggcatcctgctcctgtcgttgctggtcttctcacagctgctcaagcacatggtcctggtggccatcgactactggctggccaagtggaccgacagcgccctgaccctgacccctgcagccaggaactgctccctcagccaggagtgcaccctcgaccagactgtctatgccatggtgttcacggtgctctgcagcctgggcattgtgctgtgcctcgtcacgtctgtcactgtggagtggacagggctgaaggtggccaagagactgcaccgcagcctgctaaaccggatcatcctagcccccatgaggttttttgagaccacgccccttgggagcatcctgaacagattttcatctgactgtaacaccatcgaccagcacatcccatccacgctggagtgcctgagccgctccaccctgctctgtgtctcagccctggccgtcatctcctatgtcacacctgtgttcctcgtggccctcttgcccctggccatcgtgtgctacttcatccagaagtacttccgggtggcgtccagggacctgcagcagctggatgacaccacccagcttccacttctctcacactttgccgaaaccgtagaaggactcaccaccatccgggccttcaggtatgaggcccggttccagcagaagcttctcgaatacacagactccaacaacattgcttccctcttcctcacagctgccaacagatggctggaagtccgaatggagtacatcggtgcatgtgtggtgctcatcgcagcggtgacctccatctccaactccctgcacagggagctctctgctggcctggtgggcctgggccttacctacgccctaatggtctccaactacctcaactggatggtgaggaacctggcagacatggagctccagctgggggctgtgaagcgcatccatgggctcctgaaaaccgaggcagagagctacgaggggctcctggcaccatcgctgatcccaaagaactggccagaccaagggaagatccagatccagaacctgagcgtgcgctacgacagctccctgaagccggtgctgaagcacgtcaatgccctcatcgcccctggacagaagatcgggatctgcggccgcaccggcagtgggaagtcctccttctctcttgccttcttccgcatggtggacacgttcgaagggcacatcatcattgatggcattgacatcgccaaactgccgctgcacaccctgcgctcacgcctctccatcatcctgcaggaccccgtcctcttcagcggcaccatccgatttaacctggaccctgagaggaagtgctcagatagcacactgtgggaggccctggaaatcgcccagctgaagctggtggtgaaggcactgccaggaggcctcgatgccatcatcacagaaggcggggagaatttcagccagggacagaggcagctgttctgcctggcccgggccttcgtgaggaagaccagcatcttcatcatggacgaggccacggcttccattgacatggccacggaaaacatcctccaaaaggtggtgatgacagccttcgcagaccgcactgtggtcaccatcgcgcatcgagtgcacaccatcctgagtgcagacctggtgatcgtcctgaagcggggtgccatccttgagttcgataagccagagaagctgctcagccggaaggacagcgtcttcgcctccttcgtccgtgcagacaagtgacctgccagagcccaagtgccatcccacattcggaccctgcccatacccctgcctgggttttctaactgtaaatcacttgtaaataaat

SEQ ID NO: 10376 - DNA, 2893 bp, Homo sapiens
ggtgcccctcagggttgtgaaccgcaagcgtccagcccgggaggattgtcggggcctcaccggcccactgcagagcctggtccccagtgcagatggcgatgctgacaactgctgtgtccagatcatgggaggctacttcacgtggaccccagatggaatccccacactgtccaacatcaccattcgtatcccccgaggccagctgactatgatcgtggggcaggtgggctgcggcaagtcctcgctccttctagccgcactgggggagatgcagaaggtctcaggggctgtcttctggagcagcagccttcctgacagcgagataggagaggaccccagcccagagcgggagacagcgaccgacttggatatcaggaagagaggccccgtggcctatgcttcgcagaaaccatggctgctaaatgccactgtggaggagaacatcatctttgagagtcccttcaacaaacaacggtacaagatggtcattgaagcctgctctctgcagccagacatcgacatcctgccccatggagaccagacccagattggggaacggggcatcaacctgtctggtggtcaacgccagcgaatcagtgtggcccgagccctctaccagcacgccaacgttgtcttcttggatgaccccttctcagctctggatatccatctgagtgaccacttaatgcaggccggcatccttgagctgctccgggacgacaagaggacagtggtcttagtgacccacaagctacagtacctgccccatgcagactggatcattgccatgaaggatggcaccatccagagggagggtaccctcaaggacttccagaggtctgaatgccagctctttgagcactggaagaccctcatgaaccgacaggaccaagagctggagaaggagactgtcacagagagaaaagccacagagccaccccagggcctatctcgtgccatgtcctcgagggatggccttctgcaggatgaggaagaggaggaagaggaggcagctgagagcgaggaggatgacaacctgtcgtccatgctgcaccagcgtgctgagatcccatggcgagcctgcgccaagtacctgtcctccgccggcatcctgctcctgtcgttgctggtcttctcacagctgctcaagcacatggtcctggtggccatcgactactggctggccaagtggaccgacagcgccctgaccctgacccctgcagccaggaactgctccctcagccaggagtgcaccctcgaccagactgtctatgccatggtgttcacggtgctctgcagcctgggcattgtgctgtgcctcgtcacgtctgtcactgtggagtggacagggctgaaggtggccaagagactgcaccgcagcctgctaaaccggatcatcctagcccccatgaggttttttgagaccacgccccttgggagcatcctgaacagattttcatctgactgtaacaccatcgaccagcacatcccatccacgctggagtgcctgagccgctccaccctgctctgtgtctcagccctggccgtcatctcctatgtcacacctgtgttcctcgtggccctcttgcccctggccatcgtgtgctacttcatccagaagtacttccgggtggcgtccagggacctgcagcagctggatgacaccacccagcttccacttctctcacactttgccgaaaccgtagaaggactcaccaccatccgggccttcaggtatgaggcccggttccagcagaagcttctcgaatacacagactccaacaacattgcttccctcttcctcacagctgccaacagatggctggaagtccgaatggagtacatcggtgcatgtgtggtgctcatcgcagcggtgacctccatctccaactccctgcacagggagctctctgctggcctggtgggcctgggccttacctacgccctaatggtctccaactacctcaactggatggtgaggaacctggcagacatggagctccagctgggggctgtgaagcgcatccatgggctcctgaaaaccgaggcagagagctacgaggggctcctggaccaagggaagatccagatccagaacctgagcgtgcgctacgacagctccctgaagccggtgctgaagcacgtcaatgccctcatcgcccctggacagaagatcgggatctgcggccgcaccggcagtgggaagtcctccttctctcttgccttcttccgcatggtggacacgttcgaagggcacatcatcattgatggcattgacatcgccaaactgccgctgcacaccctgcgctcacgcctctccatcatcctgcaggaccccgtcctcttcagcggcaccatccgatttaacctggaccctgagaggaagtgctcagatagcacactgtgggaggccctggaaatcgcccagctgaagctggtggtgaaggcactgccaggaggcctcgatgccatcatcacagaaggcggggagaatttcagccagggacagaggcagctgttctgcctggcccgggccttcgtgaggaagaccagcatcttcatcatggacgaggccacggcttccattgacatggccacggaaaacatcctccaaaaggtggtgatgacagccttcgcagaccgcactgtggtcaccatcgcgcatcgagtgcacaccatcctgagtgcagacctggtgatcgtcctgaagcggggtgccatccttgagttcgataagccagagaagctgctcagccggaaggacagcgtcttcgcctccttcgtccgtgcagacaagtgacctgccagagcccaagtgccatcccacattcggaccctgcccatacccctgcctgggttttctaactgtaaatcacttgtaaataaatagatt

SEQ ID NO: 10377 - DNA, 6052 bp, Homo sapiens
gggtggaccagggggtcctcaacaacggctgctttgtggacgcgctcaacgtggtgccgcacgtcttcctactcttcatcaccttccccatcctcttcattggatggggaagtcagagctccaaggtgcacatccaccacagcacatggcttcatttccctgggcacaacctgcggtggatcctgaccttcatgctgctcttcgtcctggtgtgtgagattgcagagggcatcctgtctgatggggtgaccgaatcccaccatctgcacctgtacatgccagccgggatggcgttcatggctgctgtcacctccgtggtctactatcacaacatcgagacttccaacttccccaagctgctaattgccctgctggtgtattggaccctggccttcatcaccaagaccatcaagtttgtcaagttcttggaccacgccatcggcttctcgcagctacgcttctgcctcacagggctgctggtgatcctctatgggatgctgctcctcgtggaggtcaatgtcatcagggtgaggagatacatcttcttcaagacaccgagggaggtgaagcctcccgaggacctgcaagacctgggggtacgcttcctgcagcccttcgtgaatctgctgtccaaaggcacctactggtggatgaacgccttcatcaagactgcccacaagaagcccatcgacttgcgagccatcgggaagctgcccatcgccatgagggccctcaccaactaccaacggctctgcgaggcctttgacgcccagcggaaggacattcagggcactcaaggtgcccgggccatctggcaggcactcagccatgccttcgggaggcgcctggtcctcagcagcactttccgcatcttggccgacctgctgggcttcgccgggccactgtgcatctttgggatcgtggaccaccttgggaaggagaacgacgtcttccagcccaagacacaatttctcggggtttactttgtctcatcccaagagttccttgccaatgcctacgtcttagctgtgcttctgttccttgccctcctactgcaaaggacatttctgcaagcatcctactatgtggccattgaaactggaattaacttgagaggagcaatacagaccaagatttacaataaaattatgcacctgtccacctccaacctgtccatgggagaaatgactgctggacagatctgtaatctggttgccatcgacaccaatcagctcatgtggtttttcttcttgtgcccaaacctctgggctatgccagtacagatcattgtgggtgtgattctcctctactacatactcggagtcagtgccttaattggagcagctgtcatcattctactggctcctgtccagtacttcgtggccaccaagctgtctcaggcccagcggagcacactggagtattccaatgagcggctgaagcagaccaacgagatgctccgcggcatcaagctgctgaagctgtacgcctgggagaacatcttccgcacgcgggtggagacgacccgcaggaaggagatgaccagcctcagggcctttgccatctatacctccatctccattttcatgaacacggccatccccattgcagctgtcctcataactttcgtgggccacgtcagcttcttcaaagaggccgacttctcgccctccgtggcctttgcctccctctccctcttccatatcttggtcacaccgctgttcctgctgtccagtgtggtccgatctaccgtcaaagctctagtgagcgtgcaaaagctaagcgagttcctgtccagtgcagagatccgtgaggagcagtgtgccccccatgagcccacacctcagggcccagccagcaagtaccaggcggtgcccctcagggttgtgaaccgcaagcgtccagcccgggaggattgtcggggcctcaccggcccactgcagagcctggtccccagtgcagatggcgatgctgacaactgctgtgtccagatcatgggaggctacttcacgtggaccccagatggaatccccacactgtccaacatcaccattcgtatcccccgaggccagctgactatgatcgtggggcaggtgggctgcggcaagtcctcgctccttctagccgcactgggggagatgcagaaggtctcaggggctgtcttctggagcagcagccttcctgacagcgagataggagaggaccccagcccagagcgggagacagcgaccgacttggatatcaggaagagaggccccgtggcctatgcttcgcagaaaccatggctgctaaatgccactgtggaggagaacatcatctttgagagtcccttcaacaaacaacggtacaagatggtcattgaagcctgctctctgcagccagacatcgacatcctgccccatggagaccagacccagattggggaacggggcatcaacctgtctggtggtcaacgccagcgaatcagtgtggcccgagccctctaccagcacgccaacgttgtcttcttggatgaccccttctcagctctggatatccatctgagtgaccacttaatgcaggccggcatccttgagctgctccgggacgacaagaggacagtggtcttagtgacccacaagctacagtacctgccccatgcagactggatcattgccatgaaggatggcaccatccagagggagggtaccctcaaggacttccagaggtctgaatgccagctctttgagcactggaagaccctcatgaaccgacaggaccaagagctggagaaggagactgtcacagagagaaaagccacagagccaccccagggcctatctcgtgccatgtcctcgagggatggccttctgcaggatgaggaagaggaggaagaggaggcagctgagagcgaggaggatgacaacctgtcgtccatgctgcaccagcgtgctgagatcccatggcgagcctgcgccaagtacctgtcctccgccggcatcctgctcctgtcgttgctggtcttctcacagctgctcaagcacatggtcctggtggccatcgactactggctggccaagtggaccgacagcgccctgaccctgacccctgcagccaggaactgctccctcagccaggagtgcaccctcgaccagactgtctatgccatggtgttcacggtgctctgcagcctgggcattgtgctgtgcctcgtcacgtctgtcactgtggagtggacagggctgaaggtggccaagagactgcaccgcagcctgctaaaccggatcatcctagcccccatgaggttttttgagaccacgccccttgggagcatcctgaacagattttcatctgactgtaacaccatcgaccagcacatcccatccacgctggagtgcctgagccgctccaccctgctctgtgtctcagccctggccgtcatctcctatgtcacacctgtgttcctcgtggccctcttgcccctggccatcgtgtgctacttcatccagaagtacttccgggtggcgtccagggacctgcagcagctggatgacaccacccagcttccacttctctcacactttgccgaaaccgtagaaggactcaccaccatccgggccttcaggtatgaggcccggttccagcagaagcttctcgaatacacagactccaacaacattgcttccctcttcctcacagctgccaacagatggctggaagtccgaatggagtacatcggtgcatgtgtggtgctcatcgcagcggtgacctccatctccaactccctgcacagggagctctctgctggcctggtgggcctgggccttacctacgccctaatggtctccaactacctcaactggatggtgaggaacctggcagacatggagctccagctgggggctgtgaagcgcatccatgggctcctgaaaaccgaggcagagagctacgaggggctcctgggtgagaggctcagggagaggggtggggaagagtccaaggaggagtgtgtctgggttgggggccacaagggagcctggggatggggtggcactttcggatactagctgtggcccatgcctggtggctgagcccagcccggcccccagcaccatcgctgatcccaaagaactggccagaccaagggaagatccagatccagaacctgagcgtgcgctacgacagctccctgaagccggtgctgaagcacgtcaatgccctcatcgcccctggacagaaggtcagagcacgggcccaacccaatgctgcaggacaggcgtgagcaggggatggggcatgcacggagctggatggcttcgcagtcacctcgtggccctccagggccgaggcctctcactattcagacatcgcagtctcctgccctgggcctgtgggggcccatctttcctctccttctattgccttcccccagtgctgccctcaggccttgtcttctcactcatccaccaaggagaccgacactctggactcccccagctcacacgggctttgtcagggcctccctctctgcgaatggtcaggggctttccctagggcactgccccgagcttcagggcagggacctgggggcagacagcgaggccacccttgtattgagggtgagcccctgcctatggccctggcccagctctcctctcgtttcccactctgtctctttgtctctgtctcactttgctgtggctgtccatgtcattctctgaccttgggatgtacctctgtccctgcctctctcatccttctatgtcactatctgtctccgtattgtaatttctgttggtacccaagtgccaggaagcaacgggatcagaggtggctccattgtagggcggggcacacagacacatccatgcataccactctcagctgcccctgtgtcctcctgccacacccatgcccatagagacacaccactgccccccagctctccttcagccaagtacccggcacacccagacccacaccaaggcccaggcaaatggacatccatgcctgcacttgcgtgccggtccctgtgtaagccctctctggacccactgcaggaaacaagcccaaacctgtggtgtccaaagagaaactagtcagaaaaccaggccaaaaagataccctgtgacctcccacacctgcacacacacccagagctagcatagaggctattcccagcagccccagagtcccagtggcggtgcctgcttctctctttccagatcgggatctgcggccgcaccggcagtgggaagtcctccttctctcttgccttcttccgcatggtggacacgttcgaaggtgagttgtaaggcgggcaccccacgtgtacccacagccaccagatgaggcctcagccctggcacgtggtcagacatgacaggaggcccagcagtcaccgccttcccctgcaccctcactgggacccatgcagggcacatcatcattgatggcattgacatcgccaaactgccgctgcacaccctgcgctcacgcctctccatcatcctgcaggaccccgtcctcttcagcggcaccatccgatttaacctggaccctgagaggaagtgctcagatagcacactgtgggaggccctggaaatcgcccagctgaagctggtggtgaaggcactgccaggaggcctcgatgccatcatcacagaaggcggggagaatttcagccagggacagaggcagctgttctgcctggcccgggccttcgtgaggaagaccagcatcttcatcatggacgaggccacggcttccattgacatggccacggaaaacatcctccaaaaggtggtgatgacagccttcgcagaccgcactgtggtcaccatcgcgcatcgagtgcacaccatcctgagtgcagacctggtgatcgtcctgaagcggggtgccatccttgagttcgataagccagagaagctgctcagccggaaggacagcgtcttcgcctccttcgtccgtgcagacaagtgacctgccagagcccaagtgccatcccacattcggaccctgcccatacccctgcctgggttttctaactgtaaatcacttgtaaataaat

SEQ ID NO: 10378 - DNA, 4592 bp, Homo sapiens
gcggcagcgagaaccactcggccgcctaccgggtggaccagggggtcctcaacaacggctgctttgtggacgcgctcaacgtggtgccgcacgtcttcctactcttcatcaccttccccatcctcttcattggatggggaagtcagagctccaaggtgcacatccaccacagcacatggcttcatttccctgggcacaacctgcggtggatcctgaccttcatgctgctcttcgtcctggtgtgtgagattgcagagggcatcctgtctgatggggtgaccgaatcccaccatctgcacctgtacatgccagccgggatggcgttcatggctgctgtcacctccgtggtctactatcacaacatcgagacttccaacttccccaagctgctaattgccctgctggtgtattggaccctggccttcatcaccaagaccatcaagtttgtcaagttcttggaccacgccatcggcttctcgcagctacgcttctgcctcacagggctgctggtgatcctctatgggatgctgctcctcgtggaggtcaatgtcatcagggtgaggagatacatcttcttcaagacaccgagggaggtgaagcctcccgaggacctgcaagacctgggggtacgcttcctgcagcccttcgtgaatctgctgtccaaaggcacctactggtggatgaacgccttcatcaagactgcccacaagaagcccatcgacttgcgagccatcgggaagctgcccatcgccatgagggccctcaccaactaccaacggctctgcgaggcctttgacgcccagcggaaggacattcagggcactcaaggtgcccgggccatctggcaggcactcagccatgccttcgggaggcgcctggtcctcagcagcactttccgcatcttggccgacctgctgggcttcgccgggccactgtgcatctttgggatcgtggaccaccttgggaaggagaacgacgtcttccagcccaagacacaatttctcggggtttactttgtctcatcccaagagttccttgccaatgcctacgtcttagctgtgcttctgttccttgccctcctactgcaaaggacatttctgcaagcatcctactatgtggccattgaaactggaattaacttgagaggagcaatacagaccaagatttacaataaaattatgcacctgtccacctccaacctgtccatgggagaaatgactgctggacagatctgtaatctggttgccatcgacaccaatcagctcatgtggtttttcttcttgtgcccaaacctctgggctatgccagtacagatcattgtgggtgtgattctcctctactacatactcggagtcagtgccttaattggagcagctgtcatcattctactggctcctgtccagtacttcgtggccaccaagctgtctcaggcccagcggagcacactggagtattccaatgagcggctgaagcagaccaacgagatgctccgcggcatcaagctgctgaagctgtacgcctgggagaacatcttccgcacgcgggtggagacgacccgcaggaaggagatgaccagcctcagggcctttgccatctatacctccatctccattttcatgaacacggccatccccattgcagctgtcctcatacgtgcaaaagctaagcgagttcctgtccagtgcagagatccgtgaggagcagtgtgccccccatgagcccacacctcagggcccagccagcaagtaccaggcggtgcccctcagggttgtgaaccgcaagcgtccagcccgggaggattgtcggggcctcaccggcccactgcagagcctggtccccagtgcagatggcgatgctgacaactgctgtgtccagatcatgggaggctacttcacgtggaccccagatggaatccccacactgtccaacatcaccattcgtatcccccgaggccagctgactatgatcgtggggcaggtgggctgcggcaagtcctcgctccttctagccgcactgggggagatgcagaaggtctcaggggctgtcttctggagcagccttcctgacagcgagataggagaggaccccagcccagagcgggagacagcgaccgacttggatatcaggaagagaggccccgtggcctatgcttcgcagaaaccatggctgctaaatgccactgtggaggagaacatcatctttgagagtcccttcaacaaacaacggtacaagatggtcattgaagcctgctctctgcagccagacatcgacatcctgccccatggagaccagacccagattggggaacggggcatcaacctgtctggtggtcaacgccagcgaatcagtgtggcccgagccctctaccagcacgccaacgttgtcttcttggatgaccccttctcagctctggatatccatctgagtgaccacttaatgcaggccggcatccttgagctgctccgggacgacaagaggacagtggtcttagtgacccacaagctacagtacctgccccatgcagactggatcattgccatgaaggatggcaccatccagagggagggtaccctcaaggacttccagaggtctgaatgccagctctttgagcactggaagaccctcatgaaccgacaggaccaagagctggagaaggagactgtcacagagagaaaagccacagagccaccccagggcctatctcgtgccatgtcctcgagggatggccttctgcaggatgaggaagaggaggaagcgtgctgagatcccatggcgagcctgcgccaagtacctgtcctccgccggcatcctgctcctgtcgttgctggtcttctcacagctgctcaagcacatggtcctggtggccatcgactactggctggccaagtggaccgacagcgccctgaccctgacccctgcagccaggaactgctccctcagccaggagtgcaccctcgaccagactgtctatgccatggtgttcacggtgctctgcagcctgggcattgtgctgtgcctcgtcacgtctgtcactgtggagtggacagggctgaaggtggccaagagactgcaccgcagcctgctaaaccggatcatcctagcccccatgaggttttttgagaccacgccccttgggagcatcctgaacagattttcatctgactgtaacaccatcgaccagcacatcccatccacgctggagtgcctgagccgctccaccctgctctgtgtctcagccctggccgtcatctcctatgtcacacctgtgttcctcgtggccctcttgcccctggccatcgtgtgctacttcatccagaagtacttccgggtggcgtccagggacctgcagcagctggatgacaccacccagcttccacttctctcacactttgccgaaaccgtagaaggactcaccaccatccgggccttcaggtatgaggcccggttccagcagaagcttctcgaatacacagactccaacaacattgcttccctcttcctcacagctgccaacagatggctggaagtccgaatggagtacatcggtgcatgtgtggtgctcatcgcagcggtgacctccatctccaactccctgcacagggagctctctgctggcctggtgggcctgggccttacctacgccctaatggtctccaactacctcaactggatggtgaggaacctggcagacatggagctccagctgggggctgtgaagcgcatccatgggctcctgaaaaccgaggcagagagctacgaggggctcctggcaccatcgctgatcccaaagaactggccagaccaagggaagatccagatccagaacctgagcgtgcgctacgacagctccctgaagccggtgctgaagcacgtcaatgccctcatcgcccctggacagaagatcgggatctgcggccgcaccggcagtgggaagtcctccttctctcttgccttcttccgcatggtggacacgttcgaagggcacatcatcattgatggcattgacatcgccaaactgccgctgcacaccctgcgctcacgcctctccatcatcctgcaggaccccgtcctcttcagcggcaccatccgatttaacctggaccctgagaggaagtgctcagatagcacactgtgggaggccctggaaatcgcccagctgaagctggtggtgaaggcactgccaggaggcctcgatgccatcatcacagaaggcggggagaatttcagccagggacagaggcagctgttctgcctggcccgggccttcgtgaggaagaccagcatcttcatcatggacgaggccacggcttccattgacatggccacggaaaacatcctccaaaaggtggtgatgacagccttcgcagaccgcactgtggtcaccatcgcgcatcgagtgcacaccatcctgagtgcagacctggtgatcgtcctgaagcggggtgccatccttgagttcgataagccagagaagctgctcagccggaaggacagcgtcttcgcctccttcgtccgtgcagacaagtgacctgccagagcccaagtgccatcccacattcggaccctgcccatacccctgcctgggttttcta

SEQ ID NO: 10379 - DNA, 4903 bp, Homo sapiens
agaggcgcggcaggcgcgcggagccagcggagccagctgagcccgagcccagcccgcgcccgcgccgccatgcccctggccttctgcggcagcgagaaccactcggccgcctaccgggtggaccagggggtcctcaacaacggctgctttgtggacgcgctcaacgtggtgccgcacgtcttcctactcttcatcaccttccccatcctcttcattggatggggaagtcagagctccaaggtgcacatccaccacagcacatggcttcatttccctgggcacaacctgcggtggatcctgaccttcatgctgctcttcgtcctggtgtgtgagattgcagagggcatcctgtctgatggggtgaccgaatcccaccatctgcacctgtacatgccagccgggatggcgttcatggctgctgtcacctccgtggtctactatcacaacatcgagacttccaacttccccaagctgctaattgccctgctggtgtattggaccctggccttcatcaccaagaccatcaagtttgtcaagttcttggaccacgccatcggcttctcgcagctacgcttctgcctcacagggctgctggtgatcctctatgggatgctgctcctcgtggaggtcaatgtcatcagggtgaggagatacatcttcttcaagacaccgagggaggtgaagcctcccgaggacctgcaagacctgggggtacgcttcctgcagcccttcgtgaatctgctgtccaaaggcacctactggtggatgaacgccttcatcaagactgcccacaagaagcccatcgacttgcgagccatcgggaagctgcccatcgccatgagggccctcaccaactaccaacggctctgcgaggcctttgacgcccagcggaaggacattcagggcactcaaggtgcccgggccatctggcaggcactcagccatgccttcgggaggcgcctggtcctcagcagcactttccgcatcttggccgacctgctgggcttcgccgggccactgtgcatctttgggatcgtggaccaccttgggaaggagaacgacgtcttccagcccaagacacaatttctcggggtttactttgtctcatcccaagagttccttgccaatgcctacgtcttagctgtgcttctgttccttgccctcctactgcaaaggacatttctgcaagcatcctactatgtggccattgaaactggaattaacttgagaggagcaatacagaccaagatttacaataaaattatgcacctgtccacctccaacctgtccatgggagaaatgactgctggacagatctgtaatctggttgccatcgacaccaatcagctcatgtggtttttcttcttgtgcccaaacctctgggctatgccagtacagatcattgtgggtgtgattctcctctactacatactcggagtcagtgccttaattggagcagctgtcatcattctactggctcctgtccagtacttcgtggccaccaagctgtctcaggcccagcggagcacactggagtattccaatgagcggctgaagcagaccaacgagatgctccgcggcatcaagctgctgaagctgtacgcctgggagaacatcttccgcacgcgggtggagacgacccgcaggaaggagatgaccagcctcagggcctttgccatctatacctccatctccattttcatgaacacggccatccccattgcagctgtcctcataactttcgtgggccacgtcagcttcttcaaagaggccgacttctcgccctccgtggcctttgcctccctctccctcttccatatcttggtcacaccgctgttcctgctgtccagtgtggtccgatctaccgtcaaagctctagtgagcgtgcaaaagctaagcgagttcctgtccagtgcagagatccgtgaggagcagtgtgccccccatgagcccacacctcagggcccagccagcaagtaccaggcggtgcccctcagggttgtgaaccgcaagcgtccagcccgggaggattgtcggggcctcaccggcccactgcagagcctggtccccagtgcagatggcgatgctgacaactgctgtgtccagatcatgggaggctacttcacgtggaccccagatggaatccccacactgtccaacatcaccattcgtatcccccgaggccagctgactatgatcgtggggcaggtgggctgcggcaagtcctcgctccttctagccgcactgggggagatgcagaaggtctcaggggctgtcttctggagcagcagccttcctgacagcgagataggagaggaccccagcccagagcgggagacagcgaccgacttggatatcaggaagagaggccccgtggcctatgcttcgcagaaaccatggctgctaaatgccactgtggaggagaacatcatctttgagagtcccttcaacaaacaacggtacaagatggtcattgaagcctgctctctgcagccagacatcgacatcctgccccatggagaccagacccagattggggaacggggcatcaacctgtctggtggtcaacgccagcgaatcagtgtggcccgagccctctaccagcacgccaacgttgtcttcttggatgaccccttctcagctctggatatccatctgagtgaccacttaatgcaggccggcatccttgagctgctccgggacgacaagaggacagtggtcttagtgacccacaagctacagtacctgccccatgcagactggatcattgccatgaaggatggcaccatccagagggagggtaccctcaaggacttccagaggtctgaatgccagctctttgagcactggaagaccctcatgaaccgacaggaccaagagctggagaaggagactgtcacagagagaaaagccacagagccaccccagggcctatctcgtgccatgtcctcgagggatggccttctgcaggatgaggaagaggaggaagaggaggcagctgagagcgaggaggatgacaacctgtcgtccatgctgcaccagcgtgctgagatcccatggcgagcctgcgccaagtacctgtcctccgccggcatcctgctcctgtcgttgctggtcttctcacagctgctcaagcacatggtcctggtggccatcgactactggctggccaagtggaccgacagcgccctgaccctgacccctgcagccaggaactgctccctcagccaggagtgcaccctcgaccagactgtctatgccatggtgttcacggtgctctgcagcctgggcattgtgctgtgcctcgtcacgtctgtcactgtggagtggacagggctgaaggtggccaagagactgcaccgcagcctgctaaaccggatcatcctagcccccatgaggttttttgagaccacgccccttgggagcatcctgaacagattttcatctgactgtaacaccatcgaccagcacatcccatccacgctggagtgcctgagccgctccaccctgctctgtgtctcagccctggccgtcatctcctatgtcacacctgtgttcctcgtggccctcttgcccctggccatcgtgtgctacttcatccagaagtacttccgggtggcgtccagggacctgcagcagctggatgacaccacccagcttccacttctctcacactttgccgaaaccgtagaaggactcaccaccatccgggccttcaggtatgaggcccggttccagcagaagcttctcgaatacacagactccaacaacattgcttccctcttcctcacagctgccaacagatggctggaagtccgaatggagtacatcggtgcatgtgtggtgctcatcgcagcggtgacctccatctccaactccctgcacagggagctctctgctggcctggtgggcctgggccttacctacgccctaatggtctccaactacctcaactggatggtgaggaacctggcagacatggagctccagctgggggctgtgaagcgcatccatgggctcctgaaaaccgaggcagagagctacgaggggctcctggcaccatcgctgatcccaaagaactggccagaccaagggaagatccagatccagaacctgagcgtgcgctacgacagctccctgaagccggtgctgaagcacgtcaatgccctcatcgcccctggacagaagatcgggatctgcggccgcaccggcagtgggaagtcctccttctctcttgccttcttccgcatggtggacacgttcgaagggcacatcatcattgatggcattgacatcgccaaactgccgctgcacaccctgcgctcacgcctctccatcatcctgcaggaccccgtcctcttcagcggcaccatccgatttaacctggaccctgagaggaagtgctcagatagcacactgtgggaggccctggaaatcgcccagctgaagctggtggtgaaggcactgccaggaggcctcgatgccatcatcacagaaggcggggagaatttcagccagggacagaggcagctgttctgcctggcccgggccttcgtgaggaagaccagcatcttcatcatggacgaggccacggcttccattgacatggccacggaaaacatcctccaaaaggtggtgatgacagccttcgcagaccgcactgtggtcaccatcgcgcatcgagtgcacaccatcctgagtgcagacctggtgatcgtcctgaagcggggtgccatccttgagttcgataagccagagaagctgctcagccggaaggacagcgtcttcgcctccttcgtccgtgcagacaagtgacctgccagagcccaagtgccatcccacattcggaccctgcccatacccctgcctgggttttctaactgtaaatcacttgtaaataaat

SEQ ID NO: 10380 - DNA, 5445 bp, Homo sapiens
gaggcgcggcaggcgcgcggagccagcggagccagctgagcccgagcccagcccgcgcccgcgccgccatgcccctggccttctgcggcagcgagaaccactcggccgcctaccgggtggaccagggggtcctcaacaacggctgctttgtggacgcgctcaacgtggtgccgcacgtcttcctactcttcatcaccttccccatcctcttcattggatggggaagtcagagctccaaggtgcacatccaccacagcacatggcttcatttccctgggcacaacctgcggtggatcctgaccttcatgctgctcttcgtcctggtgtgtgagattgcagagggcatcctgtctgatggggtgaccgaatcccaccatctgcacctgtacatgccagccgggatggcgttcatggctgctgtcacctccgtggtctactatcacaacatcgagacttccaacttccccaagctgctaattgccctgctggtgtattggaccctggccttcatcaccaagaccatcaagtttgtcaagttcttggaccacgccatcggcttctcgcagctacgcttctgcctcacagggctgctggtgatcctctatgggatgctgctcctcgtggaggtcaatgtcatcagggtgaggagatacatcttcttcaagacaccgagggaggtgaagcctcccgaggacctgcaagacctgggggtacgcttcctgcagcccttcgtgaatctgctgtccaaaggcacctactggtggatgaacgccttcatcaagactgcccacaagaagcccatcgacttgcgagccatcgggaagctgcccatcgccatgagggccctcaccaactaccaacggctctgcgaggcctttgacgcccaggtgcggaaggacattcagggcactcaaggtgcccgggccatctggcaggcactcagccatgccttcgggaggcgcctggtcctcagcagcactttccgcatcttggccgacctgctgggcttcgccgggccactgtgcatctttgggatcgtggaccaccttgggaaggagaacgacgtcttccagcccaagacacaatttctcggggtttactttgtctcatcccaagagttccttgccaatgcctacgtcttagctgtgcttctgttccttgccctcctactgcaaaggacatttctgcaagcatcctactatgtggccattgaaactggaattaacttgagaggagcaatacagaccaagatttacaataaaattatgcacctgtccacctccaacctgtccatgggagaaatgactgctggacagatctgtaatctggttgccatcgacaccaatcagctcatgtggtttttcttcttgtgcccaaacctctgggctatgccagtacagatcattgtgggtgtgattctcctctactacatactcggagtcagtgccttaattggagcagctgtcatcattctactggctcctgtccagtacttcgtggccaccaagctgtctcaggcccagcggagcacactggagtattccaatgagcggctgaagcagaccaacgagatgctccgcggcatcaagctgctgaagctgtacgcctgggagaacatcttccgcacgcgggtggagacgacccgcaggaaggagatgaccagcctcagggcctttgccatctatacctccatctccattttcatgaacacggccatccccattgcagctgtcctcataactttcgtgggccacgtcagcttcttcaaagaggccgacttctcgccctccgtggcctttgcctccctctccctcttccatatcttggtcacaccgctgttcctgctgtccagtgtggtccgatctaccgtcaaagctctagtgagcgtgcaaaagctaagcgagttcctgtccagtgcagagatccgtgaggagcagtgtgccccccatgagcccacacctcagggcccagccagcaagtaccaggcggtgggttgtgaaccgcaagcgtccagcccgggaggattgtcggggcctcaccggcccactgcagagcctggtccccagtgcagatggcgatgctgacaactgctgtgtccagatcatgggaggctacttcacgtggaccccagatggaatccccacactgtccaacatcaccattcgtatcccccgaggccagctgactatgatcgtggggcaggtgggctgcggcaagtcctcgctccttctagccgcactgggggagatgcagaaggtctcaggggctgtcttctggagcagccttcctgacagcgagataggagaggaccccagcccagagcgggagacagcgaccgacttggatatcaggaagagaggccccgtggcctatgcttcgcagaaaccatggctgctaaatgccactgtggaggagaacatcatctttgagagtcccttcaacaaacaacggtacaagatggtcattgaagcctgctctctgcagccagacatcgacatcctgccccatggagaccagacccagattggggaacggggcatcaacctgtctggtggtcaacgccagcgaatcagtgtggcccgagccctctaccagcacgccaacgttgtcttcttggatgaccccttctcagctctggatatccatctgagtgaccacttaatgcaggccggcatccttgagctgctccgggacgacaagaggacagtggtcttagtgacccacaagctacagtacctgccccatgcagactggatcattgccatgaaggatggcaccatccagagggagggtaccctcaaggacttccagaggtctgaatgccagctctttgagcactggaagaccctcatgaaccgacaggaccaagagctggagaaggagactgtcacagagagaaaagccacagagccaccccagggcctatctcgtgccatgtcctcgagggatggccttctgcaggatgaggaagaggaggaagaggaggcagctgagagcgaggaggatgacaacctgtcgtccatgctgcaccagcgtgctgagatcccatggcgagcctgcgccaagtacctgtcctccgccggcatcctgctcctgtcgttgctggtcttctcacagctgctcaagcacatggtcctggtggccatcgactactggctggccaagtggaccgacagcgccctgaccctgacccctgcagccaggaactgctccctcagccaggagtgcaccctcgaccagactgtctatgccatggtgttcacggtgctctgcagcctgggcattgtgctgtgcctcgtcacgtctgtcactgtggagtggacagggctgaaggtggccaagagactgcaccgcagcctgctaaaccggatcatcctagcccccatgaggttttttgagaccacgccccttgggagcatcctgaacagattttcatctgactgtaacaccatcgaccagcacatcccatccacgctggagtgcctgagccgctccaccctgctctgtgtctcagccctggccgtcatctcctatgtcacacctgtgttcctcgtggccctcttgcccctggccatcgtgtgctacttcatccagaagtacttccgggtggcgtccagggacctgcagcagctggatgacaccacccagcttccacttctctcacactttgccgaaaccgtagaaggactcaccaccatccgggccttcaggtatgaggcccggttccagcagaagcttctcgaatacacagactccaacaacattgcttccctcttcctcacagctgccaacagatggctggaagtccgaatggagtacatcggtgcatgtgtggtgctcatcgcagcggtgacctccatctccaactccctgcacagggagctctctgctggcctggtgggcctgggccttacctacgccctaatggtctccaactacctcaactggatggtgaggaacctggcagacatggagctccagctgggggctgtgaagcgcatccatgggctcctgaaaaccgaggcagagagctacgaggggctcctgggtgagaggctcagggagaggggtggggaagagtccaaggaggagtgtgtctgggttgggggccacaagggagcctggggatggggtggcactttcggatactagctgtggcccatgcctggtggctgagcccagcccggcccccagcaccatcgctgatcccaaagaactggccagaccaagggaagatccagatccagaacctgagcgtgcgctacgacagctccctgaagccggtgctgaagcacgtcaatgccctcatcgcccctggacagaagatcgggatctgcggccgcaccggcagtgggaagtcctccttctctcttgccttcttccgcatggtggacacgttcgaagggcacatcatcattgatggcattgacatcgccaaactgccgctgcacaccctgcgctcacgcctctccatcatcctgcaggaccccgtcctcttcagcggcaccatccgatttaacctggaccctgagaggaagtgctcagatagcacactgtgggaggccctggaaatcgcccagctgaagctggtggtgaaggcactgccaggaggcctcgatgccatcatcacagaaggcggggagaatttcagccagggacagaggcagctgttctgcctggcccgggccttcgtgaggaagaccagcatcttcatcatggacgaggccacggcttccattgacatggccacggaaaacatcctccaaaaggtggtgatgacagccttcgcagaccgcactgtggtcaccatcgcgcatcgagtgcacaccatcctgagtgcagacctggtgatcgtcctgaagcggggtgccatccttgagttcgataagccagagaagctgctcagccggaaggacagcgtcttcgcctccttcgtccgtgcagacaagtgacctgccagagcccaagtgccatcccacattcggaccctgcccatacccctgcctgggttttctaactgtaaatcacttgtaaataaatagatttgattatttcctactagaggccctaagtctggtgggcaggggctggcggtggatggtgggttcagtagaaccagcctggctctgacatcaggcagaagctgtgtgagcaaaagcctgcttccttacctgtgaaatgaggcctctattagtcagccaggctgccacaacaacatatcacagactgggtggctttaaaacagacttttttctcacagttctggaggctgaagtctgggatcaaggtgttggcaggtttggtttctcctgaggcctctctccttggcttgcagagggctgccttctggctgtgtgctcacatgacctttactctgtgcacatgcatccctgctttctctctgtgtcttaaaaggacaccagtcatattggattagggccccac

SEQ ID NO: 10381 - DNA, 3379 bp, Homo sapiens
gaccccagatggaatccccacactgtccaacatcaccattcgtatcccccgaggccagctgactatgatcgtggggcaggtgggctgcggcaagtcctcgctccttctagccgcactgggggagatgcagaaggtctcaggggctgtcttctggagcagcagccttcctgacagcgagataggagaggaccccagcccagagcgggagacagcgaccgacttggatatcaggaagagaggccccgtggcctatgcttcgcagaaaccatggctgctaaatgccactgtggaggagaacatcatctttgagagtcccttcaacaaacaacggtacaagatggtcattgaagcctgctctctgcagccagacatcgacatcctgccccatggagaccagacccagattggggaacggatggtccctagcgcctacacaatgaatctttaaagacttggggctcatgctgccctcttctgaatgaattcagtaaacacgtgcaagttccttctctatgcaagggcatcaacctgtctggtggtcaacgccagcgaatcagtgtggcccgagccctctaccagcacgccaacgttgtcttcttggatgaccccttctcagctctggatatccatctgagtgaccacttaatgcaggccggcatccttgagctgctccgggacgacaagaggacagtggtcttagtgacccacaagctacagtacctgccccatgcagactggatcattgccatgaaggatggcaccatccagagggagggtaccctcaaggacttccagaggtctgaatgccagctctttgagcactggaagaccctcatgaaccgacaggaccaagagctggagaaggagactgtcacagagagaaaagccacagagccaccccagggcctatctcgtgccatgtcctcgagggatggccttctgcaggatgaggaagaggaggaagtaagtggggataaaatgccctgattcaccctcagagggatggaaatgtgtagccacagagtgggttcttgcggcctgcagaggaggcagctgagagcgaggaggatgacaacctgtcgtccatgctgcaccagcgtgctgagatcccatggcgagcctgcgccaagtacctgtcctccgccggcatcctgctcctgtcgttgctggtcttctcacagctgctcaagcacatggtcctggtggccatcgactactggctggccaagtggaccgacagcgccctgaccctgacccctgcagccaggaactgctccctcagccaggagtgcaccctcgaccagactgtctatgccatggtgttcacggtgctctgcagcctgggcattgtgctgtgcctcgtcacgtctgtcactgtggagtggacagggctgaaggtggccaagagactgcaccgcagcctgctaaaccggatcatcctagcccccatgaggttttttgagaccacgccccttgggagcatcctgaacagattttcatctgactgtaacaccatcgaccagcacatcccatccacgctggagtgcctgagccgctccaccctgctctgtgtctcagccctggccgtcatctcctatgtcacacctgtgttcctcgtggccctcttgcccctggccatcgtgtgctacttcatccagaagtacttccgggtggcgtccagggacctgcagcagctggatgacaccacccagcttccacttctctcacactttgccgaaaccgtagaaggactcaccaccatccgggccttcaggtatgaggcccggttccagcagaagcttctcgaatacacagactccaacaacattgcttccctcttcctcacagctgccaacagatggctggaagtccgaatggagtacatcggtgcatgtgtggtgctcatcgcagcggtgacctccatctccaactccctgcacagggagctctctgctggcctggtgggcctgggccttacctacgccctaatggtgagcggcagtgggctagggcagaggaggggtcagacaccagcactcccggagcaccttcgtcactggagacatgagacactcccaggccttaccccaatttcatttgcatctgatgccagagggacagtgcgggcaggaaggctgaccagcaggccccagggcccaggccccagacaggtggaggttggggagccacatgactgaccctccctgtgcctccagggagggctgctctgagcaggcagtggatggcagcaaaaggaatctggggccctggcccctctccagccttaagaagagccattctggtggctgaggacagaactaagcgaccatggagtgtgcgccactggcttgctccccacaggtctccaactacctcaactggatggtgaggaacctggcagacatggagctccagctgggggctgtgaagcgcatccatgggctcctgaaaaccgaggcagagagctacgaggggctcctgggtgagaggctcagggagaggggtggggaagagtccaaggaggagtgtgtctgggttgggggccacaagggagcctggggatggggtggcactttcggatactagctgtggcccatgcctggtggctgagcccagcccggcccccagcaccatcgctgatcccaaagaactggccagaccaagggaagatccagatccagaacctgagcgtgcgctacgacagctccctgaagccggtgctgaagcacgtcaatgccctcatcgcccctggacagaagatcgggatctgcggccgcaccggcagtgggaagtcctccttctctcttgccttcttccgcatggtggacacgttcgaagggcacatcatcattgatggcattgacatcgccaaactgccgctgcacaccctgcgctcacgcctctccatcatcctgcaggaccccgtcctcttcagcggcaccatccgatttaacctggaccctgagaggaagtgctcagatagcacactgtgggaggccctggaaatcgcccagctgaagctggtggtgaaggcactgccaggaggcctcgatgccatcatcacagaaggcggggagaatttcagccagggacagaggcagctgttctgcctggcccgggccttcgtgaggaagaccagcatcttcatcatggacgaggccacggcttccattgacatggccacgcatcgagtgcacaccatcctgagtgcagacctggtgatcgtcctgaagcggggtgccatccttgagttcgataagccagagaagctgctcagccggaaggacagcgtcttcgcctccttcgtccgtgcagacaagtgacctgccagagcccaagtgccatcccacattcggaccctgcccatacccctgcctgg

SEQ ID NO: 10382 - DNA, 4185 bp, Homo sapiens
ggggtggcactttcggatactagctgtggcccatgcctggtggctgagcccagcccggcccccagcaccatcgctgatcccaaagaactggccagaccaagggaagatccagatccagaacctgagcgtgcgctacgacagctccctgaagccggtgctgaagcacgtcaatgccctcatcgcccctggacagaaggtcagagcacgggcccaacccaatgctgcaggacaggcgtgagcaggggatggggcatgcacggagctggatggcttcgcagtcacctcgtggccctccagggccgaggcctctcactattcagacatcgcagtctcctgccctgggcctgtgggggcccatctttcctctccttctattgccttcccccagtgctgccctcaggccttgtcttctcactcatccaccaaggagaccgacactctggactcccccagctcacacgggctttgtcagggcctccctctctgcgaatggtcaggggctttccctagggcactgccccgagcttcagggcagggacctgggggcagacagcgaggccacccttgtattgagggtgagcccctgcctatggccctggcccagctctcctctcgtttcccactctgtctctttgtctctgtctcactttgctgtggctgtccatgtcattctctgaccttgggatgtacctctgtccctgcctctctcatccttctatgtcactatctgtctccgtattgtaatttctgttggtacccaagtgccaggaagcaacgggatcagaggtggctccattgtagggcggggcacacagacacatccatgcataccactctcagctgcccctgtgtcctcctgccacacccatgcccatagagacacaccactgccccccagctctccttcagccaagtacccggcacacccagacccacaccaaggcccaggcaaatggacatccatgcctgcacttgcgtgccggtccctgtgtaagccctctctggacccactgcaggaaacaagcccaaacctgtggtgtccaaagagaaactagtcagaaaaccaggccaaaaagataccctgtgacctcccacacctgcacacacacccagagctagcatagaggctattcccagcagccccagagtcccagtggcggtgcctgcttctctctttccagatcgggatctgcggccgcaccggcagtgggaagtcctccttctctcttgccttcttccgcatggtggacacgttcgaaggtgagttgtaaggcgggcaccccacgtgtacccacagccaccagatgaggcctcagccctggcacgtggtcagacatgacaggaggcccagcagtcaccgccttcccctgcaccctcactgggacccatgcagggcacatcatcattgatggcattgacatcgccaaactgccgctgcacaccctgcgctcacgcctctccatcatcctgcaggaccccgtcctcttcagcggcaccatccggtgagccccaccacccctcaggcccacccagccccaggccggctcagttccatcagatctggagcacaaagaggagggggttgggggagaccaggatcccagaggtgtttcctgctcatgcccttctccatcccatcaggcccaggcagcctctggaaggggatcccccacccatgggtctaagatgctgtcccccacccactgccaccacctcggtgcttctcccagccagacctccaactcagtctgctctcgctcactgccctctttgccgcctggggatgcaggcaggaccctgctccctccctactggggctttctgtgccacttccagatttaacctggaccctgagaggaagtgctcagatagcacactgtgggaggccctggaaatcgcccagctgaagctggtggtgaaggcactgccaggaggcctcggtaactactcctggctatgcagctgggttggttgggcactcaaggaccctgtaaggatggcagacagaagcccgtgtctcaggtttgccccaagtttggagtctgaagcctggcaggaccatttagtcctacttctcactatacgggggcccagagaggtcaggtgtcttgccccaggtcacacaactggtcagttcagggtctggctcctcctgcagggtacagcgggtacagtcagggatccttgtgagacagagattgcgagtcccccatgccaagggggcatcttcagccctgccctgccccatccacctgcatgcccagttctgccttaggggaggagaagatggactgggcaatcatagacacgggtcactcatcaaggccaccggtgattggcaaagccttggtatatttgctgcagctcctggagcattgggggtggccaagccttggtttcaatgaatcaccctaccaaggccctacatacacactcagtgcacccctcagtgcacacgccccctcccagaactgcccagggccacagcagcacacacctccaggggtgcccttctcgttgcagtccttgcagacggcctccacattgttgtgtcaggtgcaccagccctgcacacgcctgtgctcttggacacacacccacctatttgcccccatgcacacattttccaacagccccccaagccatcccatctgctccactcacagcacaagattaactcagtcctacttcatctccccgggctgttttcagatgccatcatcacagaaggcggggagaatttcagccagggacagaggcagctgttctgcctggcccgggccttcgtgaggaagaccagcatcttcatcatggacgaggccacggcttccattgacatggccacggttggtcctgggcccctccatgggaccatggtcttggaaagggtttagtgggatgctagggagaaatttgcacgaagtagtcctgaggctcaagttgcctctaacatcaaatgctatgtgttgcagaaaatgaaaagagctggggggaccctgactctgtctagtcttagggaatgttacacacacacacgcacacacaaaaacactatgcaaacacacacataagctgcacacacagacccacacagacttcacactgtcacctatcacaacagcacacacacagccacaaccacaacctacatacacacacagagctgagctcccaacaggctgagtccagtccctgagtgccgggaacctgttcagtcctgtggggtgggggtgggactaggatcggggtcagatgggagctgagccacagacctgggctccacatcccccaagccaggccagaccccatccactgggcaggtgagccaacagctgttgcccccacttggcaggaaaacatcctccaaaaggtggtgatgacagccttcgcagaccgcactgtggtcaccatcgcggtaaggggcccattgatggggtgcagagggacacccagggacaggactggcctgttgtggccgtcatcagtgcacagcccctgggcttgcctggtcccagtaatcaagaaagaaccctgaagcaggcagttcagggcaaggggcctggagggcatgcagggagcctgggttgcaggatttggggtggggggttttgcccctgtgcttccctcagacctcccctctccttctccaggttccaaggcctgcccctgtcccaaggccttatatgttaggctggcgttacttctccataggaagtgggggaggggttgtggagggtctctgagccttgaagcctggaggtggggtagagttgggacttggagaggagagaagggtggtattagcagatggagagcttgtagtcacatccaccccaggaaagtgcagtccccacagtgacaggacattctggccacatgcctcatcctcctcctccaagccgcaggagggccaccctcagctgtggcccccaccgcgggtggtattcccaccatcctgacccgccccctcctgccctgcccagcatcgagtgcacaccatcctgagtgcagacctggtgatcgtcctgaagcggggtgccatccttgagttcgataagccagagaagctgctcagccggaaggacagcgtcttcgcctccttcgtccgtgcagacaagtgacctgccagagcccaagtgccatcccacattcggaccctgcccatacccctgcctgggttttcta

SEQ ID NO: 10383 - DNA, 969 bp, Homo sapiens
ggggtggcactttcggatactagctgtggcccatgcctggtggctgagcccagcccggcccccagcaccatcgctgatcccaaagaactggccagaccaagggaagatccagatccagaacctgagcgtgcgctacgacagctccctgaagccggtgctgaagcacgtcaatgccctcatcgcccctggacagaagatcgggatctgcggccgcaccggcagtgggaagtcctccttctctcttgccttcttccgcatggtggacacgttcgaagggcacatcatcattgatggcattgacatcgccaaactgccgctgcacaccctgcgctcacgcctctccatcatcctgcaggaccccgtcctcttcagcggcaccatccgatttaacctggaccctgagaggaagtgctcagatagcacactgtgggaggccctggaaatcgcccagctgaagctggtggtgaaggcactgccaggaggcctcggtaactactcctggctatgcagctgggttggttgggcactcaaggaccctgtaaggatggcagacagaagcccgtgtctcagatgccatcatcacagaaggcggggagaatttcagccagggacagaggcagctgttctgcctggcccgggccttcgtgaggaagaccagcatcttcatcatggacgaggccacggcttccattgacatggccacggaaaacatcctccaaaaggtggtgatgacagccttcgcagaccgcactgtggtcaccatcgcgcatcgagtgcacaccatcctgagtgcagacctggtgatcgtcctgaagcggggtgccatccttgagttcgataagccagagaagctgctcagccggaaggacagcgtcttcgcctccttcgtccgtgcagacaagtgacctgccagagcccaagtgccatcccacattcggaccctgcccatacccctgcctgggttttcta

SEQ ID NO: 10384 - DNA, 2477 bp, Homo sapiens
atccccattgcagctgtcctcataactttcgtgggccacgtcagcttcttcaaagaggccgacttctcgccctccgtggcctttgcctccctctccctcttccatatcttggtcacaccgctgttcctgctgtccagtgtggtccgatctaccgtcaaagctctagtgagcgtgcaaaagctaagcgagttcctgtccagtgcagagatccgtgaggagcagtgtgccccccatgagcccacacctcagggcccagccagcaagtaccaggcggtgcccctcagggttgtgaaccgcaagcgtccagcccgggaggattgtcggggcctcaccggcccactgcagagcctggtccccagtgcagatggcgatgctgacaactgctgtgtccagatcatgggaggctacttcacgtggaccccagatggaatccccacactgtccaacatcaccattcgtatcccccgaggccagctgactatgatcgtggggcaggtgggctgcggcaagtcctcgctccttctagccgcactgggggagatgcagaaggtctcaggggctgtcttctggagcagcagccttcctgacagcgagataggagaggaccccagcccagagcgggagacagcgaccgacttggatatcaggaagagaggccccgtggcctatgcttcgcagaaaccatggctgctaaatgccactgtggaggagaacatcatctttgagagtcccttcaacaaacaacggtacaagatggtcattgaagcctgctctctgcagccagacatcgacatcctgccccatggagaccagacccagattggggaacggggcatcaacctgtctggtggtcaacgccagcgaatcagtgtggcccgagccctctaccagcacgccaacgttgtcttcttggatgaccccttctcagctctggatatccatctgagtgaccacttaatgcaggccggcatccttgagctgctccgggacgacaagaggacagtggtcttagtgacccacaagctacagtacctgccccatgcagactggatcattgccatgaaggatggcaccatccagagggagggtaccctcaaggacttccagaggtctgaatgccagctctttgagcactggaagaccctcatgaaccgacaggaccaagagctggagaaggagactgtcacagagagaaaagccacagagccaccccagggcctatctcgtgccatgtcctcgagggatggccttctgcaggatgaggaagaggaggaagaggaggcagctgagagcgaggaggatgacaacctgtcgtccatgctgcaccagcgtgctgagatcccatggcgagcctgcgccaagtacctgtcctccgccggcatcctgctcctgtcgttgctggtcttctcacagctgctcaagcacatggtcctggtggccatcgactactggctggccaagtggaccgacagcgccctgaccctgacccctgcagccaggaactgctccctcagccaggagtgcaccctcgaccagactgtctatgccatggtgttcacggtgctctgcagcctgggcattgtgctgtgcctcgtcacgtctgtcactgtggagtggacagggctgaaggtggccaagagactgcaccgcagcctgctaaaccggatcatcctagcccccatgaggttttttgagaccacgccccttgggagcatcctgaacagattttcatctgactgtaacaccatcgaccagcacatcccatccacgctggagtgcctgagccgctccaccctgctctgtgtctcagccctggccgtcatctcctatgtcacacctgtgttcctcgtggccctcttgcccctggccatcgtgtgctacttcatccagaagtacttccgggtggcgtccagggacctgcagcagctggatgacaccacccagcttccacttctctcacactttgccgaaaccgtagaaggactcaccaccatccgggccttcagagacagaattccaccatgttggccaggctggtcttgaactcttgacctcaggtgatccgcccgcctcagcctcccaaagtgctgggattacaggggtatgaggcccggttccagcagaagcttctcgaatacacagactccaacaacattgcttccctcttcctcacagctgccaacagatggctggaagtccgaatggagtacatcggtgcatgtgtggtgctcatcgcagcggtgacctccatctccaactccctgcacagggagctctctgctggcctggtgggcctgggccttacctacgccctaatggtctccaactacctcaactggatggtgaggaacctggcagacatggagctccagctgggggctgtgaagcgcatccatgggctcctgaaaaccgaggcagagagctacgaggggctcctgggtgagaggctcagggagaggggtggggaagagtccaag

SEQ ID NO: 10385 - DNA, 2580 bp, Homo sapiens
gacggccgggccgggcggcggagctgcaagggacagaggcgcggcaggcgcgcggagccagcggagccagctgagcccgagcccagcccgcgcccgcgccgccatgcccctggccttctgcggcagcgagaaccactcggccgcctaccgggtggaccagggggtcctcaacaacggctgctttgtggacgcgctcaacgtggtgccgcacgtcttcctactcttcatcaccttccccatcctcttcattggatggggaagtcagagctccaaggtgcacatccaccacagcacatggcttcatttccctgggcacaacctgcggtggatcctgaccttcatgctgctcttcgtcctggtgtgtgagattgcagagggcatcctgtctgatggggtgaccgaatcccaccatctgcacctgtacatgccagccgggatggcgttcatggctgctgtcacctccgtggtctactatcacaacatcgagacttccaacttccccaagctgctaattgccctgctggtgtattggaccctggccttcatcaccaagaccatcaagtttgtcaagttcttggaccacgccatcggcttctcgcagctacgcttctgcctcacagggctgctggtgatcctctatgggatgctgctcctcgtggaggtcaatgtcatcagggtgaggagatacatcttcttcaagacaccgagggaggtgaagcctcccgaggacctgcaagacctgggggtacgcttcctgcagcccttcgtgaatctgctgtccaaaggcacctactggtggatgaacgccttcatcaagactgcccacaagaagcccatcgacttgcgagccatcgggaagctgcccatcgccatgagggccctcaccaactaccaacggctctgcgaggcctttgacgcccagcggaaggacattcagggcactcaaggtgcccgggccatctggcaggcactcagccatgccttcgggaggcgcctggtcctcagcagcactttccgcatcttggccgacctgctgggcttcgccgggccactgtgcatctttgggatcgtggaccaccttgggaaggagaacgacgtcttccagcccaagacacaatttctcggggtttactttgtctcatcccaagagttccttgccaatgcctacgtcttagctgtgcttctgttccttgccctcctactgcaaaggacatttctgcaagcatcctactatgtggccattgaaactggaattaacttgagaggagcaatacagaccaagatttacaataaaattatgcacctgtccacctccaacctgtccatgggagaaatgactgctggacagatctgtaatctggttgccatcgacaccaatcagctcatgtggtttttcttcttgtgcccaaacctctgggctatgccagtacagttttcatgaacacggccatccccattgcagctgtcctcataactttcgtgggccacgtcagcttcttcaaagaggccgacttctcgccctccgtggcctttgcctccctctccctcttccatatcttggtcacaccgctgttcctgctgtccagtgtggtccgatctaccgtcaaagctctagtgagcgtgcaaaagctaagcgagttcctgtccagtgcagagatccgtgaggagcagtgtgccccccatgagcccacacctcagggcccagccagcaagtaccaggcggtgcccctcagggttgtgaaccgcaagcgtccagcccgggaggattgtcggggcctcaccggcccactgcagagcctggtccccagtgcagatggcgatgctgacaactgctgtgtccagatcatgggaggctacttcacgtggaccccagatggaatccccacactgtccaacatcaccattcgtatcccccgaggccagctgactatgatcgtggggcaggtgggctgcggcaagtcctcgctccttctagccgcactgggggagatgcagaaggtctcaggggctgtcttctggagcagccttcctgacagcgagataggagaggaccccagcccagagcgggagacagcgaccgacttggatatcaggaagagaggccccgtggcctatgcttcgcagaaaccatggctgctaaatgccactgtggaggagaacatcatctttgagagtcccttcaacaaacaacggtacaagatggtcattgaagcctgctctctgcagccagacatcgacatcctgccccatggagaccagacccagattggggaacggggcatcaacctgtctggtggtcaacgccagcgaatcagtgtggcccgagccctctaccagcacgccaacgttgtcttcttggatgaccccttctcagctctggatatccatctgagtgaccacttaatgcaggccggcatccttgagctgctccgggacgacaagaggacagtggtcttagtgacccacaagctacagtacctgccccatgcagactggatcattgccatgaaggatggcaccatccagagggagggtaccctcaaggacttccagaggtctgaatgccagctctttgagcac

SEQ ID NO: 10386 - DNA, 5969 bp, Homo sapiens
agaggcgcggcaggcgcgcggagccagcggagccagctgagcccgagcccagcccgcgcccgcgccgccatgcccctggccttctgcggcagcgagaaccactcggccgcctaccgggtggaccagggggtcctcaacaacggctgctttgtggacgcgctcaacgtggtgccgcacgtcttcctactcttcatcaccttccccatcctcttcattggatggggaagtcagagctccaaggtgcacatccaccacagcacatggcttcatttccctgggcacaacctgcggtggatcctgaccttcatgctgctcttcgtcctggtgtgtgagattgcagagggcatcctgtctgatggggtgaccgaatcccaccatctgcacctgtacatgccagccgggatggcgttcatggctgctgtcacctccgtggtctactatcacaacatcgagacttccaacttccccaagctgctaattgccctgctggtgtattggaccctggccttcatcaccaagaccatcaagtttgtcaagttcttggaccacgccatcggcttctcgcagctacgcttctgcctcacagggctgctggtgatcctctatgggatgctgctcctcgtggaggtcaatgtcatcagggtgaggagatacatcttcttcaagacaccgagggaggtgaagcctcccgaggacctgcaagacctgggggtacgcttcctgcagcccttcgtgaatctgctgtccaaaggcacctactggtggatgaacgccttcatcaagactgcccacaagaagcccatcgacttgcgagccatcgggaagctgcccatcgccatgagggccctcaccaactaccaacggctctgcgaggcctttgacgcccagcggaaggacattcagggcactcaaggtgcccgggccatctggcaggcactcagccatgccttcgggaggcgcctggtcctcagcagcactttccgcatcttggccgacctgctgggcttcgccgggccactgtgcatctttgggatcgtggaccaccttgggaaggagaacgacgtcttccagcccaagacacaatttctcggggtttactttgtctcatcccaagagttccttgccaatgcctacgtcttagctgtgcttctgttccttgccctcctactgcaaaggacatttctgcaagcatcctactatgtggccattgaaactggaattaacttgagaggagcaatacagaccaagatttacaataaaattatgcacctgtccacctccaacctgtccatgggagaaatgactgctggacagatctgtaatctggttgccatcgacaccaatcagctcatgtggtttttcttcttgtgcccaaacctctgggctatgccagtacagatcattgtgggtgtgattctcctctactacatactcggagtcagtgccttaattggagcagctgtcatcattctactggctcctgtccagtacttcgtggccaccaagctgtctcaggcccagcggagcacactggagtattccaatgagcggctgaagcagaccaacgagatgctccgcggcatcaagctgctgaagctgtacgcctgggagaacatcttccgcacgcgggtggagacgacccgcaggaaggagatgaccagcctcagggcctttgccatctatacctccatctccattttcatgaacacggccatccccattgcagctgtcctcatagggtgaggggtgtctctgtgcttcccgagcagcgtgcaaaagctaagcgagttcctgtccagtgcagagatccgtgaggagcagtgtgccccccatgagcccacacctcagggcccagccagcaagtaccaggcggtgcccctcagggttgtgaaccgcaagcgtccagcccgggaggattgtcggggcctcaccggcccactgcagagcctggtccccagtgcagatggcgatgctgacaactgctgtgtccagatcatgggaggctacttcacgtggaccccagatggaatccccacactgtccaacatcaccattcgtatcccccgaggccagctgactatgatcgtggggcaggtgggctgcggcaagtcctcgctccttctagccgcactgggggagatgcagaaggtctcaggggctgtcttctggagcagccttcctgacagcgagataggagaggaccccagcccagagcgggagacagcgaccgacttggatatcaggaagagaggccccgtggcctatgcttcgcagaaaccatggctgctaaatgccactgtggaggagaacatcatctttgagagtcccttcaacaaacaacggtacaagatggtcattgaagcctgctctctgcagccagacatcgacatcctgccccatggagaccagacccagattggggaacggggcatcaacctgtctggtggtcaacgccagcgaatcagtgtggcccgagccctctaccagcacgccaacgttgtcttcttggatgaccccttctcagctctggatatccatctgagtgaccacttaatgcaggccggcatccttgagctgctccgggacgacaagaggacagtggtcttagtgacccacaagctacagtacctgccccatgcagactggatcattgccatgaaggatggcaccatccagagggagggtaccctcaaggacttccagaggtctgaatgccagctctttgagcactggaagaccctcatgaaccgacaggaccaagagctggagaaggagactgtcacagagagaaaagccacagagccaccccagggcctatctcgtgccatgtcctcgagggatggccttctgcaggatgaggaagaggaggaagagggatggaaatgtgtagccacagagtgggttcttgcggcctgcagaggaggcagctgagagcgaggaggatgacaacctgtcgtccatgctgcaccagcgtgctgagatcccatggcgagcctgcgccaagtacctgtcctccgccggcatcctgctcctgtcgttgctggtcttctcacagctgctcaagcacatggtcctggtggccatcgactactggctggccaagtggaccgacagcgccctgaccctgacccctgcagccaggaactgctccctcagccaggagtgcaccctcgaccagactgtctatgccatggtgttcacggtgctctgcagcctgggcattgtgctgtgcctcgtcacgtctgtcactgtggagtggacagggctgaaggtggccaagagactgcaccgcagcctgctaaaccggatcatcctagcccccatgaggttttttgagaccacgccccttgggagcatcctgaacagattttcatctgactgtaacaccatcgaccagcacatcccatccacgctggagtgcctgagccgctccaccctgctctgtgtctcagccctggccgtcatctcctatgtcacacctgtgttcctcgtggccctcttgcccctggccatcgtgtgctacttcatccagaagtacttccgggtggcgtccagggacctgcagcagctggatgacaccacccagcttccacttctctcacactttgccgaaaccgtagaaggactcaccaccatccgggccttcaggtatgaggcccggttccagcagaagcttctcgaatacacagactccaacaacattgcttccctcttcctcacagctgccaacagatggctggaagtccgaatggagtacatcggtgcatgtgtggtgctcatcgcagcggtgacctccatctccaactccctgcacagggagctctctgctggcctggtgggcctgggccttacctacgccctaatggtctccaactacctcaactggatggtgaggaacctggcagacatggagctccagctgggggctgtgaagcgcatccatgggctcctgaaaaccgaggcagagagctacgaggggctcctgggtgagaggctcagggagaggggtggggaagagtccaaggaggagtgtgtctgggttgggggccacaagggagcctggggatggggtggcactttcggatactagctgtggcccatgcctggtggctgagcccagcccggcccccagcaccatcgctgatcccaaagaactggccagaccaagggaagatccagatccagaacctgagcgtgcgctacgacagctccctgaagccggtgctgaagcacgtcaatgccctcatcgcccctggacagaaggtcagagcacgggcccaacccaatgctgcaggacaggcgtgagcaggggatggggcatgcacggagctggatggcttcgcagtcacctcgtggccctccagggccgaggcctctcactattcagacatcgcagtctcctgccctgggcctgtgggggcccatctttcctctccttctattgccttcccccagtgctgccctcaggccttgtcttctcactcatccaccaaggagaccgacactctggactcccccagctcacacgggctttgtcagggcctccctctctgcgaatggtcaggggctttccctagggcactgccccgagcttcagggcagggacctgggggcagacagcgaggccacccttgtattgagggtgagcccctgcctatggccctggcccagctctcctctcgtttcccactctgtctctttgtctctgtctcactttgctgtggctgtccatgtcattctctgaccttgggatgtacctctgtccctgcctctctcatccttctatgtcactatctgtctccgtattgtaatttctgttggtacccaagtgccaggaagcaacgggatcagaggtggctccattgtagggcggggcacacagacacatccatgcataccactctcagctgcccctgtgtcctcctgccacacccatgcccatagagacacaccactgccccccagctctccttcagccaagtacccggcacacccagacccacaccaaggcccaggcaaatggacatccatgcctgcacttgcgtgccggtccctgtgtaagccctctctggacccactgcaggaaacaagcccaaacctgtggtgtccaaagagaaactagtcagaaaaccaggccaaaaagataccctgtgacctcccacacctgcacacacacccagagctagcatagaggctattcccagcagccccagagtcccagtggcggtgcctgcttctctctttccagatcgggatctgcggccgcaccggcagtgggaagtcctccttctctcttgccttcttccgcatggtggacacgttcgaagggcacatcatcattgatggcattgacatcgccaaactgccgctgcacaccctgcgctcacgcctctccatcatcctgcaggaccccgtcctcttcagcggcaccatccgatttaacctggaccctgagaggaagtgctcagatagcacactgtgggaggccctggaaatcgcccagctgaagctggtggtgaaggcactgccaggaggcctcgatgccatcatcacagaaggcggggagaatttcagccagggacagaggcagctgttctgcctggcccgggccttcgtgaggaagaccagcatcttcatcatggacgaggccacggcttccattgacatggccacggaaaacatcctccaaaaggtggtgatgacagccttcgcagaccgcactgtggtcaccatcgcgcatcgagtgcacaccatcctgagtgcagacctggtgatcgtcctgaagcggggtgccatccttgagttcgataagccagagaagctgctcagccggaaggacagcgtcttcgcctccttcgtccgtgcagacaagtgacctgccagagcccaagtgccatcccacattcggaccctgcccatacccctgcctgggttttctaactgtaaatcacttgtaaataaatagattt

SEQ ID NO: 10387 - DNA, 3525 bp, Homo sapiens
gcgcggcaggcgcgcggagccagcggagccagctgagcccgagcccagcccgcgcccgcgccgccatgcccctggccttctgcggcagcgagaaccactcggccgcctaccgggtggaccagggggtcctcaacaacggctgctttgtggacgcgctcaacgtggtgccgcacgtcttcctactcttcatcaccttccccatcctcttcattgggtgaccgaatcccaccatctgcacctgtacatgccagccgggatggcgttcatggctgctgtcacctccgtggtctactatcacaacatcgagacttccaacttccccaagctgctaattgccctgctggtgtattggaccctggccttcatcaccaagaccatcaagtttgtcaagttcttggaccacgccatcggcttctcgcagctacgcttctgcctcacagggctgctggtgatcctctatgggatgctgctcctcgtggaggtcaatgtcatcagggtgaggagatacatcttcttcaagacaccgagggaggtgaagcctcccgaggacctgcaagacctgggggtacgcttcctgcagcccttcgtgaatctgctgtccaaaggcacctactggtggatgaacgccttcatcaagactgcccacaagaagcccatcgacttgcgagccatcgggaagctgcccatcgccatgagggccctcaccaactaccaacggctctgcgaggcctttgacgcccagcggaaggacattcagggcactcaaggtgcccgggccatctggcaggcactcagccatgccttcgggaggcgcctggtcctcagcagcactttccgcatcttggccgacctgctgggcttcgccgggccactgtgcatctttgggatcgtggaccaccttgggaaggagaacgacgtcttccagcccaagacacaatttctcggggtttactttgtctcatcccaagagttccttgccaatgcctacgtcttagctgtgcttctgttccttgccctcctactgcaaaggacatttctgcaagcatcctactatgtggccattgaaactggaattaacttgagaggagcaatacagaccaagatttacaataaaattatgcacctgtccacctccaacctgtccatgggagaaatgactgctggacagatctgtaatctggttgccatcgacaccaatcagctcatgtggtttttcttcttgtgcccaaacctctgggctatgccagtacagatcattgtgggtgtgattctcctctactacatactcggagtcagtgccttaattggagcagctgtcatcattctactggctcctgtccagtacttcgtggccaccaagctgtctcaggcccagcggagcacactggagtattccaatgagcggctgaagcagaccaacgagatgctccgcggcatcaagctgctgaagctgtacgcctgggagaacatcttccgcacgcgggtggagacgacccgcaggaaggagatgaccagcctcagggcctttgccatctatacctccatctccattttcatgaacacggccatccccattgcagctgtcctcataactttcgtgggccacgtcagcttcttcaaagaggccgacttctcgccctccgtggcctttgcctccctctccctcttccatatcttggtcacaccgctgttcctgctgtccagtgtggtccgatctaccgtcaaagctctagtgagcgtgcaaaagctaagcgagttcctgtccagtgcagagatccgtgaggagcagtgtgccccccatgagcccacacctcagggcccagccagcaagtaccaggcggtgcccctcagggttgtgaaccgcaagcgtccagcccgggaggattgtcggggcctcaccggcccactgcagagcctggtccccagtgcagatggcgatgctgacaactgctgtgtccagatcatgggaggctacttcacgtggaccccagatggaatccccacactgtccaacatcaccattcgtatcccccgaggccagctgactatgatcgtggggcaggtgggctgcggcaagtcctcgctccttctagccgcactgggggagatgcagaaggtctcaggggctgtcttctggagcagcagccttcctgacagcgagataggagaggaccccagcccagagcgggagacagcgaccgacttggatatcaggaagagaggccccgtggcctatgcttcgcagaaaccatggctgctaaatgccactgtggaggagaacatcatctttgagagtcccttcaacaaacaacggtacaagatggtcattgaagcctgctctctgcagccagacatcgacatcctgccccatggagaccagacccagattggggaacggggcatcaacctgtctggtggtcaacgccagcgaatcagtgtggcccgagccctctaccagcacgccaacgttgtcttcttggatgaccccttctcagctctggatatccatctgagtgaccacttaatgcaggccggcatccttgagctgctccgggacgacaagaggacagtggtcttagtgacccacaagctacagtacctgccccatgcagactggatcattgccatgaaggatggcaccatccagagggagggtaccctcaaggacttccagaggtctgaatgccagctctttgagcactggaagaccctcatgaaccgacaggaccaagagctggagaaggagactgtcacagagagaaaagccacagagccaccccagggcctatctcgtgccatgtcctcgagggatggccttctgcaggatgaggaagaggaggaagaggaggcagctgagagcgaggaggatgacaacctgtcgtccatgctgcaccagcgtgctgagatcccatggcgagcctgcgccaagtacctgtcctccgccggcatcctgctcctgtcgttgctggtcttctcacagctgctcaagcacatggtcctggtggccatcgactactggctggccaagtggaccgacagcgccctgaccctgacccctgcagccaggaactgctccctcagccaggtgtgactggcggcccatggcagaggttgggagtggggatgggggaagggctgagcccatgggcaccctggaactccaaatcactctctgcctgtgaaggagtgcaccctcgaccagactgtctatgccatggtgttcacggtgctctgcagcctgggcattgtgctgtgcctcgtcacgtctgtcactgtggagtggacagggctgaaggtggccaagagactgcaccgcagcctgctaaaccggatcatcctagcccccatgaggtacccgtctcccctggccaggctgggactgtgagcaagtcactgttctctgagccttagtcttcccatctataaaatggggatatacaacctgtcacaagcttgtgggggtgactcaaggagacagtgtgtgtaaaagtgccctccttgtgcaagaagcagggagaaactggc

SEQ ID NO: 10388 - DNA, 1248 bp, Homo sapiens
actgtgcatctttgggatcgtggaccaccttgggaaggagaacgacgtcttccagcccaagacacaatttctcggggtttactttgtctcatcccaagagttccttgccaatgcctacgtcttagctgtgcttctgttccttgccctcctactgcaaaggacatttctgcaagcatcctactatgtggccattgaaactggaattaacttgagaggagcaatacagaccaagatttacaataaaattatgcacctgtccacctccaacctgtccatgggagaaatgactgctggacagatctgtaatctggttgccatcgacaccaatcagctcatgtggtttttcttcttgtgcccaaacctctgggctatgccagtacaggcccaacccaagctggctgaagaacaccctgatggcctccatttgagcacaactaatgaaggactggatgccagagataagtccaggagggtgatgctgcagggcaggccagggaagaggatcattgtgggtgtgattctcctctactacatactcggagtcagtgccttaattggagcagctgtcatcattctactggctcctgtccagtacttcgtggccaccaagctgtctcaggcccagcggagcacactggagtattccaatgagcggctgaagcagaccaacgagatgctccgcggcatcaagctgctgaagctgtacgcctgggagaacatcttccgcacgcgggtggagacgacccgcaggaaggagatgaccagcctcagggcctttgccatctatacctccatctccattttcatgaacacggccatccccattgcagctgtcctcataactttcgtgggccacgtcagcttcttcaaagaggccgacttctcgccctccgtggcctttgcctccctctccctcttccatatcttggtcacaccgctgttcctgctgtccagtgtggtccgatctaccgtcaaagctctagtgagcgtgcaaaagctaagcgagttcctgtccagtgcagagatccgtgaggagcagtgtgccccccatgagcccacacctcagggcccagccagcaagtaccaggcggtgcccctcagggttgtgaaccgcaagcgtccagcccgggaggattgtcggggcctcaccggcccactgcagagcctggtccccagtgcagatggcgatgctgacaactgctgtgtccagatcatgggaggctacttcacgtggaccccagatggaat

SEQ ID NO: 10389 - DNA, 4940 bp, Homo sapiens
gggccgggcggcggagctgcaagggacagaggcgcggcaggcgcgcggagccagcggagccagctgagcccgagcccagcccgcgcccgcgccgccatgcccctggccttctgcggcagcgagaaccactcggccgcctaccgggtggaccagggggtcctcaacaacggctgctttgtggacgcgctcaacgtggtgccgcacgtcttcctactcttcatcaccttccccatcctcttcattggatggggaagtcagagctccaaggtgcacatccaccacagcacatggcttcatttccctgggcacaacctgcggtggatcctgaccttcatgctgctcttcgtcctggtgtgtgagattgcagagggcatcctgtctgatggggtgaccgaatcccaccatctgcacctgtacatgccagccgggatggcgttcatggctgctgtcacctccgtggtctactatcacaacatcgagacttccaacttccccaagctgctaattgccctgctggtgtattggaccctggccttcatcaccaagaccatcaagtttgtcaagttcttggaccacgccatcggcttctcgcagctacgcttctgcctcacagggctgctggtgatcctctatgggatgctgctcctcgtggaggtcaatgtcatcagggtgaggagatacatcttcttcaagacaccgagggaggtgaagcctcccgaggacctgcaagacctgggggtacgcttcctgcagcccttcgtgaatctgctgtccaaaggcacctactggtggatgaacgccttcatcaagactgcccacaagaagcccatcgacttgcgagccatcgggaagctgcccatcgccatgagggccctcaccaactaccaacggctctgcgaggcctttgacgcccagcggaaggacattcagggcactcaaggtgcccgggccatctggcaggcactcagccatgccttcgggaggcgcctggtcctcagcagcactttccgcatcttggccgacctgctgggcttcgccgggccactgtgcatctttgggatcgtggaccaccttgggaaggagaacgacgtcttccagcccaagacacaatttctcggggtttactttgtctcatcccaagagttccttgccaatgcctacgtcttagctgtgcttctgttccttgccctcctactgcaaaggacatttctgcaagcatcctactatgtggccattgaaactggaattaacttgagaggagcaatacagaccaagatttacaataaaattatgcacctgtccacctccaacctgtccatgggagaaatgactgctggacagatctgtaatctggttgccatcgacaccaatcagctcatgtggtttttcttcttgtgcccaaacctctgggctatgccagtacagatcattgtgggtgtgattctcctctactacatactcggagtcagtgccttaattggagcagctgtcatcattctactggctcctgtccagtacttcgtggccaccaagctgtctcaggcccagcggagcacactggagtattccaatgagcggctgaagcagaccaacgagatgctccgcggcatcaagctgctgaagctgtacgcctgggagaacatcttccgcacgcgggtggagacgacccgcaggaaggagatgaccagcctcagggcctttgccatctatacctccatctccattttcatgaacacggccatccccattgcagctgtcctcataactttcgtgggccacgtcagcttcttcaaagaggccgacttctcgccctccgtggcctttgcctccctctccctcttccatatcttggtcacaccgctgttcctgctgtccagtgtggtccgatctaccgtcaaagctctagtgaggggtgaggggtgtctctgtgcttcccgagcagcgtgcaaaagctaagcgagttcctgtccagtgcagagatccgtgaggagcagtgtgccccccatgagcccacacctcagggcccagccagcaagtaccaggcggtgcccctcagggttgtgaaccgcaagcgtccagcccgggaggattgtcggggcctcaccggcccactgcagagcctggtccccagtgcagatggcgatgctgacaactgctgtgtccagatcatgggaggctacttcacgtggaccccagatggaatccccacactgtccaacatcaccattcgtatcccccgaggccagctgactatgatcgtggggcaggtgggctgcggcaagtcctcgctccttctagccgcactgggggagatgcagaaggtctcaggggctgtcttctggagcagcagccttcctgacagcgagataggagaggaccccagcccagagcgggagacagcgaccgacttggatatcaggaagagaggccccgtggcctatgcttcgcagaaaccatggctgctaaatgccactgtggaggagaacatcatctttgagagtcccttcaacaaacaacggtacaagatggtcattgaagcctgctctctgcagccagacatcgacatcctgccccatggagaccagacccagattggggaacggggcatcaacctgtctggtggtcaacgccagcgaatcagtgtggcccgagccctctaccagcacgccaacgttgtcttcttggatgaccccttctcagctctggatatccatctgagtgaccacttaatgcaggccggcatccttgagctgctccgggacgacaagaggacagtggtcttagtgacccacaagctacagtacctgccccatgcagactggatcattgccatgaaggatggcaccatccagagggagggtaccctcaaggacttccagaggtctgaatgccagctctttgagcactggaagaccctcatgaaccgacaggaccaagagctggagaaggagactgtcacagagagaaaagccacagagccaccccagggcctatctcgtgccatgtcctcgagggatggccttctgcaggatgaggaagaggaggaagaggaggcagctgagagcgaggaggatgacaacctgtcgtccatgctgcaccagcgtgctgagatcccatggcgagcctgcgccaagtacctgtcctccgccggcatcctgctcctgtcgttgctggtcttctcacagctgctcaagcacatggtcctggtggccatcgactactggctggccaagtggaccgacagcgccctgaccctgacccctgcagccaggaactgctccctcagccaggagtgcaccctcgaccagactgtctatgccatggtgttcacggtgctctgcagcctgggcattgtgctgtgcctcgtcacgtctgtcactgtggagtggacagggctgaaggtggccaagagactgcaccgcagcctgctaaaccggatcatcctagcccccatgaggttttttgagaccacgccccttgggagcatcctgaacagattttcatctgactgtaacaccatcgaccagcacatcccatccacgctggagtgcctgagccgctccaccctgctctgtgtctcagccctggccgtcatctcctatgtcacacctgtgttcctcgtggccctcttgcccctggccatcgtgtgctacttcatccagaagtacttccgggtggcgtccagggacctgcagcagctggatgacaccacccagcttccacttctctcacactttgccgaaaccgtagaaggactcaccaccatccgggccttcaggtatgaggcccggttccagcagaagcttctcgaatacacagactccaacaacattgcttccctcttcctcacagctgccaacagatggctggaagtccgaatggagtacatcggtgcatgtgtggtgctcatcgcagcggtgacctccatctccaactccctgcacagggagctctctgctggcctggtgggcctgggccttacctacgccctaatggtctccaactacctcaactggatggtgaggaacctggcagacatggagctccagctgggggctgtgaagcgcatccatgggctcctgaaaaccgaggcagagagctacgaggggctcctggcaccatcgctgatcccaaagaactggccagaccaagggaagatccagatccagaacctgagcgtgcgctacgacagctccctgaagccggtgctgaagcacgtcaatgccctcatcgcccctggacagaagatcgggatctgcggccgcaccggcagtgggaagtcctccttctctcttgccttcttccgcatggtggacacgttcgaagggcacatcatcattgatggcattgacatcgccaaactgccgctgcacaccctgcgctcacgcctctccatcatcctgcaggaccccgtcctcttcagcggcaccatccgatttaacctggaccctgagaggaagtgctcagatagcacactgtgggaggccctggaaatcgcccagctgaagctggtggtgaaggcactgccaggaggcctcgatgccatcatcacagaaggcggggagaatttcagccagggacagaggcagctgttctgcctggcccgggccttcgtgaggaagaccagcatcttcatcatggacgaggccacggcttccattgacatggccacggaaaacatcctccaaaaggtggtgatgacagccttcgcagaccgcactgtggtcaccatcgcgcatcgagtgcacaccatcctgagtgcagacctggtgatcgtcctgaagcggggtgccatccttgagttcgataagccagagaagctgctcagccggaaggacagcgtcttcgcctccttcgtccgtgcagacaagtgacctgccagagcccaagtgccatcccacattcggaccctgcccatacccctgcctgggttttctaac

SEQ ID NO: 10390 - DNA, 5025 bp, Homo sapiens
gctgcaagggacagaggcgcggcaggcgcgcggagccagcggagccagctgagcccgagcccagcccgcgcccgcgccgccatgcccctggccttctgcggcagcgagaaccactcggccgcctaccgggtggaccagggggtcctcaacaacggctgctttgtggacgcgctcaacgtggtgccgcacgtcttcctactcttcatcaccttccccatcctcttcattggatggggaagtcagagctccaaggtgcacatccaccacagcacatggcttcatttccctgggcacaacctgcggtggatcctgaccttcatgctgctcttcgtcctggtgtgtgagattgcagagggcatcctgtctgatggggtgaccgaatcccaccatctgcacctgtacatgccagccgggatggcgttcatggctgctgtcacctccgtggtctactatcacaacatcgagacttccaacttccccaagctgctaattgccctgctggtgtattggaccctggccttcatcaccaagaccatcaagtttgtcaagttcttggaccacgccatcggcttctcgcagctacgcttctgcctcacagggctgctggtgatcctctatgggatgctgctcctcgtggaggtcaatgtcatcagggtgaggagatacatcttcttcaagacaccgagggaggtgaagcctcccgaggacctgcaagacctgggggtacgcttcctgcagcccttcgtgaatctgctgtccaaaggcacctactggtggatgaacgccttcatcaagactgcccacaagaagcccatcgacttgcgagccatcgggaagctgcccatcgccatgagggccctcaccaactaccaacggctctgcgaggcctttgacgcccaggtgcggaaggacattcagggcactcaaggtgcccgggccatctggcaggcactcagccatgccttcgggaggcgcctggtcctcagcagcactttccgcatcttggccgacctgctgggcttcgccgggccactgtgcatctttgggatcgtggaccaccttgggaaggagaacgacgtcttccagcccaagacacaatttctcggggtttactttgtctcatcccaagagttccttgccaatgcctacgtcttagctgtgcttctgttccttgccctcctactgcaaaggacatttctgcaagcatcctactatgtggccattgaaactggaattaacttgagaggagcaatacagaccaagatttacaataaaattatgcacctgtccacctccaacctgtccatgggagaaatgactgctggacagatctgtaatctggttgccatcgacaccaatcagctcatgtggtttttcttcttgtgcccaaacctctgggctatgccagtacagatcattgtgggtgtgattctcctctactacatactcggagtcagtgccttaattggagcagctgtcatcattctactggctcctgtccagtacttcgtggccaccaagctgtctcaggcccagcggagcacactggagtattccaatgagcggctgaagcagaccaacgagatgctccgcggcatcaagctgctgaagctgtacgcctgggagaacatcttccgcacgcgggtggagacgacccgcaggaaggagatgaccagcctcagggcctttgccatctatacctccatctccagctggccccactggactgcgctgcctccaagccatcctgggcatctccatgtgtagctgtcacgctcctcccactaaacgcctccctgtgcttcctctgcagttttcatgaacacggccatccccattgcagctgtcctcatagggtgaggggtgtctctgtgcttcccgagcagcgtgcaaaagctaagcgagttcctgtccagtgcagagatccgtgaggagcagtgtgccccccatgagcccacacctcagggcccagccagcaagtaccaggcggtgcccctcagggttgtgaaccgcaagcgtccagcccgggaggattgtcggggcctcaccggcccactgcagagcctggtccccagtgcagatggcgatgctgacaactgctgtgtccagatcatgggaggctacttcacgtggaccccagatggaatccccacactgtccaacatcaccattcgtatcccccgaggccagctgactatgatcgtggggcaggtgggctgcggcaagtcctcgctccttctagccgcactgggggagatgcagaaggtctcaggggctgtcttctggagcagcagccttcctgacagcgagataggagaggaccccagcccagagcgggagacagcgaccgacttggatatcaggaagagaggccccgtggcctatgcttcgcagaaaccatggctgctaaatgccactgtggaggagaacatcatctttgagagtcccttcaacaaacaacggtacaagatggtcattgaagcctgctctctgcagccagacatcgacatcctgccccatggagaccagacccagattggggaacggggcatcaacctgtctggtggtcaacgccagcgaatcagtgtggcccgagccctctaccagcacgccaacgttgtcttcttggatgaccccttctcagctctggatatccatctgagtgaccacttaatgcaggccggcatccttgagctgctccgggacgacaagaggacagtggtcttagtgacccacaagctacagtacctgccccatgcagactggatcattgccatgaaggatggcaccatccagagggagggtaccctcaaggacttccagaggtctgaatgccagctctttgagcactggaagaccctcatgaaccgacaggaccaagagctggagaagtaagtggggataaaatgccctgattcaccctcagagggatggaaatgtgtagccacagagtgggttcttgcggcctgcagaggaggcagctgagagcgaggaggatgacaacctgtcgtccatgctgcaccagcgtgctgagatcccatggcgagcctgcgccaagtacctgtcctccgccggcatcctgctcctgtcgttgctggtcttctcacagctgctcaagcacatggtcctggtggccatcgactactggctggccaagtggaccgacagcgccctgaccctgacccctgcagccaggaactgctccctcagccaggagtgcaccctcgaccagactgtctatgccatggtgttcacggtgctctgcagcctgggcattgtgctgtgcctcgtcacgtctgtcactgtggagtggacagggctgaaggtggccaagagactgcaccgcagcctgctaaaccggatcatcctagcccccatgaggttttttgagaccacgccccttgggagcatcctgaacagattttcatctgactgtaacaccatcgaccagcacatcccatccacgctggagtgcctgagccgctccaccctgctctgtgtctcagccctggccgtcatctcctatgtcacacctgtgttcctcgtggccctcttgcccctggccatcgtgtgctacttcatccagaagtacttccgggtggcgtccagggacctgcagcagctggatgacaccacccagcttccacttctctcacactttgccgaaaccgtagaaggactcaccaccatccgggccttcaggtatgaggcccggttccagcagaagcttctcgaatacacagactccaacaacattgcttccctcttcctcacagctgccaacagatggctggaagtccgaatggagtacatcggtgcatgtgtggtgctcatcgcagcggtgacctccatctccaactccctgcacagggagctctctgctggcctggtgggcctgggccttacctacgccctaatggtctccaactacctcaactggatggtgaggaacctggcagacatggagctccagctgggggctgtgaagcgcatccatgggctcctgaaaaccgaggcagagagctacgaggggctcctgggtgagaggctcagggagaggggtggggaagagtccaaggaggagtgtgtctgggttgggggccacaagggagcctggggatggggtggcactttcggatactagctgtggcccatgcctggtggctgagcccagcccggcccccagcaccatcgctgatcccaaagaactggccagaccaagggaagatccagatccagaacctgagcgtgcgctacgacagctccctgaagccggtgctgaagcacgtcaatgccctcatcgcccctggacagaaggtcagagcacgggcccaacccaatgctgcaggacaggcgtgagcaggggatggggcatgcacggagctggatggcttcgcagtcacctcgtggccctccagggccgaggcctctcactattcagacatcgcagtctcctgccctgggcctgtgggggcccatctttcctctccttctattgccttcccccagtgctgccctcaggccttgtcttctcactcatccaccaaggagaccgacactctggactcccccagctcacacgggctttgtcagggcctccctctctgcgaatggtcaggggctttccctagggcactgccccgagcttcagggcagggacctgggggcagacagcgaggccacccttgtattgagggtgagcccctgcctatggccctggcccagctctcctctcgtttcccactctgtctctttgtctctgtctcactttgctgtggctgtccatgtcattctctgaccttgggatgtacctctgtccctgcctctctcatccttctatgtcactatctgtctccgtattgtaatttctgttggtacccaagtgccaggaagcaacgggatcagaggtggctccattgtagggcggggcacacagacacatccatgcataccactctcagctgcccctcccaagtgccatcccacattcggaccctgcccatacccctgcctgggttttctaac

SEQ ID NO: 10391 - DNA, 5336 bp, Homo sapiens
gagcccgagcccagcccgcgcccgcgccgccatgcccctggccttctgcggcagcgagaaccactcggccgcctaccgggtggaccagggggtcctcaacaacggctgctttgtggacgcgctcaacgtggtgccgcacgtcttcctactcttcatcaccttccccatcctcttcattggatggggaagtcagagctccaaggtgcacatccaccacagcacatggcttcatttccctgggcacaacctgcggtggatcctgaccttcatgctgctcttcgtcctggtgtgtgagattgcagagggcatcctgtctgatggggtgaccgaatcccaccatctgcacctgtacatgccagccgggatggcgttcatggctgctgtcacctccgtggtctactatcacaacatcgagacttccaacttccccaagctgctaattgccctgctggtgtattggaccctggccttcatcaccaagaccatcaagtttgtcaagttcttggaccacgccatcggcttctcgcagctacgcttctgcctcacagggctgctggtgatcctctatgggatgctgctcctcgtggaggtcaatgtcatcagggtgaggagatacatcttcttcaagacaccgagggaggtgaagcctcccgaggacctgcaagacctgggggtacgcttcctgcagcccttcgtgaatctgctgtccaaaggcacctactggtggatgaacgccttcatcaagactgcccacaagaagcccatcgacttgcgagccatcgggaagctgcccatcgccatgagggccctcaccaactaccaacggctctgcgaggcctttgacgcccaggtgcggaaggacattcagggcactcaaggtgcccgggccatctggcaggcactcagccatgccttcgggaggcgcctggtcctcagcagcactttccgcatcttggccgacctgctgggcttcgccgggccactgtgcatctttgggatcgtggaccaccttgggaaggagaacgacgtcttccagcccaagacacaatttctcggggtttactttgtctcatcccaagagttccttgccaatgcctacgtcttagctgtgcttctgttccttgccctcctactgcaaaggacatttctgcaagcatcctactatgtggccattgaaactggaattaacttgagaggagcaatacagaccaagatttacaataaaattatgcacctgtccacctccaacctgtccatgggagaaatgactgctggacagatctgtaatctggttgccatcgacaccaatcagctcatgtggtttttcttcttgtgcccaaacctctgggctatgccagtacagatcattgtgggtgtgattctcctctactacatactcggagtcagtgccttaattggagcagctgtcatcattctactggctcctgtccagtacttcgtggccaccaagctgtctcaggcccagcggagcacactggagtattccaatgagcggctgaagcagaccaacgagatgctccgcggcatcaagctgctgaagctgtacgcctgggagaacatcttccgcacgcgggtggagacgacccgcaggaaggagatgaccagcctcagggcctttgccatctatacctccatctccattttcatgaacacggccatccccattgcagctgtcctcataactttcgtgggccacgtcagcttcttcaaagaggccgacttctcgccctccgtggcctttgcctccctctccctcttccatatcttggtcacaccgctgttcctgctgtccagtgtggtccgatctaccgtcaaagctctagtgagcgtgcaaaagctaagcgagttcctgtccagtgcagagatccgtgaggagcagtgtgccccccatgagcccacacctcagggcccagccagcaagtaccaggcggtggaagaggggctcccttccctacacagctcccagcccagtgggtcctcacctccaaaccacccccagcccctcagggttgtgaaccgcaagcgtccagcccgggaggattgtcggggcctcaccggcccactgcagagcctggtccccagtgcagatggcgatgctgacaactgctgtgtccagatcatgggaggctacttcacgtggaccccagatggaatccccacactgtccaacatcaccattcgtatcccccgaggccagctgactatgatcgtggggcaggtgggctgcggcaagtcctcgctccttctagccgcactgggggagatgcagaaggtctcaggggctgtcttctggagcagccttcctgacagcgagataggagaggaccccagcccagagcgggagacagcgaccgacttggatatcaggaagagaggccccgtggcctatgcttcgcagaaaccatggctgctaaatgccactgtggaggagaacatcatctttgagagtcccttcaacaaacaacggtacaagatggtcattgaagcctgctctctgcagccagacatcgacatcctgccccatggagaccagacccagattggggaacggggcatcaacctgtctggtggtcaacgccagcgaatcagtgtggcccgagccctctaccagcacgccaacgttgtcttcttggatgaccccttctcagctctggatatccatctgagtgaccacttaatgcaggccggcatccttgagctgctccgggacgacaagaggacagtggtcttagtgacccacaagctacagtacctgccccatgcagactggatcattgccatgaaggatggcaccatccagagggagggtaccctcaaggacttccagaggtctgaatgccagctctttgagcactggaagaccctcatgaaccgacaggaccaagagctggagaaggagactgtcacagagagaaaagccacagagccaccccagggcctatctcgtgccatgtcctcgagggatggccttctgcaggatgaggaagaggaggaagaggaggcagctgagagcgaggaggatgacaacctgtcgtccatgctgcaccagcgtgctgagatcccatggcgagcctgcgccaagtacctgtcctccgccggcatcctgctcctgtcgttgctggtcttctcacagctgctcaagcacatggtcctggtggccatcgactactggctggccaagtggaccgacagcgccctgaccctgacccctgcagccaggaactgctccctcagccaggagtgcaccctcgaccagactgtctatgccatggtgttcacggtgctctgcagcctgggcattgtgctgtgcctcgtcacgtctgtcactgtggagtggacagggctgaaggtggccaagagactgcaccgcagcctgctaaaccggatcatcctagcccccatgaggttttttgagaccacgccccttgggagcatcctgaacagattttcatctgactgtaacaccatcgaccagcacatcccatccacgctggagtgcctgagccgctccaccctgctctgtgtctcagccctggccgtcatctcctatgtcacacctgtgttcctcgtggccctcttgcccctggccatcgtgtgctacttcatccagaagtacttccgggtggcgtccagggacctgcagcagctggatgacaccacccagcttccacttctctcacactttgccgaaaccgtagaaggactcaccaccatccgggccttcaggtatgaggcccggttccagcagaagcttctcgaatacacagactccaacaacattgcttccctcttcctcacagctgccaacagatggctggaagtccgaatggagtacatcggtgcatgtgtggtgctcatcgcagcggtgacctccatctccaactccctgcacagggagctctctgctggcctggtgggcctgggccttacctacgccctaatggtctccaactacctcaactggatggtgaggaacctggcagacatggagctccagctgggggctgtgaagcgcatccatgggctcctgaaaaccgaggcagagagctacgaggggctcctggcaccatcgctgatcccaaagaactggccagaccaagggaagatccagatccagaacctgagcgtgcgctacgacagctccctgaagccggtgctgaagcacgtcaatgccctcatcgcccctggacagaagatcgggatctgcggccgcaccggcagtgggaagtcctccttctctcttgccttcttccgcatggtggacacgttcgaagggcacatcatcattgatggcattgacatcgccaaactgccgctgcacaccctgcgctcacgcctctccatcatcctgcaggaccccgtcctcttcagcggcaccatccgatttaacctggaccctgagaggaagtgctcagatagcacactgtgggaggccctggaaatcgcccagctgaagctggtggtgaaggcactgccaggaggcctcgatgccatcatcacagaaggcggggagaatttcagccagggacagaggcagctgttctgcctggcccgggccttcgtgaggaagaccagcatcttcatcatggacgaggccacggcttccattgacatggccacggaaaacatcctccaaaaggtggtgatgacagccttcgcagaccgcactgtggtcaccatcgcgcatcgagtgcacaccatcctgagtgcagacctggtgatcgtcctgaagcggggtgccatccttgagttcgataagccagagaagctgctcagccggaaggacagcgtcttcgcctccttcgtccgtgcagacaagtgacctgccagagcccaagtgccatcccacattcggaccctgcccatacccctgcctgggttttctaactgtaaatcacttgtaaataaatagatttgattatttcctactagaggccctaagtctggtgggcaggggctggcggtggatggtgggttcagtagaaccagcctggctctgacatcaggcagaagctgtgtgagcaaaagcctgcttccttacctgtgaaatgaggcctctattagtcagccaggctgccacaacaacatatcacagactgggtggctttaaaacagacttttttctcacagttctggaggctgaagtctgggatcaaggtgttggcaggtttggtttctcctgaggcctctctccttggcttgcagagggctgccttctggctgtgtgctcacatgacctttactctgtgcacatgcatccctgctttctctctgtgtcttaaaaggacaccagtcatattggattagggccccac

SEQ ID NO: 10392 - DNA, 14496 bp, Homo sapiens
cctatctcgtgccatgtcctcgagggatggccttctgcaggatgaggaagaggaggaaggtacaggcaatgggactgggagtgaaattatggcctgaggtctgatcagccacagagaggctaaggtttggggttctgggtgtggtgcagtagtgtgcctttgattaaatggcttccctctgtgtgcccccgttgtcccctcagtaagtggggataaaatgccctgattcaccctcagagggatggaaatgtgtagccacagagtgggttcttgcggcctgcagaggaggcagctgagagcgaggaggatgacaacctgtcgtccatgctgcaccagcgtgctgagatcccatggcgagcctgcgccaagtacctgtcctccgccggcatcctgctcctgtcgttgctggtcttctcacagctgctcaagcacatggtcctggtggccatcgactactggctggccaagtggaccgacagcgccctgaccctgacccctgcagccaggaactgctccctcagccaggtgtgactggcggcccatggcagaggttgggagtggggatgggggaagggctgagcccatgggcaccctggaactccaaatcactctctgcctgtgaaggagtgcaccctcgaccagactgtctatgccatggtgttcacggtgctctgcagcctgggcattgtgctgtgcctcgtcacgtctgtcactgtggagtggacagggctgaaggtggccaagagactgcaccgcagcctgctaaaccggatcatcctagcccccatgaggtacccgtctcccctggccaggctgggactgtgagcaagtcactgttctctgagccttagtcttcccatctataaaatggggatatacaacctgtcacaagcttgtgggggtgactcaaggagacagtgtgtgtaaaagtgccctccttgtgcaagaagcagggagaaactggcatttactcagccagatactgtgataggcattgtgtgtggttagctcatttaattgttaccatggccctttaaagtgagcgtctgcacatccaagtaaagattgttttctcctccctaagtgggtgtaatttgcccatccccacccatgagttcagctccctgccctcccctcactctctctccctcagccagcctcaggttttgacactgggggaacaggtagctgttctattaataatttcctgtaatgggatggataaaaatctcaaaggccacttgatgtcaaagaggtttaaagttgtccctgcccaattggttggccaacttggcttaaaaacacaacaggcaaacagattttctggccccttgtcgaggctagacctcacaatctaactgcactttttactttccagcctcatgagttttctgtggcccacagatatggcctccaagtttatttacttttactctctatttgccccagctctgtagttctgaaactccctggttggggttgggctgactctgggtcagccagccggcaggctgtccccagggccctgttcctcttggcaggttgtccctctggagaggactctgtgtcccaggaggacagctgctgagtcaggccgagccggcagctgagaaaggcggcagtcgtcagatgggcttgagaaactgaaaggctaacgaaaggccagcgcccctttgggcagctgcaggaattcacggggatacaggccagatgtctacaaattggcagaggatgccagacccatgaatgactccagagacacttacatgaaataattaactatctcattcagtaaacaggaagtaaatcaatggacaaatgagtaactcttcctctggctgcctcttaggttttttgagaccacgccccttgggagcatcctgaacagattttcatctgactgtaacaccatcgaccaggtacagaggaccgtgccacactatccccccttccagagacacctcggacccctgggggcttctcctgtctgaggctgggttccccagatcaggtgatcacagccctctgggaagaagccagtgtccccgatccgattataatgctgcttcagggctggggcctccctcgtgggagcctcacagtaaggctgagggaaaccagatccctttagcttccacctgagatcccactggctttctctagtaaagttccagcatattctgaaccaaggtggctgattgtatggagaatattcattttgattcagcctgtgttctttatttaccattgtaccagatggtgtgaaaacaaaatcttgattcctacctcagggagtttaccttgtagctggagagatgagatacgtgcctataataaagggagagcaaggccgggctcagtggctcactcctgtaaccccagcactttgggaggcggaggcaggcggatcacttgaggccaggtgttcaagaccagcctgatggccaacatgatgaaaccccttctctattaaaaatacaaaaattagccaggtgtggtggcaggtgcctgtaatcccaactacttgggaagctgaggcaggagaatcatttgaacccaaggggcagaggctgccgtgaaccgagattacgctgctgcactcaagtctgggcaacagtgagactcagtctcaaaaaaataaaggatcaaaaaataaagtgagagcaaaacatggcggccagtagcactctaaacacagtcaataccaaaattcacctcactctctccccctcgtctccctcagcacatcccatccacgctggagtgcctgagccgctccaccctgctctgtgtctcagccctggccgtcatctcctatgtcacacctgtgttcctcgtggccctcttgcccctggccatcgtgtgctacttcatccagaagtacttccgggtggcgtccaggtgatggcctcaggggtgaggggtgggaggtgctttgcaatgtgcagtttggtgtacttgctagactcatcgttatgagagtaatagggtcgtgttccctccaaaaaataaaaacaaaaaacagaaatgaaggaaatagaaatatccacatcttattccaccgccctaatataatagtctgccaacacacgcacacactgaggttgacatctgaattatttccttgggcgatatggtcaggactggaattgctaggtcatgataaatgcacattttatgcccttcattcattttgccaacatgcttcccaggagggttgcatcattctagtggtcaggctgattgctgatgcatgaaatcggcgggcacctgattcaagcagtgttatgataacacctcccagcccacgtgagtccagagtgtagctgtaagccttgacttgagggagcctctcacagccattctcatggatcacatttgccctcatgagctttggatccatgcacgcctctttcctcctcaaaattttctaagaatgttctctagggagttctttctgggagtgattctcccagattcatagaaactcatagattcaaaaaattgtaggaaaaaatttaaagaacgtctaggccagtgtttctcaaactgccaattacagcccatcagtgggtcatgaaatcaatatcatggatcacaaccagcatttttttaaaaatgaaaaaaacatcagactgtattcatagagtaaagcaagctttgcttcatgaaacctttgtgttggtcatggaggtgtgtgagtactgatttgtgagataaaatatatttctgactgcaggttgtggtcagaaaggttaagtacctttcccaagtgcacatagttggctagaaactagagttgagatacttattagcaataataaaatttagatgcattttggacacaattacctgccccaaaggatcaacatttgtataaatggctttttgcttggatgatccagaatggcccgacacccacacgaacaacatagctttttgacactcaaaaaattcaaagtgctgcacaagctgttctacaaagttcatttcttctgccagagaaacagcccagtctctgtggcacccagtctgaccctggagatggtttatcagggaaatcaacttcctgcatcccaaactggcctccctggcactgatgtgcttgtcgaggtgcagctttggggagcaggaggcaattctgttgccatggaaacctctggccttaccccgagacgaaacctatcatttcagcacatcactggccagggtctaaagagctccttgatggggtaagcggaagacggggttgaacgctttgagtttggtcttctgttcctttggccagctgtctcaaggttcagattgttcacctgtaaaatggaactagcactgcctgcccagccttagctcagctccaggctgtgcagcagaagtacagggacagatggcgacctggggttgacaatgcccaggacagcagtaattgtgccccacatcaggctgtgtctaagcattgtacataaacgatctcattcagtgctcacaaaagctcaatgggctggtggcattgtcttcccccttcacggggtaagaagctgaggcctagagaggtaaggccattcacccacacagcggtagcaggtggagctaggcttcaggcccaggccgagccctgagcctgccctcttaactgttccactctgttccccgccacagggacctgcagcagctggatgacaccacccagcttccacttctctcacactttgccgaaaccgtagaaggactcaccaccatccgggccttcaggtacgagtccacattcccccaaggtaggagtggaacaggggtggggccagggggcacaggccatgagatttgattctcaggactccacttgggaaggccaaggacacgttctctctcaagctgcctcaggtcccaaggcccaagggatatccaccagcagggacaggccaggtgggctcccactgaatgttctagagaggaaaattccagctctgtagacaagcccaggacctctgtgaggcagagcatgaaaagagacaaagctgggacaagtcttcatgtatcaacgctagaaagggccttaggtgcgggccaccctaagcccttcttttattaaggagcccctgtgtgccaaacactatgctgagtactgtacaggccaatcccactcattctgcactgcaaccctcggtgctgagaatggtcatttccattgcacagacaaggaaactgaggcacagagacgttctataacctctctgtgtaaggtgccacaaagcccagacttgaacctatttgttcatgcaacaaacatttactaagccccgactatgtgctaagccccatgccaggcactaaaaagatgagtcaaataagccgctgccctgcaggcgtttacagcccagactttgagcaggccaggataaatccacgtgacaagtattctgaaaaaagcggattcaagggctgtgggagcatagaagagagacagtccgggaaggtttttgtaccagaggtgtcatcagaactaggactcaaaggaggggcaggagttcaccaggctgaggaattcctgaaaacttcagtgcccctgccatcgtctcactaccctgagtggtgatgttggggtggacaggagcatctgaggttgcctggggaatgagggaagctgttgtttcccactccccaagagtctgtctgatctccagaggcatctctcttccagtcaggcaggccagagacccctgacacacaaagttgggctcttttctcatcttcatccagagagtgataataggttatttttagggtggcacagctgcacgaagtatgacagtaaccatgagacaccaagcactgtgtccaggagtaaccatagggcacaaggaccagccaagggccagagaggcttacatctcctccccccaacccctgaagtccagcttcagccctggagaggtatccaggcccctctgcccaccctggagcacctagggccagtggaaatccacctcttagggatcttgtctaagtaaagaagagcagagcaaagctctgccctggccttggcgctgctccctggacatcccttgcccctggacaagcctatgctgtgtcttccacaaagaagcttgctggggactggattatgactctagagtctcctcccagcctcctcttctcaagcctgaacttctcccgttccttcaacttccaggtccctcgacattactgagcctagcctttgctctaagttttggtgatttccctctctcaattggtgtctcagagggccctggggtagagagatggtgactcttctagagtgggccacagccccttgtgtgcagatcccagcttcctgtaaacagcctcagatcaggccaaacctgtggtcagccagagccactgctacccagtgaggtcttccacaccctactgacacggtgaatgatttttaaatttgaatgaaaggctttttaatcaaccccatacacatttaatgcattggctttaatccagcagcctgttgagagctattagcacttattgattgcccacttactgtatgccaggcaccgtgctaagtgttgtatgtgcattattacatttaatcctcacaaggaccacataacataggtacgaatcgccacattctccagatgcagaagcgagacccagagaggctgggtaatcaatccaaggtcacacagactgcgggggctggcgctgagcttggaacccaggtttgcctgaccttctgggctttcctaagagatcttattttttcccaaaagagtttcaagagtgcccagcactgggctcagtggcgggctcggaggttgttttcgttcatgtaggaactatcacttccccatttttttcataagaaaactgagtctcagtcctgatacacagccaggaagttgtgatgttcaggctccaacctgggtttacatggctccgaggctggggctcttttctagtcctcagacacactgtcgcacgcctgtggcagaagctcccatctcacacttgccgaccctcaactcacacagtcctgagacccacatacgctgagcgcctcacactcctataacacgcacatgccctgatgcacacacattttcaacacgcacttactctacccttcaggcatggtttcacactcactgcagacacgtcaccctcccacacgtctccaccctgggggtgtgcagtagcatgctctctcccacctcagaacctcccttcagtcccctcagacacatgccctctctccacgcagagacaatcaaagctgaactaacaccttccagggtgaaaagcaaatgcccagtaaggtacgtcttgggtgcctccgtgtcccctgagtttggtcctatcaaaccagcgatgatgaggcagcttttctttcgttccttcctccatcatcaaacaagtgctcctgcatctcctctgggccgggcctacgtcagcaaggtctgagggaagcggccaaggagagtgatgacggcagcccaggttgatcagagaaaggaggcaggtccatgcgcagtaactcagggaaaacatgatgaggacctaaggatgagaaagaagcctccagagttccctgtgcagagagattccatcaatttcagagggtcaggggagtgccatgcattcatccaacaaatatttattgatagtgccaggtgctggggtatattggtgaataaaacatcttcatggaatttgcagtctattgagggagatgattataaatagctagagaaatgcatgtacagcagatactgtggagcaaacaggttgcagacaataataggggaaacctactttatagtaaggtagtagccaggaagagcctctctgaggaggcagcatttaaggcaagccctgaaggttgagttgagccagccttatgaagagcaagggcaaaagccttccaggaaaagggaatagtgtgtgcaaaggccctggggtagggaagactttagtattgtcacagagcttttaaaaagctgagtggctgcagcatagtgtgtggggtgtttgtggcaggaattaggttggcaggagggggttcttcatcctataagcagtggaaggtcattaatattcttttttatttgtttttttttttttttttttttttttttttgaggcagagtctcactttgtcacccaggctggagtgcagtgaggtgatcttggctcactgcaacctccacctcccgggttcaagcaattatcctggcttcctcagcctcccaagtagctgggattacaggtgtgcaccaccatgcccagctactaatttttgtattattagtagagacagaattccaccatgttggccaggctggtcttgaactcttgacctcaggtgatccgcccgcctcagcctcccaaagtgctgggattacaggggtgagtcaccgcatccggccggagatcattaatattctaaacagtgggggagaggacacagtttgcgatttagatagattaagccagccactgtgtggagcatggactgtagggagacagcaggtagacgtattcaggaagctgatgcagtagtccaggtgagagtttgtggtgggcaggaagcaggatagagggggagggaggcaaggactcttttagagagagacataagaggacttgccaaggggctgaatgtgaatccaggtgattcctgggtgagaaactgggtaaagggaggtgccccttattataatgggaaagacctagagaaaatggatcttggggtgaaaacaagagtttggaggaggtggggattctggacaggtttgaataagcagaaaggagtggggtggacattccagagagggatagcttacatgaagtggccacggtggcatgtctggggactggaggggccctggagcctccctctgcaggtagggagactcctaggagctatgtggaccaacactgttcccttaggagcttctcatcctccctccaggtatgaggcccggttccagcagaagcttctcgaatacacagactccaacaacattgcttccctcttcctcacagctgccaacagatggctggaagtccgaatggcaagtgctattcccctctaccctggcctctgataggagggtggggccagagcaagagcacacaggtacctggggatgaaagagaggataggataccagatcgtgtggacaccaagccttcctgcttcccccagccctggtggtcctcctagtgtctagcctgtgctccttttccccatatcactgcctggaggcttgtgtatctgaggtgtgtgccagtggcaagaacagttgtggtgaatgtgtatctgcagtgggtcatatgacacccacattgtgtgtgtttgtgggccagctgaggcgtgcatgttaaagggtgtgcaggggctagggggtaggggagcatgagcttgtgggacatgttggctcctggggctccagccttcgcagcccttgtgtgtgtctggtgacgtgtgcatgagttgcagggctggagtggaggcctggctgagctgctctctgccccgaaaaggagtgaggtagaacaggggcctgtggctctaacccctgagcgcccaggtcagctcctctccctccccaggagtacatcggtgcatgtgtggtgctcatcgcagcggtgacctccatctccaactccctgcacagggagctctctgctggcctggtgggcctgggccttacctacgccctaatggtgagcggcagtgggctagggcagaggaggggtcagacaccagcactcccggagcaccttcgtcactggagacatgagacactcccaggccttaccccaatttcatttgcatctgatgccagagggacagtgcgggcaggaaggctgaccagcaggccccagggcccaggccccagacaggtggaggttggggagccacatgactgaccctccctgtgcctccagggagggctgctctgagcaggcagtggatggcagcaaaaggaatctggggccctggcccctctccagccttaagaagagccattctggtggctgaggacagaactaagcgaccatggagtgtgcgccactggcttgctccccacaggtctccaactacctcaactggatggtgaggaacctggcagacatggagctccagctgggggctgtgaagcgcatccatgggctcctgaaaaccgaggcagagagctacgaggggctcctgggtgagaggctcagggagaggggtggggaagagtccaaggaggagtgtgtctgggttgggggccacaagggagcctggggatggggtggcactttcggatactagctgtggcccatgcctggtggctgagcccagcccggcccccagcaccatcgctgatcccaaagaactggccagaccaagggaagatccagatccagaacctgagcgtgcgctacgacagctccctgaagccggtgctgaagcacgtcaatgccctcatcgcccctggacagaaggtcagagcacgggcccaacccaatgctgcaggacaggcgtgagcaggggatggggcatgcacggagctggatggcttcgcagtcacctcgtggccctccagggccgaggcctctcactattcagacatcgcagtctcctgccctgggcctgtgggggcccatctttcctctccttctattgccttcccccagtgctgccctcaggccttgtcttctcactcatccaccaaggagaccgacactctggactcccccagctcacacgggctttgtcagggcctccctctctgcgaatggtcaggggctttccctagggcactgccccgagcttcagggcagggacctgggggcagacagcgaggccacccttgtattgagggtgagcccctgcctatggccctggcccagctctcctctcgtttcccactctgtctctttgtctctgtctcactttgctgtggctgtccatgtcattctctgaccttgggatgtacctctgtccctgcctctctcatccttctatgtcactatctgtctccgtattgtaatttctgttggtacccaagtgccaggaagcaacgggatcagaggtggctccattgtagggcggggcacacagacacatccatgcataccactctcagctgcccctgtgtcctcctgccacacccatgcccatagagacacaccactgccccccagctctccttcagccaagtacccggcacacccagacccacaccaaggcccaggcaaatggacatccatgcctgcacttgcgtgccggtccctgtgtaagccctctctggacccactgcaggaaacaagcccaaacctgtggtgtccaaagagaaactagtcagaaaaccaggccaaaaagataccctgtgacctcccacacctgcacacacacccagagctagcatagaggctattcccagcagccccagagtcccagtggcggtgcctgcttctctctttccagatcgggatctgcggccgcaccggcagtgggaagtcctccttctctcttgccttcttccgcatggtggacacgttcgaaggtgagttgtaaggcgggcaccccacgtgtacccacagccaccagatgaggcctcagccctggcacgtggtcagacatgacaggaggcccagcagtcaccgccttcccctgcaccctcactgggacccatgcagggcacatcatcattgatggcattgacatcgccaaactgccgctgcacaccctgcgctcacgcctctccatcatcctgcaggaccccgtcctcttcagcggcaccatccggtgagccccaccacccctcaggcccacccagccccaggccggctcagttccatcagatctggagcacaaagaggagggggttgggggagaccaggatcccagaggtgtttcctgctcatgcccttctccatcccatcaggcccaggcagcctctggaaggggatcccccacccatgggtctaagatgctgtcccccacccactgccaccacctcggtgcttctcccagccagacctccaactcagtctgctctcgctcactgccctctttgccgcctggggatgcaggcaggaccctgctccctccctactggggctttctgtgccacttccagatttaacctggaccctgagaggaagtgctcagatagcacactgtgggaggccctggaaatcgcccagctgaagctggtggtgaaggcactgccaggaggcctcggtaactactcctggctatgcagctgggttggttgggcactcaaggaccctgtaaggatggcagacagaagcccgtgtctcaggtttgccccaagtttggagtctgaagcctggcaggaccatttagtcctacttctcactatacgggggcccagagaggtcaggtgtcttgccccaggtcacacaactggtcagttcagggtctggctcctcctgcagggtacagcgggtacagtcagggatccttgtgagacagagattgcgagtcccccatgccaagggggcatcttcagccctgccctgccccatccacctgcatgcccagttctgccttaggggaggagaagatggactgggcaatcatagacacgggtcactcatcaaggccaccggtgattggcaaagccttggtatatttgctgcagctcctggagcattgggggtggccaagccttggtttcaatgaatcaccctaccaaggccctacatacacactcagtgcacccctcagtgcacacgccccctcccagaactgcccagggccacagcagcacacacctccaggggtgcccttctcgttgcagtccttgcagacggcctccacattgttgtgtcaggtgcaccagccctgcacacgcctgtgctcttggacacacacccacctatttgcccccatgcacacattttccaacagccccccaagccatcccatctgctccactcacagcacaagattaactcagtcctacttcatctccccgggctgttttcagatgccatcatcacagaaggcggggagaatttcagccagggacagaggcagctgttctgcctggcccgggccttcgtgaggaagaccagcatcttcatcatggacgaggccacggcttccattgacatggccacggttggtcctgggcccctccatgggaccatggtcttggaaagggtttagtgggatgctagggagaaatttgcacgaagtagtcctgaggctcaagttgcctctaacatcaaatgctatgtgttgcagaaaatgaaaagagctggggggaccctgactctgtctagtcttagggaatgttacacacacacacgcacacacaaaaacactatgcaaacacacacataagctgcacacacagacccacacagacttcacactgtcacctatcacaacagcacacacacagccacaaccacaacctacatacacacacagagctgagctcccaacaggctgagtccagtccctgagtgccgggaacctgttcagtcctgtggggtgggggtgggactaggatcggggtcagatgggagctgagccacagacctgggctccacatcccccaagccaggccagaccccatccactgggcaggtgagccaacagctgttgcccccacttggcaggaaaacatcctccaaaaggtggtgatgacagccttcgcagaccgcactgtggtcaccatcgcggtaaggggcccattgatggggtgcagagggacacccagggacaggactggcctgttgtggccgtcatcagtgcacagcccctgggcttgcctggtcccagtaatcaagaaagaaccctgaagcaggcagttcagggcaaggggcctggagggcatgcagggagcctgggttgcaggatttggggtggggggttttgcccctgtgcttccctcagacctcccctctccttctccaggttccaaggcctgcccctgtcccaaggccttatatgttaggctggcgttacttctccataggaagtgggggaggggttgtggagggtctctgagccttgaagcctggaggtggggtagagttgggacttggagaggagagaagggtggtattagcagatggagagcttgtagtcacatccaccccaggaaagtgcagtccccacagtgacaggacattctggccacatgcctcatcctcctcctccaagccgcaggagggccaccctcagctgtggcccccaccgcgggtggtattcccaccatcctgacccgccccctcctgccctgcccagcatcgagtgcacaccatcctgagtgcagacctggtgatcgtcctgaagcggggtgccatccttgagttcgataagccagagaagctgctcagccggaaggacagcgtcttcgcctccttcgtccgtgcagacaagtgacctgccagagcccaagtgccatcccacattcggaccctgcccatacccctgcctgggttttctaactgtaaatc

SEQ ID NO: 10393 - DNA, 2513 bp, Homo sapiens
cctatctcgtgccatgtcctcgagggatggccttctgcaggatgaggaagaggaggaagaggaggcagctgagagcgaggaggatgacaacctgtcgtccatgctgcaccagcgtgctgagatcccatggcgagcctgcgccaagtacctgtcctccgccggcatcctgctcctgtcgttgctggtcttctcacagctgctcaagcacatggtcctggtggccatcgactactggctggccaagtggaccgacagcgccctgaccctgacccctgcagccaggaactgctccctcagccaggagtgcaccctcgaccagactgtctatgccatggtgttcacggtgctctgcagcctgggcattgtgctgtgcctcgtcacgtctgtcactgtggagtggacagggctgaaggtggccaagagactgcaccgcagcctgctaaaccggatcatcctagcccccatgaggttttttgagaccacgccccttgggagcatcctgaacagattttcatctgactgtaacaccatcgaccagcacatcccatccacgctggagtgcctgagccgctccaccctgctctgtgtctcagccctggccgtcatctcctatgtcacacctgtgttcctcgtggccctcttgcccctggccatcgtgtgctacttcatccagaagtacttccgggtggcgtccagggacctgcagcagctggatgacaccacccagcttccacttctctcacactttgccgaaaccgtagaaggactcaccaccatccgggccttcaggtatgaggcccggttccagcagaagcttctcgaatacacagactccaacaacattgcttccctcttcctcacagctgccaacagatggctggaagtccgaatggagtacatcggtgcatgtgtggtgctcatcgcagcggtgacctccatctccaactccctgcacagggagctctctgctggcctggtgggcctgggccttacctacgccctaatggtgagcggcagtgggctagggcagaggaggggtcagacaccagcactcccggagcaccttcgtcactggagacatgagacactcccaggccttaccccaatttcatttgcatctgatgccagagggacagtgcgggcaggaaggctgaccagcaggccccagggcccaggccccagacaggtggaggttggggagccacatgactgaccctccctgtgcctccagggagggctgctctgagcaggcagtggatggcagcaaaaggaatctggggccctggcccctctccagccttaagaagagccattctggtggctgaggacagaactaagcgaccatggagtgtgcgccactggcttgctccccacaggtctccaactacctcaactggatggtgaggaacctggcagacatggagctccagctgggggctgtgaagcgcatccatgggctcctgaaaaccgaggcagagagctacgaggggctcctgggtgagaggctcagggagaggggtggggaagagtccaaggaggagtgtgtctgggttgggggccacaagggagcctggggatggggtggcactttcggatactagctgtggcccatgcctggtggctgagcccagcccggcccccagcaccatcgctgatcccaaagaactggccagaccaagggaagatccagatccagaacctgagcgtgcgctacgacagctccctgaagccggtgctgaagcacgtcaatgccctcatcgcccctggacagaaggtcagagcacgggcccaacccaatgctgcaggacaggcatcgggatctgcggccgcaccggcagtgggaagtcctccttctctcttgccttcttccgcatggtggacacgttcgaagggcacatcatcattgatggcattgacatcgccaaactgccgctgcacaccctgcgctcacgcctctccatcatcctgcaggaccccgtcctcttcagcggcaccatccgatttaacctggaccctgagaggaagtgctcagatagcacactgtgggaggccctggaaatcgcccagctgaagctggtggtgaaggcactgccaggaggcctcgatgccatcatcacagaaggcggggagaatttcagccagggacagaggcagctgttctgcctggcccgggccttcgtgaggaagaccagcatcttcatcatggacgaggccacggcttccattgacatggccacggaaaacatcctccaaaaggtggtgatgacagccttcgcagaccgcactgtggtcaccatcgcgcatcgagtgcacaccatcctgagtgcagacctggtgatcgtcctgaagcggggtgccatccttgagttcgataagccagagaagctgctcagccggaaggacagcgtcttcgcctccttcgtccgtgcagacaagtgacctgccagagcccaagtgccatcccacattcggaccctgcccatacccctgcctgggttttctaactgtaaatc

SEQ ID NO: 10394 - DNA, 3885 bp, Homo sapiens
ctgcccacaagaagcccatcgacttgcgagccatcgggaagctgcccatcgccatgagggccctcaccaactaccaacggctctgcgaggcctttgacgcccagcggaaggacattcagggcactcaaggtgcccgggccatctggcaggcactcagccatgccttcgggaggcgcctggtcctcagcagcactttccgcatcttggccgacctgctgggcttcgccgggccactgtgcatctttgggatcgtggaccaccttgggaaggagaacgacgtcttccagcccaagacacaatttctcggggtttactttgtctcatcccaagagttccttgccaatgcctacgtcttagctgtgcttctgttccttgccctcctactgcaaaggacatttctgcaagcatcctactatgtggccattgaaactggaattaacttgagaggagcaatacagaccaagatttacaataaaattatgcacctgtccacctccaacctgtccatgggagaaatgactgctggacagatctgtaatctggttgccatcgacaccaatcagctcatgtggtttttcttcttgtgcccaaacctctgggctatgccagtacagatcattgtgggtgtgattctcctctactacatactcggagtcagtgccttaattggagcagctgtcatcattctactggctcctgtccagtacttcgtggccaccaagctgtctcaggcccagcggagcacactggagtattccaatgagcggctgaagcagaccaacgagatgctccgcggcatcaagctgctgaagctgtacgcctgggagaacatcttccgcacgcgggtggagacgacccgcaggaaggagatgaccagcctcagggcctttgccatctatacctccatctccattttcatgaacacggccatccccattgcagctgtcctcataactttcgtgggccacgtcagcttcttcaaagaggccgacttctcgccctccgtggcctttgcctccctctccctcttccatatcttggtcacaccgctgttcctgctgtccagtgtggtccgatctaccgtcaaagctctagtgagtgcagagatccgtgaggagcagtgtgccccccatgagcccacacctcagggcccagccagcaagtaccaggcggtgcccctcagggttgtgaaccgcaagcgtccagcccgggaggattgtcggggcctcaccggcccactgcagagcctggtccccagtgcagatggcgatgctgacaactgctgtgtccagatcatgggaggctacttcacgtggaccccagatggaatccccacactgtccaacatcaccattcgtatcccccgaggccagctgactatgatcgtggggcaggtgggctgcggcaagtcctcgctccttctagccgcactgggggagatgcagaaggtctcaggggctgtcttctggagcagccttcctgacagcgagataggagaggaccccagcccagagcgggagacagcgaccgacttggatatcaggaagagaggccccgtggcctatgcttcgcagaaaccatggctgctaaatgccactgtggaggagaacatcatctttgagagtcccttcaacaaacaacggtacaagatggtcattgaagcctgctctctgcagccagacatcgacatcctgccccatggagaccagacccagattggggaacggggcatcaacctgtctggtggtcaacgccagcgaatcagtgtggcccgagccctctaccagcacgccaacgttgtcttcttggatgaccccttctcagctctggatatccatctgagtgaccacttaatgcaggccggcatccttgagctgctccgggacgacaagaggacagtggtcttagtgacccacaagctacagtacctgccccatgcagactggatcattgccatgaaggatggcaccatccagagggagggtaccctcaaggacttccagaggtctgaatgccagctctttgagcactggaagaccctcatgaaccgacaggaccaagagctggagaaggagactgtcacagagagaaaagccacagagccaccccagggcctatctcgtgccatgtcctcgagggatggccttctgcaggatgaggaagaggaggaagcgtgctgagatcccatggcgagcctgcgccaagtacctgtcctccgccggcatcctgctcctgtcgttgctggtcttctcacagctgctcaagcacatggtcctggtggccatcgactactggctggccaagtggaccgacagcgccctgaccctgacccctgcagccaggaactgctccctcagccaggagtgcaccctcgaccagactgtctatgccatggtgttcacggtgctctgcagcctgggcattgtgctgtgcctcgtcacgtctgtcactgtggagtggacagggctgaaggtggccaagagactgcaccgcagcctgctaaaccggatcatcctagcccccatgaggttttttgagaccacgccccttgggagcatcctgaacagattttcatctgactgtaacaccatcgaccagcacatcccatccacgctggagtgcctgagccgctccaccctgctctgtgtctcagccctggccgtcatctcctatgtcacacctgtgttcctcgtggccctcttgcccctggccatcgtgtgctacttcatccagaagtacttccgggtggcgtccagggacctgcagcagctggatgacaccacccagcttccacttctctcacactttgccgaaaccgtagaaggactcaccaccatccgggccttcaggtatgaggcccggttccagcagaagcttctcgaatacacagactccaacaacattgcttccctcttcctcacagctgccaacagatggctggaagtccgaatggagtacatcggtgcatgtgtggtgctcatcgcagcggtgacctccatctccaactccctgcacagggagctctctgctggcctggtgggcctgggccttacctacgccctaatggtctccaactacctcaactggatggtgaggaacctggcagacatggagctccagctgggggctgtgaagcgcatccatgggctcctgaaaaccgaggcagagagctacgaggggctcctggcaccatcgctgatcccaaagaactggccagaccaagggaagatccagatccagaacctgagcgtgcgctacgacagctccctgaagccggtgctgaagcacgtcaatgccctcatcgcccctggacagaagatcgggatctgcggccgcaccggcagtgggaagtcctccttctctcttgccttcttccgcatggtggacacgttcgaagggcacatcatcattgatggcattgacatcgccaaactgccgctgcacaccctgcgctcacgcctctccatcatcctgcaggaccccgtcctcttcagcggcaccatccgatgccatcatcacagaaggcggggagaatttcagccagggacagaggcagctgttctgcctggcccgggccttcgtgaggaagaccagcatcttcatcatggacgaggccacggcttccattgacatggccacggaaaacatcctccaaaaggtggtgatgacagccttcgcagaccgcactgtggtcaccatcgcgcatcgagtgcacaccatcctgagtgcagacctggtgatcgtcctgaagcggggtgccatccttgagttcgataagccagagaagctgctcagccggaaggacagcgtcttcgcctccttcgtccgtgcagacaagtgacctgccagagcccaagtgccatcccacattcggaccctgcccat

SEQ ID NO: 10395 - DNA, 14364 bp, Homo sapiens
gagaaaagccacagagccaccccagggcctatctcgtgccatgtcctcgagggatggccttctgcaggatgaggaagaggaggaaggtacaggcaatgggactgggagtgaaattatggcctgaggtctgatcagccacagagaggctaaggtttggggttctgggtgtggtgcagtagtgtgcctttgattaaatggcttccctctgtgtgcccccgttgtcccctcagtaagtggggataaaatgccctgattcaccctcagagggatggaaatgtgtagccacagagtgggttcttgcggcctgcagaggaggcagctgagagcgaggaggatgacaacctgtcgtccatgctgcaccagcgtgctgagatcccatggcgagcctgcgccaagtacctgtcctccgccggcatcctgctcctgtcgttgctggtcttctcacagctgctcaagcacatggtcctggtggccatcgactactggctggccaagtggaccgacagcgccctgaccctgacccctgcagccaggaactgctccctcagccaggtgtgactggcggcccatggcagaggttgggagtggggatgggggaagggctgagcccatgggcaccctggaactccaaatcactctctgcctgtgaaggagtgcaccctcgaccagactgtctatgccatggtgttcacggtgctctgcagcctgggcattgtgctgtgcctcgtcacgtctgtcactgtggagtggacagggctgaaggtggccaagagactgcaccgcagcctgctaaaccggatcatcctagcccccatgaggtacccgtctcccctggccaggctgggactgtgagcaagtcactgttctctgagccttagtcttcccatctataaaatggggatatacaacctgtcacaagcttgtgggggtgactcaaggagacagtgtgtgtaaaagtgccctccttgtgcaagaagcagggagaaactggcatttactcagccagatactgtgataggcattgtgtgtggttagctcatttaattgttaccatggccctttaaagtgagcgtctgcacatccaagtaaagattgttttctcctccctaagtgggtgtaatttgcccatccccacccatgagttcagctccctgccctcccctcactctctctccctcagccagcctcaggttttgacactgggggaacaggtagctgttctattaataatttcctgtaatgggatggataaaaatctcaaaggccacttgatgtcaaagaggtttaaagttgtccctgcccaattggttggccaacttggcttaaaaacacaacaggcaaacagattttctggccccttgtcgaggctagacctcacaatctaactgcactttttactttccagcctcatgagttttctgtggcccacagatatggcctccaagtttatttacttttactctctatttgccccagctctgtagttctgaaactccctggttggggttgggctgactctgggtcagccagccggcaggctgtccccagggccctgttcctcttggcaggttgtccctctggagaggactctgtgtcccaggaggacagctgctgagtcaggccgagccggcagctgagaaaggcggcagtcgtcagatgggcttgagaaactgaaaggctaacgaaaggccagcgcccctttgggcagctgcaggaattcacggggatacaggccagatgtctacaaattggcagaggatgccagacccatgaatgactccagagacacttacatgaaataattaactatctcattcagtaaacaggaagtaaatcaatggacaaatgagtaactcttcctctggctgcctcttaggttttttgagaccacgccccttgggagcatcctgaacagattttcatctgactgtaacaccatcgaccaggtacagaggaccgtgccacactatccccccttccagagacacctcggacccctgggggcttctcctgtctgaggctgggttccccagatcaggtgatcacagccctctgggaagaagccagtgtccccgatccgattataatgctgcttcagggctggggcctccctcgtgggagcctcacagtaaggctgagggaaaccagatccctttagcttccacctgagatcccactggctttctctagtaaagttccagcatattctgaaccaaggtggctgattgtatggagaatattcattttgattcagcctgtgttctttatttaccattgtaccagatggtgtgaaaacaaaatcttgattcctacctcagggagtttaccttgtagctggagagatgagatacgtgcctataataaagggagagcaaggccgggctcagtggctcactcctgtaaccccagcactttgggaggcggaggcaggcggatcacttgaggccaggtgttcaagaccagcctgatggccaacatgatgaaaccccttctctattaaaaatacaaaaattagccaggtgtggtggcaggtgcctgtaatcccaactacttgggaagctgaggcaggagaatcatttgaacccaaggggcagaggctgccgtgaaccgagattacgctgctgcactcaagtctgggcaacagtgagactcagtctcaaaaaaataaaggatcaaaaaataaagtgagagcaaaacatggcggccagtagcactctaaacacagtcaataccaaaattcacctcactctctccccctcgtctccctcagcacatcccatccacgctggagtgcctgagccgctccaccctgctctgtgtctcagccctggccgtcatctcctatgtcacacctgtgttcctcgtggccctcttgcccctggccatcgtgtgctacttcatccagaagtacttccgggtggcgtccaggtgatggcctcaggggtgaggggtgggaggtgctttgcaatgtgcagtttggtgtacttgctagactcatcgttatgagagtaatagggtcgtgttccctccaaaaaataaaaacaaaaaacagaaatgaaggaaatagaaatatccacatcttattccaccgccctaatataatagtctgccaacacacgcacacactgaggttgacatctgaattatttccttgggcgatatggtcaggactggaattgctaggtcatgataaatgcacattttatgcccttcattcattttgccaacatgcttcccaggagggttgcatcattctagtggtcaggctgattgctgatgcatgaaatcggcgggcacctgattcaagcagtgttatgataacacctcccagcccacgtgagtccagagtgtagctgtaagccttgacttgagggagcctctcacagccattctcatggatcacatttgccctcatgagctttggatccatgcacgcctctttcctcctcaaaattttctaagaatgttctctagggagttctttctgggagtgattctcccagattcatagaaactcatagattcaaaaaattgtaggaaaaaatttaaagaacgtctaggccagtgtttctcaaactgccaattacagcccatcagtgggtcatgaaatcaatatcatggatcacaaccagcatttttttaaaaatgaaaaaaacatcagactgtattcatagagtaaagcaagctttgcttcatgaaacctttgtgttggtcatggaggtgtgtgagtactgatttgtgagataaaatatatttctgactgcaggttgtggtcagaaaggttaagtacctttcccaagtgcacatagttggctagaaactagagttgagatacttattagcaataataaaatttagatgcattttggacacaattacctgccccaaaggatcaacatttgtataaatggctttttgcttggatgatccagaatggcccgacacccacacgaacaacatagctttttgacactcaaaaaattcaaagtgctgcacaagctgttctacaaagttcatttcttctgccagagaaacagcccagtctctgtggcacccagtctgaccctggagatggtttatcagggaaatcaacttcctgcatcccaaactggcctccctggcactgatgtgcttgtcgaggtgcagctttggggagcaggaggcaattctgttgccatggaaacctctggccttaccccgagacgaaacctatcatttcagcacatcactggccagggtctaaagagctccttgatggggtaagcggaagacggggttgaacgctttgagtttggtcttctgttcctttggccagctgtctcaaggttcagattgttcacctgtaaaatggaactagcactgcctgcccagccttagctcagctccaggctgtgcagcagaagtacagggacagatggcgacctggggttgacaatgcccaggacagcagtaattgtgccccacatcaggctgtgtctaagcattgtacataaacgatctcattcagtgctcacaaaagctcaatgggctggtggcattgtcttcccccttcacggggtaagaagctgaggcctagagaggtaaggccattcacccacacagcggtagcaggtggagctaggcttcaggcccaggccgagccctgagcctgccctcttaactgttccactctgttccccgccacagggacctgcagcagctggatgacaccacccagcttccacttctctcacactttgccgaaaccgtagaaggactcaccaccatccgggccttcaggtacgagtccacattcccccaaggtaggagtggaacaggggtggggccagggggcacaggccatgagatttgattctcaggactccacttgggaaggccaaggacacgttctctctcaagctgcctcaggtcccaaggcccaagggatatccaccagcagggacaggccaggtgggctcccactgaatgttctagagaggaaaattccagctctgtagacaagcccaggacctctgtgaggcagagcatgaaaagagacaaagctgggacaagtcttcatgtatcaacgctagaaagggccttaggtgcgggccaccctaagcccttcttttattaaggagcccctgtgtgccaaacactatgctgagtactgtacaggccaatcccactcattctgcactgcaaccctcggtgctgagaatggtcatttccattgcacagacaaggaaactgaggcacagagacgttctataacctctctgtgtaaggtgccacaaagcccagacttgaacctatttgttcatgcaacaaacatttactaagccccgactatgtgctaagccccatgccaggcactaaaaagatgagtcaaataagccgctgccctgcaggcgtttacagcccagactttgagcaggccaggataaatccacgtgacaagtattctgaaaaaagcggattcaagggctgtgggagcatagaagagagacagtccgggaaggtttttgtaccagaggtgtcatcagaactaggactcaaaggaggggcaggagttcaccaggctgaggaattcctgaaaacttcagtgcccctgccatcgtctcactaccctgagtggtgatgttggggtggacaggagcatctgaggttgcctggggaatgagggaagctgttgtttcccactccccaagagtctgtctgatctccagaggcatctctcttccagtcaggcaggccagagacccctgacacacaaagttgggctcttttctcatcttcatccagagagtgataataggttatttttagggtggcacagctgcacgaagtatgacagtaaccatgagacaccaagcactgtgtccaggagtaaccatagggcacaaggaccagccaagggccagagaggcttacatctcctccccccaacccctgaagtccagcttcagccctggagaggtatccaggcccctctgcccaccctggagcacctagggccagtggaaatccacctcttagggatcttgtctaagtaaagaagagcagagcaaagctctgccctggccttggcgctgctccctggacatcccttgcccctggacaagcctatgctgtgtcttccacaaagaagcttgctggggactggattatgactctagagtctcctcccagcctcctcttctcaagcctgaacttctcccgttccttcaacttccaggtccctcgacattactgagcctagcctttgctctaagttttggtgatttccctctctcaattggtgtctcagagggccctggggtagagagatggtgactcttctagagtgggccacagccccttgtgtgcagatcccagcttcctgtaaacagcctcagatcaggccaaacctgtggtcagccagagccactgctacccagtgaggtcttccacaccctactgacacggtgaatgatttttaaatttgaatgaaaggctttttaatcaaccccatacacatttaatgcattggctttaatccagcagcctgttgagagctattagcacttattgattgcccacttactgtatgccaggcaccgtgctaagtgttgtatgtgcattattacatttaatcctcacaaggaccacataacataggtacgaatcgccacattctccagatgcagaagcgagacccagagaggctgggtaatcaatccaaggtcacacagactgcgggggctggcgctgagcttggaacccaggtttgcctgaccttctgggctttcctaagagatcttattttttcccaaaagagtttcaagagtgcccagcactgggctcagtggcgggctcggaggttgttttcgttcatgtaggaactatcacttccccatttttttcataagaaaactgagtctcagtcctgatacacagccaggaagttgtgatgttcaggctccaacctgggtttacatggctccgaggctggggctcttttctagtcctcagacacactgtcgcacgcctgtggcagaagctcccatctcacacttgccgaccctcaactcacacagtcctgagacccacatacgctgagcgcctcacactcctataacacgcacatgccctgatgcacacacattttcaacacgcacttactctacccttcaggcatggtttcacactcactgcagacacgtcaccctcccacacgtctccaccctgggggtgtgcagtagcatgctctctcccacctcagaacctcccttcagtcccctcagacacatgccctctctccacgcagagacaatcaaagctgaactaacaccttccagggtgaaaagcaaatgcccagtaaggtacgtcttgggtgcctccgtgtcccctgagtttggtcctatcaaaccagcgatgatgaggcagcttttctttcgttccttcctccatcatcaaacaagtgctcctgcatctcctctgggccgggcctacgtcagcaaggtctgagggaagcggccaaggagagtgatgacggcagcccaggttgatcagagaaaggaggcaggtccatgcgcagtaactcagggaaaacatgatgaggacctaaggatgagaaagaagcctccagagttccctgtgcagagagattccatcaatttcagagggtcaggggagtgccatgcattcatccaacaaatatttattgatagtgccaggtgctggggtatattggtgaataaaacatcttcatggaatttgcagtctattgagggagatgattataaatagctagagaaatgcatgtacagcagatactgtggagcaaacaggttgcagacaataataggggaaacctactttatagtaaggtagtagccaggaagagcctctctgaggaggcagcatttaaggcaagccctgaaggttgagttgagccagccttatgaagagcaagggcaaaagccttccaggaaaagggaatagtgtgtgcaaaggccctggggtagggaagactttagtattgtcacagagcttttaaaaagctgagtggctgcagcatagtgtgtggggtgtttgtggcaggaattaggttggcaggagggggttcttcatcctataagcagtggaaggtcattaatattcttttttatttgtttttttttttttttttttttttttttttgaggcagagtctcactttgtcacccaggctggagtgcagtgaggtgatcttggctcactgcaacctccacctcccgggttcaagcaattatcctggcttcctcagcctcccaagtagctgggattacaggtgtgcaccaccatgcccagctactaatttttgtattattagtagagacagaattccaccatgttggccaggctggtcttgaactcttgacctcaggtgatccgcccgcctcagcctcccaaagtgctgggattacaggggtgagtcaccgcatccggccggagatcattaatattctaaacagtgggggagaggacacagtttgcgatttagatagattaagccagccactgtgtggagcatggactgtagggagacagcaggtagacgtattcaggaagctgatgcagtagtccaggtgagagtttgtggtgggcaggaagcaggatagagggggagggaggcaaggactcttttagagagagacataagaggacttgccaaggggctgaatgtgaatccaggtgattcctgggtgagaaactgggtaaagggaggtgccccttattataatgggaaagacctagagaaaatggatcttggggtgaaaacaagagtttggaggaggtggggattctggacaggtttgaataagcagaaaggagtggggtggacattccagagagggatagcttacatgaagtggccacggtggcatgtctggggactggaggggccctggagcctccctctgcaggtagggagactcctaggagctatgtggaccaacactgttcccttaggagcttctcatcctccctccaggtatgaggcccggttccagcagaagcttctcgaatacacagactccaacaacattgcttccctcttcctcacagctgccaacagatggctggaagtccgaatggcaagtgctattcccctctaccctggcctctgataggagggtggggccagagcaagagcacacaggtacctggggatgaaagagaggataggataccagatcgtgtggacaccaagccttcctgcttcccccagccctggtggtcctcctagtgtctagcctgtgctccttttccccatatcactgcctggaggcttgtgtatctgaggtgtgtgccagtggcaagaacagttgtggtgaatgtgtatctgcagtgggtcatatgacacccacattgtgtgtgtttgtgggccagctgaggcgtgcatgttaaagggtgtgcaggggctagggggtaggggagcatgagcttgtgggacatgttggctcctggggctccagccttcgcagcccttgtgtgtgtctggtgacgtgtgcatgagttgcagggctggagtggaggcctggctgagctgctctctgccccgaaaaggagtgaggtagaacaggggcctgtggctctaacccctgagcgcccaggtcagctcctctccctccccaggagtacatcggtgcatgtgtggtgctcatcgcagcggtgacctccatctccaactccctgcacagggagctctctgctggcctggtgggcctgggccttacctacgccctaatggtgagcggcagtgggctagggcagaggaggggtcagacaccagcactcccggagcaccttcgtcactggagacatgagacactcccaggccttaccccaatttcatttgcatctgatgccagagggacagtgcgggcaggaaggctgaccagcaggccccagggcccaggccccagacaggtggaggttggggagccacatgactgaccctccctgtgcctccagggagggctgctctgagcaggcagtggatggcagcaaaaggaatctggggccctggcccctctccagccttaagaagagccattctggtggctgaggacagaactaagcgaccatggagtgtgcgccactggcttgctccccacaggtctccaactacctcaactggatggtgaggaacctggcagacatggagctccagctgggggctgtgaagcgcatccatgggctcctgaaaaccgaggcagagagctacgaggggctcctgggtgagaggctcagggagaggggtggggaagagtccaaggaggagtgtgtctgggttgggggccacaagggagcctggggatggggtggcactttcggatactagctgtggcccatgcctggtggctgagcccagcccggcccccagcaccatcgctgatcccaaagaactggccagaccaagggaagatccagatccagaacctgagcgtgcgctacgacagctccctgaagccggtgctgaagcacgtcaatgccctcatcgcccctggacagaaggtcagagcacgggcccaacccaatgctgcaggacaggcgtgagcaggggatggggcatgcacggagctggatggcttcgcagtcacctcgtggccctccagggccgaggcctctcactattcagacatcgcagtctcctgccctgggcctgtgggggcccatctttcctctccttctattgccttcccccagtgctgccctcaggccttgtcttctcactcatccaccaaggagaccgacactctggactcccccagctcacacgggctttgtcagggcctccctctctgcgaatggtcaggggctttccctagggcactgccccgagcttcagggcagggacctgggggcagacagcgaggccacccttgtattgagggtgagcccctgcctatggccctggcccagctctcctctcgtttcccactctgtctctttgtctctgtctcactttgctgtggctgtccatgtcattctctgaccttgggatgtacctctgtccctgcctctctcatccttctatgtcactatctgtctccgtattgtaatttctgttggtacccaagtgccaggaagcaacgggatcagaggtggctccattgtagggcggggcacacagacacatccatgcataccactctcagctgcccctgtgtcctcctgccacacccatgcccatagagacacaccactgccccccagctctccttcagccaagtacccggcacacccagacccacaccaaggcccaggcaaatggacatccatgcctgcacttgcgtgccggtccctgtgtaagccctctctggacccactgcaggaaacaagcccaaacctgtggtgtccaaagagaaactagtcagaaaaccaggccaaaaagataccctgtgacctcccacacctgcacacacacccagagctagcatagaggctattcccagcagccccagagtcccagtggcggtgcctgcttctctctttccagatcgggatctgcggccgcaccggcagtgggaagtcctccttctctcttgccttcttccgcatggtggacacgttcgaaggtgagttgtaaggcgggcaccccacgtgtacccacagccaccagatgaggcctcagccctggcacgtggtcagacatgacaggaggcccagcagtcaccgccttcccctgcaccctcactgggacccatgcagggcacatcatcattgatggcattgacatcgccaaactgccgctgcacaccctgcgctcacgcctctccatcatcctgcaggaccccgtcctcttcagcggcaccatccggtgagccccaccacccctcaggcccacccagccccaggccggctcagttccatcagatctggagcacaaagaggagggggttgggggagaccaggatcccagaggtgtttcctgctcatgcccttctccatcccatcaggcccaggcagcctctggaaggggatcccccacccatgggtctaagatgctgtcccccacccactgccaccacctcggtgcttctcccagccagacctccaactcagtctgctctcgctcactgccctctttgccgcctggggatgcaggcaggaccctgctccctccctactggggctttctgtgccacttccagatttaacctggaccctgagaggaagtgctcagatagcacactgtgggaggccctggaaatcgcccagctgaagctggtggtgaaggcactgccaggaggcctcggtaactactcctggctatgcagctgggttggttgggcactcaaggaccctgtaaggatggcagacagaagcccgtgtctcaggtttgccccaagtttggagtctgaagcctggcaggaccatttagtcctacttctcactatacgggggcccagagaggtcaggtgtcttgccccaggtcacacaactggtcagttcagggtctggctcctcctgcagggtacagcgggtacagtcagggatccttgtgagacagagattgcgagtcccccatgccaagggggcatcttcagccctgccctgccccatccacctgcatgcccagttctgccttaggggaggagaagatggactgggcaatcatagacacgggtcactcatcaaggccaccggtgattggcaaagccttggtatatttgctgcagctcctggagcattgggggtggccaagccttggtttcaatgaatcaccctaccaaggccctacatacacactcagtgcacccctcagtgcacacgccccctcccagaactgcccagggccacagcagcacacacctccaggggtgcccttctcgttgcagtccttgcagacggcctccacattgttgtgtcaggtgcaccagccctgcacacgcctgtgctcttggacacacacccacctatttgcccccatgcacacattttccaacagccccccaagccatcccatctgctccactcacagcacaagattaactcagtcctacttcatctccccgggctgttttcagatgccatcatcacagaaggcggggagaatttcagccagggacagaggcagctgttctgcctggcccgggccttcgtgaggaagaccagcatcttcatcatggacgaggccacggcttccattgacatggccacggttggtcctgggcccctccatgggaccatggtcttggaaagggtttagtgggatgctagggagaaatttgcacgaagtagtcctgaggctcaagttgcctctaacatcaaatgctatgtgttgcagaaaatgaaaagagctggggggaccctgactctgtctagtcttagggaatgttacacacacacacgcacacacaaaaacactatgcaaacacacacataagctgcacacacagacccacacagacttcacactgtcacctatcacaacagcacacacacagccacaaccacaacctacatacacacacagagctgagctcccaacaggctgagtccagtccctgagtgccgggaacctgttcagtcctgtggggtgggggtgggactaggatcggggtcagatgggagctgagccacagacctgggctccacatcccccaagccaggccagaccccatccactgggcaggtgagccaacagctgttgcccccacttggcaggaaaacatcctccaaaaggtggtgatgacagccttcgcagaccgcactgtggtcaccatcgcggtaaggggcccattgatggggtgcagagggacacccagggacaggactggcctgttgtggccgtcatcagtgcacagcccctgggcttgcctggtcccagtaatcaagaaagaaccctgaagcaggcagttcagggcaaggggcctggagggcatgcagggagcctgggttgcaggatttggggtggggggttttgcccctgtgcttccctcagacctcccctctccttctccaggttccaaggcctgcccctgtcccaaggccttatatgttaggctggcgttacttctccataggaagtgggggaggggttgtggagggtctctgagccttgaagcctggaggtggggtagagttgggacttggagaggagagaagggtggtattagcagatggagagcttgtagtcacatccaccccaggaaagtgcagtccccacagtgacaggacattctggccacatgcctcatcctcctcctccaagccgcaggagggccaccctcagctgtggcccccaccgcgggtggtattcccaccatcctgacccgccccctcctgccctgcccagcatcgagtgcacaccatcctgagtgcagacctggtgatcgtcctgaagcgggg

SEQ ID NO: 10396 - DNA, 1849 bp, Homo sapiens
gagaaaagccacagagccaccccagggcctatctcgtgccatgtcctcgagggatggccttctgcaggatgaggaagaggaggaagaggaggcagctgagagcgaggaggatgacaacctgtcgtccatgctgcaccagcgtgctgagatcccatggcgagcctgcgccaagtacctgtcctccgccggcatcctgctcctgtcgttgctggtcttctcacagctgctcaagcacatggtcctggtggccatcgactactggctggccaagtggaccgacagcgccctgaccctgacccctgcagccaggaactgctccctcagccaggagtgcaccctcgaccagactgtctatgccatggtgttcacggtgctctgcagcctgggcattgtgctgtgcctcgtcacgtctgtcactgtggagtggacagggctgaaggtggccaagagactgcaccgcagcctgctaaaccggatcatcctagcccccatgaggttttttgagaccacgccccttgggagcatcctgaacagattttcatctgactgtaacaccatcgaccagcacatcccatccacgctggagtgcctgagccgctccaccctgctctgtgtctcagccctggccgtcatctcctatgtcacacctgtgttcctcgtggccctcttgcccctggccatcgtgtgctacttcatccagaagtacttccgggtggcgtccagggacctgcagcagctggatgacaccacccagcttccacttctctcacactttgccgaaaccgtagaaggactcaccaccatccgggccttcaggagcttctcatcctccctccaggtatgaggcccggttccagcagaagcttctcgaatacacagactccaacaacattgcttccctcttcctcacagctgccaacagatggctggaagtccgaatggagtacatcggtgcatgtgtggtgctcatcgcagcggtgacctccatctccaactccctgcacagggagctctctgctggcctggtgggcctgggccttacctacgccctaatggtctccaactacctcaactggatggtgaggaacctggcagacatggagctccagctgggggctgtgaagcgcatccatgggctcctgaaaaccgaggcagagagctacgaggggctcctggcaccatcgctgatcccaaagaactggccagaccaagggaagatccagatccagaacctgagcgtgcgctacgacagctccctgaagccggtgctgaagcacgtcaatgccctcatcgcccctggacagaagatcgggatctgcggccgcaccggcagtgggaagtcctccttctctcttgccttcttccgcatggtggacacgttcgaagggcacatcatcattgatggcattgacatcgccaaactgccgctgcacaccctgcgctcacgcctctccatcatcctgcaggaccccgtcctcttcagcggcaccatccgatttaacctggaccctgagaggaagtgctcagatagcacactgtgggaggccctggaaatcgcccagctgaagctggtggtgaaggcactgccaggaggcctcgatgccatcatcacagaaggcggggagaatttcagccagggacagaggcagctgttctgcctggcccgggccttcgtgaggaagaccagcatcttcatcatggacgaggccacggcttccattgacatggccacggaaaacatcctccaaaaggtggtgatgacagccttcgcagaccgcactgtggtcaccatcgcgcatcgagtgcacaccatcctgagtgcagacctggtgatcgtcctgaagcgggg

SEQ ID NO: 10397 - DNA, 5398 bp, Homo sapiens
aggcgcggcaggcgcgcggagccagcggagccagctgagcccgagcccagcccgcgcccgcgccgccatgcccctggccttctgcggcagcgagaaccactcggccgcctaccgggtggaccagggggtcctcaacaacggctgctttgtggacgcgctcaacgtggtgccgcacgtcttcctactcttcatcaccttccccatcctcttcattggatggggaagtcagagctccaaggtgcacatccaccacagcacatggcttcatttccctgggcacaacctgcggtggatcctgaccttcatgctgctcttcgtcctggtgtgtgagattgcagagggcatcctgtctgatggggtgaccgaatcccaccatctgcacctgtacatgccagccgggatggcgttcatggctgctgtcacctccgtggtctactatcacaacatcgagacttccaacttccccaagctgctaattgccctgctggtgtattggaccctggccttcatcaccaagaccatcaagtttgtcaagttcttggaccacgccatcggcttctcgcagctacgcttctgcctcacagggctgctggtgatcctctatgggatgctgctcctcgtggaggtcaatgtcatcagggtgaggagatacatcttcttcaagacaccgagggaggtgaagcctcccgaggacctgcaagacctgggggtacgcttcctgcagcccttcgtgaatctgctgtccaaaggcacctactggtggatgaacgccttcatcaagactgcccacaagaagcccatcgacttgcgagccatcgggaagctgcccatcgccatgagggccctcaccaactaccaacggctctgcgaggcctttgacgcccagcggaaggacattcagggcactcaaggtgcccgggccatctggcaggcactcagccatgccttcgggaggcgcctggtcctcagcagcactttccgcatcttggccgacctgctgggcttcgccgggccactgtgcatctttgggatcgtggaccaccttgggaaggagaacgacgtcttccagcccaagttttcatgaacacggccatccccattgcagctgtcctcataactttcgtgggccacgtcagcttcttcaaagaggccgacttctcgccctccgtggcctttgcctccctctccctcttccatatcttggtcacaccgctgttcctgctgtccagtgtggtccgatctaccgtcaaagctctagtgagcgtgcaaaagctaagcgagttcctgtccagtgcagagatccgtgaggagcagtgtgccccccatgagcccacacctcagggcccagccagcaagtaccaggcggtgcccctcagggttgtgaaccgcaagcgtccagcccgggaggattgtcggggcctcaccggcccactgcagagcctggtccccagtgcagatggcgatgctgacaactgctgtgtccagatcatgggaggctacttcacgtggaccccagatggaatccccacactgtccaacatcaccattcgtatcccccgaggccagctgactatgatcgtggggcaggtgggctgcggcaagtcctcgctccttctagccgcactgggggagatgcagaaggtctcaggggctgtcttctggagcagcagccttcctgacagcgagataggagaggaccccagcccagagcgggagacagcgaccgacttggatatcaggaagagaggccccgtggcctatgcttcgcagaaaccatggctgctaaatgccactgtggaggagaacatcatctttgagagtcccttcaacaaacaacggtacaagatggtcattgaagcctgctctctgcagccagacatcgacatcctgccccatggagaccagacccagattggggaacggggcatcaacctgtctggtggtcaacgccagcgaatcagtgtggcccgagccctctaccagcacgccaacgttgtcttcttggatgaccccttctcagctctggatatccatctgagtgaccacttaatgcaggccggcatccttgagctgctccgggacgacaagaggacagtggtcttagtgacccacaagctacagtacctgccccatgcagactggatcattgccatgaaggatggcaccatccagagggagggtaccctcaaggacttccagaggtctgaatgccagctctttgagcactggaagaccctcatgaaccgacaggaccaagagctggagaagaggaggcagctgagagcgaggaggatgacaacctgtcgtccatgctgcaccagcgtgctgagatcccatggcgagcctgcgccaagtacctgtcctccgccggcatcctgctcctgtcgttgctggtcttctcacagctgctcaagcacatggtcctggtggccatcgactactggctggccaagtggaccgacagcgccctgaccctgacccctgcagccaggaactgctccctcagccaggagtgcaccctcgaccagactgtctatgccatggtgttcacggtgctctgcagcctgggcattgtgctgtgcctcgtcacgtctgtcactgtggagtggacagggctgaaggtggccaagagactgcaccgcagcctgctaaaccggatcatcctagcccccatgaggttttttgagaccacgccccttgggagcatcctgaacagattttcatctgactgtaacaccatcgaccagcacatcccatccacgctggagtgcctgagccgctccaccctgctctgtgtctcagccctggccgtcatctcctatgtcacacctgtgttcctcgtggccctcttgcccctggccatcgtgtgctacttcatccagaagtacttccgggtggcgtccagggacctgcagcagctggatgacaccacccagcttccacttctctcacactttgccgaaaccgtagaaggactcaccaccatccgggccttcaggtatgaggcccggttccagcagaagcttctcgaatacacagactccaacaacattgcttccctcttcctcacagctgccaacagatggctggaagtccgaatggagtacatcggtgcatgtgtggtgctcatcgcagcggtgacctccatctccaactccctgcacagggagctctctgctggcctggtgggcctgggccttacctacgccctaatggtgagcggcagtgggctagggcagaggaggggtcagacaccagcactcccggagcaccttcgtcactggagacatgagacactcccaggccttaccccaatttcatttgcatctgatgccagagggacagtgcgggcaggaaggctgaccagcaggccccagggcccaggccccagacaggtggaggttggggagccacatgactgaccctccctgtgcctccagggagggctgctctgagcaggcagtggatggcagcaaaaggaatctggggccctggcccctctccagccttaagaagagccattctggtggctgaggacagaactaagcgaccatggagtgtgcgccactggcttgctccccacaggtctccaactacctcaactggatggtgaggaacctggcagacatggagctccagctgggggctgtgaagcgcatccatgggctcctgaaaaccgaggcagagagctacgaggggctcctgggtgagaggctcagggagaggggtggggaagagtccaaggaggagtgtgtctgggttgggggccacaagggagcctggggatggggtggcactttcggatactagctgtggcccatgcctggtggctgagcccagcccggcccccagcaccatcgctgatcccaaagaactggccagaccaagggaagatccagatccagaacctgagcgtgcgctacgacagctccctgaagccggtgctgaagcacgtcaatgccctcatcgcccctggacagaaggtcagagcacgggcccaacccaatgctgcaggacaggcgtgagcaggggatggggcatgcacggagctggatggcttcgcagtcacctcgtggccctccagggccgaggcctctcactattcagacatcgcagtctcctgccctgggcctgtgggggcccatctttcctctccttctattgccttcccccagtgctgccctcaggccttgtcttctcactcatccaccaaggagaccgacactctggactcccccagctcacacgggctttgtcagggcctccctctctgcgaatggtcaggggctttccctagggcactgccccgagcttcagggcagggacctgggggcagacagcgaggccacccttgtattgagggtgagcccctgcctatggccctggcccagctctcctctcgtttcccactctgtctctttgtctctgtctcactttgctgtggctgtccatgtcattctctgaccttgggatgtacctctgtccctgcctctctcatccttctatgtcactatctgtctccgtattgtaatttctgttggtacccaagtgccaggaagcaacgggatcagaggtggctccattgtagggcggggcacacagacacatccatgcataccactctcagctgcccctgtgtcctcctgccacacccatgcccatagagacacaccactgccccccagctctccttcagccaagtacccggcacacccagacccacaccaaggcccaggcaaatggacatccatgcctgcacttgcgtgccggtccctgtgtaagccctctctggacccactgcaggaaacaagcccaaacctgtggtgtccaaagagaaactagtcagaaaaccaggccaaaaagataccctgtgacctcccacacctgcacacacacccagagctagcatagaggctattcccagcagccccagagtcccagtggcggtgcctgcttctctctttccagatcgggatctgcggccgcaccggcagtgggaagtcctccttctctcttgccttcttccgcatggtggacacgttcgaaggaccccgtcctcttcagcggcaccatccgatttaacctggaccctgagaggaagtgctcagatagcacactgtgggaggccctggaaatcgcccagctgaagctggtggtgaaggcactgccaggaggcctcgatgccatcatcacagaaggcggggagaatttcagccagggacagaggcagctgttctgcctggcccgggccttcgtgaggaagaccagcatcttcatcatggacgaggccacggcttccattgacatggccacggaaaacatcctccaaaaggtggtgatgacagccttcgcagaccgcactgtggtcaccatcgcgcatcgagtgcacaccatcctg

SEQ ID NO: 10398 - DNA, 5231 bp, Homo sapiens
tggccttctgcggcagcgagaaccactcggccgcctaccgggtggaccagggggtcctcaacaacggctgctttgtggacgcgctcaacgtggtgccgcacgtcttcctactcttcatcaccttccccatcctcttcattggatggggaagtcagagctccaaggtgcacatccaccacagcacatggcttcatttccctgggcacaacctgcggtggatcctgaccttcatgctgctcttcgtcctggtgtgtgagattgcagagggcatcctgtctgatggggtgaccgaatcccaccatctgcacctgtacatgccagccgggatggcgttcatggctgctgtcacctccgtggtctactatcacaacatcgagacttccaacttccccaagctgctaattggcattcagcttttgctgagtacttctgtgtctgacaacaggctgagcactcagcactgcaggacaggactatgcaaaaaacctctgggcctagtcctgggtgcactgctaattccctgtgtgaccttgcacaagacatccaagctctctgagcctcggattccccacctgggcaggaagaccctgctggtgtattggaccctggccttcatcaccaagaccatcaagtttgtcaagttcttggaccacgccatcggcttctcgcagctacgcttctgcctcacagggctgctggtgatcctctatgggatgctgctcctcgtggaggtcaatgtcatcagggtgaggagatacatcttcttcaagacaccgagggaggtgaagcctcccgaggacctgcaagacctgggggtacgcttcctgcagcccttcgtgaatctgctgtccaaaggcacctactggtggatgaacgccttcatcaagactgcccacaagaagcccatcgacttgcgagccatcgggaagctgcccatcgccatgagggccctcaccaactaccaacggctctgcgaggcctttgacgcccaggtgcggaaggacattcagggcactcaaggtgcccgggccatctggcaggcactcagccatgccttcgggaggcgcctggtcctcagcagcactttccgcatcttggccgacctgctgggcttcgccgggccactgtgcatctttgggatcgtggaccaccttgggaaggagaacgacgtcttccagcccaagacacaatttctcggggtttactttgtctcatcccaagagttccttgccaatgcctacgtcttagctgtgcttctgttccttgccctcctactgcaaaggacatttctgcaagcatcctactatgtggccattgaaactggaattaacttgagaggagcaatacagaccaagatttacaataaaattatgcacctgtccacctccaacctgtccatgggagaaatgactgctggacagatctgtaatctggttgccatcgacaccaatcagctcatgtggtttttcttcttgtgcccaaacctctgggctatgccagtacagatcattgtgggtgtgattctcctctactacatactcggagtcagtgccttaattggagcagctgtcatcattctactggctcctgtccagtacttcgtggccaccaagctgtctcaggcccagcggagcacactggagtattccaatgagcggctgaagcagaccaacgagatgctccgcggcatcaagctgctgaagctgtacgcctgggagaacatcttccgcacgcgggtggagacgacccgcaggaaggagatgaccagcctcagggcctttgccatctatacctccatctccagctggccccactggactgcgctgcctccaagccatcctgggcatctccatgtgtagctgtcacgctcctcccactaaacgcctccctgtgcttcctctgcagttttcatgaacacggccatccccattgcagctgtcctcataactttcgtgggccacgtcagcttcttcaaagaggccgacttctcgccctccgtggcctttgcctccctctccctcttccatatcttggtcacaccgctgttcctgctgtccagtgtggtccgatctaccgtcaaagctctagtgagcgtgcaaaagctaagcgagttcctgtccagtgcagagatccgtgaggagcagtgtgccccccatgagcccacacctcagggcccagccagcaagtaccaggcggtgcccctcagggttgtgaaccgcaagcgtccagcccgggaggattgtcggggcctcaccggcccactgcagagcctggtccccagtgcagatggcgatgctgacaactgctgtgtccagatcatgggaggctacttcacgtggaccccagatggaatccccacactgtccaacatcaccattcgtatcccccgaggccagctgactatgatcgtggggcaggtgggctgcggcaagtcctcgctccttctagccgcactgggggagatgcagaaggtctcaggggctgtcttctggagcagccttcctgacagcgagataggagaggaccccagcccagagcgggagacagcgaccgacttggatatcaggaagagaggccccgtggcctatgcttcgcagaaaccatggctgctaaatgccactgtggaggagaacatcatctttgagagtcccttcaacaaacaacggtacaagatggtcattgaagcctgctctctgcagccagacatcgacatcctgccccatggagaccagacccagattggggaacggggcatcaacctgtctggtggtcaacgccagcgaatcagtgtggcccgagccctctaccagcacgccaacgttgtcttcttggatgaccccttctcagctctggatatccatctgagtgaccacttaatgcaggccggcatccttgagctgctccgggacgacaagaggacagtggtcttagtgacccacaagctacagtacctgccccatgcagactggatcattgccatgaaggatggcaccatccagagggagggtaccctcaaggacttccagaggtctgaatgccagctctttgagcactggaagaccctcatgaaccgacaggaccaagagctggagaaggagactgtcacagagagaaaagccacagagccaccccagggcctatctcgtgccatgtcctcgagggatggccttctgcaggatgaggaagaggaggaagaggaggcagctgagagcgaggaggatgacaacctgtcgtccatgctgcaccagcgtgctgagatcccatggcgagcctgcgccaagtacctgtcctccgccggcatcctgctcctgtcgttgctggtcttctcacagctgctcaagcacatggtcctggtggccatcgactactggctggccaagtggaccgacagcgccctgaccctgacccctgcagccaggaactgctccctcagccaggagtgcaccctcgaccagactgtctatgccatggtgttcacggtgctctgcagcctgggcattgtgctgtgcctcgtcacgtctgtcactgtggagtggacagggctgaaggtggccaagagactgcaccgcagcctgctaaaccggatcatcctagcccccatgaggttttttgagaccacgccccttgggagcatcctgaacagattttcatctgactgtaacaccatcgaccagcacatcccatccacgctggagtgcctgagccgctccaccctgctctgtgtctcagccctggccgtcatctcctatgtcacacctgtgttcctcgtggccctcttgcccctggccatcgtgtgctacttcatccagaagtacttccgggtggcgtccagggacctgcagcagctggatgacaccacccagcttccacttctctcacactttgccgaaaccgtagaaggactcaccaccatccgggccttcaggtatgaggcccggttccagcagaagcttctcgaatacacagactccaacaacattgcttccctcttcctcacagctgccaacagatggctggaagtccgaatggagtacatcggtgcatgtgtggtgctcatcgcagcggtgacctccatctccaactccctgcacagggagctctctgctggcctggtgggcctgggccttacctacgccctaatggtctccaactacctcaactggatggtgaggaacctggcagacatggagctccagctgggggctgtgaagcgcatccatgggctcctgaaaaccgaggcagagagctacgaggggctcctgggtgagaggctcagggagaggggtggggaagagtccaaggaggagtgtgtctgggttgggggccacaagggagcctggggatggggtggcactttcggatactagctgtggcccatgcctggtggctgagcccagcccggcccccagcaccatcgctgatcccaaagaactggccagaccaagggaagatccagatccagaacctgagcgtgcgctacgacagctccctgaagccggtgctgaagcacgtcaatgccctcatcgcccctggacagaagatcgggatctgcggccgcaccggcagtgggaagtcctccttctctcttgccttcttccgcatggtggacacgttcgaagggcacatcatcattgatggcattgacatcgccaaactgccgctgcacaccctgcgctcacgcctctccatcatcctgcaggaccccgtcctcttcagcggcaccatccgatttaacctggaccctgagaggaagtgctcagatagcacactgtgggaggccctggaaatcgcccagctgaagctggtggtgaaggcactgccaggaggcctcgatgccatcatcacagaaggcggggagaatttcagccagggacagaggcagctgttctgcctggcccgggccttcgtgaggaagaccagcatcttcatcatggacgaggccacggcttccattgacatggccacggaaaacatcctccaaaaggtggtgatgacagccttcgcagaccgcactgtggtcaccatcgcgcatcgagtgcacaccatcctgagtgcagacctggtgatcgtcctgaagcggggtgccatccttgagttcgataagccagagaagctgctcagccggaaggacagcgtcttcgcctccttcgtccgtgcagacaagtgacctgccagagcccaagtgccatcccacattcggaccctgcccatacccctgcctgggttttcta

SEQ ID NO: 10399 - DNA, 5094 bp, Homo sapiens
gaggcgcggcaggcgcgcggagccagcggagccagctgagcccgagcccagcccgcgcccgcgccgccatgcccctggccttctgcggcagcgagaaccactcggccgcctaccgggtggaccagggggtcctcaacaacggctgctttgtggacgcgctcaacgtggtgccgcacgtcttcctactcttcatcaccttccccatcctcttcattggatggggaagtcagagctccaaggtgcacatccaccacagcacatggcttcatttccctgggcacaacctgcggtggatcctgaccttcatgctgctcttcgtcctggtgtgtgagattgcagagggcatcctgtctgatggggtgaccgaatcccaccatctgcacctgtacatgccagccgggatggcgttcatggctgctgtcacctccgtggtctactatcacaacatcgagacttccaacttccccaagctgctaattgccctgctggtgtattggaccctggccttcatcaccaagaccatcaagtttgtcaagttcttggaccacgccatcggcttctcgcagctacgcttctgcctcacagggctgctggtgatcctctatgggatgctgctcctcgtggaggtcaatgtcatcagggtgaggagatacatcttcttcaagacaccgagggaggtgaagcctcccgaggacctgcaagacctgggggtacgcttcctgcagcccttcgtgaatctgctgtccaaaggcacctactggtggatgaacgccttcatcaagactgcccacaagaagcccatcgacttgcgagccatcgggaagctgcccatcgccatgagggccctcaccaactaccaacggctctgcgaggcctttgacgcccagcggaaggacattcagggcactcaaggtgcccgggccatctggcaggcactcagccatgccttcgggaggcgcctggtcctcagcagcactttccgcatcttggccgacctgctgggcttcgccgggccactgtgcatctttgggatcgtggaccaccttgggaaggagaacgacgtcttccagcccaagacacaatttctcggggtttactttgtctcatcccaagagttccttgccaatgcctacgtcttagctgtgcttctgttccttgccctcctactgcaaaggacatttctgcaagcatcctactatgtggccattgaaactggaattaacttgagaggagcaatacagaccaagatttacaataaaattatgcacctgtccacctccaacctgtccatgggagaaatgactgctggacagatctgtaatctggttgccatcgacaccaatcagctcatgtggtttttcttcttgtgcccaaacctctgggctatgccagtacagatcattgtgggtgtgattctcctctactacatactcggagtcagtgccttaattggagcagctgtcatcattctactggctcctgtccagtacttcgtggccaccaagctgtctcaggcccagcggagcacactggagtattccaatgagcggctgaagcagaccaacgagatgctccgcggcatcaagctgctgaagctgtacgcctgggagaacatcttccgcacgcgggtggagacgacccgcaggaaggagatgaccagcctcagggcctttgccatctatacctccatctccattttcatgaacacggccatccccattgcagctgtcctcataactttcgtgggccacgtcagcttcttcaaagaggccgacttctcgccctccgtggcctttgcctccctctccctcttccatatcttggtcacaccgctgttcctgctgtccagtgtggtccgatctaccgtcaaagctctagtgagcgtgcaaaagctaagcgagttcctgtccagtgcagagatccgtgaggagcagtgtgccccccatgagcccacacctcagggcccagccagcaagtaccaggcggtgcccctcagggttgtgaaccgcaagcgtccagcccgggaggattgtcggggcctcaccggcccactgcagagcctggtccccagtgcagatggcgatgctgacaactgctgtgtccagatcatgggaggctacttcacgtggaccccagatggaatccccacactgtccaacatcaccattcgtatcccccgaggccagctgactatgatcgtggggcaggtgggctgcggcaagtcctcgctccttctagccgcactgggggagatgcagaaggtctcaggggctgtcttctggagcagcagccttcctgacagcgagataggagaggaccccagcccagagcgggagacagcgaccgacttggatatcaggaagagaggccccgtggcctatgcttcgcagaaaccatggctgctaaatgccactgtggaggagaacatcatctttgagagtcccttcaacaaacaacggtacaagatggtcattgaagcctgctctctgcagccagacatcgacatcctgccccatggagaccagacccagattggggaacggggcatcaacctgtctggtggtcaacgccagcgaatcagtgtggcccgagccctctaccagcacgccaacgttgtcttcttggatgaccccttctcagctctggatatccatctgagtgaccacttaatgcaggccggcatccttgagctgctccgggacgacaagaggacagtggtcttagtgacccacaagctacagtacctgccccatgcagactggatcattgccatgaaggatggcaccatccagagggagggtaccctcaaggacttccagaggtctgaatgccagctctttgagcactggaagaccctcatgaaccgacaggaccaagagctggagaaggagactgtcacagagagaaaagccacagagccaccccagggcctatctcgtgccatgtcctcgagggatggccttctgcaggatgaggaagaggaggaagtaagtggggataaaatgccctgattcaccctcagagggatggaaatgtgtagccacagagtgggttcttgcggcctgcagaggaggcagctgagagcgaggaggatgacaacctgtcgtccatgctgcaccagcgtgctgagatcccatggcgagcctgcgccaagtacctgtcctccgccggcatcctgctcctgtcgttgctggtcttctcacagctgctcaagcacatggtcctggtggccatcgactactggctggccaagtggaccgacagcgccctgaccctgacccctgcagccaggaactgctccctcagccaggagtgcaccctcgaccagactgtctatgccatggtgttcacggtgctctgcagcctgggcattgtgctgtgcctcgtcacgtctgtcactgtggagtggacagggctgaaggtggccaagagactgcaccgcagcctgctaaaccggatcatcctagcccccatgaggttttttgagaccacgccccttgggagcatcctgaacagattttcatctgactgtaacaccatcgaccagcacatcccatccacgctggagtgcctgagccgctccaccctgctctgtgtctcagccctggccgtcatctcctatgtcacacctgtgttcctcgtggccctcttgcccctggccatcgtgtgctacttcatccagaagtacttccgggtggcgtccagggacctgcagcagctggatgacaccacccagcttccacttctctcacactttgccgaaaccgtagaaggactcaccaccatccgggccttcaggtatgaggcccggttccagcagaagcttctcgaatacacagactccaacaacattgcttccctcttcctcacagctgccaacagatggctggaagtccgaatggagtacatcggtgcatgtgtggtgctcatcgcagcggtgacctccatctccaactccctgcacagggagctctctgctggcctggtgggcctgggccttacctacgccctaatggtctccaactacctcaactggatggtgaggaacctggcagacatggagctccagctgggggctgtgaagcgcatccatgggctcctgaaaaccgaggcagagagctacgaggggctcctgggtgagaggctcagggagaggggtggggaagagtccaaggaggagtgtgtctgggttgggggccacaagggagcctggggatggggtggcactttcggatactagctgtggcccatgcctggtggctgagcccagcccggcccccagcaccatcgctgatcccaaagaactggccagaccaagggaagatccagatccagaacctgagcgtgcgctacgacagctccctgaagccggtgctgaagcacgtcaatgccctcatcgcccctggacagaagatcgggatctgcggccgcaccggcagtgggaagtcctccttctctcttgccttcttccgcatggtggacacgttcgaagggcacatcatcattgatggcattgacatcgccaaactgccgctgcacaccctgcgctcacgcctctccatcatcctgcaggaccccgtcctcttcagcggcaccatccgatttaacctggaccctgagaggaagtgctcagatagcacactgtgggaggccctggaaatcgcccagctgaagctggtggtgaaggcactgccaggaggcctcgatgccatcatcacagaaggcggggagaatttcagccagggacagaggcagctgttctgcctggcccgggccttcgtgaggaagaccagcatcttcatcatggacgaggccacggcttccattgacatggccacggaaaacatcctccaaaaggtggtgatgacagccttcgcagaccgcactgtggtcaccatcgcgcatcgagtgcacaccatcctgagtgcagacctggtgatcgtcctgaagcggggtgccatccttgagttcgataagccagagaagctgctcagccggaaggacagcgtcttcgcctccttcgtccgtgcagacaagtgacctgccagagcccaagtgccatcccacattcggaccctgcccatacccctgcct

SEQ ID NO: 10400 - DNA, 4628 bp, Homo sapiens
agaggcgcggcaggcgcgcggagccagcggagccagctgagcccgagcccagcccgcgcccgcgccgccatgcccctggccttctgcggcagcgagaaccactcggccgcctaccgggtggaccagggggtcctcaacaacggctgctttgtggacgcgctcaacgtggtgccgcacgtcttcctactcttcatcaccttccccatcctcttcattggatggggaagtcagagctccaaggtgcacatccaccacagcacatggcttcatttccctgggcacaacctgcggtggatcctgaccttcatgctgctcttcgtcctggtgtgtgagattgcagagggcatcctgtctgatggggtgaccgaatcccaccatctgcacctgtacatgccagccgggatggcgttcatggctgctgtcacctccgtggtctactatcacaacatcgagacttccaacttccccaagctgctaattgccctgctggtgtattggaccctggccttcatcaccaagaccatcaagtttgtcaagttcttggaccacgccatcggcttctcgcagctacgcttctgcctcacagggctgctggtgatcctctatgggatgctgctcctcgtggaggtcaatgtcatcagggtgaggagatacatcttcttcaagacaccgagggaggtgaagcctcccgaggacctgcaagacctgggggtacgcttcctgcagcccttcgtgaatctgctgtccaaaggcacctactggtggatgaacgccttcatcaagactgcccacaagaagcccatcgacttgcgagccatcgggaagctgcccatcgccatgagggccctcaccaactaccaacggctctgcgaggcctttgacgcccagcggaaggacattcagggcactcaaggtgcccgggccatctggcaggcactcagccatgccttcgggaggcgcctggtcctcagcagcactttccgcatcttggccgacctgctgggcttcgccgggccactgtgcatctttgggatcgtggaccaccttgggaaggagaacgacgtcttccagcccaagacacaatttctcggggtttactttgtctcatcccaagagttccttgccaatgcctacgtcttagctgtgcttctgttccttgccctcctactgcaaaggacatttctgcaagcatcctactatgtggccattgaaactggaattaacttgagaggagcaatacagaccaagatttacaataaaattatgcacctgtccacctccaacctgtccatgggagaaatgactgctggacagatctgtaatctggttgccatcgacaccaatcagctcatgtggtttttcttcttgtgcccaaacctctgggctatgccagtacagatcattgtgggtgtgattctcctctactacatactcggagtcagtgccttaattggagcagctgtcatcattctactggctcctgtccagtacttcgtggccaccaagctgtctcaggcccagcggagcacactggagtattccaatgagcggctgaagcagaccaacgagatgctccgcggcatcaagctgctgaagctgtacgcctgggagaacatcttccgcacgcgggtggagacgacccgcaggaaggagatgaccagcctcagggcctttgccatctatacctccatctccattttcatgaacacggccatccccattgcagctgtcctcatacgtgcaaaagctaagcgagttcctgtccagtgcagagatccgtgaggagcagtgtgccccccatgagcccacacctcagggcccagccagcaagtaccaggcggtgcccctcagggttgtgaaccgcaagcgtccagcccgggaggattgtcggggcctcaccggcccactgcagagcctggtccccagtgcagatggcgatgctgacaactgctgtgtccagatcatgggaggctacttcacgtggaccccagatggaatccccacactgtccaacatcaccattcgtatcccccgaggccagctgactatgatcgtggggcaggtgggctgcggcaagtcctcgctccttctagccgcactgggggagatgcagaaggtctcaggggctgtcttctggagcagcagccttcctgacagcgagataggagaggaccccagcccagagcgggagacagcgaccgacttggatatcaggaagagaggccccgtggcctatgcttcgcagaaaccatggctgctaaatgccactgtggaggagaacatcatctttgagagtcccttcaacaaacaacgggcatcaacctgtctggtggtcaacgccagcgaatcagtgtggcccgagccctctaccagcacgccaacgttgtcttcttggatgaccccttctcagctctggatatccatctgagtgaccacttaatgcaggccggcatccttgagctgctccgggacgacaagaggacagtggtcttagtgacccacaagctacagtacctgccccatgcagactggatcattgccatgaaggatggcaccatccagagggagggtaccctcaaggacttccagaggtctgaatgccagctctttgagcactggaagaccctcatgaaccgacaggaccaagagctggagaagaggaggcagctgagagcgaggaggatgacaacctgtcgtccatgctgcaccagcgtgctgagatcccatggcgagcctgcgccaagtacctgtcctccgccggcatcctgctcctgtcgttgctggtcttctcacagctgctcaagcacatggtcctggtggccatcgactactggctggccaagtggaccgacagcgccctgaccctgacccctgcagccaggaactgctccctcagccaggagtgcaccctcgaccagactgtctatgccatggtgttcacggtgctctgcagcctgggcattgtgctgtgcctcgtcacgtctgtcactgtggagtggacagggctgaaggtggccaagagactgcaccgcagcctgctaaaccggatcatcctagcccccatgaggttttttgagaccacgccccttgggagcatcctgaacagattttcatctgactgtaacaccatcgaccagcacatcccatccacgctggagtgcctgagccgctccaccctgctctgtgtctcagccctggccgtcatctcctatgtcacacctgtgttcctcgtggccctcttgcccctggccatcgtgtgctacttcatccagaagtacttccgggtggcgtccagggacctgcagcagctggatgacaccacccagcttccacttctctcacactttgccgaaaccgtagaaggactcaccaccatccgggccttcaggtatgaggcccggttccagcagaagcttctcgaatacacagactccaacaacattgcttccctcttcctcacagctgccaacagatggctggaagtccgaatggagtacatcggtgcatgtgtggtgctcatcgcagcggtgacctccatctccaactccctgcacagggagctctctgctggcctggtgggcctgggccttacctacgccctaatggtctccaactacctcaactggatggtgaggaacctggcagacatggagctccagctgggggctgtgaagcgcatccatgggctcctgaaaaccgaggcagagagctacgaggggctcctgggtgagaggctcagggagaggggtggggaagagtccaaggaggagtgtgtctgggttgggggccacaagggagcctggggatggggtggcactttcggatactagctgtggcccatgcctggtggctgagcccagcccggcccccagcaccatcgctgatcccaaagaactggccagaccaagggaagatccagatccagaacctgagcgtgcgctacgacagctccctgaagccggtgctgaagcacgtcaatgccctcatcgcccctggacagaagatcgggatctgcggccgcaccggcagtgggaagtcctccttctctcttgccttcttccgcatggtggacacgttcgaaggaccccgtcctcttcagcggcaccatccgatttaacctggaccctgagaggaagtgctcagatagcacactgtgggaggccctggaaatcgcccagctgaagctggtggtgaaggcactgccaggaggcctcgatgccatcatcacagaaggcggggagaatttcagccagggacagaggcagctgttctgcctggcccgggccttcgtgaggaagaccagcatcttcatcatggacgaggccacggcttccattgacatggccacggaaaacatcctccaaaaggtggtgatgacagccttcgcagaccgcactgtggtcaccatcgcgcatcgagtgcacaccatcctgagtgcagacctggtgatcgtcctgaagcggggtgccatccttgagttcgataagccagagaagctgctcagccggaaggacagcgtcttcgcctccttcgtccgtgcagacaagtgacctgccagagcccaagtgccatcccacattcggaccctgcccatacccctgcctgggttttctaactgtaaatcactt

SEQ ID NO: 10401 - DNA, 5128 bp, Homo sapiens
gcgccgccatgcccctggccttctgcggcagcgagaaccactcggccgcctaccgggtggaccagggggtcctcaacaacggctgctttgtggacgcgctcaacgtggtgccgcacgtcttcctactcttcatcaccttccccatcctcttcattggatggggaagtcagagctccaaggtgcacatccaccacagcacatggcttcatttccctgggcacaacctgcggtggatcctgaccttcatgctgctcttcgtcctggtgtgtgagattgcagagggcatcctgtctgatggggtgaccgaatcccaccatctgcacctgtacatgccagccgggatggcgttcatggctgctgtcacctccgtggtctactatcacaacatcgagacttccaacttccccaagctgctaattgccctgctggtgtattggaccctggccttcatcaccaagaccatcaagtttgtcaagttcttggaccacgccatcggcttctcgcagctacgcttctgcctcacagggctgctggtgatcctctatgggatgctgctcctcgtggaggtcaatgtcatcagggtgaggagatacatcttcttcaagacaccgagggaggtgaagcctcccgaggacctgcaagacctgggggtacgcttcctgcagcccttcgtgaatctgctgtccaaaggcacctactggtggatgaacgccttcatcaagactgcccacaagaagcccatcgacttgcgagccatcgggaagctgcccatcgccatgagggccctcaccaactaccaacggctctgcgaggcctttgacgcccagcggaaggacattcagggcactcaaggtgcccgggccatctggcaggcactcagccatgccttcgggaggcgcctggtcctcagcagcactttccgcatcttggccgacctgctgggcttcgccgggccactgtgcatctttgggatcgtggaccaccttgggaaggagaacgacgtcttccagcccaagacacaatttctcggggtttactttgtctcatcccaagagttccttgccaatgcctacgtcttagctgtgcttctgttccttgccctcctactgcaaaggacatttctgcaagcatcctactatgtggccattgaaactggaattaacttgagaggagcaatacagaccaagatttacaataaaattatgcacctgtccacctccaacctgtccatgggagaaatgactgctggacagatctgtaatctggttgccatcgacaccaatcagctcatgtggtttttcttcttgtgcccaaacctctgggctatgccagtacagatcattgtgggtgtgattctcctctactacatactcggagtcagtgccttaattggagcagctgtcatcattctactggctcctgtccagtacttcgtggccaccaagctgtctcaggcccagcggagcacactgttttcatgaacacggccatccccattgcagctgtcctcataactttcgtgggccacgtcagcttcttcaaagaggccgacttctcgccctccgtggcctttgcctccctctccctcttccatatcttggtcacaccgctgttcctgctgtccagtgtggtccgatctaccgtcaaagctctagtgagcgtgcaaaagctaagcgagttcctgtccagtgcagagatccgtgaggagcagtgtgccccccatgagcccacacctcagggcccagccagcaagtaccaggcggtgcccctcagggttgtgaaccgcaagcgtccagcccgggaggattgtcggggcctcaccggcccactgcagagcctggtccccagtgcagatggcgatgctgacaactgctgtgtccagatcatgggaggctacttcacgtggaccccagatggaatccccacactgtccaacatcaccattcgtatcccccgaggccagctgactatgatcgtggggcaggtgggctgcggcaagtcctcgctccttctagccgcactgggggagatgcagaaggtctcaggggctgtcttctggagcagcagccttcctgacagcgagataggagaggaccccagcccagagcgggagacagcgaccgacttggatatcaggaagagaggccccgtggcctatgcttcgcagaaaccatggctgctaaatgccactgtggaggagaacatcatctttgagagtcccttcaacaaacaacggtacaagatggtcattgaagcctgctctctgcagccagacatcgacatcctgccccatggagaccagacccagattggggaacggggcatcaacctgtctggtggtcaacgccagcgaatcagtgtggcccgagccctctaccagcacgccaacgttgtcttcttggatgaccccttctcagctctggatatccatctgagtgaccacttaatgcaggccggcatccttgagctgctccgggacgacaagaggacagtggtcttagtgacccacaagctacagtacctgccccatgcagactggatcattgccatgaaggatggcaccatccagagggagggtaccctcaaggacttccagaggtctgaatgccagctctttgagcactggaagaccctcatgaaccgacaggaccaagagctggagaagtgccccaggaagccccctaaagggcagatgtgggagctgggcatgaactggctcctaccagaggagagacagtacctgtgccaggtgcccagggcagaatcaggagactgtcacagagagaaaagccacagagccaccccagggcctatctcgtgccatgtcctcgagggatggccttctgcaggatgaggaagaggaggaagaggaggcagctgagagcgaggaggatgacaacctgtcgtccatgctgcaccagcgtgctgagatcccatggcgagcctgcgccaagtacctgtcctccgccggcatcctgctcctgtcgttgctggtcttctcacagctgctcaagcacatggtcctggtggccatcgactactggctggccaagtggaccgacagcgccctgaccctgacccctgcagccaggaactgctccctcagccaggagtgcaccctcgaccagactgtctatgccatggtgttcacggtgctctgcagcctgggcattgtgctgtgcctcgtcacgtctgtcactgtggagtggacagggctgaaggtggccaagagactgcaccgcagcctgctaaaccggatcatcctagcccccatgaggttttttgagaccacgccccttgggagcatcctgaacagattttcatctgactgtaacaccatcgaccagcacatcccatccacgctggagtgcctgagccgctccaccctgctctgtgtctcagccctggccgtcatctcctatgtcacacctgtgttcctcgtggccctcttgcccctggccatcgtgtgctacttcatccagaagtacttccgggtggcgtccagggacctgcagcagctggatgacaccacccagcttccacttctctcacactttgccgaaaccgtagaaggactcaccaccatccgggccttcaggtatgaggcccggttccagcagaagcttctcgaatacacagactccaacaacattgcttccctcttcctcacagctgccaacagatggctggaagtccgaatggagtacatcggtgcatgtgtggtgctcatcgcagcggtgacctccatctccaactccctgcacagggagctctctgctggcctggtgggcctgggccttacctacgccctaatggtgagcggcagtgggctagggcagaggaggggtcagacaccagcactcccggagcaccttcgtcactggagacatgagacactcccaggccttaccccaatttcatttgcatctgatgccagagggacagtgcgggcaggaaggctgaccagcaggccccagggcccaggccccagacaggtggaggttggggagccacatgactgaccctccctgtgcctccagggagggctgctctgagcaggcagtggatggcagcaaaaggaatctggggccctggcccctctccagccttaagaagagccattctggtggctgaggacagaactaagcgaccatggagtgtgcgccactggcttgctccccacaggtctccaactacctcaactggatggtgaggaacctggcagacatggagctccagctgggggctgtgaagcgcatccatgggctcctgaaaaccgaggcagagagctacgaggggctcctggcaccatcgctgatcccaaagaactggccagaccaagggaagatccagatccagaacctgagcgtgcgctacgacagctccctgaagccggtgctgaagcacgtcaatgccctcatcgcccctggacagaagatcgggatctgcggccgcaccggcagtgggaagtcctccttctctcttgccttcttccgcatggtggacacgttcgaagggcacatcatcattgatggcattgacatcgccaaactgccgctgcacaccctgcgctcacgcctctccatcatcctgcaggaccccgtcctcttcagcggcaccatccgatttaacctggaccctgagaggaagtgctcagatagcacactgtgggaggccctggaaatcgcccagctgaagctggtggtgaaggcactgccaggaggcctcgatgccatcatcacagaaggcggggagaatttcagccagggacagaggcagctgttctgcctggcccgggccttcgtgaggaagaccagcatcttcatcatggacgaggccacggcttccattgacatggccacggaaaacatcctccaaaaggtggtgatgacagccttcgcagaccgcactgtggtcaccatcgcgcatcgagtgcacaccatcctgagtgcagacctggtgatcgtcctgaagcggggtgccatccttgagttcgataagccagagaagctgctcagccggaaggacagcgtcttcgcctccttcgtccgtgcagacaagtgacctgccagagcccaagtgccatcccacattcggaccctgcccatacccctgcctgggttttcta

SEQ ID NO: 10402 - DNA, 5799 bp, Homo sapiens
aagggacagaggcgcggcaggcgcgcggagccagcggagccagctgagcccgagcccagcccgcgcccgcgccgccatgcccctggccttctgcggcagcgagaaccactcggccgcctaccgggtggaccagggggtcctcaacaacggctgctttgtggacgcgctcaacgtggtgccgcacgtcttcctactcttcatcaccttccccatcctcttcattggatggggaagtcagagctccaaggtgcacatccaccacagcacatggcttcatttccctgggcacaacctgcggtggatcctgaccttcatgctgctcttcgtcctggtgtgtgagattgcagagggcatcctgtctgatggggtgaccgaatcccaccatctgcacctgtacatgccagccgggatggcgttcatggctgctgtcacctccgtggtctactatcacaacatcgagacttccaacttccccaagctgctaattgccctgctggtgtattggaccctggccttcatcaccaagaccatcaagtttgtcaagttcttggaccacgccatcggcttctcgcagctacgcttctgcctcacagggctgctggtgatcctctatgggatgctgctcctcgtggagagatacatcttcttcaagacaccgagggaggtgaagcctcccgaggacctgcaagacctgggggtacgcttcctgcagcccttcgtgaatctgctgtccaaaggcacctactggtggatgaacgccttcatcaagactgcccacaagaagcccatcgacttgcgagccatcgggaagctgcccatcgccatgagggccctcaccaactaccaacggctctgcgaggcctttgacgcccagcggaaggacattcagggcactcaaggtgcccgggccatctggcaggcactcagccatgccttcgggaggcgcctggtcctcagcagcactttccgcatcttggccgacctgctgggcttcgccgggccactgtgcatctttgggatcgtggaccaccttgggaaggagaacgacgtcttccagcccaagacacaatttctcggggtttactttgtctcatcccaagagttccttgccaatgcctacgtcttagctgtgcttctgttccttgccctcctactgcaaaggacatttctgcaagcatcctactatgtggccattgaaactggaattaacttgagaggagcaatacagaccaagatttacaataaaattatgcacctgtccacctccaacctgtccatgggagaaatgactgctggacagatctgtaatctggttgccatcgacaccaatcagctcatgtggtttttcttcttgtgcccaaacctctgggctatgccagtacagatcattgtgggtgtgattctcctctactacatactcggagtcagtgccttaattggagcagctgtcatcattctactggctcctgtccagtacttcgtggccaccaagctgtctcaggcccagcggagcacactggagtattccaatgagcggctgaagcagaccaacgagatgctccgcggcatcaagctgctgaagctgtacgcctgggagaacatcttccgcacgcgggtggagacgacccgcaggaaggagatgaccagcctcagggcctttgccatctatacctccatctccagctggccccactggactgcgctgcctccaagccatcctgggcatctccatgtgtagctgtcacgctcctcccactaaacgcctccctgtgcttcctctgcagttttcatgaacacggccatccccattgcagctgtcctcatacgtgcaaaagctaagcgagttcctgtccagtgcagagatccgtgaggagcagtgtgccccccatgagcccacacctcagggcccagccagcaagtaccaggcggtgcccctcagggttgtgaaccgcaagcgtccagcccgggaggattgtcggggcctcaccggcccactgcagagcctggtccccagtgcagatggcgatgctgacaactgctgtgtccagatcatgggaggctacttcacgtggaccccagatggaatccccacactgtccaacatcaccattcgtatcccccgaggccagctgactatgatcgtggggcaggtgggctgcggcaagtcctcgctccttctagccgcactgggggagatgcagaaggtctcaggggctgtcttctggagcagcagccttcctgacagcgagataggagaggaccccagcccagagcgggagacagcgaccgacttggatatcaggaagagaggccccgtggcctatgcttcgcagaaaccatggctgctaaatgccactgtggaggagaacatcatctttgagagtcccttcaacaaacaacggtacaagatggtcattgaagcctgctctctgcagccagacatcgacatcctgccccatggagaccagacccagattggggaacggggcatcaacctgtctggtggtcaacgccagcgaatcagtgtggcccgagccctctaccagcacgccaacgttgtcttcttggatgaccccttctcagctctggatatccatctgagtgaccacttaatgcaggccggcatccttgagctgctccgggacgacaagaggacagtggtcttagtgacccacaagctacagtacctgccccatgcagactggatcattgccatgaaggatggcaccatccagagggagggtaccctcaaggacttccagaggtctgaatgccagctctttgagcactggaagaccctcatgaaccgacaggaccaagagctggagaaggagactgtcacagagagaaaagccacagagccaccccagggcctatctcgtgccatgtcctcgagggatggccttctgcaggatgaggaagaggaggaagaggaggcagctgagagcgaggaggatgacaacctgtcgtccatgctgcaccagcgtgctgagatcccatggcgagcctgcgccaagtacctgtcctccgccggcatcctgctcctgtcgttgctggtcttctcacagctgctcaagcacatggtcctggtggccatcgactactggctggccaagtggaccgacagcgccctgaccctgacccctgcagccaggaactgctccctcagccaggagtgcaccctcgaccagactgtctatgccatggtgttcacggtgctctgcagcctgggcattgtgctgtgcctcgtcacgtctgtcactgtggagtggacagggctgaaggtggccaagagactgcaccgcagcctgctaaaccggatcatcctagcccccatgaggttttttgagaccacgccccttgggagcatcctgaacagattttcatctgactgtaacaccatcgaccagcacatcccatccacgctggagtgcctgagccgctccaccctgctctgtgtctcagccctggccgtcatctcctatgtcacacctgtgttcctcgtggccctcttgcccctggccatcgtgtgctacttcatccagaagtacttccgggtggcgtccagggacctgcagcagctggatgacaccacccagcttccacttctctcacactttgccgaaaccgtagaaggactcaccaccatccgggccttcaggtatgaggcccggttccagcagaagcttctcgaatacacagactccaacaacattgcttccctcttcctcacagctgccaacagatggctggaagtccgaatggagtacatcggtgcatgtgtggtgctcatcgcagcggtgacctccatctccaactccctgcacagggagctctctgctggcctggtgggcctgggccttacctacgccctaatggtctccaactacctcaactggatggtgaggaacctggcagacatggagctccagctgggggctgtgaagcgcatccatgggctcctgaaaaccgaggcagagagctacgaggggctcctgggtgagaggctcagggagaggggtggggaagagtccaaggaggagtgtgtctgggttgggggccacaagggagcctggggatggggtggcactttcggatactagctgtggcccatgcctggtggctgagcccagcccggcccccagcaccatcgctgatcccaaagaactggccagaccaagggaagatccagatccagaacctgagcgtgcgctacgacagctccctgaagccggtgctgaagcacgtcaatgccctcatcgcccctggacagaaggtcagagcacgggcccaacccaatgctgcaggacaggcgtgagcaggggatggggcatgcacggagctggatggcttcgcagtcacctcgtggccctccagggccgaggcctctcactattcagacatcgcagtctcctgccctgggcctgtgggggcccatctttcctctccttctattgccttcccccagtgctgccctcaggccttgtcttctcactcatccaccaaggagaccgacactctggactcccccagctcacacgggctttgtcagggcctccctctctgcgaatggtcaggggctttccctagggcactgccccgagcttcagggcagggacctgggggcagacagcgaggccacccttgtattgagggtgagcccctgcctatggccctggcccagctctcctctcgtttcccactctgtctctttgtctctgtctcactttgctgtggctgtccatgtcattctctgaccttgggatgtacctctgtccctgcctctctcatccttctatgtcactatctgtctccgtattgtaatttctgttggtacccaagtgccaggaagcaacgggatcagaggtggctccattgtagggcggggcacacagacacatccatgcataccactctcagctgcccctgtgtcctcctgccacacccatgcccatagagacacaccactgccccccagctctccttcagccaagtacccggcacacccagacccacaccaaggcccaggcaaatggacatccatgcctgcacttgcgtgccggtccctgtgtaagccctctctggacccactgcaggaaacaagcccaaacctgtggtgtccaaagagaaactagtcagaaaaccaggccaaaaagataccctgtgacctcccacacctgcacacacacccagagctagcatagaggctattcccagcagccccagagtcccagtggcggtgcctgcttctctctttccagatcgggatctgcggccgcaccggcagtgggaagtcctccttctctcttgccttcttccgcatggtggacacgttcgaagggcacatcatcattgatggcattgacatcgccaaactgccgctgcacaccctgcgctcacgcctctccatcatcctgcaggaccccgtcctcttcagcggcaccatccgatttaacctggaccctgagaggaagtgctcagatagcacactgtgggaggccctggaaatcgcccagctgaagctggtggtgaaggcactgccaggaggcctcgatgccatcatcacagaaggcggggagaatttcagccagggacagaggcagctgttctgcctggcccgggccttcgtgaggaagaccagcatcttcatcatggacgaggccacggcttccattgacatggccacggaaaacatcctccaaaaggtggtgatgacagccttcgcagaccgcactgtggtcaccatcgcgcatcgagtgcacaccatcctgagtgcagacctggtgatcgtcctgaagc

SEQ ID NO: 10403 - DNA, 4149 bp, Homo sapiens
catcgggaagctgcccatcgccatgagggccctcaccaactaccaacggctctgcgaggcctttgacgcccagcggaaggacattcagggcactcaaggtgcccgggccatctggcaggcactcagccatgccttcgggaggcgcctggtcctcagcagcactttccgcatcttggccgacctgctgggcttcgccgggccactgtgcatctttgggatcgtggaccaccttgggaaggagaacgacgtcttccagcccaagacacaatttctcggggtttactttgtctcatcccaagagttccttgccaatgcctacgtcttagctgtgcttctgttccttgccctcctactgcaaaggacatttctgcaagcatcctactatgtggccattgaaactggaattaacttgagaggagcaatacagaccaagatttacaataaaattatgcacctgtccacctccaacctgtccatgggagaaatgactgctggacagatctgtaatctggttgccatcgacaccaatcagctcatgtggtttttcttcttgtgcccaaacctctgggctatgccagtacagatcattgtgggtgtgattctcctctactacatactcggagtcagtgccttaattggagcagctgtcatcattctactggctcctgtccagtacttcgtggccaccaagctgtctcaggcccagcggagcacactggagtattccaatgagcggctgaagcagaccaacgagatgctccgcggcatcaagctgctgaagctgtacgcctgggagaacatcttccgcacgcgggtggagacgacccgcaggaaggagatgaccagcctcagggcctttgccatctatacctccatctccacgtgcaaaagctaagcgagttcctgtccagtgcagagatccgtgaggagcagtgtgccccccatgagcccacacctcagggcccagccagcaagtaccaggcggtggtgagtgcccggcctccccttgctactcccagcatggtcctctaaggcccaaaacttgggcctgctgtgtcggacttctgccttttttcccaggaagaggggctcccttccctacacagctcccagcccagtgggtcctcacctccaaaccacccccagcccctcagggttgtgaaccgcaagcgtccagcccgggaggattgtcggggcctcaccggcccactgcagagcctggtccccagtgcagatggcgatgctgacaactgctgtgtccagatcatgggaggctacttcacgtggaccccagatggaatccccacactgtccaacatcaccattcgtatcccccgaggccagctgactatgatcgtggggcaggtgggctgcggcaagtcctcgctccttctagccgcactgggggagatgcagaaggtctcaggggctgtcttctggagcagcagccttcctgacagcgagataggagaggaccccagcccagagcgggagacagcgaccgacttggatatcaggaagagaggccccgtggcctatgcttcgcagaaaccatggctgctaaatgccactgtggaggagaacatcatctttgagagtcccttcaacaaacaacggtacaagatggtcattgaagcctgctctctgcagccagacatcgacatcctgccccatggagaccagacccagattggggaacggggcatcaacctgtctggtggtcaacgccagcgaatcagtgtggcccgagccctctaccagcacgccaacgttgtcttcttggatgaccccttctcagctctggatatccatctgagtgaccacttaatgcaggccggcatccttgagctgctccgggacgacaagaggacagtggtcttagtgacccacaagctacagtacctgccccatgcagactggatcattgccatgaaggatggcaccatccagagggagggtaccctcaaggacttccagaggtctgaatgccagctctttgagcactggaagaccctcatgaaccgacaggaccaagagctggagaaggagactgtcacagagagaaaagccacagagccaccccagggcctatctcgtgccatgtcctcgagggatggccttctgcaggatgaggaagaggaggaagtaagtggggataaaatgccctgattcaccctcagagggatggaaatgtgtagccacagagtgggttcttgcggcctgcagaggaggcagctgagagcgaggaggatgacaacctgtcgtccatgctgcaccagcgtgctgagatcccatggcgagcctgcgccaagtacctgtcctccgccggcatcctgctcctgtcgttgctggtcttctcacagctgctcaagcacatggtcctggtggccatcgactactggctggccaagtggaccgacagcgccctgaccctgacccctgcagccaggaactgctccctcagccaggagtgcaccctcgaccagactgtctatgccatggtgttcacggtgctctgcagcctgggcattgtgctgtgcctcgtcacgtctgtcactgtggagtggacagggctgaaggtggccaagagactgcaccgcagcctgctaaaccggatcatcctagcccccatgaggttttttgagaccacgccccttgggagcatcctgaacagattttcatctgactgtaacaccatcgaccagcacatcccatccacgctggagtgcctgagccgctccaccctgctctgtgtctcagccctggccgtcatctcctatgtcacacctgtgttcctcgtggccctcttgcccctggccatcgtgtgctacttcatccagaagtacttccgggtggcgtccagggacctgcagcagctggatgacaccacccagcttccacttctctcacactttgccgaaaccgtagaaggactcaccaccatccgggccttcaggtatgaggcccggttccagcagaagcttctcgaatacacagactccaacaacattgcttccctcttcctcacagctgccaacagatggctggaagtccgaatggagtacatcggtgcatgtgtggtgctcatcgcagcggtgacctccatctccaactccctgcacagggagctctctgctggcctggtgggcctgggccttacctacgccctaatggtctccaactacctcaactggatggtgaggaacctggcagacatggagctccagctgggggctgtgaagcgcatccatgggctcctgaaaaccgaggcagagagctacgaggggctcctggcaccatcgctgatcccaaagaactggccagaccaagggaagatccagatccagaacctgagcgtgcgctacgacagctccctgaagccggtgctgaagcacgtcaatgccctcatcgcccctggacagaagatcgggatctgcggccgcaccggcagtgggaagtcctccttctctcttgccttcttccgcatggtggacacgttcgaagggcacatcatcattgatggcattgacatcgccaaactgccgctgcacaccctgcgctcacgcctctccatcatcctgcaggaccccgtcctcttcagcggcaccatccgatttaacctggaccctgagaggaagtgctcagatagcacactgtgggaggccctggaaatcgcccagctgaagctggtggtgaaggcactgccaggaggcctcgatgccatcatcacagaaggcggggagaatttcagccagggacagaggcagctgttctgcctggcccgggccttcgtgaggaagaccagcatcttcatcatggacgaggccacggcttccattgacatggccacggaaaacatcctccaaaaggtggtgatgacagccttcgcagaccgcactgtggtcaccatcgcgcatcgagtgcacaccatcctgagtgcagacctggtgatcgtcctgaagcggggtgccatccttgagttcgataagccagagaagctgctcagccggaaggacagcgtcttcgcctccttcgtccgtgcagacaagtgacctgccagagcccaagtgccatcccacattcggaccctgcccatacccctgcctgggttttctaactgtaaatcacttgtaaataaatagatttgat

SEQ ID NO: 10404 - DNA, 28701 bp, Homo sapiens
gaggcgcggcaggcgcgcggagccagcggagccagctgagcccgagcccagcccgcgcccgcgccgccatgcccctggccttctgcggcagcgagaaccactcggccgcctaccgggtggaccagggggtcctcaacaacggctgctttgtggacgcgctcaacgtggtgccgcacgtcttcctactcttcatcaccttccccatcctcttcattggtgagtgcgcgcagcgagccgcggaggaggggacgggagagcagggagggaggaggaggcgctgcgcgccgcaccgctcggcgtccccttccggcccgcgaccgccgtccgcctcgttcccggggtcccctgccctgtgtcctgcccgccggtccccgcactcgcacaccagctcatcccttcactcccccggtgcccccgatcccgcgccaaacacagcggacgtttgtgacccatgggatcaccaagttttgcttctgcagggccaagagctgggatggggaaaagggaaagaggaggtctcagcacgcagtgggaaactggagaggggtcgggcctcaccctccgtggcgcagcttagggagccgggtcacccctcccgcaaggcagcctccctgtcagccgcagctgggcctagggaagagggaagcctgtgctttggagtctgggatggaggcccagctaacccctatgctttcaccgggctgagccgcgcagtggtccgtgatctctgacagtcccaggcccgcgccctgggcgaggagaggcgagagctagggacttggattcccttcccccgccaccccacccgggcatgtgtctccagagcgcaacttctcaggctctgcgcaaagtagctccgactcgccgacgcagcgaccccggcgcccttgcttgcaaagttgggcgccacggccgggacaatcgtgcgtgcctctccactgaggtcccccccatctctctccaagaccttgactcttccagaccagtcaagtctatcaactcatagggtgtcccctgcatccccaaaacgtgttcattcactttaagaaaacaagcaaatcttaaaattcatatacagctttggggaagaaaggaaagattgtcacaaaattagatttacaagaggttgctgcagaagcagagttgctagttattaacaaagacagttagatagaaatagaaataaaacatacaaaatatgtgctcatatgtgcatcaaaaatcaaaaaagaacagcatttacacttctgttctcagccaaacggtttattaacctgatgacttgtcacacaagaagttagtatgtataatggggtaccttggcagggcacagtggcttacatctgtaatctcagcattttggtgggctgtgacaggaagactgcttgagtccaggagttcgagaccagcctgggcaacatagtgagaccccccccgccctttctacaaaaaattaaaaattagctgagcatggtgatgtgcgcctgtagtcccagctactcaggaggctgaggcgggaggatcacttgagcctaggagatcaaggctgtagtgagccgtgatcgtggcactgcactccagcagaggcaacagagcaagaccctgtctcagtaaaaaggtgtggtgggggaggtaccagcataggaccaggctgaatgagttggacgtttagtttgtgtgtaccagccttggggatcctcatgtgtaggtgtcaccctcaccatggacccaatgcccaagcacctttctggggttcatgcaccctcttcctcctccaagtgggcaggcatcctgcctctgactgtctctccctgcaggatggggaagtcagagctccaaggtgcacatccaccacagcacatggcttcatttccctgggcacaacctgcggtggatcctgaccttcatgctgctcttcgtcctggtgtgtgagattgcagagggcatcctgtctgatgggtgagtgactgtctgaggactcaggaaagtgaatctgctccagggtacttcctgaaaggcccaaggagatcctagctcacctatattccacaagcccatgtcttttgttactacatccagcagctcagtgtcttctatgtgccaacctctctgagctgggcactggacgcaagtgagtcccaggccctgccatcagtccaggagagcagagggaacacggacctgcatgccaagtcccagtgaaataatgctagagcctattagaatgccacaactccagtgaaaaatgtctggcctcttctacaacctgccggagttaccttcttggaaaaaaaaaaaaatctaaccatgccacccactcttgcataagacctttccttggttctcagctgttttgaagatgtggtctcagatcctcagcccaccattcaaggtcttcacagtcagccccacctatctctggcctcattccccatgcccaccttccgtttgggcctcacagcacactcctcacacctctgctacagcacagatcacactgtatgttaaagtttatgtctatttgcaaaactgtcttcagagtcagaaaggcctaagagttagaatctgagtcttgttcatctttgtgttcacagtgcaaggcatgtgataaacataaacattattcagtccataaacatttattgggtccttaggagaatgaatgaaaccatgttacaaataagtactctgggaggtgagaggaaggcagaattgggcaagctccatggttgagagggctttggagcggagtctggaagggtgactaggcttcagacacacagaggaggaaggagagagagaactggtggtgcctgagggaagggaaaaggcaccaaagagaaaagcaggtagggctagggagcagcgcaggggctggagcattaaacacaggctggggagcgatggaggctgaggctgggaacccaggttggggcatctcaggaggactgtgaatcccagcctgcatgtttgggtcggatttggtcagcagtttggaacagaagagagatgtcatcagcataacacttttaggtgggaacctgaggtgttcagcgcaggctggaggcagggagaatctagaggtataatagaagcaggacttagcattgactgcagtagtctaggtgagcaataactgcagacagaaatggtgtgtcagcagtcagggacagaagaggagcgggagcagccatctcactaaggaagaatccagtaaccagcaaggatgagagactgccaggagagggagtggtggaggagagggatatttggcttgagtatctgaggtccagcgccccctgagctggaatcagattatacccagactgcactcctgcagtgctgcctggctcctgtagttggatggcaggggataggctccctcatcctccctcccgttccccaccttcccttccccaatgtccctgcatcctggcttcagcagtgatctctaaaatacctgcttgacttggaggcagcagctctgcctgcttattaaagtccctagaccagcaagaagaccagaaggcatactgctacacaagcacgtgacaagtccgcctccacccccacccctacaccccttccaaagtagcacaaatgccacagtgagccctcagatgggaaatactcaccagatggtgacagagaaagacacctccgcccttggagaaggaagacctgggtcttcagtgagcactgctgctgtgtaccagctatgggactttgcacaagtcattcaggctttctgggcctcataagcatttataaacatacgataaaacattttagttgccaacttaaaaatgtgtgagaaagtataaggtgtttcaaaattatttcaaggagtaaagaggcaagagttttgaagatccctgggcagggtgttggctgttcccagtgtggccattcatgactgctctctggccttatgaaacaagcatcatagtccctggcttgcctgcttcatggggctgtggagggtgaaattcgagcatggacagggtgcagagcccggagtggcagagcactgggtagactgtgtattcccagaatgtgggaaactggaatgaatcggtccagggatgccctcctgctggctgtcagcagcccctcctgtgtgtggctgtactgcttcagctcagtgcaaagggccatctcctccccagggcacagatcagctcaagctgagtaattgtcatctggtctttgtgagctcctacccccaggcctgagtgaggggcaggaaaagagcagacaggagaagtcacagacccttgtgatacctccagtctaatccagcctgggttttcagagctgtctggaaatttagggggcaggtgggagggggctgattaaggcagccctgatttgatttagagtgagcctcatttagtgactaattaagccatcttaaacctgtagggcttcccctcttcctttgggtattatttctttctgtgatgttctgaattcagaacaatcaaaacagtataagttagtgaagaagatattttttaataactacaatattttcccagaccaccatacactggataaagcctgtatataaaactttacctaatttcttaactaattgaatgtgtattatttaacaaagcagctaaaaactattctatgaagccatgtcatgaaatatttagttcaattatggttaatcctcatcttatttcgtcttataaaattttaacatttctacctcctattgcaaaaaaaagcatttatatcagcatataataaaacatgtctagatgtcagcttaaaaatgtgtgagagagtagagggtgtttcaaaattatttcaaggagtaaagaggcaagagttttgaagatccccaggaagggtgttggctgtgcccagtgttgccattcatgactgctctctggccttgtctgtcttgtaccttctatattagtttgaagaccttttttggagaatattcactaaagaatatcaatatctaccatttcattaaaaaagaaatgtggagtttgccttttcaagttggtttgatgcttattgatgttttcagggacccagcctcttcccatctttccataccatcctgtgtgtgtgtgtcagcctatcttccccatggtcacaaggtggctgcctagctccgggtattgcttagcatgagcagagagggcatgctgccgacatgcctctcctttatgacagagatcattctttctttgacatctcactggccagaatacgtggaccaacactggcaaaggagtatggaattgcatggctgcttaaaccaatcaccatccattccctggggctgggtatattgctgctggagcaaacctgtggtcctcctggcacagaataaggggaagatactctttggtggacagcccacattgcctctacacttgcacctcagtcccaccagacccactgaggtcacaggatagctctcctcatgtccttcctccttctctgttgaactcttatgtatccttcaaagtccagcctggtgccacctcctctgggaagctgtccttggttgcccaccccctcctttgtgctctctcagtctctgtccatcggcagtatcacttccctagcctgctgactccaacagttagctctgagcatggcagccccctccataccatcagcttctcaagggcagggacccttggcacactggatagaagtagcctggtgggcaacagcagcactgaggcagcaagctgtagcaggccatctgggaatggagtgggtaccacagggctggagcagaaagggcaggctgggcagatctgataaagtggctggaggccacatagcctgggcctttcgttccaggctgagcagagtgggttttgctgtctgcaggagggagctgtggaagggcatgatcacgaccaactaaggtgaccctcctcaccaggcccagggaagactgaggcctggaaggaggctctggctgcctctgggtcttacccccaggccacagtccacccacttagaggcctctgtgagttaaggtggagagactatgagctggtattgactgctccattccccatcccgagagaggagacaaaatcagtgaccttggaaatgcctcttcgtgcctcagtttcctcaccccataaaatgggagactaagagtacccactcgatggggtttaatgaagattaaatgggttaacatatatcgcatgcttagaacagtgcctggcacagagtaaatgctccataaatactgactctcatcagtttgttatcacagcctctggggagggcgccagtgctgacttatgctgttcgtgttaaatggggctgtcactgggtgagttgtggcatacaggcccctgcactgttcaagagaccccagcaacccttgtgcttagggctcagcacatagtaaggcctccagatcatatacccagctctactccatgtactggcagctctgcccagcccataccccaaatacgcccattaactaaagggccctgcagcctataaagtgatgctataaaggttcagtgttcagcctttgaaattcaaggcctgggctgctctattgcagtacttagcatgtccccatcctgtctgtttctctctcccatctcagggtgaccgaatcccaccatctgcacctgtacatgccagccgggatggcgttcatggctgctgtcacctccgtggtctactatcacaacatcgagacttccaacttccccaagctgctaattggtaggtgaggtgtaggagggaggggcagtaccttcattcatttcttcagataatgtttactgaggactcattatgtgccagctattgctctaaacagtagagatttggaatagaaaaagaaaaaaatccctgccttcatggagcttacagtctggtgaaggaggatagacaggcaaagacagtgaataaacaagcaaacaaataggtggtggggatgctatgaagaaaatcaagctgagtaaggggtaggggcaatgacaatgttgctatctacacaggatggtcagggaagggctgtggtaactgtgggcatgcagatatttgggggaaggtattccctgcaaggggagtgacaagtgcaaagtcctctgatagggatagatttggcaaagatgtcactgtgggcaaagccaaatgagcaaggggaagagtgggaggtgagggcaggcgtcaggagaggagcgagcaagagtcccaggctctgggcctgagagcctgggtgaactgtggcatcaataactgatgtgacagaggagggggaggtgggctgtggtggggataaagttttctactgggggcatatcgagtttgagatgtcacagagacagccaactcaagtgtcaagttgggctttcatggggaggtcaggacaggagctacactttcaggaggtgggccttgtagatgacatctaaagcttgagcctggggctggctgccgtggctcacacctgtaaccccagcactttgggaggccgaggtgggcggatcacccgaggtcaggagtttgagaccagcctgaccaacatggagaaacccccacctctactaaaaatagaaaaattagctgggcatggtggcacgcatcggtggtcccaggtactcaggaggctgaggcagtcaaatctcttgaacccaggaggtggagattgtagtgagctgagatcgcgccactgcagtccagcctgggtgacagagcaagactccatctagaaggaaggaaggaaggaaggaaggagggagggagggaagggagggagggaggagggagggagaagaaagcttgagcctggatgaggtcacctggggagagaagagaaaggctctgggaccagagcttgaggtttgctaacatttagagagactcgggaaggactgcccacttagagcttctgagatgttaaatactgcaggactggggtcccaggcagaagcaacaggatgatggttggtgtttactgagcatgtgccatggggcaggctccatgccatgttccttacattcattgtcccacaggctaattcccccagcctccttattggtattgttaatatccccattttccagtgtggaccctgaaactgagaggttaaaaataataacagtaaatactcactttgtacttactgtatgccaggccccatcctacctatgtgatatattaattcatttaatccttgcaacaactctatgaggtaggtaccattattattttccctttacatatcagaaaactgaggctcagaggttaaataactggcactagtctagctcgtcaaggggcacagccgggagtctagcatctgtgcaatctcctaatcatttctgagactgcgtgtctaagggccctcagacttcgtccttggggtaaaggtatcaatccgcaggtctgcctctgtgttggggttcagcctgtgtgtctaaggctggggctgtacatctggcagttagactttgttcacactatgtccttaagtcagactgatttttaggtatcacagcatcgaattgacatttggagtctggcacactctgtgctaagccagtgacatcatggtgttgtcagggagtacagggtgtttcttgcactagtcacaggtctgcctttctgtagaaggtgggatctgagctccattaggattatccaggtgatccccctacccctagcccaggggcccccacatgagtatgaatgggagctgggggaagcaggttgagaggggagatgttaaatacaggcttcagagagccaccctgcttccatttctgaagtagctccttgtctgtagagaacccttcattaaccagggcctggctgaccagtgtcctctggaaacaccctgtctggacatctgaggagttcattttctcattctccagcaaacacataatgttctctctttaaagcacaagttatcacccgtggatggatttgtccttttctaaggaacaaagactaactccctccattccccttgttggagttatctccccttgaaaggacactccacagagccagaaattctagaacagggaaaagtggaggggacgtgcctgtgaactgcagggacagaaggaaatgggtattgggagaatggccagccctccaaggggctgatgtctggcctgggtatggagtcccacagaaaggggacctgtgatgcagcttacattgtcccgtgagggaaccatgatcctggaacccagatgaggccaaggaaatgttctctgaaaaagtcatatttgagctgagaactgaaggaactaactgggagaagggaggaaagagtgcttcaggcagaggaaacagcatgtgcaaaggccccaaggcagaaggaacaaaacacattagaaaattcagaagaagaagagtggcgtgggtgcaaagtggaggggagctggactttgggttttgtttgcttgtgcccaggctggagtgcagtggcaccaccttgggtcactacaacctccgcttcctgggttcaagcggattcttgtgcctcagcctgctgagtagctgggaatacaggcgtgtaccaccacactcagataattttttgtatttttagaagagttgggatttcaccctgttgaccatgctggtcttgaactcctggccttaagtgatcaggtctcaacttcccaaagtgttgggattacagccgtgagccaccgcacccacctggaaggtcataccacagatgtttgcctttatcccaacagcaatgggaagttgtgtgtgtgtgtgtgtgtgtgtgtgtgtgtgtgtgtgtgtgtggtttaacatgtttaacataaaatttatcatcttaactgtttttaagtatagtgttctgtggcattaagtatattcacagccgggcatggtggctcatgcctgtaatcccagcaccttggcaggccaaggcaggtgaattgcttgagctcagaagttcgagaccagcctggccaacatgccaaaaccccgtctctacaaaaaacataaaaattagctgggcgtggtaatgtacacctgtagttccagctacttgggaggctgaggtgggagtatcatgggaggctgaggagagaggatcagttgagcctggaaagtggaggctacagtgagccaagattgtgccactgcactccagccaagattgtgccactgcactccagcctggacaacagagtgagaccctgtctcaaaaaaagaaaaaaaaagtatattcacagtgctgtgtagccatcaccactatccatctccagaactttttcatcttcccaggttgaaactctgtactcattaaatgataactccccatttctccctccttacagcccctgacgaccaccattctactttctatctatgaatttgagcactctaggtacctcatctaagcggcatcatgcactgtctttttttttttttttttttttgagatggagtcttgctctgttgcccaggttggagtgcagtggtgcaatctcggctcaccgcaacctctgcttctctggttcaagcgattctcctgcctcagcctcctgagtaactgggactataggtacctgccaccacgcctggctaatttttgtatttttagtagagacggggtttcaccatattggctaggctggtctcaaactcctgatcttgtgatctgcccacctcggcctcccaaagtgctcggattacaggcgagagccaccttgcctggcctatttgtctttttatgacttgcttatttcactgagcataatgtcctcaaggttcatccatgttgtagcatgtattgaaatttccttcctttttaaggctaatattctactgtatggatatgccacattttgtttatctattcgtctgtcagtgggttgcttccacctcttgactcttgtaaatagcactgctatgaacatgggtgcattgaggggttttcgacataatcataataattgctttatggagaccagcttggaggagaacaagatggggaggaagtgtggaaaccaatgagaaggctctcagggtatagcgggaatacagaggacgcatgatgatgcctggacttaggtggtaccacagggatggagagaagtagatagagtcaagctatttaggacgtgaaatagacagcatttgttaatgggagaggtgtggggcgagggagaagaatagagggagaaggaggagtaatgggagctcaccagcagcccccatgttatgcctctttccttccttttccctcttctctcatcaggcattcagcttttgctgagtacttctgtgtctgacaacaggctgagcactcagcactgcaggacaggactatgcaaaaaacctctgggcctagtcctgggtgcactgctaattccctgtgtgaccttgcacaagacatccaagctctctgagcctcggattccccacctgggcaggaagagtaagtccctgcctaagtcatagggttgtaatgaagagcaaagcagaccatatctgttaagtgttagggacaagacaagcatgaggcatattttcaagtctcggctcctgtaggcagctctcactaagggctaaagggcttctgatgcctgggatagaatctgtccggcagagtggagtggaggcagggggacagccttcagctgtggaattcctccagtcctagagaccagcctgagctgggggacattattccagtcctgaggcatgagagcagaaggccgatgcttctgccctccatcctaatgtcctcctgcagggacccaaggtggatggcatcgatccccccgggtgagctcagccctgggcgcatggtggggcccaacatctcaacctgtttcctaaccctgagccaggcaggacagatcccagatttgtgcccaagagatgctctggcatccatgcccaggcccacatagggatagagggcagggtgaaagtctctctccctcactcgggtcctctggagaggggctctgtgtcatgaagctgaccttatccgcatctggtctaggagggaggagggaaggagctgccagtgctaaaatctcccccaccctcaaagggggacttcacaggttattgctggttttggttgttggaagctgacagtgatttattggcagattgaagtgagtgtgtgtgcgagaatttaggatagaatctactgatagcttctgaggtttaccttccccaggtcttaaatctggagataataaaaatataacagctaatgtccaaagagcacccgctgcgtgtgaggctcactgcactaaatgctttccatatgtttctcacaagaaccttctaggtagcactattatgattcccacttaatggatgaggaaactaagctctagaaggctaagtgactaatccaaggtcacacagctattatgtcacaggctctgagcccaggtgtatctggctgcggagccaccaccactaacccctgtataacgctgcctcacagaactgtggctggctctttccgtatcccccatgcccctgctccatcatcatgctgtggtgggctctgaactgtgaggacagggatccaggctttcaccctctctctgtccctagctgccagtgcacttgggcaaggtcacatcctatttctgggcctcagtttcctcatctgtaaaatgaaaggctggattgaatgacctttaagatttccctcacttggaaattccacaagtaagtcattatagcatggagcttgcatgcatgggctccagcgtcaggccagcccagctctgccagttaatgggtgtgtggccttggatctgttacctaacctttctgagcctcatttcctttgtctgagaaattgggggtgacggcagtgtactttctttgaaaagttatggtgaggaatagataagatcatgtgtttaaagtgcttacttggcacagtgcctgtaacttagttaaattcaataaataaatttcccattcttcccatgatcatttatttttaagggacatttgtctgaccagtttgatttatgagattattggtgtttttcatgaatgttaagacgtacgtgcgtcatcttagagtcatgtactctgatatattcacacgtgcacatccacttactcggaaatgtacacacccaggcacgcttattctgtctccttctctgccacatacttgcacacattatgtgagtgtacacacatgatgcacacacgtctctgcgatcttccatctctcctcggcagccctgctggtgtattggaccctggccttcatcaccaagaccatcaagtttgtcaagttcttggaccacgccatcggcttctcgcagctacgcttctgcctcacagggctgctggtgatcctctatgggatgctgctcctcgtggaggtcaatgtcatcagggtgagggtaagcaggccacctgggccagggtggggtgggaagcagaggctctggcctctgtcctgccctgggttcaggcccccaccctgcttctcagccaaactgagaagggatcagcttgttttacccgcccgtgtaaaggggagtggggccgtggcggaaatttcaggatagacactgcatctggcccacgtgtgctctaccccagggtcccagagggagaggggggtgatgggtgtgttcgctgaggttggcggatgactttccgtagaaagggaagataagcatcaggcactggcctctcctactttctttcttcgggggtgggggactttgctttaatgtattcatatcgtcacgctggtaaatgaatgagtaagtgttttgttttcctttctgtttgctcccgcctccctctctcttcctcaccccagactccaaccttccccttcccctgcccctacctccccaggcagcccagactaatgaactcgtttgtctttcccatgctttgtttttattagtataataccatatgtgtctgtctaaataaatacctattcaggttttttcctctcaacacaagtgaatatgtaggtttcccccacggtatttatcttgtaagaatgggatcatattatgcagttttctgcactgtgcttttctcacccaacaaatatctcttgggactccctccaagccatctgatatggctaattccgttttcttaatggctgcataatattccatcgtatggatgagccataatgtgttcagctatttctctatggatgggcatttactttgttgccaagttcttgccttcatgaataatggtgtgttgaacatacttatatatttatgtattgctgcttttatttctatgggagagagtccaaggaatggcgttgctgggtcaaagggtctgtgtattttaaattttgatcagtgttacatattgccttccagaaagactgtaatctgccagcaatgagtgagaaaaccctttccctgccttccaaccagcagtgagggctacagccctttcgaacttggactgcctgcatttctctgactcttctgcttttagttggtgatctgcagggcacaaagctccttatgtgtccccccatccagtgaccctcacaggaaccctgtgatgcaagcaccatcccctttatagatgaggaaacattttagatgaggcttgtccaaaaacaccttgctagtaagtggaggaggcaggattcaaaaccaggtctgcatgacttggagttctgtgaactgtatatgaaacatggtggtatccttagatctgtggagaagatagcatatgagagattcctgctcctccccaacccaacctaaacccaacccagcctagccatggggggttcaaagtcgacctcaatgagcagttacaaagtcaggatgccctgacattggtggccaagaagtgttggggaatccttttcctggtaataattacaggcgaaagatggccccatctgttagagatcaagtgtggaatatcacaaccccagatccttgctggggcaaggtagggagtggtgagaagttggacttacccatcccccatggcccatgtgccccacagagatacatcttcttcaagacaccgagggaggtgaagcctcccgaggacctgcaagacctgggggtacgcttcctgcagcccttcgtgaatctgctgtccaaaggcacctactggtggatgaacgccttcatcaagactgcccacaagaagcccatcgacttgcgagccatcgggaagctgcccatcgccatgagggccctcaccaactaccaacggctctgcgaggcctttgacgcccaggtggtcagtgggggcacagccacaccatctattcactgccttctggtttagggtcacagagagggacctcaaagggcattaggtcaaaatcctggtgggacaagaggggaaactgaggctggtgaggggaagaagcttgccttaagtcacacagtgaaccagggacaggtgcagggctgaggattcataggacaggcacagttggaatggcccttaccgtttaggtcgtctagtccaaagtccttatccagatggggaaactgaggctctgagaagggaagtgaccccactggactctcacatccctgtgctctttcctctgcagcttactgactataaaggttggagtgttcacttgatttggagcaggggtgttagtggcctgatccttatggtaactctatgagttgagccagacaggaatctccccatatcactgaggagcaaattgaggccctgagaaaggctgtgacctgcccagagctggccacagctggcaggcggcagaggcagtctcctggctcccagtccagtgctccttcacttcctctgccctcgcaccagggcagttgctgaggcagacacggtggcaggtggtaatgagtgagtgtggcacatggccacctcctcattccagtgctgtgctcatcacatagtccctgaccagctgtgtgaccttgagcaatcatctggccttagtttccccatctagaccatgttggtgttgatagggccctcccaactgtgcacttgctgattccatgatctcttcctggagttcacctatttgcagaggatgtgaccactgggtttccccagacaacaggagctaggggcatcctgggaggctaggcccagccgtgaattagccctcaggcactctgacctggccatggtctctctgggcagcggaaggacattcagggcactcaaggtgcccgggccatctggcaggcactcagccatgccttcgggaggcgcctggtcctcagcagcactttccgcatcttggccgacctgctgggcttcgccgggccactgtgcatctttgggatcgtggaccaccttgggaaggagaacgacgtcttccagcccaaggtaggcagccccaggggtagggtaaggcaccctctagatggttttcagttgtttctgagagtgcaacaggccaatgtgtgtgagccatggccacactggagtggctcctcacacatgcgcaaagcccatagcagtatccccaccacagaatactctacatctggtcaacagaaatgccagagggcgagcctatgccccaagggtatcctactctcctctcaccgtcactaccatagtacctctcccggtagttaggtcagtccgaaaactgcaggaagtgcttttgtttgtccagtgtctagagcttctgtgacttggatttgttggctttcagttcatgtcatcttagtaaactctttaaaagttttcaagatctgtcttcttcagtcctgtaaaggctggcacttgagctttctgcaggggcatcttgggagctactgtcagaggagagagaagtgggaaaccctcacgagtggagctttgtctctccccactccaaatttcattcaaagctgcccgtagttttattaatatgttggacttttccattaaaatttcttttttaagaaaagtttccatggcttaaaaaacactggagacttattagactagattatatccaatggccttggcagttgtaacgattctgcaaactgaaatttgttggagctagaaaacctttccccggggttatttgccctgcgtggggccgtagcatccacttcgggggctgggcagactgtgctctgttgtctgtttccttgcagccgtttaggtttaaatggccacaaaatgaaaactttttcacccctaataagtttcagagttttagtttccaagtgaggatgtcattataacattttaaccacagacagtctgaaaataatgcagagaatggggaattagggtttttaataatttatgacaccctttgcgtaacatttgttcatctcatgagctccaaaatcgcagccagcagttaatcctcaggaggtttatgttcatttttctggagacataattagtcagctgaacagttttggccacagatatgagatacgttgagtctgatttatgcagcaaactttcattgaacactgctgtgtgccaggcctgggttgggctgtgggaatatgaaagcaatagttatgatgaggatgattaacaatattaacagccacttactgaccacataatacatacctggctgtgtgcaggagttatccatgtgttatttaatccctaaaactatcctttggcgtgagtatattttgcaacatctttactgtggtatacctcaaatactgtacagtttatgagatgataggtattcttatccccattttacagatgagaaagttgaggctcagaaagtttaagtaattttccccagggtctctcagctagttaataacagaggcagaatttgaacacaagactcactccacagtctgggcatttacagccaggaagctaaattgactattattatcaagccatcacctctggctccaaggattatgaaatccaacagtgaggagagaaatcaaaataaaatacttttatgctatgtgttacatgtgactcttaggaggaatattcagggaattgtgggaaaagatagtgattaacttagccagtggtcatgaacagcttcatagaggaggggatgtttgaaaggggtcttgacggatgagtaggaatttgccaggctgccatgggaagatttcttgctcaaccaagaatgcaaggaccacttttgcttatttaaactttgatggcttttgaagccatatctggctttttgagcctctctactttacctggcccataaaagagaggggaagcggctgcttctcttgtctacaggagtgtcacctttggctctagcctgaccataggctaccccagaatacccccattggcgatcctgaagcagcatggagccagttgttaatatcagggggaaatggcacaggccagagcccttatcagagtgtccacaccacgctcttcttcctgtgtttcccaaaacccttgtgggattctgctaaggagagagctctgaggcaggacgtgccaaagagatggcgaaagcacttagaattttagttcatctgaacgttatcattgccgtttttttctctttgtttatacacaaaccctggggtttattaccgtctcattggaatgctcttgtcccagttacttagcacacaaatccctgagacagatggccctgcctcagtggcagtgggccttatcagatttaatattttttccctgcagcccaaacacaatcagaaaatttccgacacagaaacaagagttgaaagtaaatatagtctccagtgtccgcaacaaagaactctccatcatgtggttgcctgggatgtggcttaattctcatgtgggcttctgagctcagaaaatgggggaaagggatcatttactgagatcatttggttcatctcccagcccccaagccattctaatccagagagaaccgagtgctattctggtctttatgaatgacaaagaaggaagctccctagctacatgttgcagtgtttcacagtctgggagaggaagccgttttttctgcccagcctgaatccatcctgcagcagttggcacagcgaggcacctgtggtttattcatcatcactcttccttcctaagatactcagagttggcaagaaacatgtcatccttggtatccgcaaggacgaacatttctgatgtcctctttagttactgaaagtgtctgtgacttgccagatctttgatgctcctgtcaccccgctgccactccccagggaaagctgggacccaggttgggctctgcctatgatctatagctctttccagcctcctctccaacccaacccctactcccaatctgtcacctcccatggatgccactgatctggctgaaggacaagagaattagattcataatgagctgctggtgtctgaaacctgccagcactgccctgggctatcagttgagccaaaggaagaaggaacagtctgggtttgatcgaagggctaaagcttcaaacagcctctaagtctcagtaggaaaatgtgtaggtttgggagggtgtatgtgtttccgaatgagttcccctaagaactgcttatggttctatatgtgtgttctgtttgtccctgtgtcttttggtgtgtctttttctgcgtgtgtgtgtgcatgtgtgtgtgtctatgcccccgtttggattgccatatttgtggctatcattatgagtgacttaatgagtgtatatgcattggtgtttctgtgactttgtggttttgatgcatgggctggcctcttcataaccatgtccatgcagctggtctggcctagagtacctgccttcaattcactagctccttcttggccatcaagactctgctcaaatgtcacctgctccagggagccttcacctggttgaattagatgccccttatctgtgctcacataacatcctatcaaagcgccctgtttctttccctgacttgatcctctgtcccctattgcctgacctctgtgtgcccagcactcagcccactgcctgacacccaggagatgcacgggaaatggttctgcaaagaaggaataatgcagcaattactatatattgagtgcttacacttactgttttttcacatgcactgttacattgacttctcataacaactctctgaagtcccttcatagcctcaccttacagatgaggaaactgaagctaagagaggttgaggaacttacctaaggacacagtggctaatatatgatgagtcaggacctctaagtccaggctcttaaccaccgtgtcaaacagtcttgtatgaatgggtaggtgtgttggtctctgggtggccaaagataattttattctttacccagggcctcccggggctgggacctacggacaactcaccttttgacacctgccaaaataggaaacaagagtccaagtgatcccctctcctttaagcaccagagaacatgtgaaggggacctttccaatcatacctctggcctggcagagacaatggggctccaaactgtagagtcgggagtgctgggttttagtcctacctctgcagctaactcatttattctcctcagcagtcacattctgcaagcctcaaatgcaaaatgtgtaataacttctgtagaaagtacatgggggcatgaagatcattggcttgattgcttttaaaaaatcggtattgagcactactggggaaatccctggaaacaaacacaattcttccctgagagcttgtgaaaatgcaagactagggcctatgattttccaaagcattttcttccaccaagtgtcaggttgtaggtccttggtcttttctctcttgccttggtacctgcagggtgctgaccagtgctatcatatcccctccccgtttcctaggaccctcttctcggtagactccaacagggcctgccttccttgggcagcatggcaggcctcttggctagtctagtacccacttcttttttttttttttttttttttggatggagcctcactctgtctcccaggctggagtgcactggcgcaatcttagctcactgcaacctctgcctcctgggttcaagcaattctcctggcccagcctcccaagtagctgggattacaggcatgcatcaccatgtccagctatttttttgtatttttagtagaaacagggtttcagcatgttggccaggctggtctcaaactcccgacctcaggtgatctgcctacttcagcctcccaaaatgctggaattacaggcatgacccaccacgcctagtcaggtacccacttcttaactgaaacttagctattccaggttctatcccttttaaaccaactctttgaagagaggtctaataatgacccaatgacttatagctgcagtgagatttttattttaacaggtcacaaaattctcaatccacaaaagtagatttctgaccctaggttattttgttgggggcggagagaggaagtcaaaggttttgcagcctttagagctgcaaaaccagaatttgttgttttgttaaaaatgcacaaataccgacgagtatatttaagtaacacccatagtctaacgaacaaacatgatcagttggcttttccagccctcattctccagcctgtgtgttttctgctcattgtaacacagcgtgtgtgtggcattccatgtttctccagagctttcatgagaatcagtggtcttggatgcatagtgttcccatgagtaccttaattacctaaccattccctgtggttggaaatttatatgggtttttgcattctccttctgctctgaccccaaaataaatgtctgtgttcatacagctattaccttatgtgaaattattttctttgggataaattctcatgatgtgttgttgctttaaaatagtggactccagtctccagagctgcgtctctgcagaggacagtgggacagaagaatcccagggcatgttaaaaaggaccgggtcttcctaaacccacatgcctatatttctgacccagtaccagccaggggggcaagtttccatcccccacaagtcacaaacctgtaactgacactaggatgcttaaggtcaaaggcctggacgaggcctagacagtgggtctggggtagtgtttttgacatcactcaggttcatgttcacatgttgtccccttaccagcatgtgaccttgggccagccactaaccctactgaaactcctttttttcatgtatgaaatggggctaataatggtaccctcctcattagggtattgtgaggatagagttttgcacctgataaatattgtctcctgccccttcctcccctggaaattcaggtctctccctgcagcctaattttaaggcccatttttctgcttccagcccacccctgcccttctaccttcgacctcctccctctgcctctccctctggtgcactggcaaatgggacagagagcctcggtagggccttcctcttagagtcttgcacgcatccctcagtggtctccctgtggctgcttcctgctgccaccaacagatacagacccctgtcgcacagatcatggtagagacagtggtgagcaggaccagacagctccagggagcagtgagggctggcttagagaacctctgttaaactgagaggccaccatcaggaagctctgatccaagatccaggaatccctgactctagggaaaggcctccaatgagagcctgggccctctctgcctgattctgattgtggatgtgccctcaaactccttctcatcactttgttccatccctctttaccctgcagcagctcccacaccctgccaaacaggatgcacagtccagggcagtgtctgagaaagagcagagatctgtcttcatggaaatattgatgtggctctgctggggagcaatggatttatcaagatcaaagttttcctgggagttattgatgcttaatttggaaatagacacactgttgatccctggtatctttagcaacaaagttaaaatgtttgtttttcttcactggttgccatctgagatcttgccggaagtacacaagagaaccttaaatttaacaggaggccctgggagcccatgaggctggcgggcttgggtctgaaatcttttcagtctcttgtaagtgatgagctctcattctctcctgagagctctacggtgccatgttttccactggccttttctgctcagtaattgctacattacaggctgttggtaagttcggaacaagggagctgctgattccatttctgtagcagagaacatgcaccgtgagacttgttgtaccagttcaggttttaggtgctctatttattcttgccccattcagaatgctctcccctgggtctgtggccacaatgctaagagtcatatttatgggcctgcagttgtaattgggccccattctgttcccccaagtggaaagatgaacagggtgtaagcaaccttccctgtagttagaaaaacgtttagttggatttatcagtctgatttttcactcataaacaattgcacaagcctttgcaagcccagagggtcttgtaataatgatggccgtggtccattatggcacagtgatgtgttctacggtggtcattttgctggcaatgacagtcacctctgaacttctctttccaacagacacaatttctcggggtttactttgtctcatcccaagagttccttgccaatgcctacgtcttagctgtgcttctgttccttgccctcctactgcaaaggacatttctgcaagcatcctactatgtggccattgaaactggaattaacttgagaggagcaatacaggtacttggatgattattttttcactttgccataagaaccattattaggaataatgtccatgagtgttattcatcctcatggacactcaagaataattctgctgtaaatttattttttgttgcccattaacgatgttttaaaacagtaaccattgacaaggcagtgtgggatagtggaaaatatcttgggctgaacttgggagacagtgtagctctggctctggttctgccttggactgggtctgaaaatccagctgctcagcccttggcttgaaagtggtagacgtcactaattgatcacagcactctttctgaccaagggtaaatgcaaccttggaatcctctctaagtggctgttccagagttctgctaccagacagtcttctttgggtgtgaaaaaaggaatgtgcttgacatacaaggtctagatagcctctaagacagggtcccctctaagatggggtattggtccatggcctgttaggaactgagccacacatcaggaggtaagcagtgggagcaagcattactacctgagctctgcctcctgtcagatcagcggctacattagactctcataggagtgcgaaccctattgtgaactgtgcaggcaagggtctaggttgtgtgttccttatgagaatctaatgcctgatgatctgaagtggaacagtttcatcctgaaaccatccctctcccccaggtccatggaaaaattgtcttccacgaaaccagtccctggtgccaaaaaggttgaggaccactgctctaagttctatttgaacccttaagtcttgctcactaatgagagtgacctatttggtctgttgggtcacttaagtctaggctcttggtcctgccttctgtgatttccttcttagagtttctggaaagatgatcaaagccagggagtgttcagggcccctctgaagaaggtgatgatgagagttgtccaagtcccagggtcttcactaggattttggttcagctatcagactagagagacatcctgattgagagtagtttaaatgggatagaagtttgtttattcttcagatagagtcagggctgacacaggagctactcaatgatcagagacctggcttcttctgtcatgttgctctgccagccttcttttgtgacttttgtctccatagccatggtgggtattgaaactgccactatatttacatttaaactagccagaagaagggacaagaggagggaacgcattttccttttaaaatggtaatacctgatttgcacataccctctcgcatcccattggtgagaaagtggccaaatggccgtatctagagagtctagaaagagcttggtctttattcttgacagctatatatgcactgctagaaattctctgtgcaaagaggagaatgggcattgggaataactagatgcagctatgcctagtgatgtccatgaagttgtggtaaaatcctgaagctaccttgttctttggaaatgttcctcagaatcattaacattagtcatgtgggagacaggagaagaagctctgcagaaaagggaccgagaggacaaggatatagcttgggctggggacaatgtcagagtccaaactctggctatcttggaatagtctgtgtgaacggtgccctcccaagttgtgcagtgcacaacctgtgcagctatatatggcaaccctgcccatccccagtggtttctcactgggaaagcagagtatttcctcagggatgtcattatgtgacaatagtggaaaaagcccaggaaaatctaagaccttctaagactcatgggggcccagagctgggaggaaccaagctgttgctcagttcagaaaacttctctagaaatcccagcctctcctcacacccctccagtgacaggcagacttgcaccaccacaagcaacagccacttttgtggttgggcagttttgtaattaaatatactaatgtgtgtatgtcataaattacattttccaattatgccaaaagagccaaaaatggttttttaatggttagcatataatcgtttttatcaaattgcttgaatctttcatgttaataagagagattcattactatgccacaaaaagcaaatactggcattaattatagaaacaaattaggggggtggagcgcaatggctcatgactgtaatcccagcgctttgggaggctgaggcgggtggatcacaaggtcagaagtttgagaccagcctgaccaacatagtgaaaccccatctctactaaaaatacaaaaattagccaggcatgttggcgtgcacctgtagtcccagctactcaggaggctgaggcaggagaatcgcttgaacccagcaggtggaggttgcagtgagctgagatcgtgccactatactccagcttgggcgacagagtgagacttcatctcaaaaaaaaaaaaaaaaaaaaagtggctcatgcctgtaatcccagcactttgggaggccaaggcgggtggatcacaaggtcaggagatcgagaccatcctggctaacatggtgaaaccccgtctctactaaaaatacaaaaaaaaattagccaggcatggtggcgggtgcctgtagtcccagctactcgggaggctgaggcaggagaatggcgtgaacccaggaggaggagcttgcagtgagccgagatggcaccaccgcactccagcctgggcgacacagcaagactctgaaaaaaaaaaaaaggaaagaaagaaggaaaggaaaggaaagaaaggaaaggaaaggaaggaaagaaagaaagaaaggaaagagagagagagaaagaaagaaagaaagaaagaaagaaagaaagaaagaaagaaagaaagaaagaaagaaagaaagagaaagaaagaaagaaaaagaaaagaaaggagttagggagaaaaaaaccctttctttctttcttttggagatttccggaaaatgtacccttacggatgagagcctgtgtcttcatgggttagagaataaccacgctttgtgcataaaaagttattaagcacaattcctgaattatacataattactagctgtcagtcagttgtgcatttctgtgtatgctggtcttcacttaataagactttatttcacagatcacttggtgtccctacttcactgaaactaggtgattatcttttgaagtctcatttcacataacctaggaggtatatagatttctttaaaaatgtcattgccattattttaaaccttacccatggtatatataaacttacagaaagacagaataggttcattattttaaaccttgcccatggtgtatattagctcacagaaagacatagaataggttcctgccttaagaaaacctgacccacaaaaaagcctgggtttacacaaaagaggaattaagggcggggagcccaccttacaacagaatgaataatagaattttatccaagagcaggcatcctgaggacatttaagacccggatgcatttttccttgttcaagagcacacatccaaaaattgcagtctttctgcgagtcatgatcactctgcacataaagcgtttaggttcagagctcggggaggccattaccatggctgctctctgtctgccctgtgagggtccttggggtggctgcactctggggatggtgctggggctgactgactcacgcggtcgtgtaacacatcagaccttccaaagtcgaacccttgttttgtttcaaggctcaattatgacaggacttggtctcagagcagatcccctccctaggctggagaaggccactttaaaacagatggcctgccccacttcatcatttttatggctctgatctgtgttctccactggcctctggtaaatcaagaatacaagtggacatgaagatctgctttaaaaaataaagaacagaccgggtgcggtggctcatgcctgtaatctcagcatttggaggccgaggtggatggatctcctgaggtcaggagtttgagaccagcctggccaacatggcaaaaccccatctctgctaaaaatataaaaattagctgggcatggtaggcacgtgcctataattccagctactccggaggctgaggcatgagaattgcttgaacccggaaggtggaggctgcagtgagctgagatcatgccacttcactccagcctgggaagcagagcgagactctgtctctaaataaataagtaaatgaattaaattaaataaaaataaagaaccaattaagtcctgtctacaggaaaaggccttacttgctggagaagtagcttgctgtgctggagtagactagtaagttggaacggtgatacagtaccaccttacagagctgctctagggcaccatggggactgtctgagaagcccctggcacactgtaacaggtggcatctggtgtggtgatgatgatgagaatgatgatgaatgtgaaacactctgctctcatttctagaccaagatttacaataaaattatgcacctgtccacctccaacctgtccatgggagaaatgactgctggacagatctgtaatctggttgccatcgacaccaatcagctcatgtggtttttcttcttgtgcccaaacctctgggctatgccagtacaggtactagatgggctgaggggaagggaggggggcagcaggacacacaaccagaatctgctggtccatggccagtaactaggagcacaccgtcttccactccatgcttgcctgtacctttcacacacttggctataccacaggctgtacctctgggtccctcctgtcccatactctgcaagcactgaccatctctcttaatgaccagagaaggcagtatcattaagactttaaaaatggagccaactttataaactatagaaaaatcaagccaggttcaggggctcacacctgtaatcccagcactttgggaggctgaggcaggaagattacatgagcacaggagttcaagactggcctgggcaacacagtgag

SEQ ID NO: 10405 - DNA, 2556 bp, Homo sapiens
gaggcgcggcaggcgcgcggagccagcggagccagctgagcccgagcccagcccgcgcccgcgccgccatgcccctggccttctgcggcagcgagaaccactcggccgcctaccgggtggaccagggggtcctcaacaacggctgctttgtggacgcgctcaacgtggtgccgcacgtcttcctactcttcatcaccttccccatcctcttcattggatggggaagtcagagctccaaggtgcacatccaccacagcacatggcttcatttccctgggcacaacctgcggtggatcctgaccttcatgctgctcttcgtcctggtgtgtgagattgcagagggcatcctgtctgatggccctgctggtgtattggaccctggccttcatcaccaagaccatcaagtttgtcaagttcttggaccacgccatcggcttctcgcagctacgcttctgcctcacagggctgctggtgatcctctatgggatgctgctcctcgtggaggtcaatgtcatcagggtgaggagatacatcttcttcaagacaccgagggaggtgaagcctcccgaggacctgcaagacctgggggtacgcttcctgcagcccttcgtgaatctgctgtccaaaggcacctactggtggatgaacgccttcatcaagactgcccacaagaagcccatcgacttgcgagccatcgggaagctgcccatcgccatgagggccctcaccaactaccaacggctctgcgaggcctttgacgcccaggtggtcagtgggggcacagccacaccatctattcactgccttctggtttagggtcacagagagggacctcaaagggcattaggtcaaaatcctggtgggacaagaggggaaactgaggctggtgaggggaagaagcttgccttaagtcacacagtgaaccagggacaggtgcagggctgaggattcataggacaggcacagttggaatggcccttaccgtttaggtcgtctagtccaaagtccttatccagatggggaaactgaggctctgagaagggaagtgaccccactggactctcacatccctgtgctctttcctctgcagcttactgactataaaggttggagtgttcacttgatttggagcaggggtgttagtggcctgatccttatggtaactctatgagttgagccagacaggaatctccccatatcactgaggagcaaattgaggccctgagaaaggctgtgacctgcccagagctggccacagctggcaggcggcagaggcagtctcctggctcccagtccagtgctccttcacttcctctgccctcgcaccagggcagttgctgaggcagacacggtggcaggtggtaatgagtgagtgtggcacatggccacctcctcattccagtgctgtgctcatcacatagtccctgaccagctgtgtgaccttgagcaatcatctggccttagtttccccatctagaccatgttggtgttgatagggccctcccaactgtgcacttgctgattccatgatctcttcctggagttcacctatttgcagaggatgtgaccactgggtttccccagacaacaggagctaggggcatcctgggaggctaggcccagccgtgaattagccctcaggcactctgacctggccatggtctctctgggcagcggaaggacattcagggcactcaaggtgcccgggccatctggcaggcactcagccatgccttcgggaggcgcctggtcctcagcagcactttccgcatcttggccgacctgctgggcttcgccgggccactgtgcatctttgggatcgtggaccaccttgggaaggagaacgacgtcttccagcccaagacacaatttctcggggtttactttgtctcatcccaagagttccttgccaatgcctacgtcttagctgtgcttctgttccttgccctcctactgcaaaggacatttctgcaagcatcctactatgtggccattgaaactggaattaacttgagaggagcaatacagaccaagatttacaataaaattatgcacctgtccacctccaacctgtccatgggagaaatgactgctggacagatctgtaatctggttgccatcgacaccaatcagctcatgtggtttttcttcttgtgcccaaacctctgggctatgccagtacaggtactagatgggctgaggggaagggaggggggcagcaggacacacaaccagaatctgctggtccatggccagtaactaggagcacaccgtcttccactccatgcttgcctgtacctttcacacacttggctataccacaggctgtacctctgggtccctcctgtcccatactctgcaagcactgaccatctctcttaatgaccagagaaggcagtatcattaagactttaaaaatggagccaactttataaactatagaaaaatcaagccaggttcaggggctcacacctgtaatcccagcactttgggaggctgaggcaggaagattacatgagcacaggagttcaagactggcctgggcaacacagtgag

SEQ ID NO: 10406 - DNA, 4874 bp, Homo sapiens
gaggcgcggcaggcgcgcggagccagcggagccagctgagcccgagcccagcccgcgcccgcgccgccatgcccctggccttctgcggcagcgagaaccactcggccgcctaccgggtggaccagggggtcctcaacaacggctgctttgtggacgcgctcaacgtggtgccgcacgtcttcctactcttcatcaccttccccatcctcttcattggatggggaagtcagagctccaaggtgcacatccaccacagcacatggcttcatttccctgggcacaacctgcggtggatcctgaccttcatgctgctcttcgtcctggtgtgtgagattgcagagggcatcctgtctgatggggtgaccgaatcccaccatctgcacctgtacatgccagccgggatggcgttcatggctgctgtcacctccgtggtctactatcacaacatcgagacttccaacttccccaagctgctaattgccctgctggtgtattggaccctggccttcatcaccaagaccatcaagtttgtcaagttcttggaccacgccatcggcttctcgcagctacgcttctgcctcacagggctgctggtgatcctctatgggatgctgctcctcgtggaggtcaatgtcatcagggtgaggagatacatcttcttcaagacaccgagggaggtgaagcctcccgaggacctgcaagacctgggggtacgcttcctgcagcccttcgtgaatctgctgtccaaaggcacctactggtggatgaacgccttcatcaagactgcccacaagaagcccatcgacttgcgagccatcgggaagctgcccatcgccatgagggccctcaccaactaccaacggctctgcgaggcctttgacgcccagcggaaggacattcagggcactcaaggtgcccgggccatctggcaggcactcagccatgccttcgggaggcgcctggtcctcagcagcactttccgcatcttggccgacctgctgggcttcgccgggccactgtgcatctttgggatcgtggaccaccttgggaaggagaacgacgtcttccagcccaagacacaatttctcggggtttactttgtctcatcccaagagttccttgccaatgcctacgtcttagctgtgcttctgttccttgccctcctactgcaaaggacatttctgcaagcatcctactatgtggccattgaaactggaattaacttgagaggagcaatacagaccaagatttacaataaaattatgcacctgtccacctccaacctgtccatgggagaaatgactgctggacagatctgtaatctggttgccatcgacaccaatcagctcatgtggtttttcttcttgtgcccaaacctctgggctatgccagtacagatcattgtgggtgtgattctcctctactacatactcggagtcagtgccttaattggagcagctgtcatcattctactggctcctgtccagtacttcgtggccaccaagctgtctcaggcccagcggagcacactggagtattccaatgagcggctgaagcagaccaacgagatgctccgcggcatcaagctgctgaagctgtacgcctgggagaacatcttccgcacgcgggtggagacgacccgcaggaaggagatgaccagcctcagggcctttgccatctatacctccatctccattttcatgaacacggccatccccattgcagctgtcctcataactttcgtgggccacgtcagcttcttcaaagaggccgacttctcgccctccgtggcctttgcctccctctccctcttccatatcttggtcacaccgctgttcctgctgtccagtgtggtccgatctaccgtcaaagctctagtgagcgtgcaaaagctaagcgagttcctgtccagtgcagagatccgtgaggagcagtgtgccccccatgagcccacacctcagggcccagccagcaagtaccaggcggtgcccctcagggttgtgaaccgcaagcgtccagcccgggaggattgtcggggcctcaccggcccactgcagagcctggtccccagtgcagatggcgatgctgacaactgctgtgtccagatcatgggaggctacttcacgtggaccccagatggaatccccacactgtccaacatcaccattcgtatcccccgaggccagctgactatgatcgtggggcaggtgggctgcggcaagtcctcgctccttctagccgcactgggggagatgcagaaggtctcaggggctgtcttctggagcagccttcctgacagcgagataggagaggaccccagcccagagcgggagacagcgaccgacttggatatcaggaagagaggccccgtggcctatgcttcgcagaaaccatggctgctaaatgccactgtggaggagaacatcatctttgagagtcccttcaacaaacaacggtacaagatggtcattgaagcctgctctctgcagccagacatcgacatcctgccccatggagaccagacccagattggggaacggggcatcaacctgtctggtggtcaacgccagcgaatcagtgtggcccgagccctctaccagcacgccaacgttgtcttcttggatgaccccttctcagctctggatatccatctgagtgaccacttaatgcaggccggcatccttgagctgctccgggacgacaagaggacagtggtcttagtgacccacaagctacagtacctgccccatgcagactggatcattgccatgaaggatggcaccatccagagggagggtaccctcaaggacttccagaggtctgaatgccagctctttgagcactggaagaccctcatgaaccgacaggaccaagagctggagaaggagactgtcacagagagaaaagccacagagccaccccagggcctatctcgtgccatgtcctcgagggatggccttctgcaggatgaggaagaggaggaagaggaggcagctgagagcgaggaggatgacaacctgtcgtccatgctgcaccagcgtgctgagatcccatggcgagcctgcgccaagtacctgtcctccgccggcatcctgctcctgtcgttgctggtcttctcacagctgctcaagcacatggtcctggtggccatcgactactggctggccaagtggaccgacagcgccctgaccctgacccctgcagccaggaactgctccctcagccaggagtgcaccctcgaccagactgtctatgccatggtgttcacggtgctctgcagcctgggcattgtgctgtgcctcgtcacgtctgtcactgtggagtggacagggctgaaggtggccaagagactgcaccgcagcctgctaaaccggatcatcctagcccccatgaggttttttgagaccacgccccttgggagcatcctgaacagattttcatctgactgtaacaccatcgaccagcacatcccatccacgctggagtgcctgagccgctccaccctgctctgtgtctcagccctggccgtcatctcctatgtcacacctgtgttcctcgtggccctcttgcccctggccatcgtgtgctacttcatccagaagtacttccgggtggcgtccagggacctgcagcagctggatgacaccacccagcttccacttctctcacactttgccgaaaccgtagaaggactcaccaccatccgggccttcaggtatgaggcccggttccagcagaagcttctcgaatacacagactccaacaacattgcttccctcttcctcacagctgccaacagatggctggaagtccgaatggagtacatcggtgcatgtgtggtgctcatcgcagcggtgacctccatctccaactccctgcacagggagctctctgctggcctggtgggcctgggccttacctacgccctaatggtctccaactacctcaactggatggtgaggaacctggcagacatggagctccagctgggggctgtgaagcgcatccatgggctcctgaaaaccgaggcagagagctacgaggggctcctggaccaagggaagatccagatccagaacctgagcgtgcgctacgacagctccctgaagccggtgctgaagcacgtcaatgccctcatcgcccctggacagaagatcgggatctgcggccgcaccggcagtgggaagtcctccttctctcttgccttcttccgcatggtggacacgttcgaagggcacatcatcattgatggcattgacatcgccaaactgccgctgcacaccctgcgctcacgcctctccatcatcctgcaggaccccgtcctcttcagcggcaccatccgatttaacctggaccctgagaggaagtgctcagatagcacactgtgggaggccctggaaatcgcccagctgaagctggtggtgaaggcactgccaggaggcctcgatgccatcatcacagaaggcggggagaatttcagccagggacagaggcagctgttctgcctggcccgggccttcgtgaggaagaccagcatcttcatcatggacgaggccacggcttccattgacatggccacggaaaacatcctccaaaaggtggtgatgacagccttcgcagaccgcactgtggtcaccatcgcgcatcgagtgcacaccatcctgagtgcagacctggtgatcgtcctgaagcggggtgccatccttgagttcgataagccagagaagctgctcagccggaaggacagcgtcttcgcctccttcgtccgtgcagacaagtgacctgccagagcccaagtgccatcccacattcggaccctgcccatacccctgcctgggttttctaactgtaaatcacttgtaaataaatagatt

SEQ ID NO: 10407 - DNA, 5016 bp, Homo sapiens
aggcgcgcggagccagcggagccagctgagcccgagcccagcccgcgcccgcgccgccatgcccctggccttctgcggcagcgagaaccactcggccgcctaccgggtggaccagggggtcctcaacaacggctgctttgtggacgcgctcaacgtggtgccgcacgtcttcctactcttcatcaccttccccatcctcttcattggatggggaagtcagagctccaaggtgcacatccaccacagcacatggcttcatttccctgggcacaacctgcggtggatcctgaccttcatgctgctcttcgtcctggtgtgtgagattgcagagggcatcctgtctgatggggtgaccgaatcccaccatctgcacctgtacatgccagccgggatggcgttcatggctgctgtcacctccgtggtctactatcacaacatcgagacttccaacttccccaagctgctaattgccctgctggtgtattggaccctggccttcatcaccaagaccatcaagtttgtcaagttcttggaccacgccatcggcttctcgcagctacgcttctgcctcacagggctgctggtgatcctctatgggatgctgctcctcgtggaggtcaatgtcatcagggtgaggagatacatcttcttcaagacaccgagggaggtgaagcctcccgaggacctgcaagacctgggggtacgcttcctgcagcccttcgtgaatctgctgtccaaaggcacctactggtggatgaacgccttcatcaagactgcccacaagaagcccatcgacttgcgagccatcgggaagctgcccatcgccatgagggccctcaccaactaccaacggctctgcgaggcctttgacgcccaggtgcggaaggacattcagggcactcaaggtgcccgggccatctggcaggcactcagccatgccttcgggaggcgcctggtcctcagcagcactttccgcatcttggccgacctgctgggcttcgccgggccactgtgcatctttgggatcgtggaccaccttgggaaggagaacgacgtcttccagcccaagacacaatttctcggggtttactttgtctcatcccaagagttccttgccaatgcctacgtcttagctgtgcttctgttccttgccctcctactgcaaaggacatttctgcaagcatcctactatgtggccattgaaactggaattaacttgagaggagcaatacagaccaagatttacaataaaattatgcacctgtccacctccaacctgtccatgggagaaatgactgctggacagatctgtaatctggttgccatcgacaccaatcagctcatgtggtttttcttcttgtgcccaaacctctgggctatgccagtacagatcattgtgggtgtgattctcctctactacatactcggagtcagtgccttaattggagcagctgtcatcattctactggctcctgtccagtacttcgtggccaccaagctgtctcaggcccagcggagcacactggagtattccaatgagcggctgaagcagaccaacgagatgctccgcggcatcaagctgctgaagctgtacgcctgggagaacatcttccgcacgcgggtggagacgacccgcaggaaggagatgaccagcctcagggcctttgccatctatacctccatctccattttcatgaacacggccatccccattgcagctgtcctcatatgctgagcgtttccagtgtgggagggacccacaccctgggccaccctggcctcacttgtgcctctgtccacagactttcgtgggccacgtcagcttcttcaaagaggccgacttctcgccctccgtggcctttgcctccctctccctcttccatatcttggtcacaccgctgttcctgctgtccagtgtggtccgatctaccgtcaaagctctagtgagcgtgcaaaagctaagcgagttcctgtccagtgcagagatccgtgaggagcagtgtgccccccatgagcccacacctcagggcccagccagcaagtaccaggcggtgcccctcagggttgtgaaccgcaagcgtccagcccgggaggattgtcggggcctcaccggcccactgcagagcctggtccccagtgcagatggcgatgctgacaactgctgtgtccagatcatgggaggctacttcacgtggaccccagatggaatccccacactgtccaacatcaccattcgtatcccccgaggccagctgactatgatcgtggggcaggtgggctgcggcaagtcctcgctccttctagccgcactgggggagatgcagaaggtctcaggggctgtcttctggagcagccttcctgacagcgagataggagaggaccccagcccagagcgggagacagcgaccgacttggatatcaggaagagaggccccgtggcctatgcttcgcagaaaccatggctgctaaatgccactgtggaggagaacatcatctttgagagtcccttcaacaaacaacggtacaagatggtcattgaagcctgctctctgcagccagacatcgacatcctgccccatggagaccagacccagattggggaacggggcatcaacctgtctggtggtcaacgccagcgaatcagtgtggcccgagccctctaccagcacgccaacgttgtcttcttggatgaccccttctcagctctggatatccatctgagtgaccacttaatgcaggccggcatccttgagctgctccgggacgacaagaggacagtggtcttagtgacccacaagctacagtacctgccccatgcagactggatcattgccatgaaggatggcaccatccagagggagggtaccctcaaggacttccagaggtctgaatgccagctctttgagcactggaagaccctcatgaaccgacaggaccaagagctggagaaggagactgtcacagagagaaaagccacagagccaccccagggcctatctcgtgccatgtcctcgagggatggccttctgcaggatgaggaagaggaggaagaggaggcagctgagagcgaggaggatgacaacctgtcgtccatgctgcaccagcgtgctgagatcccatggcgagcctgcgccaagtacctgtcctccgccggcatcctgctcctgtcgttgctggtcttctcacagctgctcaagcacatggtcctggtggccatcgactactggctggccaagtggaccgacagcgccctgaccctgacccctgcagccaggaactgctccctcagccaggagtgcaccctcgaccagactgtctatgccatggtgttcacggtgctctgcagcctgggcattgtgctgtgcctcgtcacgtctgtcactgtggagtggacagggctgaaggtggccaagagactgcaccgcagcctgctaaaccggatcatcctagcccccatgaggttttttgagaccacgccccttgggagcatcctgaacagattttcatctgactgtaacaccatcgaccagcacatcccatccacgctggagtgcctgagccgctccaccctgctctgtgtctcagccctggccgtcatctcctatgtcacacctgtgttcctcgtggccctcttgcccctggccatcgtgtgctacttcatccagaagtacttccgggtggcgtccagggacctgcagcagctggatgacaccacccagcttccacttctctcacactttgccgaaaccgtagaaggactcaccaccatccgggccttcaggtatgaggcccggttccagcagaagcttctcgaatacacagactccaacaacattgcttccctcttcctcacagctgccaacagatggctggaagtccgaatggagtacatcggtgcatgtgtggtgctcatcgcagcggtgacctccatctccaactccctgcacagggagctctctgctggcctggtgggcctgggccttacctacgccctaatggtctccaactacctcaactggatggtgaggaacctggcagacatggagctccagctgggggctgtgaagcgcatccatgggctcctgaaaaccgaggcagagagctacgaggggctcctgggtgagaggctcagggagaggggtggggaagagtccaaggaggagtgtgtctgggttgggggccacaagggagcctggggatggggtggcactttcggatactagctgtggcccatgcctggtggctgagcccagcccggcccccagcaccatcgctgatcccaaagaactggccagaccaagggaagatccagatccagaacctgagcgtgcgctacgacagctccctgaagccggtgctgaagcacgtcaatgccctcatcgcccctggacagaagatcgggatctgcggccgcaccggcagtgggaagtcctccttctctcttgccttcttccgcatggtggacacgttcgaagggcacatcatcattgatggcattgacatcgccaaactgccgctgcacaccctgcgctcacgcctctccatcatcctgcaggaccccgtcctcttcagcggcaccatccgatgccatcatcacagaaggcggggagaatttcagccagggacagaggcagctgttctgcctggcccgggccttcgtgaggaagaccagcatcttcatcatggacgaggccacggcttccattgacatggccacggaaaacatcctccaaaaggtggtgatgacagccttcgcagaccgcactgtggtcaccatcgcgcatcgagtgcacaccatcctgagtgcagacctggtgatcgtcctgaagcggggtgccatccttgagttcgataagccagagaagctgctcagccggaaggacagcgtcttcgcctccttcgtccgtgcagacaagtgacctgccagagcccaagtgccatcccacattcggaccctgcccatacccctgcctgggttttctaactgtaaatcacttgtaaataaatagatttgat

SEQ ID NO: 10408 - DNA, 4530 bp, Homo sapiens
ccgcacgtcttcctactcttcatcaccttccccatcctcttcattggatggggaagtcagagctccaaggtgcacatccaccacagcacatggcttcatttccctgggcacaacctgcggtggatcctgaccttcatgctgctcttcgtcctggtgtgtgagattgcagagggcatcctgtctgatggggtgaccgaatcccaccatctgcacctgtacatgccagccgggatggcgttcatggctgctgtcacctccgtggtctactatcacaacatcgagacttccaacttccccaagctgctaattgccctgctggtgtattggaccctggccttcatcaccaagaccatcaagtttgtcaagttcttggaccacgccatcggcttctcgcagctacgcttctgcctcacagggctgctggtgatcctctatgggatgctgctcctcgtggaggtcaatgtcatcagggtgaggagatacatcttcttcaagacaccgagggaggtgaagcctcccgaggacctgcaagacctgggggtacgcttcctgcagcccttcgtgaatctgctgtccaaaggcacctactggtggatgaacgccttcatcaagactgcccacaagaagcccatcgacttgcgagccatcgggaagctgcccatcgccatgagggccctcaccaactaccaacggctctgcgaggcctttgacgcccaggtgcggaaggacattcagggcactcaaggtgcccgggccatctggcaggcactcagccatgccttcgggaggcgcctggtcctcagcagcactttccgcatcttggccgacctgctgggcttcgccgggccactgtgcatctttgggatcgtggaccaccttgggaaggagaacgacgtcttccagcccaagacacaatttctcggggtttactttgtctcatcccaagagttccttgccaatgcctacgtcttagctgtgcttctgttccttgccctcctactgcaaaggacatttctgcaagcatcctactatgtggccattgaaactggaattaacttgagaggagcaatacagaccaagatttacaataaaattatgcacctgtccacctccaacctgtccatgggagaaatgactgctggacagatctgtaatctggttgccatcgacaccaatcagctcatgtggtttttcttcttgtgcccaaacctctgggctatgccagtacagatcattgtgggtgtgattctcctctactacatactcggagtcagtgccttaattggagcagctgtcatcattctactggctcctgtccagtacttcgtggccaccaagctgtctcaggcccagcggagcacactggagtattccaatgagcggctgaagcagaccaacgagatgctccgcggcatcaagctgctgaagctgtacgcctgggagaacatcttccgcacgcgggtggagacgacccgcaggaaggagatgaccagcctcagggcctttgccatctatacctccatctccattttcatgaacacggccatccccattgcagctgtcctcatatgctgagcgtttccagtgtgggagggacccacaccctgggccaccctggcctcacttgtgcctctgtccacagactttcgtgggccacgtcagcttcttcaaagaggccgacttctcgccctccgtggcctttgcctccctctccctcttccatatcttggtcacaccgctgttcctgctgtccagtgtggtccgatctaccgtcaaagctctagtgaggggtgaggggtgtctctgtgcttcccgagcagcgtgcaaaagctaagcgagttcctgtccagtgcagagatccgtgaggagcagtgtgccccccatgagcccacacctcagggcccagccagcaagtaccaggcggtgcccctcagggttgtgaaccgcaagcgtccagcccgggaggattgtcggggcctcaccggcccactgcagagcctggtccccagtgcagatggcgatgctgacaactgctgtgtccagatcatgggaggctacttcacgtggaccccagatggaatccccacactgtccaacatcaccattcgtatcccccgaggccagctgactatgatcgtggggcaggtgggctgcggcaagtcctcgctccttctagccgcactgggggagatgcagaaggtctcaggggctgtcttctggagcagcagccttcctgacagcgagataggagaggaccccagcccagagcgggagacagcgaccgacttggatatcaggaagagaggccccgtggcctatgcttcgcagaaaccatggctgctaaatgccactgtggaggagaacatcatctttgagagtcccttcaacaaacaacggtacaagatggtcattgaagcctgctctctgcagccagacatcgacatcctgccccatggagaccagacccagattggggaacggggcatcaacctgtctggtggtcaacgccagcgaatcagtgtggcccgagccctctaccagcacgccaacgttgtcttcttggatgaccccttctcagctctggatatccatctgagtgaccacttaatgcaggccggcatccttgagctgctccgggacgacaagaggacagtggtcttagtgacccacaagctacagtacctgccccatgcagactggatcattgccatgaaggatggcaccatccagagggagggtaccctcaaggacttccagaggtctgaatgccagctctttgagcactggaagaccctcatgaaccgacaggaccaagagctggagaaggagactgtcacagagagaaaagccacagagccaccccagggcctatctcgtgccatgtcctcgagggatggccttctgcaggatgaggaagaggaggaagaggaggcagctgagagcgaggaggatgacaacctgtcgtccatgctgcaccagcgtgctgagatcccatggcgagcctgcgccaagtacctgtcctccgccggcatcctgctcctgtcgttgctggtcttctcacagctgctcaagcacatggtcctggtggccatcgactactggctggccaagtggaccgacagcgccctgaccctgacccctgcagccaggaactgctccctcagccaggagtgcaccctcgaccagactgtctatgccatggtgttcacggtgctctgcagcctgggcattgtgctgtgcctcgtcacgtctgtcactgtggagtggacagggctgaaggtggccaagagactgcaccgcagcctgctaaaccggatcatcctagcccccatgaggttttttgagaccacgccccttgggagcatcctgaacagattttcatctgactgtaacaccatcgaccagcacatcccatccacgctggagtgcctgagccgctccaccctgctctgtgtctcagccctggccgtcatctcctatgtcacacctgtgttcctcgtggccctcttgcccctggccatcgtgtgctacttcatccagaagtacttccgggtggcgtccagggacctgcagcagctggatgacaccacccagcttccacttctctcacactttgccgaaaccgtagaaggactcaccaccatccgggccttcaggtatgaggcccggttccagcagaagcttctcgaatacacagactccaacaacattgcttccctcttcctcacagctgccaacagatggctggaagtccgaatggagtacatcggtgcatgtgtggtgctcatcgcagcggtgacctccatctccaactccctgcacagggagctctctgctggcctggtgggcctgggccttacctacgccctaatggtctccaactacctcaactggatggtgaggaacctggcagacatggagctccagctgggggctgtgaagcgcatccatgggctcctgaaaaccgaggcagagagctacgaggggctcctggcaccatcgctgatcccaaagaactggccagaccaagggaagatccagatccagaacctgagcgtgcgctacgacagctccctgaagccggtgctgaagcacgtcaatgccctcatcgcccctggacagaagatcgggatctgcggccgcaccggcagtgggaagtcctccttctctcttgccttcttccgcatggtggacacgttcgaagggcacatcatcattgatggcattgacatcgccaaactgccgctgcacaccctgcgctcacgcctctccatcatcctgcaggaccccgtcctcttcagcggcaccatccgatttaacctggaccctgagaggaagtgctcagatagcacactgtgggaggccctggaaatcgcccagctgaagctggtggtgaaggcactgccaggaggcctcgatgccatcatcacagaaggcggggagaatttcagccagggacagaggcagctgttctgcctggcccgggccttcgtgaggaagaccagcatcttcatcatggacgaggccacg

SEQ ID NO: 10409 - DNA, 4642 bp, Homo sapiens
gaggcgcggcaggcgcgcggagccagcggagccagctgagcccgagcccagcccgcgcccgcgccgccatgcccctggccttctgcggcagcgagaaccactcggccgcctaccgggtggaccagggggtcctcaacaacggctgctttgtggacgcgctcaacgtggtgccgcacgtcttcctactcttcatcaccttccccatcctcttcattggatggggaagtcagagctccaaggtgcacatccaccacagcacatggcttcatttccctgggcacaacctgcggtggatcctgaccttcatgctgctcttcgtcctggtgtgtgagattgcagagggcatcctgtctgatggggtgaccgaatcccaccatctgcacctgtacatgccagccgggatggcgttcatggctgctgtcacctccgtggtctactatcacaacatcgagacttccaacttccccaagctgctaattgccctgctggtgtattggaccctggccttcatcaccaagaccatcaagtttgtcaagttcttggaccacgccatcggcttctcgcagctacgcttctgcctcacagggctgctggtgatcctctatgggatgctgctcctcgtggaggtcaatgtcatcagggtgaggagatacatcttcttcaagacaccgagggaggtgaagcctcccgaggacctgcaagacctgggggtacgcttcctgcagcccttcgtgaatctgctgtccaaaggcacctactggtggatgaacgccttcatcaagactgcccacaagaagcccatcgacttgcgagccatcgggaagctgcccatcgccatgagggccctcaccaactaccaacggctctgcgaggcctttgacgcccaggtgcggaaggacattcagggcactcaaggtgcccgggccatctggcaggcactcagccatgccttcgggaggcgcctggtcctcagcagcactttccgcatcttggccgacctgctgggcttcgccgggccactgtgcatctttgggatcgtggaccaccttgggaaggagaacgacgtcttccagcccaagacacaatttctcggggtttactttgtctcatcccaagagttccttgccaatgcctacgtcttagctgtgcttctgttccttgccctcctactgcaaaggacatttctgcaagcatcctactatgtggccattgaaactggaattaacttgagaggagcaatacagaccaagatttacaataaaattatgcacctgtccacctccaacctgtccatgggagaaatgactgctggacagatctgtaatctggttgccatcgacaccaatcagctcatgtggtttttcttcttgtgcccaaacctctgggctatgccagtacagatcattgtgggtgtgattctcctctactacatactcggagtcagtgccttaattggagcagctgtcatcattctactggctcctgtccagtacttcgtggccaccaagctgtctcaggcccagcggagcacactggagtattccaatgagcggctgaagcagaccaacgagatgctccgcggcatcaagctgctgaagctgtacgcctgggagaacatcttccgcacgcgggtggagacgacccgcaggaaggagatgaccagcctcagggcctttgccatctatacctccatctccattttcatgaacacggccatccccattgcagctgtcctcatacccctcagggttgtgaaccgcaagcgtccagcccgggaggattgtcggggcctcaccggcccactgcagagcctggtccccagtgcagatggcgatgctgacaactgctgtgtccagatcatgggaggctacttcacgtggaccccagatggaatccccacactgtccaacatcaccattcgtatcccccgaggccagctgactatgatcgtggggcaggtgggctgcggcaagtcctcgctccttctagccgcactgggggagatgcagaaggtctcaggggctgtcttctggagcagcagccttcctgacagcgagataggagaggaccccagcccagagcgggagacagcgaccgacttggatatcaggaagagaggccccgtggcctatgcttcgcagaaaccatggctgctaaatgccactgtggaggagaacatcatctttgagagtcccttcaacaaacaacggtacaagatggtcattgaagcctgctctctgcagccagacatcgacatcctgccccatggagaccagacccagattggggaacggggcatcaacctgtctggtggtcaacgccagcgaatcagtgtggcccgagccctctaccagcacgccaacgttgtcttcttggatgaccccttctcagctctggatatccatctgagtgaccacttaatgcaggccggcatccttgagctgctccgggacgacaagaggacagtggtcttagtgacccacaagctacagtacctgccccatgcagactggatcattgccatgaaggatggcaccatccagagggagggtaccctcaaggacttccagaggtctgaatgccagctctttgagcactggaagaccctcatgaaccgacaggaccaagagctggagaaggagactgtcacagagagaaaagccacagagccaccccagggcctatctcgtgccatgtcctcgagggatggccttctgcaggatgaggaagaggaggaagaggaggcagctgagagcgaggaggatgacaacctgtcgtccatgctgcaccagcgtgctgagatcccatggcgagcctgcgccaagtacctgtcctccgccggcatcctgctcctgtcgttgctggtcttctcacagctgctcaagcacatggtcctggtggccatcgactactggctggccaagtggaccgacagcgccctgaccctgacccctgcagccaggaactgctccctcagccaggagtgcaccctcgaccagactgtctatgccatggtgttcacggtgctctgcagcctgggcattgtgctgtgcctcgtcacgtctgtcactgtggagtggacagggctgaaggtggccaagagactgcaccgcagcctgctaaaccggatcatcctagcccccatgaggttttttgagaccacgccccttgggagcatcctgaacagattttcatctgactgtaacaccatcgaccagcacatcccatccacgctggagtgcctgagccgctccaccctgctctgtgtctcagccctggccgtcatctcctatgtcacacctgtgttcctcgtggccctcttgcccctggccatcgtgtgctacttcatccagaagtacttccgggtggcgtccagggacctgcagcagctggatgacaccacccagcttccacttctctcacactttgccgaaaccgtagaaggactcaccaccatccgggccttcaggtatgaggcccggttccagcagaagcttctcgaatacacagactccaacaacattgcttccctcttcctcacagctgccaacagatggctggaagtccgaatggagtacatcggtgcatgtgtggtgctcatcgcagcggtgacctccatctccaactccctgcacagggagctctctgctggcctggtgggcctgggccttacctacgccctaatggtctccaactacctcaactggatggtgaggaacctggcagacatggagctccagctgggggctgtgaagcgcatccatgggctcctgaaaaccgaggcagagagctacgaggggctcctggcaccatcgctgatcccaaagaactggccagaccaagggaagatccagatccagaacctgagcgtgcgctacgacagctccctgaagccggtgctgaagcacgtcaatgccctcatcgcccctggacagaagatcgggatctgcggccgcaccggcagtgggaagtcctccttctctcttgccttcttccgcatggtggacacgttcgaagggcacatcatcattgatggcattgacatcgccaaactgccgctgcacaccctgcgctcacgcctctccatcatcctgcaggaccccgtcctcttcagcggcaccatccgatttaacctggaccctgagaggaagtgctcagatagcacactgtgggaggccctggaaatcgcccagctgaagctggtggtgaaggcactgccaggaggcctcgatgccatcatcacagaaggcggggagaatttcagccagggacagaggcagctgttctgcctggcccgggccttcgtgaggaagaccagcatcttcatcatggacgaggccacggcttccattgacatggccacggaaaacatcctccaaaaggtggtgatgacagccttcgcagaccgcactgtggtcaccatcgcgcatcgagtgcacaccatcctgagtgcagacctggtgatcgtcctgaagcggggtgccatccttgagttcgataagccagagaagctgctcagccggaaggacagcgtcttcgcctccttcgtccgtgcagacaagtgacctgccagagcccaagtgccatcccacattcggaccctgcccatacccctgcctgggttttctaactgtaaatcact

SEQ ID NO: 10410 - DNA, 6565 bp, Homo sapiens
gcggcaggcgcgcggagccagcggagccagctgagcccgagcccagcccgcgcccgcgccgccatgcccctggccttctgcggcagcgagaaccactcggccgcctaccgggtggaccagggggtcctcaacaacggctgctttgtggacgcgctcaacgtggtgccgcacgtcttcctactcttcatcaccttccccatcctcttcattggatggggaagtcagagctccaaggtgcacatccaccacagcacatggcttcatttccctgggcacaacctgcggtggatcctgaccttcatgctgctcttcgtcctggtgtgtgagattgcagagggcatcctgtctgatggggtgaccgaatcccaccatctgcacctgtacatgccagccgggatggcgttcatggctgctgtcacctccgtggtctactatcacaacatcgagacttccaacttccccaagctgctaattgccctgctggtgtattggaccctggccttcatcaccaagaccatcaagtttgtcaagttcttggaccacgccatcggcttctcgcagctacgcttctgcctcacagggctgctggtgatcctctatgggatgctgctcctcgtggaggtcaatgtcatcagggtgaggagatacatcttcttcaagacaccgagggaggtgaagcctcccgaggacctgcaagacctgggggtacgcttcctgcagcccttcgtgaatctgctgtccaaaggcacctactggtggatgaacgccttcatcaagactgcccacaagaagcccatcgacttgcgagccatcgggaagctgcccatcgccatgagggccctcaccaactaccaacggctctgcgaggcctttgacgcccagcggaaggacattcagggcactcaaggtgcccgggccatctggcaggcactcagccatgccttcgggaggcgcctggtcctcagcagcactttccgcatcttggccgacctgctgggcttcgccgggccactgtgcatctttgggatcgtggaccaccttgggaaggagaacgacgtcttccagcccaagacacaatttctcggggtttactttgtctcatcccaagagttccttgccaatgcctacgtcttagctgtgcttctgttccttgccctcctactgcaaaggacatttctgcaagcatcctactatgtggccattgaaactggaattaacttgagaggagcaatacagaccaagatttacaataaaattatgcacctgtccacctccaacctgtccatgggagaaatgactgctggacagatctgtaatctggttgccatcgacaccaatcagctcatgtggtttttcttcttgtgcccaaacctctgggctatgccagtacagatcattgtgggtgtgattctcctctactacatactcggagtcagtgccttaattggagcagctgtcatcattctactggctcctgtccagtacttcgtggccaccaagctgtctcaggcccagcggagcacactggagtattccaatgagcggctgaagcagaccaacgagatgctccgcggcatcaagctgctgaagctgtacgcctgggagaacatcttccgcacgcgggtggagacgacccgcaggaaggagatgaccagcctcagggcctttgccatctatacctccatctccattttcatgaacacggccatccccattgcagctgtcctcataactttcgtgggccacgtcagcttcttcaaagaggccgacttctcgccctccgtggcctttgcctccctctccctcttccatatcttggtcacaccgctgttcctgctgtccagtgtggtccgatctaccgtcaaagctctagtgagagccaccaagaatgaggccatcccgtccccacgtggctgccccatggatatcagaaggcatccactgtgtctatctttcccaggccaagtatcccctaccctttccacagcccctgagccctcacagcctcagccagtgaaacagcttcccccaagcgctgggtcctgctctgattggcccacagctcttggaggctcccacttccaggctctagagcctcatggggactctgccactgtcccagaggcattgccctcttgggaatgaaagcctgaaggtagaaggctgaggctttggctgggaaatgccctgtctggagtgagaagatgtccttgggcctctgaagtagctctgcctccttgaaagcaagagcctgtcatgcctctatggagggctggcttgtccttacccatggccagagaaccagtcagtaacaaatgtcctctgtgtcttcagccttgaggaaggtgacacccctgtctcatgggaccctggcaggtactgggaagctggaaggaaggagtagctgttggaatgaagtagctgatagagagggtagcttgcagggggagactctagcatgggttcaaagatggaatggggcataactcagcaaaattatgctctaaggagtatctgaccaggcagtagctggttaaacagggattagctcccatttccacagtcggctgtgctgactcagtttcttgaccagggtgttgtggggtctgaagatcacccctcctcccaccacccactctccagccctatgattctgtgtagaaaccacagatttaagaacgctgcacctgcctgaaaactgttgcactgatcccaaagcgttcatattttcaaacactctggatcccactgtttccaggaatggaacaccagagtagcagaggccttttcagtgaggcagctcaggctctggctgaaggtgggcgcaggacactacctgaagcttcaccccaagagatgagggccagctccactcttcccagtcaccgcctgtgggggagggaggctggacagggcatgaaggcagagcctggtggtctgcccctcccatctaggggtggcgcacagaaagggagactccaggccacagctcacttacaccccagaataaccttgccttgagggtgggatggcttgtctgccccaggcctgttggacatttagcaaaagagaagaaaggggaatacaaacaatcctgagcttcccagaaagctttcacacctccaggatgggagagaatgaactagaagagtgaagcttccagtgcttcctcaggtccacagggaaatctggacaggggagagggtaggaatagccgcctcccccgtgagtaatgacacctcctccagcaggctgttatggggatccgattacataatgctacaaaacagttaacacagtgtctggcatttagtgtatgctcacaaaatactagctattgattctttaccaatcctagtcctaactaaccttaaccctgaccaatccaacaccaaccatccttcagtctaataacccagactaactaacttcaacattaaccctaaaactaaccaatctcacctccaatccagaccccagcctattccagctgactggtcaaccctagcaaaccctggtaacaccaattacctgcccccatgcccactggtctgcccccttcagtgtgggctttgtgggactatacttcaggcctgagatcctgctcagagctctctatcaggctgcgccctctcccctcccctctgcccctggcaggggtgaggggtgtctctgtgcttcccgagcagcgtgcaaaagctaagcgagttcctgtccagtgcagagatccgtgaggagcagtgtgccccccatgagcccacacctcagggcccagccagcaagtaccaggcggtgcccctcagggttgtgaaccgcaagcgtccagcccgggaggattgtcggggcctcaccggcccactgcagagcctggtccccagtgcagatggcgatgctgacaactgctgtgtccagatcatgggaggctacttcacgtggaccccagatggaatccccacactgtccaacatcaccattcgtatcccccgaggccagctgactatgatcgtggggcaggtgggctgcggcaagtcctcgctccttctagccgcactgggggagatgcagaaggtctcaggggctgtcttctggagcagcagccttcctgacagcgagataggagaggaccccagcccagagcgggagacagcgaccgacttggatatcaggaagagaggccccgtggcctatgcttcgcagaaaccatggctgctaaatgccactgtggaggagaacatcatctttgagagtcccttcaacaaacaacggtacaagatggtcattgaagcctgctctctgcagccagacatcgacatcctgccccatggagaccagacccagattggggaacggggcatcaacctgtctggtggtcaacgccagcgaatcagtgtggcccgagccctctaccagcacgccaacgttgtcttcttggatgaccccttctcagctctggatatccatctgagtgaccacttaatgcaggccggcatccttgagctgctccgggacgacaagaggacagtggtcttagtgacccacaagctacagtacctgccccatgcagactggatcattgccatgaaggatggcaccatccagagggagggtaccctcaaggacttccagaggtctgaatgccagctctttgagcactggaagaccctcatgaaccgacaggaccaagagctggagaaggagactgtcacagagagaaaagccacagagccaccccagggcctatctcgtgccatgtcctcgagggatggccttctgcaggatgaggaagaggaggaagaggaggcagctgagagcgaggaggatgacaacctgtcgtccatgctgcaccagcgtgctgagatcccatggcgagcctgcgccaagtacctgtcctccgccggcatcctgctcctgtcgttgctggtcttctcacagctgctcaagcacatggtcctggtggccatcgactactggctggccaagtggaccgacagcgccctgaccctgacccctgcagccaggaactgctccctcagccaggagtgcaccctcgaccagactgtctatgccatggtgttcacggtgctctgcagcctgggcattgtgctgtgcctcgtcacgtctgtcactgtggagtggacagggctgaaggtggccaagagactgcaccgcagcctgctaaaccggatcatcctagcccccatgaggttttttgagaccacgccccttgggagcatcctgaacagattttcatctgactgtaacaccatcgaccagcacatcccatccacgctggagtgcctgagccgctccaccctgctctgtgtctcagccctggccgtcatctcctatgtcacacctgtgttcctcgtggccctcttgcccctggccatcgtgtgctacttcatccagaagtacttccgggtggcgtccagggacctgcagcagctggatgacaccacccagcttccacttctctcacactttgccgaaaccgtagaaggactcaccaccatccgggccttcaggtatgaggcccggttccagcagaagcttctcgaatacacagactccaacaacattgcttccctcttcctcacagctgccaacagatggctggaagtccgaatggtctccaactacctcaactggatggtgaggaacctggcagacatggagctccagctgggggctgtgaagcgcatccatgggctcctgaaaaccgaggcagagagctacgaggggctcctggaccaagggaagatccagatccagaacctgagcgtgcgctacgacagctccctgaagccggtgctgaagcacgtcaatgccctcatcgcccctggacagaagatcgggatctgcggccgcaccggcagtgggaagtcctccttctctcttgccttcttccgcatggtggacacgttcgaagggcacatcatcattgatggcattgacatcgccaaactgccgctgcacaccctgcgctcacgcctctccatcatcctgcaggaccccgtcctcttcagcggcaccatccgatttaacctggaccctgagaggaagtgctcagatagcacactgtgggaggccctggaaatcgcccagctgaagctggtggtgaaggcactgccaggaggcctcgatgccatcatcacagaaggcggggagaatttcagccagggacagaggcagctgttctgcctggcccgggccttcgtgaggaagaccagcatcttcatcatggacgaggccacggcttccattgacatggccacggaaaacatcctccaaaaggtggtgatgacagccttcgcagaccgcactgtggtcaccatcgcgcatcgagtgcacaccatcctgagtgcagacctggtgatcgtcctgaagcggggtgccatccttgagttcgataagccagagaagctgctcagccggaaggacagcgtcttcgcctccttcgtccgtgcagacaagtgacctgccagagcccaagtgccatcccacattcggaccctgcccatacccctgcctgggttttctaactgtaaatcacttgtaaataaat

SEQ ID NO: 10411 - DNA, 4761 bp, Homo sapiens
gggccgggcggcggagctgcaagggacagaggcgcggcaggcgcgcggagccagcggagccagctgagcccgagcccagcccgcgcccgcgccgccatgcccctggccttctgcggcagcgagaaccactcggccgcctaccgggtggaccagggggtcctcaacaacggctgctttgtggacgcgctcaacgtggtgccgcacgtcttcctactcttcatcaccttccccatcctcttcattggatggggaagtcagagctccaaggtgcacatccaccacagcacatggcttcatttccctgggcacaacctgcggtggatcctgaccttcatgctgctcttcgtcctggtgtgtgagattgcagagggcatcctgtctgatggggtgaccgaatcccaccatctgcacctgtacatgccagccgggatggcgttcatggctgctgtcacctccgtggtctactatcacaacatcgagacttccaacttccccaagctgctaattgccctgctggtgtattggaccctggccttcatcaccaagaccatcaagtttgtcaagttcttggaccacgccatcggcttctcgcagctacgcttctgcctcacagggctgctggtgatcctctatgggatgctgctcctcgtggaggtcaatgtcatcagggtgaggagatacatcttcttcaagacaccgagggaggtgaagcctcccgaggacctgcaagacctgggggtacgcttcctgcagcccttcgtgaatctgctgtccaaaggcacctactggtggatgaacgccttcatcaagactgcccacaagaagcccatcgacttgcgagccatcgggaagctgcccatcgccatgagggccctcaccaactaccaacggctctgcgaggcctttgacgcccagcggaaggacattcagggcactcaaggtgcccgggccatctggcaggcactcagccatgccttcgggaggcgcctggtcctcagcagcactttccgcatcttggccgacctgctgggcttcgccgggccactgtgcatctttgggatcgtggaccaccttgggaaggagaacgacgtcttccagcccaagacacaatttctcggggtttactttgtctcatcccaagagttccttgccaatgcctacgtcttagctgtgcttctgttccttgccctcctactgcaaaggacatttctgcaagcatcctactatgtggccattgaaactggaattaacttgagaggagcaatacagaccaagatttacaataaaattatgcacctgtccacctccaacctgtccatgggagaaatgactgctggacagatctgtaatctggttgccatcgacaccaatcagctcatgtggtttttcttcttgtgcccaaacctctgggctatgccagtacagatcattgtgggtgtgattctcctctactacatactcggagtcagtgccttaattggagcagctgtcatcattctactggctcctgtccagtacttcgtggccaccaagctgtctcaggcccagcggagcacactggagtattccaatgagcggctgaagcagaccaacgagatgctccgcggcatcaagctgctgaagctgtacgcctgggagaacatcttccgcacgcgggtggagacgacccgcaggaaggagatgaccagcctcagggcctttgccatctatacctccatctccattttcatgaacacggccatccccattgcagctgtcctcatacgtgcaaaagctaagcgagttcctgtccagtgcagagatccgtgaggagcagtgtgccccccatgagcccacacctcagggcccagccagcaagtaccaggcggtgcccctcagggttgtgaaccgcaagcgtccagcccgggaggattgtcggggcctcaccggcccactgcagagcctggtccccagtgcagatggcgatgctgacaactgctgtgtccagatcatgggaggctacttcacgtggaccccagatggaatccccacactgtccaacatcaccattcgtatcccccgaggccagctgactatgatcgtggggcaggtgggctgcggcaagtcctcgctccttctagccgcactgggggagatgcagaaggtctcaggggctgtcttctggagcagcagccttcctgacagcgagataggagaggaccccagcccagagcgggagacagcgaccgacttggatatcaggaagagaggccccgtggcctatgcttcgcagaaaccatggctgctaaatgccactgtggaggagaacatcatctttgagagtcccttcaacaaacaacggtacaagatggtcattgaagcctgctctctgcagccagacatcgacatcctgccccatggagaccagacccagattggggaacggggcatcaacctgtctggtggtcaacgccagcgaatcagtgtggcccgagccctctaccagcacgccaacgttgtcttcttggatgaccccttctcagctctggatatccatctgagtgaccacttaatgcaggccggcatccttgagctgctccgggacgacaagaggacagtggtcttagtgacccacaagctacagtacctgccccatgcagactggatcattgccatgaaggatggcaccatccagagggagggtaccctcaaggacttccagaggtctgaatgccagctctttgagcactggaagaccctcatgaaccgacaggaccaagagctggagaaggagactgtcacagagagaaaagccacagagccaccccagggcctatctcgtgccatgtcctcgagggatggccttctgcaggatgaggaagaggaggaagaggaggcagctgagagcgaggaggatgacaacctgtcgtccatgctgcaccagcgtgctgagatcccatggcgagcctgcgccaagtacctgtcctccgccggcatcctgctcctgtcgttgctggtcttctcacagctgctcaagcacatggtcctggtggccatcgactactggctggccaagtggaccgacagcgccctgaccctgacccctgcagccaggaactgctccctcagccaggagtgcaccctcgaccagactgtctatgccatggtgttcacggtgctctgcagcctgggcattgtgctgtgcctcgtcacgtctgtcactgtggagtggacagggctgaaggtggccaagagactgcaccgcagcctgctaaaccggatcatcctagcccccatgaggttttttgagaccacgccccttgggagcatcctgaacagattttcatctgactgtaacaccatcgaccagcacatcccatccacgctggagtgcctgagccgctccaccctgctctgtgtctcagccctggccgtcatctcctatgtcacacctgtgttcctcgtggccctcttgcccctggccatcgtgtgctacttcatccagaagtacttccgggtggcgtccagggacctgcagcagctggatgacaccacccagcttccacttctctcacactttgccgaaaccgtagaaggactcaccaccatccgggccttcaggtatgaggcccggttccagcagaagcttctcgaatacacagactccaacaacattgcttccctcttcctcacagctgccaacagatggctggaagtccgaatggagtacatcggtgcatgtgtggtgctcatcgcagcggtgacctccatctccaactccctgcacagggagctctctgctggcctggtgggcctgggccttacctacgccctaatggtctccaactacctcaactggatggtgaggaacctggcagacatggagctccagctgggggctgtgaagcgcatccatgggctcctgaaaaccgaggcagagagctacgaggggctcctgggtgagaggctcagggagaggggtggggaagagtccaaggaggagtgtgtctgggttgggggccacaagggagcctggggatggggtggcactttcggatactagctgtggcccatgcctggtggctgagcccagcccggcccccagcaccatcgctgatcccaaagaactggccagaccaagggaagatccagatccagaacctgagcgtgcgctacgacagctccctgaagccggtgctgaagcacgtcaatgccctcatcgcccctggacagaagatcgggatctgcggccgcaccggcagtgggaagtcctccttctctcttgccttcttccgcatggtggacacgttcgaagggcacatcatcattgatggcattgacatcgccaaactgccgctgcacaccctgcgctcacgcctctccatcatcctgcaggaccccgtcctcttcagcggcaccatccgatttaacctggaccctgagaggaagtgctcagatagcacactgtgggaggccctggaaatcgcccagctgaagctggtggtgaaggcactgccaggaggcctcgatgccatcatcacagaaggcggggagaatttcagccagggacagaggcagctgttctgcctggcccgggccttcgtgaggaagaccagcatcttcatcatggacgaggccacggcttccattgacatggccacggaaaacatcctccaaaaggtggtgatgacagccttcgcagaccgcactgtggtcaccatcgcgcatcgagtgcacaccatcctgagtgcagacctggtgatcgtcctgaagcggggtgcc

SEQ ID NO: 10412 - DNA, 19900 bp, Homo sapiens; identical to SEQ ID NO: 1121

SEQ ID NO: 10413 - DNA, 3669 bp, Homo sapiens
actgtcgcttcagccaggctgcggagcggacggacgcgcctggtgccccggggaggggcgccaccgggggaggaggaggaggagaaggtggagaggaagagacgccccctctgcccgagacctctcaaggccctgacctcaggggccagggcactgacaggacaggagagccaagttcctccacttgggctgcccgaagaggccgcgaccctggagggccctgagcccaccgcaccaggggccccagcaccaccccgggggcctaaagcgacagtctcaggggccatcgcaaggtttccagttgcctagacaacaggcccagggtcagagcaacaatccttccagccacctgcctcaactgctgccccaggcaccagccccagtccctacgcggcagccagcccaggtgacatgccggtgctctccaggccccggccctggcgggggaacacgctgaagcgcacggccgtgctcctggccctcgcggcctatggagcccacaaagtctaccccttggtgcgccagtgcctggccccggccaggggtcttcaggcgcccgccggggagcccacgcaggaggcctccggggtcgcggcggccaaagctggcatgaaccgggtattcctgcagcggctcctgtggctcctgcggctgctgttcccccgggtcctgtgccgggagacggggctgctggccctgcactcggccgccttggtgagccgcaccttcctgtcggtgtatgtggcccgcctggacggaaggctggcccgctgcatcgtccgcaaggacccgcgggcttttggctggcagctgctgcagtggctcctcatcgccctccctgctaccttcgtcaacagtgccatccgttacctggagggccaactggccctgtcgttccgcagccgtctggtggcccacgcctaccgcctctacttctcccagcagacctactaccgggtcagcaacatggacgggcggcttcgcaaccctgaccagtctctgacggaggacgtggtggcctttgcggcctctgtggcccacctctactccaacctgaccaagccactcctggacgtggctgtgacttcctacaccctgcttcgggcggcccgctcccgtggagccggcacagcctggccctcggccatcgccggcctcgtggtgttcctcacggccaacgtgctgcgggccttctcgcccaagttcggggagctggtggcagaggaggcgcggcggaagggggagctgcgctacatgcactcgcgtgtggtggccaactcggaggagatcgccttctatgggggccatgaggtggagctggccctgctacagcgctcctaccaggacctggcctcgcagatcaacctcatccttctggaacgcctgtggtatgttatgctggagcagttcctcatgaagtatgtgtggagcgcctcgggcctgctcatggtggctgtccccatcatcactgccactggctactcagagtcagatgcagaggccgtgaagaaggcagccttggaaaagaaggaggaggagctggtgagcgagcgcacagaagccttcactattgcccgcaacctcctgacagcggctgcagatgccattgagcggatcatgtcgtcgtacaaggaggtgacggagctggctggctacacagcccgggtgcacgagatgttccaggtatttgaagatgttcagcgctgtcacttcaagaggcccagggagctagaggacgctcaggcggggtctgggaccataggccggtctggtgtccgtgtggagggccccctgaagatccgaggccaggtggtggatgtggaacaggggatcatctgcgagaacatccccatcgtcacgccctcaggagaggtggtggtggccagcctcaacatcagggtggaggaaggcatgcatctgctcatcacaggccccaatggctgcggcaagagctccctgttccggatcctgggtgggctctggcccacgtacggtggtgtgctctacaagcccccaccccagcgcatgttctacatcccgcagaggccctacatgtctgtgggctccctgcgtgaccaggtgatctacccggactcagtggaggacatgcaaaggaagggctactcggagcaggacctggaagccatcctggacgtcgtgcacctgcaccacatcctgcagcgggagggaggttgggaggctatgtgtgactggaaggacgtcctgtcgggtggcgagaagcagagaatcggcatggcccgcatgttctaccacaggcccaagtacgccctcctggatgaatgcaccagcgccgtgagcatcgacgtggaaggcaagatcttccaggcggccaaggacgcgggcattgccctgctctccatcacccaccggccctccctgtggaaataccacacacacttgctacagttcgatggggagggcggctggaagttcgagaagctggactcagctgcccgcctgagcctgacggaggagaagcagcggctggagcagcagctggcgggcattcccaagatgcagcggcgcctccaggagctctgccagatcctgggcgaggccgtggccccagcgcatgtgccggcacctagcccgcaaggccctggtggcctccagggtgcctccacctgacacaaccgtccccggcccctgccccgcccccaagctcggatcacatgaaggagacagcagcacccacccatgcacgcaccccgcccctgcatgcctggcccctcctcctagaaaacccttcccgccctcgggaaagtagatgtggagggtggcgccctgcgtaaccctcgccctgtccctcccactccctgggggcgctgttccacagtgactgggccctgtccagggcagtgagtcctctactttgctccgtggaggaagctggggtacaaggggcccagtgctggccacacagcagcgcagccgagccccaggagcccgtcaggccacagcccctggcactgcaggtggcctccctccagagactcgagtccccatgattccctcctcgtcagtctctcaaagaccccatggtccatcccctgagggtggtcagccaaggctcccgttccgtgggatgccataaaagccgcccagtgggacccacagtcacacagagcgcctcacctgcatcctctcccccacaagagccccaaagatcccacgggagaggggagagggacgcacagcactgcctgccaagcgagaatgcaggccccgccccctcggcccctcaccacctctttctacagcctaatttattggattccctattcgtagccatctccgtggccaatgtgactaccgtgccagcagcgggggcggcccagcctctgagtcccgtggggccccggctcccaccggtgccaaacccagcccctgcggccgtcaccccgccagcctacactgccagccgccaccggggcacacgggcctctgcttgccagccaggagtgcggacaccatgttcccagctcagtgccaaagaggggtcaccagggggagctgtctgcggagccagcgcctgcccgagagagaccccaccgccaccgtgtgcctttcccgggccctcagccctcgggccgggcaccacccccagtccccccagtaaaagcctccactggcaaatgcagtccttcc

SEQ ID NO: 10414 - DNA, 4081 bp, Homo sapiens
gcaacatggacgggcggcttcgcaaccctgaccagtctctgacggaggacgtggtggcctttgcggcctctgtggcccacctctactccaacctgaccaagccactcctggacgtggctgtgacttcctacaccctgcttcgggcggcccgctcccgtggagccggcacagcctggccctcggccatcgccggcctcgtggtgttcctcacggccaacgtgctgcgggccttctcgcccaagttcggggagctggtggcagaggaggcgcggcggaagggggagctgcgctacatgcactcgcgtgtggtggccaactcggaggagatcgccttctatgggggccatgaggtggggcaggttggggtgccgggcacggagggaagcgtgtggcagggaggcccgggggcaggcagccgtgagcggtggggacagtctggggcgggccggggctgatgccaaaggtgtgggcaggccatgggagagccgggctggggtgggcagggcctttgggcagccgtggactcaggcgcggcagtggagaggcaggaaggctgggtggggactgtcctgtgctggttgcctgcacgctcgaggccacttctgcttcctctcctcctcaaggaggttgtcctggccttagagctgcgatcctagcggtttgagcctcgagagctcctgcccgccccactcctgcagccagccaggaggagacgcctgccattcatgagcggggaccgagggacgcagcctgctgcctagcccctcctgggcccttgggccctttgaaggccggcgtccagcagagctggctggccaggcaggccggcattatgggcatgactcagcccaagcggaggttaatgagcagcgcccagcacagcagtgggacttggggtcaaggccacccccgcctgagcccacaggcctgcctggctaccaactggctcagctgccttcccgggcccccagaccagagatgccgggcccaggccgccactgcggcgggacacacttcctgctcctggcgtggctgtccttccaaccctgtctgtctcctggctccctggtgggccggggccggcgggccagacaggcgctgggaaaggttactccaggtcaatgctccctttatctcgcctcagcccctccccttcctcgtgcctggggttgcagctgccttgggccctgctctctgcgactcagtttcggttccccagtgcttcttgggaggaggggcacaatggcatccatcccccgaaggcctgtgtgtgctccctgggtcaggtggcctcttgccctgggaccttgtctcactggctgtgcaccagcagagaagcaggcttgtccccgaattccacggagaggggcatcccgggtgtgggccagactgcagattcagagaaaaggcccctggacttcagccaccaccctggcttccctctcctcttctcccgcatgctgggctgcagggccttggcaagcagctgcagccttgggcgaggcgcttggcacattccccgcagctacattgtcagccttggctggcacccctgccagctcccagcacgagtctggattgccagggtgcttgcttcaggaatgggagatcgggcttgcagggagctcagctgtgcaggccgacctgggtggcgggggcagaagagagatcactggttctttgaaggccttcgtccgggctagcttcaggaagtagagagattactggttctttgaagggctagcttcaggaagtagcacgttggccaagagggtttgttggccagggcaggagggcccggtgtgcattcacggcctgtctgcataggcctcggctggaaagctgtgtggggtgagaggaccctcgggtagcatgtggcccatggcagtcccactggctgatgtccccgtggacactggcctaggctcagatcagggcagaagcagctgactggctggagggcacatagcagagtattctgtcctttctgggattgccgcgaggaggcttattgaaacgcacatgcacacgatctcttgtttgagaacaaagtaaagctctcttgataagtctaagcatcatttacaagaatgtggttcttctggcagctctgccagtgtggtccaaattcccacactggttgccaccatcaggctgtatgggcttgggcaggtcactttgcctccctgggcttcagtgttctgtgtacagtgggcacgtgaatacacatgcagtgggatgtggggagaatcaaatgcagagacgtgaaagcacttggcaaacagtggcaggctaggcagctgtcatcagacggctgtggggaggcaaggctggggtgcgtgcccctggactgagcccagaaattcacaaccccttggctaccttgctgggagcacttcccaacacctcccatctcccccgcctgtctgactgctgctgccacctcttccctgcggctgtccctttccccacctgctggtgtcctgacatagtggtggccagtgcaggaagggggacagaaggacaggggaggcctacccactgctgagggagcaaggtccaggctcagcagtggggacatccactggggcgagtcctgtagggcccagctcaggagcgcatcctcctggtttcagtgggaaaatgccatgcaaatttctcaccaaaaggaagtgtgggaaagttgaggggaaagagggcgtaaataggcccagactgttgaaccgagtttttcagaaccaagagacagggtttcactgtgctgcccaggctggggtgcagtggcgccatcactgcagcttcaaactccagggctcccgcgatcctcccacctcagcctcccgagtagctgggactacaggtgtgtgccaccacacctggctaatttttttttttaattatttttggtagagacagcatctcgccgtgttggccaggctggtctccaactcctgggctcaggcaatcctcccacctcagcctctcaaagtgctgggattgcaggtgtgagctactgcactcagcccaagagcactgccttttgctgtcctgcgctgctctttgcttagtttagggggggaaattagagctgatggatgatctctccgagccaggaggagggggctggcagggagcccaaagaaatgggctcagcagaggacagaaacaaggtgactagagagggagtggagaggggacgggagccgcactgtgacatcagccagtcccttatacccccttacaccttgagtttgagacctggccccacccaatcgtaacctctggctctcggccttctgatggccaccatggcacagcgtgtgtgagtggcactgggagaccctgaccatcgcccccacgggagctgcccctgtgcatggccaggaagcctctctgtgtctgtcaccccccgcaggtggagctggccctgctacagcgctcctaccaggacctggcctcgcagatcaacctcatccttctggaacgcctgtggtatgttatgctggagcagttcctcatgaagtatgtgtggagcgcctcgggcctgctcatggtggctgtccccatcatcactgccactggctactcagagtcaggtgagacccagggctccaagaggatccaggccaggggcctgtcccccataccgctgggtgctgagctcacgagggcccaactcagccagcccgccgcccacttctgctgccggggccaccgaggccctgctgccagccttgatgctttcagaggttgagctcgccttgcccctccttgttgccttttgccctgcgcgcacctcacgccctttgttaccactcagacaagcccaggactgcaagtcaggaacactacatgtcacttctccaggcacagataccctcacccacctgtccctgtcctcaacccaactgcgacttagaggtgggagaatgtgcggagtacctggagtgagccccttcatcactccagccttggtttcctcgccctgaaacagctcttgcaccctaaggtgttttagaggagtgggaagcctgttctacctgttattttagtgataagattaaatgtttaggtttctgca

SEQ ID NO: 10415 - DNA, 1016 bp, Homo sapiens
gcaacatggacgggcggcttcgcaaccctgaccagtctctgacggaggacgtggtggcctttgcggcctctgtggcccacctctactccaacctgaccaagccactcctggacgtggctgtgacttcctacaccctgcttcgggcggcccgctcccgtggagccggcacagcctggccctcggccatcgccggcctcgtggtgttcctcacggccaacgtgctgcgggccttctcgcccaagttcggggagctggtggcagaggaggcgcggcggaagggggagctgcgctacatgcactcgcgtgtggtggccaactcggaggagatcgccttctatgggggccatgaggtggagctggccctgctacagcgctcctaccaggacctggcctcgcagatcaacctcatccttctggaacgcctgtggtatgttatgctggagcagttcctcatgaagtatgtgtggagcgcctcgggcctgctcatggtggctgtccccatcatcactgccactggctactcagagtcaggtgagacccagggctccaagaggatccaggccaggggcctgtcccccataccgctgggtgctgagctcacgagggcccaactcagccagcccgccgcccacttctgctgccggggccaccgaggccctgctgccagccttgatgctttcagaggttgagctcgccttgcccctccttgttgccttttgccctgcgcgcacctcacgccctttgttaccactcagacaagcccaggactgcaagtcaggaacactacatgtcacttctccaggcacagataccctcacccacctgtccctgtcctcaacccaactgcgacttagaggtgggagaatgtgcggagtacctggagtgagccccttcatcactccagccttggtttcctcgccctgaaacagctcttgcaccctaaggtgttttagaggagtgggaagcctgttctacctgttattttagtgataagattaaatgtttaggtttctgca

SEQ ID NO: 10416 - DNA, 5261 bp, Homo sapiens
gactgttctccacagtggctgccccattttaccttcccgccagcagtgttggagggttccaccttttcatcgtggctagcactggttatcatctcctttgtattctagccacctagtgggtgtgaggcagtatctcttggtggttttgatttgcatttccctgatgactaatgacgctgagcctcttttgatgtgttgagtggccatttgtatgtcttctttggagaaatgtctgttcacgtccttcgcccatgtgtgatcgggttatctctgtcgctgagttgtaaaagctctttgtatattctggatactgcaccctcatcagatgtgtggttcaccagtccagagttttctcccagtctgtaggttgtctttttcactgtctcgatattgtcctttggtgcacaaaagtgttgagttgaatgaggttcagttgatctgtttttctcttgttgctcatgcttttggtgtcctagtgaaggaactattgccatatccaaggtcgtgaagttttatcccattttcttctgagagtttcatactttgggccacactacacatcagcctgtgatgtgctctgggttggtttgtctgtatggtgtgaggggtccctctcctgcacatagagagaaagagagagagagctggttgccccggcaccatttgcagaagagcctcgcctttctctccagcggctcatttttgactttccgctgtctctgccctgcccctccccgccccgccacccacccctctggggctttgcagatgcagaggccgtgaagaaggcagccttggaaaagaaggaggaggagctggtgagcgagcgcacagaagccttcactattgcccgcaacctcctgacagcggctgcagatgccattgagcggatcatgtcgtcgtacaaggaggtacccctggcccagccccacccttgccatccttgccatgcttctctccctgcaactggcaggggctgagccagggtcaccctccctcaggtgacggagctggctggctacacagcccgggtgcacgagatgttccaggtatttgaagatgttcagcgctgtcacttcaagaggcccagggagctagaggacgctcaggcggggtctgggaccataggccggtctggtgtccgtgtggagggccccctgaagatccgaggtaaggctgtcccctccctatgagtgaccccgcccctgctgctgctgcaggtgctgacctgctgccccagctcctcctattcccgctccctcactcagggacctccatgtgcttctggcccatcccagtccacccaggacgggagggctgccgggcagggtctttgaggacttcggcctggtcgagctgggcccctggagggtttcctgcagagaggtgctggtccgcccgccttccttcccagacagtagctgccggccaccgtactgactcgccctttgagggcctcagcctggattattcattcaaaacaagggggatgtggtcccctcacccatgcaggacagcaagagaaagttccagtcagtgtgccagctgctggctgccacgggaggcaggtgctgcagaagggagtggcggcccagggcactgtattagacactgggggaagagttcagcttgttggaagacctggctgtgttccctagggaccctggaccacaggctgctggtcaggaaccagctggcatgctgccagggatgggaatgagggcgtgcagccaggggcacgcagactccccagaatgcagaggggtcgccaccactccctctccaccccagccccgctgtgctgtctctgcaggccaggtggtggatgtggaacaggggatcatctgcgagaacatccccatcgtcacgccctcaggagaggtggtggtggccagcctcaacatcagggtaggtccagcggggagggcgccagccacgcacatatgcaagcctcagcccttggcttcccgcctgtctgtgctggcaacagccattgtccctagatgtacgtggcaggtgggccaaggtcaaggtgagagaccaacgtgtctctgactgttcatcctggggcaacagaggcagggctcataaaagagactagtgataccaggattgaccaaggttcaccccggcgttcctggccctatcatctgatgccaactccccacactcctaagaaagccaagacccgggtgggggggctctggttcaaaccttgccgctcgacctccctcggaaggccacagcaaggaatccacagatcacctgtgtccccagccaggggtttggacagggctggggagtaatggagtgagggggagactggggtggagggacaggtagagaagtgacaaggaatcactcattcattcactcatttaaccaatgtgccctgaactctgagccgggcaccagaaacccgaggtaaatcaggagacctgcactcagggagtcttcactgtggaggggcactaaagtgttacaaagggtctccaggtagacagctgttcaagggacagtgggggtcacaagaagagtggtcagagtccctgggggtggtgggggtgggatgaagccttgcccaggagttgctgtgagcgagtgggcaggcagctgagggtagaggagtgaggggccgtgggcctgaggggcaggtcacgcaggaggaagcagagaggaggggcatgccagggaggagggggccggcacaggtggttacccctcaccgctcgcagcggcccctcctaggatgtcgggggagctgatcaccagtgagtccaaggaaggtggtttccaggctggccccgggcagcacaagcaggcaggggcagcgggcaagctcatggggcccctgcgcgcagggccacatatgctcagggagccgggtatgcgagatggggcaaggcccaggccccacccttcaggaggggacagtcaggtggcttcattagcatcctgtggctgcggtcacaaagcgttacaaactttgagtggctttcccagcagagatggcctctctcccggctcggggaatagcagtccgagaggaaggcgcaggcagggcgggcttctgccaaggaccgagaaggtgcctccgctcggggcctctgtcccagcttctgctctgctgcccatctgcgggcttccctggcttctgccacggcaggtcggcctcagcctctgtctccacacggcgctctccctctgggtgtgtccgtgtctccgtctcccctttctgtcaggacacaggtcacactgcattagggcccacccctctgcagaatgacctcatgcagacctaactcatcacgtccgcaatgaccctgtttccaaataagctcacactccgaggtagtggggattagggttcccacataggaatttcagaggacagagttccacccatgacactgcctgaggtaagctaaagaccacggcctcaagtcttcccaggagccccgtgtagcattgttgttgttaccgtgaacttcactgactccaggcccctggcctcctccctgcacacagcccgcctccagcctggccggcattttcccaaagtaggcatttcctagctccagcgaggaccatggagtcagtgaattgaggagcctgaggtccatgatgcagagcccaggggccactgtggcatctctgggccactctggcacctggggaggcagtggggtctgtactgtcagtctagagacataaagaaagtgctttttgggccgggcgtggtcgctcatgcctgtcatcccagcactttgggaggccgaggtgggcagatcgcttaagcccaggagttcaagaccagcctgggcaacatggcaaaccccgtctctacagaaatttttaaaaatacacaaataagccaagtgtggtggcggtgcctgtagttctagccacttgaaaaaaaaggctaaagtgagagggtctcttgagcccaggaggttgagcctgcagtgagccatgatcccaccactgcactccagcctgggcaacagagcaaggccccgtctcaaaaagaaaagaaagaaactgccttttgtccccagtgactcaggaggccaaggtgagagagtcgcttgaggccaagagtttgagaccagcctgagtaacatagcaagaccctgtctctaaaacaacatttaaaaattagccaggcatggtggcgtgcatctgtaggcccagctactcaggaggctgaggtgggaggatcacttgagcccaggagttggagactgcggtgagctgtgatcataccgctgcactccagcctgggcaacagagtgaggtctcgtctcttgaaaacaaagtgcctttcagggcagttccttaaagggggctgacagttgaccctgcacttggattcctggtgaagtgggagtcggatgggactgaggacggcgctggctgtgttggaacacacctactcattcagctgtggcagaataggcccttcctcttgtgctggcaccatgttctccaggcgtgtcagggcctgaggactgggccggggcttgtccattcctgtgtcctgggccaggcatttagcgagagccaaatttagctagggctgtggacgctggaccccatcccccaggccctgctgtcccttatcaagagatcaagaatggcctgcgtgctggcctcgggcattgggagcctctcaaggctggtcaggaggccatagggtacgggaaggggcctgcgctctctggcgtcagcggctgttgcccctgcaggtggaggaaggcatgcatctgctcatcacaggccccaatggctgcggcaagagctccctgttccggatcctgggtgggctctggcccacgtacggtggtgtgctctacaagcccccaccccagcgcatgttctacatcccgcagaggtaaggaagcccgtgcgcctctcctccacctcttcctgcctgtgcgctcacacatggcttcctgcagaggcccaggaagtggtgaagagtcagcacctcaggagaggacactgaggcactgtccccagagccagagacgggctgtggttcctgctccctccaaacccgcccgatccactgccctgttttggatctgtgtggggtgtgtgcacgggcggcgatgtgagcgtgtggatgcgtgtgagcgtggcatgtggacactgcctgggaggcgcagagtatcttgggggaggcagagccggcccttccctccgtggacacccagctttcccacaggccctacatgtctgtgggctccctgcgtgac

SEQ ID NO: 10417 - DNA, 668 bp, Homo sapiens
gactgttctccacagtggctgccccattttaccttcccgccagcagtgttggagggttccaccttttcatcgtggctagcactgatgcagaggccgtgaagaaggcagccttggaaaagaaggaggaggagctggtgagcgagcgcacagaagccttcactattgcccgcaacctcctgacagcggctgcagatgccattgagcggatcatgtcgtcgtacaaggaggtgacggagctggctggctacacagcccgggtgcacgagatgttccaggtatttgaagatgttcagcgctgtcacttcaagaggcccagggagctagaggacgctcaggcggggtctgggaccataggccggtctggtgtccgtgtggagggccccctgaagatccgaggccaggtggtggatgtggaacaggggatcatctgcgagaacatccccatcgtcacgccctcaggagaggtggtggtggccagcctcaacatcagggtggaggaaggcatgcatctgctcatcacaggccccaatggctgcggcaagagctccctgttccggatcctgggtgggctctggcccacgtacggtggtgtgctctacaagcccccaccccagcgcatgttctacatcccgcagaggccctacatgtctgtgggctccctgcgtgac

SEQ ID NO: 10418 - DNA, 2673 bp, Homo sapiens
ttcctgtctgccctccgcgggctccggctgccatggaggaggaagaggaggcgataggcttgctggacaaggttctggaggacgaagatgtgtttctcctggaggagtgcgagctgggaaccccgaccagccccggctcagggtcccccttcctggtggctgtgaaggtggaagcagggaaaggcctggagatgaggaagctggttctctcggggttcttggccagcgaagagatctacattaaccagctggaagccctgttgctgcccatgaaacccctgaaggccaccgccaccacctcccagcccgtgctcaccatccagcagatcgagaccatcttctacaagatccaggacatctatgagatccacaaggagttctatgacaacctgtgccccaaggtgcaacagtgggacagccaggtcaccatgggccacctcttccagaagctggccagccagctcggtgtgtacaaagcgtttgtcgataactataaagtcgctctggagacagctgagaagtgcagccagtccaacaaccagttccagaagatctcagaggaactcaaagtgaaaggtcccaaggactccaaggacagccacacgtctgtcaccatggaagctctgctctacaagcccattgaccgggtcactcggagcaccctagtcctacacgacctgctgaagcacacacctgtggaccaccccgactacccgctgctgcaggatgccctccgcatctcccagaacttcctgtccagcatcaacgaggacatcgacccccgccggactgcagtgacaacgcccaagggggagacgcgacagctggtgaaggacggcttcctggtggaagtgtcagagagctcccggaagctgcggcacgtcttcctctttacagatgtcctactgtgtgccaagctgaagaagacctctgcagggaagcaccagcagtatgactgtaagtggtacatccccctggccgacctggtgtttccatcccccgaggagtctgaggccagcccccaggtgcaccccttcccagaccatgagctggaggacatgaagatgaagatctctgccctcaagagtgaaatccagaaggagaaagccaacaaaggccagagccgggccatcgagcgcctgaagaagaagatgtttgagaatgagttcctgctgctgctcaactcccccacaatcccgttcaggatccacaatcggaatggaaagagttacctgttcctactgtcctcggactacgagaggtcagagtggagagaagcaattcagaaactacagaagaaggatctccaggcctttgtcctgagctcagtggagctccaggtgctcacaggatcctgtttcaagcttaggactgtacacaacattcctgtcaccagcaataaagacgacgatgagtctccaggactctatggcttccttcatgtcatcgtccactctgccaagggatttaagcaatcagccaacctgtactgtaccctggaggtggattccttcggctattttgtcagcaaagccaaaaccagggtgttccgggacacagcggagcccaagtgggatgaggagtttgagatcgagctggagggctcccagtccctgaggatcctgtgctatgagaagtgctatgacaagaccaaggtcaacaaggacaacaatgagatcgtggacaagatcatgggcaaaggacagatccagctggacccacaaaccgtggagaccaagaactggcacacggacgtgattgagatgaacgggatcaaagtggaattttccatgaaattcaccagccgagatatgagcctgaagaggaccccgtccaaaaagcagaccggcgtcttcggtgtgaagatcagcgtggtgacgaagcgggagcgctccaaggtgccctacatcgtccggcagtgtgtggaggaggtggagaagaggggtatcgaggaggttggcatctacaggatatcgggcgtggccacggacatccaggcgctcaaggccgtcttcgatgccaataacaaggacatcctgctgatgctgagtgacatggacatcaacgccatcgccgggacgctcaagctgtacttccgggaactgcccgagccgctcctcacggaccgactctacccagccttcatggagggcatcgccctgtcagaccctgctgccaaggaaaactgcatgatgcacctgctccgctccctgcccgaccccaacctcatcaccttcctcttcctgctggaacacttgaaaagggttgccgagaaggagcccatcaacaaaatgtcacttcacaacctggctaccgtgtttggacccacgttactgagaccctcagaagtggagagcaaagcacacctcacctcggctgcggacatctggtcccatgacgtcatggcgcaggtccaggtcctcctctactacctgcagcacccccccatttccttcgcagaactcaagcggaacacactgtacttctccaccgacgtgtagcccgaggcagggtggctgcgggcgggtggtggaaccagcccctccagcctggggtccaactcagacttgaaagactgcaatagaaaactcccaaacccagcactccagactcgagggaagccagcttccaagaactggaatgcgtacgtcttttgtgccaccttgtacaaag

SEQ ID NO: 10419 - DNA, 5289 bp, Homo sapiens
gccccgcgctcctcccggggacctggttcccggcctcctcgcccctccgcgctcgcaacttcggcctcccccggctcccgcccgctctccctcctttgttgcgcgatgagggtcgggtttcggatctgaccgagccgccgccgcgggatggagccgctcagccaccggggcctgccgcgcctgtcctggatcgacaccctctacagcaacttcagctacgggacggacgagtacgacggagaggggaatgaggagcagaaggggcccccggagggctcagagaccatgccgtacatcgatgagtcgcccaccatgtccccgcagctcagcgcccgcagccagggcgggggggatggcgtctccccgactccacctgagggactggctcctggggtggaagcagggaaaggcctggagatgaggaagctggttctctcggggttcttggccagcgaagagatctacattaaccagctggaagccctgttgctgcccatgaaacccctgaaggccaccgccaccacctcccagcccgtgctcaccatccagcagatcgagaccatcttctacaagatccaggacatctatgagatccacaaggagttctatgacaacctgtgccccaaggtgcaacagtgggacagccaggtcaccatgggccacctcttccagaagctggccagccagctcggtgtgtacaaagcgtttgtcgataactataaagtcgctctggagacagctgagaagtgcagccagtccaacaaccagttccagaagatctcagaggaactcaaagtgaaaggtcccaaggactccaaggacagccacacgtctgtcaccatggaagctctgctctacaagcccattgaccgggtcactcggagcaccctagtcctacacgacctgctgaagcacacacctgtggaccaccccgactacccgctgctgcaggatgccctccgcatctcccagaacttcctgtccagcatcaacgaggacatcgacccccgccggactgcagtgacaacgcccaagggggagacgcgacagctggtgaaggacggcttcctggtggaagtgtcagagagctcccggaagctgcggcacgtcttcctctttacagatgtcctactgtgtgccaagctgaagaagacctctgcagggaagcaccagcagtatgactgtaagtggtacatccccctggccgacctggtgtttccatcccccgaggagtctgaggccagcccccaggtgcaccccttcccagaccatgagctggaggacatgaagatgaagatctctgccctcaagagtgaaatccagaaggagaaagccaacaaaggccagagccgggccatcgagcgcctgaagaagaagatgtttgagaatgagttcctgctgctgctcaactcccccacaatcccgttcaggatccacaatcggaatggaaagagttacctgttcctactgtcctcggactacgagaggtcagagtggagagaagcaattcagaaactacagaagaaggatctccaggcctttgtcctgagctcagtggagctccaggtgctcacaggatcctgtttcaagcttaggactgtacacaacattcctgtcaccagcaataaagacgacgatgagtctccaggactctatggcttccttcatgtcatcgtccactctgccaagggatttaagcaatcagccaacctgtactgtaccctggaggtggattccttcggctattttgtcagcaaagccaaaaccagggtgttccgggacacagcggagcccaagtgggatgaggagtttgagatcgagctggagggctcccagtccctgaggatcctgtgctatgagaagtgctatgacaagaccaaggtcaacaaggacaacaatgagatcgtggacaagatcatgggcaaaggacagatccagctggacccacaaaccgtggagaccaagaactggcacacggacgtgattgagatgaacgggatcaaagtggaattttccatgaaattcaccagccgagatatgagcctgaagaggaccccgtccaaaaagcagaccggcgtcttcggtgtgaagatcagcgtggtgacgaagcgggagcgctccaaggtgccctacatcgtccggcagtgtgtggaggaggtggagaagaggggtatcgaggaggttggcatctacaggatatcgggcgtggccacggacatccaggcgctcaaggccgtcttcgatgccaataacaaggacatcctgctgatgctgagtgacatggacatcaacgccatcgccgggacgctcaagctgtacttccgggaactgcccgagccgctcctcacggaccgactctacccagccttcatggagggcatcgccctgtcagaccctgctgccaaggaaaactgcatgatgcacctgctccgctccctgcccgaccccaacctcatcaccttcctcttcctgctggaacacttgaaaagggttgccgagaaggagcccatcaacaaaatgtcacttcacaacctggctaccgtgtttggacccacgttactgagaccctcagaagtggagagcaaagcacacctcacctcggctgcggacatctggtcccatgacgtcatggcgcaggtccaggtcctcctctactacctgcagcacccccccatttccttcgcagaactcaagcggaacacactgtacttctccaccgacgtgtagcccgaggcagggtggctgcgggcgggtggtggaaccagcccctccagcctggggtccaactcagacttgaaagactgcaatagaaaactcccaaacccagcactccagactcgagggaagccagcttccaagaactggaatgcgtacgtcttttgtgccaccttgtacaaagccggctgcccagccccagcctcaccaccgcatcccacctcctgccctccatacctctagttgtgtctgatgctccgtgctgttcgggaattgttttatgtacacttgtcaggcagaaaaggtagtgaccggcccggcgtgggcacacagacagcccgctttgttctttcatttcctccagcactttctttccgcctgagtccagcccaaggccttttattttgcgctgtgtaactgctgccagcttctctcttggccctgctcccagatggcggtctcctggcagcctcccctcagtcttcctccacccgctcttccttcccagcctgcctgcatgcatgtgcacccttggtcttcgctccatcgccttgaaagctctgaagaggccctgggttgccgcggcagcagtggtctgtttgatgctgccgtttgccgctgccggcccctcctcagactccgcctttgggagcacacctgctttgccttgctgcctgtgcaaatgttggacaagcagacacactcacactcgtccccagcttagcacagagctggagcgcccatttctggaattttccgtttgggaatctccacttctggggtttacctgttcggcctcctgtctatcagtgaggcatctctgactgtttcttctactgcttttcagttcccttccctgctgttctatttcctttgagtgtaaagactcacaggtgacctgctatcgagatagccagagggtcaggagagaatgggggaggaggcggtcaggctgctgaggaaacaccacaggctgaacgggggaggaatgcacatgccacgctgggtgtcccgggtcgcggggaggcagctcagctcttaggagcaagttgtgggggcttttcaagaggggccaggcttcctggagggtgactgatgtggccgaagcaggtgtccaggcaggtaggctgcagccaggagctccctggcaccgcaggacctcgtggtactcttgccttagattttacacacactccacagccaagcactgccacggtcctccaggacctgggaagcaaaggcacaggcccacggtggccagccattgtggtgccgccccagcttctggatacagccttttgggtaaacactgggaactccagaagttgtggggagagtggggaatcagacagccgcctctaggggctgggttctgctggggcctccttgttggtgctgtaggcacccgccagggagcagggacccgacttgcagacgcattgcccggtactaggaaggagtgaggtgtgttcccaccgtacacttcccacacgagctgcggctgccagcctcgggccatcagcctaggagagcagatgcagctccaggggctcgacttatagccagttacagctccccggctcttctgtgtggcagagcgtcgtttccgggccctcagggctggggagctcagttcccattgcttgtgctcagggctgagtcttaaagaagggtttgccggccctaacgctgcagcgcgtgcgcggtgagaggccctttttgagcctgtttactcctgtggccttgggcagaacagtaaatactctgtgcacggaggaaagacatgcccaagaggaaggaagtactgaccatcggctgcctgtgagcagcttagcaaggagcccttgctccctgggaaaggcggtgaacttgagtctaaagatgcagtgcctggcccttcctaaggtccctgcctggcatccgagtgtcggtgtgtggcacagaaggctcctgcttgcttccaaagtgatggacaggaaggggcagagtgagtcacggcccagactgggcaccttcgcgtctcagcctcagggagccccacagccccaagctcgctgaggcaacgtgagaacaggctatgggaaggctgcaaaggctgagaaatgcaaaggctcatatttataaatcccacccccagagtggggagggtcaggtgccagacctggactaaactgcaccaaggaaacacccagcagggtctcctgtgagccggggaccatgcagcccgaaacctccagtcactgcgcccggcaggagtcaggagccagggactgtgcagcctggaacctccagtcactgtgcccagcagggtgggctgtgcccagcaggagtcaggctaagaaacgccaggtctgcctgttcttgctgggcaatggctgatggctgccagtttctgctgatacacaggtaggatgggacccttcatgaatatctgactttaataagttggtaaggatatatttttttgtctatgttctgtttcaacttatgtagattattataaattgatgtaaaccacgtgagaggaaaatgttaataaaaaatgcaaagccccatcatttgcacaaaactcag

SEQ ID NO: 10420 - DNA, 2213 bp, Homo sapiens
agcctcgtgcccaggcagccagccagctacaaacgtgctcctctttaggatgccagcaggctgctggctccctccctccctacccctcctccccttccccttccctcctctcctcgccacgcgcctccctcccctcccccttgctggaagagcactccggagcggctgcccgatgctggagtccgtgcggcagcatcagcaaggtggctgagtggccgggctgctggtgggcgccggggagcctggagcgatggctgcacgctcccgccgcggggacagaggctgccatggagattctcctcattattcgcttctgctgtaactgcacctatgctctgctctacaagcccattgaccgggtcactcggagcaccctagtcctacacgacctgctgaagcacacacctgtggaccaccccgactacccgctgctgcaggatgccctccgcatctcccagaacttcctgtccagcatcaacgaggacatcgacccccgccggactgcagtgacaacgcccaagggggagacgcgacagctggtgaaggacggcttcctggtggaagtgtcagagagctcccggaagctgcggcacgtcttcctctttacagatgtcctactgtgtgccaagctgaagaagacctctgcagggaagcaccagcagtatgactgtaagtggtacatccccctggccgacctggtgtttccatcccccgaggagtctgaggccagcccccaggtgcaccccttcccagaccatgagctggaggacatgaagatgaagatctctgccctcaagagtgaaatccagaaggagaaagccaacaaaggccagagccgggccatcgagcgcctgaagaagaagatgtttgagaatgagttcctgctgctgctcaactcccccacaatcccgttcaggatccacaatcggaatggaaagagttacctgttcctactgtcctcggactacgagaggtcagagtggagagaagcaattcagaaactacagaagaaggatctccaggcctttgtcctgagctcagtggagctccaggtgctcacaggatcctgtttcaagcttaggactgtacacaacattcctgtcaccagcaataaagacgacgatgagtctccaggactctatggcttccttcatgtcatcgtccactctgccaagggatttaagcaatcagccaacctgtactgtaccctggaggtggattccttcggctattttgtcagcaaagccaaaaccagggtgttccgggacacagcggagcccaagtgggatgaggagtttgagatcgagctggagggctcccagtccctgaggatcctgtgctatgagaagtgctatgacaagaccaaggtcaacaaggacaacaatgagatcgtggacaagatcatgggcaaaggacagatccagctggacccacaaaccgtggagaccaagaactggcacacggacgtgattgagatgaacgggatcaaagtggaattttccatgaaattcaccagccgagatatgagcctgaagaggaccccgtccaaaaagcagaccggcgtcttcggtgtgaagatcagcgtggtgacgaagcgggagcgctccaaggtgccctacatcgtccggcagtgtgtggaggaggtggagaagaggggtatcgaggaggttggcatctacaggatatcgggcgtggccacggacatccaggcgctcaaggccgtcttcgatgccaataacaaggacatcctgctgatgctgagtgacatggacatcaacgccatcgccgggacgctcaagctgtacttccgggaactgcccgagccgctcctcacggaccgactctacccagccttcatggagggcatcgccctgtcagaccctgctgccaaggaaaactgcatgatgcacctgctccgctccctgcccgaccccaacctcatcaccttcctcttcctgctggaacacttgaaaagggttgccgagaaggagcccatcaacaaaatgtcacttcacaacctggctaccgtgtttggacccacgttactgagaccctcagaagtggagagcaaagcacacctcacctcggctgcggacatctggtcccatgacgtcatggcgcaggtccaggtcctcctctactacctgcagcacccccccatttccttcgcagaactcaagcggaacacactgtacttctccaccgacgtgtag

SEQ ID NO: 10421 - DNA, 25778 bp, Homo sapiens
gaaagccggcgggactagggaactagcgggactggcagccgggactgagcgctccacaggcgccttctctccagcgccgcgtcccgtcccccccggcatgaccgacgtcctgccccagcccgactgcagcccgaaggcggggcgcgaacccctggcgctggaggagtcggggagcaagcgcccccccaacaccggcgcccggctctggggccgcgtgcgcaacaagctgctccgaaacaaggtgcccgcgggggctggaggttccggggggtgggggctcgggggcgctgcggggctcggggggctgcgggggctgcgggggctgatggggtcccgctcccgccccctccgtggagtcccgggacagagctggggtctgtgcgcgtccctctaagtggcttgaacttgatggcgaacgctggggccgcccccacccggaccctggcgctcgggcatctgcccctgcctcgggagaagggaggtttcttctcggcaggtggaccctgctttccactccgggagtgcaaacagcgcacggggagacgcctgcctctgggtctatgtcttgccgccctgttcagcctctacctgatccctgcatccagcgggccttgctggctgcccctttgctgaggggcgccgaccgcagcaccgtctgccgtgtgaggtttctctgtgcaggattgtggggaggggagatgctgccgggtctgggggctcgaggcttcccttcagggaccacccatctgactgtgggcccagtgcccgccgggcaccaggcgttccgtccatgtgccagggcagaccgccggtgcccctgcagccccagacctgagttgggattaaaatctgagatagaagccgactgtcctgcagctgggcaggctgcctcggggctggcttggggccctggcatcaggcacgtgaggaagagccagacccagcgcccagcgcacaggaagtgctcgataactctgcagatcaaatcaactgtccgagttagctgtctcagagtgccagtccggctggccagggctgggcccatccatcaagagagcaacaagggaggccttggccagtccgtggtggggatctgcagctcctcctgaggctcacaggacctctctgcaggctcttactgccagccggcattgaggctcctggcatcagccaggacgaagtgatcttgggctcactggcccctcgttttgtttcagctcctgccatggggcatacttgacctcccagaggtgacatcagccctggaaagtgctgggcagggcagcaacttgagctgtactgcactggcccctgtgtcaccttcagcctccctggggactgggctagcagagccctgctggccccagctgctgccagagcccctctgtgctgaggcagctgtctgtgcccggcagcgtggactcatcccctccccagcccctgctgaggccagcaggcaccagcccagagctcaccatccatccccaaacgtcagggttggcaagaaactgacctggcaggttccgggtccagcgccagccaaacagggcgcttccagtttacctgcccctttgaggaggtgcctggtgggcagggggcaacttttaaacctgaggtcccagactttcagttctttccctatgcatttgtggccggcagaactgagaagccccttcaagaattccttagctgggtttgcctctggcagtgcctggtggctccgtgtctgatggggatctctgggcaggggtggtggccaggcagacgccgggctattgagctgctgagcagttggcgtcagtgcagctcagggtggccccggccctgggctgctctgtgtgacgagcgattccatcccctaacgtgtgctgtgtgccacagtgtgtccgtgtcgtggacgcaggggtcagcgctgtggcggacggagggacgtctgccacagtgtgtccgtgtcgtggacgcaggggtcagcgctgtggtggacggagggacgtctgccacagtgtgtccgtgtcgtggacacgggtcagcgctgtggtggacggagggacgtctgccctgtgcttcccacctcactgtgcgcaggccagcgggtgagcagcagagtcaaagggccaggcctcttgctttctatcctcagccacattaacctggcattttcctgcaggagcttcacagttgggccgaggggctgggactaggcagtttcgtttcggtggggtaagggaagggtgcctggtactgcccagactggcaggagggattgcctcattaactcctcgttaactttgccctgagtgatgctgtgggtgcgagaaacaccggtggccctcctgcttccactgacctgaaggttcattaaaggctggaggcggggcgtgactcatccagggctgggattaaacaatctgttcagatggaaaggtctcatgatcagaactgagcctttaaatagtgcagggcctctggtttctgggggagaggaggcagggacactcacggaggatcctttgggtaccagcgggggtccctgtggttgggctgttcttgtcaccggaggagagttcaggggccaaagcctcattccagcccctgacttggcagtcagctttttgtgcgagtgtttagctgggagacacgtggcatctgggtttgtgggttcagccagggctctcggtattgaacttcgcgtttctacttttctttccttttccctgtttgtttttttttttttttgcctcaaatcacactcaagtagaccaggcccggtgccttcctctccctcccatccttccctcttctagattcttggttgagctttggatgggaaggggctgaattctagattctcgcttgagctttggaggggaaggggctgaaggaggaacccccccaccctgcccccgcagcatccccttgtgggagccgtgaggaggctaagagggcctgaagggaggccggtccagaagcatttgtctgtcggggaagttgaggcccttatagagcaaccaagtccaagacgctcctgacccagaccaggccagatgctggccggcggtggggactcaggctgagccggcagggtgtaaggagattgagtgcagcttcaggtgaccttgtctctgccctgaagcacagccatgtgggtctgagaatcccctacttccaaagagctcctcttaagctggacaccggcactgctgacccccacggtgagtcccgtgttctgtgatgggagctgctgcctttgcttcagagaggatcagaggtgttacctgaggaagggcggggtggagagcccctcttgggccattcggggaagcttcaggctcatgatggtcttagaagaaggtccctttcttggatcacctgatgtcaggagtccaagaccagcctggccaacatggagaagccccgtctcaactaacaatgcaaaaattagccaagtgtggtggctcacgcctgtcatcccagcactttgggaggcagaggcgggtggatcacctgaggtcaggcgttcgagaccagcctggccaacatggtgaaaccccgtgtctactaaaaatacaaaaaaaaaaaaaatagccgggcatggtggcgggcacctgtaatcccagctgctagggaggctgaggcaggagcatcgcttgaacctgggaggtggaggttgcagtgagccgagatcatgccactgcactccagcctgggcaacagagcgagactcggtcttggggtggggggaggaaagggtccctttctttgtcagcttgatcgccaccgcaggacaaccccacccctcacagagcctgtcgtttattccttcttgatggtaccaggtgtgcagaccacgtgcacaccccagaggttcactctaccactcacttggccatcgagggtacacaggtgctgggtacaagatacagatatgtcttgggctcgtctactttattttataatccagtctgggcgtcaggaaagatctcgcagccttctgcaatagaagtctggcctggcccggctgcccaccgcccttccttgtttcccggtgggaagaaagcttcatcgtgcgtcttctctgttcacacacacccccatagcgacccctcagccacagacaggggactacagtgctgcctcccccgagagctggaggcccctacaccagcccacctcttcctgggcctatgtgtgggtcctgactgcggccaggctggctgacaggttggcagtggggtcgggcgaccctccctcttttccacagcacttacccacctgccgagtgggcagacctcactgctggggcctcatgagtactctctgatctctctgccaggccagctcccaagaggcttgcttgagtccgcagagcgggaaccctggactctgagaatctgatgaaggttctggaggccactcagacacagagccaccccatgcacacactgtgtgcgacttcagagggggctgcagacatcaaggcgggaaccctgctctgagtgaacttggcaaggtgccgcttcttggtacctagggagggtagaagggcgctggtcctccccggcctccctgcaggccacagacggcttggccagccagcggtgctgggcgcggtgccccagcttttggatggctctggaccagggagaggagaacctgccaatcaagggggttcctcaaaggccaaagctgcctgagcccagtgttgctgtagtacccagaggcaatgaggccccagacattttggaaggagcccccaagcctgcaggtgtggctgggggagctgccccaggcattttggaaggagcccccaagcctgcaggtgtgagtctgggggagctgccccaggcattttggaaggagcccccaagcctgcaggtgtgagtctgggggagctgccccaggcattttggaagcgcccccaagcctgcaggtgtgagtctgggggagctgccaggtgttggccacagggcgctggtgctggagaggcctggccctctgctgagtggcctcgctcactgcccaggtggttgggaactggtcagcaggtgctgttctttgacctcgtttcccctgtgaactcatgctggggcaggaagatgtttgtgtcctgacggccccccagcaccttcgaggaacagacagtcccctgcgcctgtgacctgcctgccccaccctggggagaaacgcagcgtcagtcctgggtccagtgagccgtagacccttggccctccaggatgggccctggagaggcgggaggggcccgtggagctggtcctgggcttctgtagagaggccaggaggccccaggatccccacagagacttccccagtcccgcttcaagacagcggaaccagctcctgagccgaaatctggagggatctcctttctggaccgtgaccccagccggggctggtaccgatgaccggcacagccagagccgtgacatccacagcgcccttcccatccgatgcctggatgccgtggctgtgctcggggaggcctccggggtccccagcccctcaggctcatgtggcacaaggtgccagagaagacagggcgccaggccggtgggagtcaaggtttcccatttttctcgtctcagtctgctacttaactgctgtgtgcccgcgagtacatccctttgcctctctggttctctggtatcagctcaatgaaggagctgaacaggatgatctcctggaatccagttcatgtgatgatcttggccatgtctcaagattcctagtcctaaaccttaaaccctgagcaccctgggagagtctgtcacagggctgcacctgggccaatgccagccattcagtggacacgggagcagggggtttagtgggaacacagggcttcttgagccctgtcctgaagcagccccggcggggagccattgtcacctccttcccccatgccccagttggttcctctggcctgtgagtattgccggagcaccttccacgtgccaggcctgcaggaactagggacacagaggcgcccgagacagacgagaccctgtctgcaggaggagtccgtcaacaaatgagatccttgccggtcagatgagtgctgtgaaaaaaataaacacaactgggtaacgcagtagagagtgacggggggatgcctggcttgagaggatcacttttgaacgaagatttaaatgacaagaagaattcagccataaaaaacctgggggcagtgcattccaggccaaagaaccggcaaggtccacaccccgaggcaggtgtgctcagaggcagagggggacagtgtggggcgttacgtggggtcaggggacggcggccaggcgacgtggggccctgcggttcaggacagggcctttaatccgaatgcagtgggaagccgcggggtgttcaagcacagttctgtgacgatatgttttgaacacgtactgtacgaggcatcattcttagcctgtgacgcaactgaggtgacacttacaaggtgctgttattcacactgtttatttatttatttgtttgggttcttttgtttttgtttgctgttgttgttttgagacagagtcttgctgtgtcgcccaggctggagtgcaatggcgcgatctcggctcgctgcagcctccgcctcccgggttcaagcgattctcctgcctcagcctcctgagtagctgggattacaggtgcccgccaccacgcccggccaagttttgtatttttttttttttttttttgagacggagtctcgctgtcgcccaggctggagtgcagtggcgcaatcttggctcactgcaggctccgccccctggggttcacgccattctcctgcctcagcctcccgagtagctgggactacaggcgcccgccacctcgcccagctaattttttgtatttttagtagagacggggtttcaccgtgttagccaggctggtcttgaactcctgacctcaggtgatccacccgcctcagcttcccaaagtgctgagattacaggcgtgagtcactgcgccaggcctaaatgtgttttgaattttgttttacatttttaattttttttttttttttttttgtgggagtctcactctctcgcccaggctggagtgcagtggcaccatctcggctcactgcagcctccatctcccaggctcaagcaatcctcccacctcagcctcccaagtagctgggtctacaggcatgtaccaacatgcctggctaatttttgtattttttgtaaagacgaggtttcgttatgttgcgcaggctgatgttgaacttctggcttcagtggatccacctgcctccgcctcccacagtgctggattacaggcgggagcccccgtgcctggcccagactgtttttatatatgaggaatgaggctcagagagtgactcagatgaagtcacgtgagtggcttagccgaggggcgacgttcagaccccggccactcagcctcagcgcaggctctcacccgcggtgtcctgccttccgtggccggttggggttgggctgcgtgccccagatgggagcgtctggagacgccgggctcctgcccgtcaggcatcagtgtggtgcccgtcctggcacgctgtgcatagcaacaggcaagacggttcttctcgacgacgccactgaacgtgagactcggagcaaggcaaggcctgggaggggccgctcagagctgacctgggccctggaattgctggagcccctcacgtccccggcagcaagctccatgcccagaaagtgttctgggcccgggcagggagggtgaagctggtatcagagaaggctgttgatgctgctttttttttttttttttttttttttgagatggagtctcgctctgtcgcccaggctggagtacaatggcacaatctcggctcaccgcaacctccgcctcctgggttcaagcggttctcctgcctcagccccctgagtagctgggtttacaggcatgtgccaccacgccggggtaatttttgtatttttagtagagacagggtttctccatgttggccaggctggtctcgaactcctgacctcaggtgatcctcccacctaggcctcccacagtgctgggattacaggtgtgaaccaccgcgcccagccctgttaatgtttcttaaccactccaggtccagctcgaggcttcagagcccatggaggtctgacaggtccttggccttcccgtggcctccagcgtgaagcttcctggtcaggaccacagaaggcctctcatcttggactttgacctctgagggcgcccctttcctttcaggacagggcctccgtgttgctttggccctggcctgttccttttctcaagagggccccactgcccctgcccttgccactctggcatcctcgacctgccctgggctggggcagggccggcttcctggctggtatttgtagcccagttctgagctgaagctgaagcctccaggctgcctgcacagggaggcagtggtggggtgggctggccctgaggaagacggagccctaggccgctgggggagatgtgcctggctgtggggcctccaagagcagcccaggtttggattttgtctgcttctcctcaaggtcagccatgcccagcccgggggctaaaagcaaagtgggtgccagggcaggcagaggctctggagtggacgtggggccggcagaggcgctggagtggacgtggggccggcagaggcgctggagtggacgtggggccggcagaggcgctgtagtggacgtggggccggcagaggctctgcagtggacgtggggccggcagaggcgctggagcggacgtggggcaggcagaggctctgcagtggacgtggggccggcagaggctctggagcggacgtggggcaggcagaggtgctagaatggacgctggggaaggcaggttgctgcgggtgctaagaggctagcctgccttggacaaaagcgtcgttcagagctgctaatccccttcctcccatgaggcttggggaacttcgaagttctctggtgttggaggggaagccagccgaggccctgggacacggcatcagcccgagcctatctgtggctggcctgggtatggcaggtgggcacaccttggctgcaggacaccttggctacaagggagcctggctgaccctgcagggtgagggctggagaggcggagcctgcctggcctagcagtgtggatgccaagccatgggaagatgtgtggagagtttatggagcctggcccggtgtccccaacccagctgctgagctggaagccaggggtaggtcctggcagcccctccctctctgccctgcctctctcggagtcgctcggagcagtcacgttgacggaatcctccggcgcctcctcgagggaggagaggcagggtcttggcaactcccgtctcccccgttgccagcttgccagccccgccgtgcctctcacgcctgtggtctgccccaatgacaggccggcttcggtgtcccaaggggacccagccctgagcgtggggctgcccttgggggagggcaggggaaagccagcccgggctgccaccgtggccgctggcctgggagccccaggaaacgtgcccaccctcagacccgatgcctggctcagggcctgggctccgcggcccctccagggcaggcgtgaaatgtgcccacacagctccaccttccacgtggttccctgtccgggggccacttgcactgaggtccttctggagtcattttctgtttttttttttttttttttgagacagagtcttgctctgttgcccaggctggagtgcagtggtgctatcttggctcactgcaacccctgcctcccgggttcaagtgatttccggctaattttgtatttttagtagagatggggtttcgtcaggttggccaggctggtctcgaactcctgagctcgagtgatccgcccgcctctgcctcccagagtgctgggattacaggcatgagccaccgcgcccggctgggagtcattttctagcgttcctgtcccacctctcaggaacagatttaccacctttgttgtgaagaagcattttttttttttttctgccgccaggctggagtgcagtggcacaatctcaactccggctcactgcaacctccgcctcccgggttcaagcgattctcctgcctcagcctccccagtagctgggattacaggcacccgccaccacgcctggctaatttttgtatttttagtagagacggggtttcgccacgttggtcaggttggtctcgatctcctgaccttgtgatccgcccgcctcggcctcccaaagtgctgggatgacaggcgtgagccaccgcacctggctgaagaagcacttttttttatgaacctctgcaaccccctctgagggaaaccctcccgcattctgggatgccggggctcagagggtggagggtagaagagcgccagccgtgagaggcaggatggggcggcccccgagggcagggctgtgcctggaggcagggctcctcggggggtcagctcctgggcggtgggagtgaccgagtgggctcctgagggaagcggctttcaggaaggaggcggaggcctgggagctcttggggccctggcaaatgtggtcttcagattcccgtcgtccagtgagcccctggatcacgtcctgagtggcgtccactgaaggctgcttgggacctctgctcccccctccactgagacccccagtggccagttctaagtcccacctgccttgggcagggccaccacaggccccttactgtggattaaagggccctgggtgagggcttgtgggaggggaggtggtggaaaccatctccgaagaccttggggcgagctgcgtgctggagtggagagtgtggcccagcaggcaggagcactgggttggaatgggggctctgccacctccgagggagcaggagtggagaccggagggagcgtgcccctgaatccgagcacggggagctggccgggagcagccctccgggcagaggcaggagaaatggggtcacctgccccagggggtgagaggtgagccgagaggaagggctgagaccctcaggggcatccccaggatgttcctgaaactcagccctggaggacgctcaggtgtgcgtggagcaccctctgccctggagcctcaaatcctctccccgctgcggggccactttgctgattcctgccccaaacatgaggtcacttcggtccagaaaggcgaggcgacctccaccagccacctacgggattcttggcagagaatccacgctcaccttcgggtcttcactcctgctccctcggaggtgacggagccccatttcaacccggtgcccctgcctgctgggttttcgccgcaggggacctggtcgtctcctggacatgagcccccagcgccagcgtttctctttgggagaggcctgaatgcgcagtcatgatttgaccaggcgaagtgcccagacaaagagaaaacagtcggccggatgcaggggctcacgcctggaatcccagcactttgggaggccgaggcgggtggatcacctgaggtcaggagttggagaccagcctggccaacacggtgaaaccccgtctctactaaaaatacaaaaattagccgggcgtggtggctcgtgcctgtagccccagctactcgggaggctgaggcaggagaatcgctcgaacccgaaggtggaggttgcagtgagctgagatcgcgccactgcactccagcctgggcgacagagtgcgactccgtctcaaaaaaaaaaaagaaggaaatagttgagctgctctcagtgaccatgtacggcccagtcgtcgacccctggcccagtcgttcgtccgccttttggctccacgatgttttgcagcctgtttctgtctcctgcctgtggcccaccttggggaggccccagtgctcgtgtgcccctggtggtcttcccagcctgacccttcacgagctccctctgtctccctgcttcaggtgatcagacatcccccaagtacctgctcccctgggcccatggaaggcacctgtctgctgggaccagagggtgagcagtcaggtgtcccatccaccaacgtcccaggggccagcccctccaccccggtgctaatctcatcaggaaatagcacagtccacatttcccaggagttataaatagccagcgcagttgcgggcagcagcgtttctctggaaaatgtacgctgtgcctctccctccctcctctgtgtttaaatgatatcctgaaatagacttggtttctggaggctgatagcctcctgggaaacagagcgtcgttgtcagggcaccgtggggccaggcaggcctctctgagcggataccagggccacacctgcagcaggcaccagggccacacctgcagcagataccagggccacacctgcagcaggcaccaggaagatgtcagggcttgaggggcttacagcttaggaaagtgcccctggcccaggcctggcctcagaaggggctggagtgtgtgagacagcagcaagtgtcgcctgggaggctgcagagggtagatcttagtggagcaggaaggcagagaggacccaaagtttcccactgtgacctggggctctccgagaaggctctctggaggaggcggggcgagaactgggccttagcatcaggaggtgcagtcctgggtcagatgtgcccaggttgaacctggcagctggagcggaagtgatgggcacgaggcagcgggagggctgtactgggggtggcctcccagcaccaggtctgcccaccgggtcgggacacacaccaggaggcccgatgttgcctttctgaggaagcagcagttacagcagctgcgggtcatggacttcacacattctgcagtttcagcagagagggtgctgggggccttgattttgaaccccagctctgacttcctaggtgtgcactgggtaaattcctcactctcgttaagctgcagcatcctcatctgtgagatgggagcggctatgagagcttaaaccgcatatgtctgctatcatgatcatgaacgcagatgctgtgtgtagaggattcatcagtgtcagacttgcaggaagagctcgagataagtccgttgctctcactcttccataacagccctgtgagtcaggtgtggatgcctccatgaggaaattgaagttcacggaggtgaaaggccttgcccgagtgcgcacggttgaatgggagactcagatcagcctgcctccaaatcctgcacactccccccgaccaggttgtgtccaggtccccctgagacttgggaagggaccattggctcagcttcctgcagaagctgccaggaggcacccagtcgtgggaagctggggcggaggaggggctgtgggtgaatcggaccaggggccatggaattggcctgaggcttatgctgatgtgtggagagacctgcctcaagaaggggtggtctcaaaacatcgaactgcgccccataaatacatacaactgcaatgtgtcaattaaaaaataagggcccgggccaggcgtggtggctcacgcccgtaatcccagcactttgggaggccgaggtgggcgaatcacgaggtcaggagatcaagaccatcctggctaacacggtgaaaccccgtctctactaaaaatacaaaaaattagccgggggtggtggcgggcgcctgtagtcccagctactcaggaggctgaggcaggagaatggcgtgaacccgggaggcggagcttgcagtgagccaggatcgcgccacagcactccagcctgggcgacagagcaagactccgtctcaaaaataaataaataaataaaaaataagggcccacacagtggtacatgcctgtaatgccagctcttcaggaggctgaggcaggaggatcactgaagcccagggcaacatagcagcctggacggcacagtgagaccctgtctctagaaaaataaatacaggccgagtgcggtggctcacgcctgtcatcccagcactttgggaggccaaggtgggcggaccacctgaggtctggagttcaagaccagcctgggcaacatggtgaaaccccatctctactaaaaataaaaaaattggccaggcatggtggctcacacttgtaatcccagcactttgggaggccaaggtgggtgggtcatttgaggtcaggagttcgagaccagcctggccaacatggtgaaaccctgtctctactaaaaatacaaaaattagccgggtgtgatggtgcgcacctgtagtcccagctaattgggaggctgaggcagaagaatcggttgaacctgggagacgggttgcagtcagccgagatcacaccactgcactccagcctgggcaacaagagtgaaactctgtctcaaaaaaaaaaaaaaaaaaaaaagagggcatggccgctccagaatgtttcttccaagggtagcatctcagttgacaaagagcatttgattcctccaccctgtgtggctactgctgggggacagagctggggacagacccaggcccggctccgtgtccagacgagatgaaggaactacgagggacagcctgtgtgatccaggagggtttgcaaagaacagaagcagcttagaggggagagaggtttcgggaaagtaaggccagagctggggcttcctttgagaccctgtaggacccctgcctccagccgggctggtgatggcctcacgcttcccgtgtgtgaagaggtgcccggagcagtggttctccctgaggggcacttggttctctgcacacacccaacttctgtctcctgttctgggttccatcccttctctgggcagggcgaacccagtgcagacccagaccccgtcggaggcttgggtaccacctgcccccagccggtgtgtgggtgatagatgtgggaaggacctacatcgagctgcaggaagcccaaggctgacccagatccagtttcccttccgtgatgacagtggcctgttatagcaactgcgttcaaaccgtggcacgcacacctcagagtgcacagagacgttctgagggcgacgtgggcaggagagttttcaggaaatcagtttgcagattctcagctgccataggtgctattgccagaaagccatctgcctgagagccagcatctcgccatcctgtcctctgcagaggagaggcctgaggctggctgtcggggcttggcccggggtgcgcagacctcctgggtggggaacagaggggcttttagaaatgttggggtaggggccaggcatggtgggtcacacctgtaatcccagcactttgggaggccgaggcaggtggatcgcctgaggtcaggagctcgagaccagcctggccaacatggtgaaaccccatctccactacaaataaaaaattagctgggcgtggtggcaggcacctgtaatcccagctactcgggaggctgaggcaggagaatcacttgaacccgggaggtggagcttgcagtgagccgagactgcaccactgcactccagcctgggcgacagagcgagactccgtctcaaaaaaaaaaaaaaaaagaaacgttggggtcagtgttcagaaagtaaaagactctagtggccacttagaacctttcaaaagtcaggtggtatccagttctttgccttccacaaaactgatggaggactcaattttcaactgagagatcatttcaagtaattttcagtaataggtatatatgcgatttaaggcggatagcatggagagaggttaaagaatggtgtaacgcggctgtgataaaactcttttcgacctcatctacttctttatgtgaacaaaatgtttcattgttcacatatttcttgttcattttagagacatggtcctacattgcccaggctggtctcgaactcctgggctcaagtggtcctgtggctgggagccacagcacctgcacatctttacaacaaaaccagaaacatgaaccaaattgatgctgagcctcgtttcactctagcaaaaaataataccctatagatacgcgaactaaagcaaaaaatgttccgcccatctcattgagagagcattccaccaaaaagttactctgctacttaatatttattaaaatgtataatgaggccaggcgcggtggctcacgcctgtaatcccagcactttgggagaccgaggcgggtggatcacctgaggtcgggagttcgagatcagcctgaccaacatggagaaaccccatctctactaaaaatacaaaaaattagccgggtgtggttgtgtgtgtctgtaattccagctactcgggaggctgaggcaggagaatcgcttgaacccaggaggcggaggttgctgtgagccaagatcgcaccattgcactccggcctggacaataagagcgaaactctgtctcaaaaaaataaataaaatgtatataatgtgtcggcttactttttttttttttttcttgagacagggtctcactctgtcgccaggctggagtgcagtggtgtgatcttggctcaatgcaacctccacctcctgggttcaagcgattcttccatctcagcctcccaagtagtagcttggactacagtgcccgccaccacacccggctcacttttgtatttttagtagagacagggttttgtcatgttggccaggctggtctcgaattcctgacctcaggtgatccaccagcctcagcctcccaaagtgctgggattacaggcgtgagccaccgtgcctggctgtctttttaattatgtactgccaatcatggtactaactaatcctgaatatattttgaatatttggagccttgtggtctctggaaatttttgttttcaatgtatacagattttttttgtggaagcaaaatgtaatggtgaataaaggacttgaaaatataaaaatataaactaggacaacattctttaggagaaatggaatagaaacaaattcaaggagagaagatccaggagctctgtgagggaaagaagagcttgtttgtgtagttttttgttgttgttgttttttttgagacggagtctcactctgtcgcccaggctggagtgcagtggtgtgatctccgctcactgcaacctccacctactgggttcatgccattctcctgcctcagcctccccagcagctgggactacaggcgcccaccaccgcgcccggctaattttttgtatttttttttttttagtagagacggggtttcaccgtgttagccaggatggtctcgatctcctgacctcgtgatccgcctccctcggcctcccaaagtgctgggattacaggcatgagccaccgtgcctggcctgttttcttaatattgaattttgagagttttatataataagccctgaaattgggtaatattagccctatagctgtgttctttttcaacattgtttagatgttttttctttttttttgagacggagtctcgctctgtcgcccaggctggagtgcagtggcgcgatctcggctcactgcaagctctgcctcccgggttcacgctattctcctgcctcagcctcccaagtagctgggactacaggcgcccgccaccacgcccggctaattttttgtatttttagtagagacggggtttcaccgtgttagccaggatggtctcgatctcctgagctcgtgatctgcctgccttggcctctcaaagtgctgggattacaggcgtgagccgccacgcctggcctcgtgtagtttttaaatggatgagtgtgggtatcacgtcgctggggtatttagatcccactgaatccatgagaaggaatgatgtcacacttttattttaggatggcaatattgacatgattttggaaatcatactctttgcaactatttaaacttggaaatgttcagattttgacttcagaaagtgccagggagcgcacagttgctcagaattagttcgcaggtgcacaggcagacgggcgcgaaggcccccgagttacagaaacagaacgtggaacagtcctgtgtgagggttgcctctgacctcccctggggtccgcacctccctgggctccagcccgagcctggggacttcccctgtggaggatttgcttatttgggagccaatggcttgacccaagttttctccctgaatcttcccagcaatcccagggaggcaggttctgttgcagatggaataactgaggcttagtgagtttaaaacttgccaggattcaaacccaggcagcctcctgtgcgcgggctcctgactcttcaacacctccacgtggatgggctggttccctcctgatggacttgagcgcctcctaatcaggtgcttaccttttgtgagcctcagtttctgcatctgtgaaatggggtaataatacccatgtcccgggctggcagccaggagtgcctaacagggtgtgccctgcctcccccacggtgggtaacagagtgtgccctgcctcccccacggcgggtaacagggtgtgccctgcctcccccacggcgggtaacagggtgtgccctgcctcccccacggcggccacaggggcctgggggctagggtccccccaaagggttgatttccaggtaaacatcagcttatcccagctgctcacttccgccttcctgactgtgtagctggctctgagcagtgctgacccacggggagatctctggcttggcctccgagctggcacctctctcacccacattctctctctgcagctggacccacaaaccgtggagaccaagaactggcacacggacgtgattgagatgaacggggtgagccggggatgggaatgatcagtggcgtgagccgggaggtggaacgtctgtgcagcaggtgggcagcccggccctgtggctgctcctggggccgctgtgccgcctcgacctccccgcagcccagccccctctcccctcctgcccacaccctgcccgctgctgtcctgcaggtgttgtgttgagggagacctgggtgtgagctagccctcatttgcagtcttggggaggggacccctgtgttttgggggcattcctcgggcactcacaccctggggaatctttacctgcctcaccccccaaccagatcaaagtggaattttccatgaaattcaccagccgagatatgagcctgaagaggaccccgtccaaaaagcagaccggcgtcttcggtgtgaagatcagcgtggtgacgaagtaggtgctgcctcgggtctcccagtcctggcgtcggtgccccgggtcccccccagcccgggccccccagccctccccgccggtgcccatcctggcacctaatcagttaccccccgctcggcggtggcagatggccggtgtggatctagagtggccgcagaggcgctcacaggacacttcagaagcacgcgagccagcacctaaacgctggaaggtctcttgtgagatcccagatcgtctgctcctcgtaacaagcgggaagctctgtcagccgggggcctacgtttgggctcggcaccaacggggactggcggcccctcgggaaagggcacgtgtcccccggttcaccaccaccctggccccttgtctcaggcctgacccacctcctcatgtgggctgcctgctgggcctcctacaagcatctgaatctgggggacgttctttccctagagtctcggccttaccttcccaagttcccaaggcttctcctgcccacgtccgtcgatgccccttcggcaggcctcgggtgggctggctggggtggggtgcggtggcctctttctctgccctgcccctgcccccgccccagctctccatcccaaatgctagaagctctccagggtgtgtgtgtgctgggtgggggttgctacgggagagctgtcgtgggggctgccctccacccatcctcacgctccaccccaggcgggagcgctccaaggtgccctacatcgtccggcagtgtgtggaggaggtggagaagaggggtatcgaggaggttggcatctacaggatatcgggcgtggccacggacatccaggcgctcaaggccgtcttcgatgccagtgagtctgggaggcccagccggggcaggtgtggctgtgtctgagcaggctggtgggatggacaggagagctcgggggaaccaggagcctccctggagaggaggcttgctctgcttcagagtccccgtggcaagtgctttctcttgtaatcccctcccctccaatctcttgtcccttgctgcaggtaagcaactgcagaaactcacaagggccgactcacttgcccaggatgacccaacttgtaggttttggttctggacttaaaactcagatctgactccagtgtctttcttgctagttcctgggtgcctggtgagccgcagggaaagagctttgagcctgcacctgctgtctccagggccccaggtcccctctggggcagtgctgcctctgcgtgaagcccaccatggtgaggcctgacctttctggtttctcctccctgctcctgctggttcaggtgcagcagccacataccccactgtcaagaaacctgcactggccaggcagggatgaatccgtggggagcctggagtggaggacggggtggggcctgggaactggccggcgttggtgcctctgtgcagcctagaagctgaggctttgtcggaacatgcttttacgtgtgaaaagtgtgcaatgccttccagagaggggcttagcgatggagaggttccagtcggaaggaagctgcaggccacatggtatgaatgtggctctgaactctgggtgatggatttcactccccaaacaccctttcccaagcagccacagcagatggcccccaggctatctctccctgttcccccaaccccgacccacagagccgagtcacagacacctgtgggccctctctacatcctgctcttccaggggagaccagaaccagagctggagtgggtgggggctgtgtcaggatgggtcgggggtggaacggggctgctggcccagctaaggctgcctgacctcggccccacccctgcagataacaaggacatcctgctgatgctgagtgacatggacatcaacgccatcgccgggacgctcaagctgtacttccgggaactgcccgagccgctcctcacggaccgactctacccagccttcatggagggcatcggtgaggccctgagggctcctaggactgggctgggccagactgagccaggactccctgcccggagaagtaaccagcaggagaaatatctgtggcttcctttgctggctgaccttcccagtgcactggggcctgtggctgaggggtccgagggtgaggtgtggcctgctgggacctggtgcagacactgggccctttctcgcctgcctcttgcccctgatgtccccatgggcagccccttctgcttcctatttggacgttggcctcttgcttggaagctcgagcatccagggaagactgccctgaggtgagtggccagaagccagcatcccagaaccaaggaggaggctggcttaagccatagggcactcgagatgggttgtgctgagccttccagcgggaccacacaccgtcccgtcacctctgcggagggccccggccagcaggccttccgcctccacccacctgggccaaacccagccccaaggaatcccttcagccttctctgctcctggggcagactggagcttcagcccccacggaaggctgcttgcacccacgctccagcagcagaaggggtggagaaagagaatccaccgctggcaggatatgtccctactggcttaaccttagccacacagaccagggggtgtcctgttacgagacaggggatgccccagcacccaaggcctatgcagtcagctgcaggaagggggtctgctcccaccagccggcctcctggctgagttaccagtcgtggtggggcctcctggaggaagcagctgctgacagcccacccagacaccaggccctcccctgtggggtctgctccccaaaggcctggaagcctgggctctctcccgcaggggcccacagcctcacgaccacaggggccctggcggggagccccaggagccaaacgccacactggcccttctctcccacagccctgtcagaccctgctgccaaggaaaactgcatgatgcacctgctccgctccctgcccgaccccaacctcatcaccttcctcttcctgctggaacacttgaaaaggtaacggggagcggccccaaccccacctcctcagtccctcctcatgaaaaggtaacggggaggggccccaaccccacctcctcagtccctcctcgtgaaaaggtaacggggagtggccccaaccccacctcctcagtccctcctcgtgggcgctggcctccatcgggctgtctgtggggagtgagagtttgctttccaagttcttgcactcatgtttttctgttttgagaaatatttgggtcccgtaaccagtagtaacctcaaatattgaccatagaatgctcagaatggcagggtgagagcccaggactacaggcaggttttataatcagtgggtcccaacctactggtggttcattcaacgaatgtagccatttctagatgcagtggggggtggacagcagtggggggtggacagcagtggggggtggacagcagtggggaatggacagtagtggggatggacagcagtgggggaatggacagcagtggggatggacagcagtgggggacagacagcaggaggatacattgtaagccttgatgcaggtgctgcttttcagttacatagagacgtgtggactgtgttacagcatgggttgtattgtgggccacagtcaaaaaaggtgaaacccactggtcttggcccacacctcactagacatagggaaactgagtccccacaccaggcggagacttgcttgggttagtagcagacctgtccttagagccctcaacttccagatcctaaattcagacccttcttgccttcccaccaccctttctagtcaggtccaaccaagagtggctaaagttggttgtacttgtagcaaagttcagaggtcctcaggcttgcgtggggaggtggtccctgggcgtcccttaaacccacctgcacgccaggaccggggagccccctcagactgctctgcggaacaattcttccctgagctcagccccagctcagggccaggccccccgctgcagctcagccacgccaggctcgggagagccagtggagacctggacgcgcccggggctggtgtcttgtttttcccatcatgaaacatttttcctctggtttggccaggactagagccccaaccaattccgaaagcatttggcaagccttgtggggaggagtgggaagggaaaattcattcggcttccaccctgggaactgggcacagtctgttcccacatctgggcccctggctggaccgtgtgcgcgcgtgtggtgaggggctggccccgctgcacagctgcctgttggcatcacagtgtttgtttgcctgtttccaaagcaggcgcagccacagctcctgcctggagggtgggaatgatggtattgagggtgagaggcgctgcttagggtgggtgggtctcagcccagaaacattttttgagactgaaggagaaccagaggccctctgatatgtttgctgaccctgggcctgcctggacaccagccctgatggcagctcctgctgttaccccagggaagcatcgcagagcatctggcctgttgagtaagagaagcaggagaggatccagagggaggacaatcctgggtcccacgaggcagacggagaggcataggaggcagccctgggtcccatgaggcagacccttccggagaggcacaagaggaagccctgggtcccacgaggccgacctttccggacaggcacggggggacagtccccgggctcatctggaagtagggctgctcctgccccagcacagctggcagagccccgggtctagctagtgactcctgctgggctccaggccctgcctgcctttctcccctgccccacccaccttaactcttcttttgggccacttagcacatgagaaagcaacagagcggtaggtcctggaggcagctaccggggttcaaatcccagctctaccagttgctggctgtgtgaccttgggcaagtcacttaacccctctgtacttcggtttcttcatctacacgatgggggtgacgataatcatatttacctcaaaggactgcggcgagtgtgagttgttccagggagttttcagaacagtatctgctctcaggcaagggagctggagttggcatctgtgggctccctggctctggcagttcaccatcagttcagggggacccagcagctggagatgttagcacagaacactggcacatggctggggccctgctctcctggatgagtccccttcccccgggggaggtccccactcctaggagacagagacgaggtgaccccttccaggagtccttcaggagttcccacagcgaaggccaagggtcctggagctccgagtggctgctgaggaagggcttctttcctccccatcttctccttcttagggttgccgagaaggagcccatcaacaaaatgtcacttcacaacctggctaccgtgtttggacccacgttactgagaccctcagaagtggagagcaaagcacacctcacctcggctgcggacatctggtcccatgacgtcatggcgcaggtaccctggcaccgcccgggcccgtggctggcggagggtgacggtcccatgacgtcatggcgcaggtaccctggcaccgcccgggcccgtggctggcggagggtgacggtcccatgacgtcatggcgcaggtaccctggcaccgcccgggcccgtggctggcggagggtgacggtcccatgacgtcatggcgtaggtaccctggcaccgcccgggcccgtggctggcggagggtgacggtcccatgacgtcatggcgcaggtaccctggcaccgcccgggcccgtggctggcggagggtgacggtcccatgacgtcatggcgcaggtaccctggcaccgcccgggcccgtggctggcggagggtgacggtcccatgacgtcatggcgcaggtaccctggcaccgcccgggcccgtggctggcggagggtgagaccagccccttaggaggagagagaacagctcagagtccccacacctcttccctcgtgggaagctgggttgatgggctatggggtgtcaccagggaggcaggactgtagacacttctgcccctcccaggccaaaacaaacatgtgagcctagaccagggcccagagatgctggctgcattctcaggagggcctcagtctcagaaagcaagcccaggggtggggagatgctgggcccttgtcctcatgggtggaagctctgaggttgcttccaagggcgggaggcttccctgggattcctgcaagacccagagcaggggccggactgtggccgcctcaggacagagcagaagcttatggccaggttggggaagtggccctaggcccccgaccctctgccccgtagcaccttccacggctgcagaaaggcaaacacacctgggctccccaggaaggggcggtggccggagccagtctagggagtgggaggggcaacacaggctggagtcagcaaggacgaggcctaggacagggagcccagcctccgccttcctgtctccccacaggtccaggtcctcctctactacctgcagcacccccccatttccttcgcagaactcaagcggaacacactgtacttctccaccgacgtgtagcccgaggcagggtggctgc

SEQ ID NO: 10422 - DNA, 1049 bp, Homo sapiens
gaaagccggcgggactagggaactagcgggactggcagccgggactgagcgctccacaggcgccttctctccagcgccgcgtcccgtcccccccggcatgaccgacgtcctgccccagcccgactgcagcccgaaggcggggcgcgaacccctggcgctggaggagtcggggagcaagcgcccccccaacaccggcgcccggctctggggccgcgtgcgcaacaagctgctccgaaacaagctggacccacaaaccgtggagaccaagaactggcacacggacgtgattgagatgaacgggatcaaagtggaattttccatgaaattcaccagccgagatatgagcctgaagaggaccccgtccaaaaagcagaccggcgtcttcggtgtgaagatcagcgtggtgacgaagcgggagcgctccaaggtgccctacatcgtccggcagtgtgtggaggaggtggagaagaggggtatcgaggaggttggcatctacaggatatcgggcgtggccacggacatccaggcgctcaaggccgtcttcgatgccaataacaaggacatcctgctgatgctgagtgacatggacatcaacgccatcgccgggacgctcaagctgtacttccgggaactgcccgagccgctcctcacggaccgactctacccagccttcatggagggcatcgccctgtcagaccctgctgccaaggaaaactgcatgatgcacctgctccgctccctgcccgaccccaacctcatcaccttcctcttcctgctggaacacttgaaaagggttgccgagaaggagcccatcaacaaaatgtcacttcacaacctggctaccgtgtttggacccacgttactgagaccctcagaagtggagagcaaagcacacctcacctcggctgcggacatctggtcccatgacgtcatggcgcaggtccaggtcctcctctactacctgcagcacccccccatttccttcgcagaactcaagcggaacacactgtacttctccaccgacgtgtagcccgaggcagggtggctgc

SEQ ID NO: 10423 - DNA, 5595 bp, Homo sapiens
ggactgcagagggaacttgccttgaagaggcctggtccttaaagagacacagcacacacggcccgaccggcagccccagagcagaggctccactgatggcaggcgcccctggctaggctctgaggttcctttgccctcgccttgctgaatggtgagccgctgcctctcggagcccgtctccttgacagcctgccctcggctcctgcagccactcctgggcctgatggggacagggccagcctggtgggtggtgtcagaggtcctggcagagcagcgtaggcctgggatgcgtctgcagaattctggctgaacgagcgaggagcacggccagcttcggggccgtcgtgaccacaggagggcagagggccagcccgtgagctctgaccccagctggacgtgctcttgtttcccttggggctaaggagattggagccactgaactgaatctctgggttttggagacttagagaatccattggactcttctgctggcgtctttctgaatgctgatggggacttggtgacttcagctacgggacggacgagtacgacggagaggggaatgaggagcagaaggggcccccggagggctcagagaccatgccgtacatcgatgagtcgcccaccatgtccccgcagctcagcgcccgcagccagggcgggggggatggcgtctccccgactccacctgagggactggctcctggggtggaagcagggaaaggcctggagatgaggaagctggttctctcggggttcttggccagcgaagagatctacattaaccagctggaagccctgttgctgcccatgaaacccctgaaggccaccgccaccacctcccagcccgtgctcaccatccagcagatcgagaccatcttctacaagatccaggacatctatgagatccacaaggagttctatgacaacctgtgccccaaggtgcaacagtgggacagccaggtcaccatgggccacctcttccagaagctggccagccagctcggtgtgtacaaagcgtttgtcgataactataaagtcgctctggagacagctgagaagtgcagccagtccaacaaccagttccagaagatctcagaggaactcaaagtgaaaggtcccaaggactccaaggacagccacacgtctgtcaccatggaagctctgctctacaagcccattgaccgggtcactcggagcaccctagtcctacacgacctgctgaagcacacacctgtggaccaccccgactacccgctgctgcaggatgccctccgcatctcccagaacttcctgtccagcatcaacgaggacatcgacccccgccggactgcagtgacaacgcccaagggggagacgcgacagctggtgaaggacggcttcctggtggaagtgtcagagagctcccggaagctgcggcacgtcttcctctttacagatgtcctactgtgtgccaagctgaagaagacctctgcagggaagcaccagcagtatgactgtaagtggtacatccccctggccgacctggtgtttccatcccccgaggagtctgaggccagcccccaggtgcaccccttcccagaccatgagctggaggacatgaagatgaagatctctgccctcaagagtgaaatccagaaggagaaagccaacaaaggccagagccgggccatcgagcgcctgaagaagaagatgtttgagaatgagttcctgctgctgctcaactcccccacaatcccgttcaggatccacaatcggaatggaaagagttacctgttcctactgtcctcggactacgagaggtcagagtggagagaagcaattcagaaactacagaagaaggatctccaggcctttgtcctgagctcagtggagctccaggtgctcacaggatcctgtttcaagcttaggactgtacacaacattcctgtcaccagcaataaagacgacgatgagtctccaggactctatggcttccttcatgtcatcgtccactctgccaagggatttaagcaatcagccaacctgtactgtaccctggaggtggattccttcggctattttgtcagcaaagccaaaaccagggtgttccgggacacagcggagcccaagtgggatgaggagtttgagatcgagctggagggctcccagtccctgaggatcctgtgctatgagaagtgctatgacaagaccaaggtcaacaaggacaacaatgagatcgtggacaagatcatgggcaaaggacagatccagctggacccacaaaccgtggagaccaagaactggcacacggacgtgattgagatgaacgggatcaaagtggaattttccatgaaattcaccagccgagatatgagcctgaagaggaccccgtccaaaaagcagaccggcgtcttcggtgtgaagatcagcgtggtgacgaagcgggagcgctccaaggtgccctacatcgtccggcagtgtgtggaggaggtggagaagaggggtatcgaggaggttggcatctacaggatatcgggcgtggccacggacatccaggcgctcaaggccgtcttcgatgccaataacaaggacatcctgctgatgctgagtgacatggacatcaacgccatcgccgggacgctcaagctgtacttccgggaactgcccgagccgctcctcacggaccgactctacccagccttcatggagggcatcgccctgtcagaccctgctgccaaggaaaactgcatgatgcacctgctccgctccctgcccgaccccaacctcatcaccttcctcttcctgctggaacacttgaaaagggttgccgagaaggagcccatcaacaaaatgtcacttcacaacctggctaccgtgtttggacccacgttactgagaccctcagaagtggagagcaaagcacacctcacctcggctgcggacatctggtcccatgacgtcatggcgcaggtccaggtcctcctctactacctgcagcacccccccatttccttcgcagaactcaagcggaacacactgtacttctccaccgacgtgtagcccgaggcagggtggctgcgggcgggtggtggaaccagcccctccagcctggggtccaactcagacttgaaagactgcaatagaaaactcccaaacccagcactccagactcgagggaagccagcttccaagaactggaatgcgtacgtcttttgtgccaccttgtacaaagccggctgcccagccccagcctcaccaccgcatcccacctcctgccctccatacctctagttgtgtctgatgctccgtgctgttcgggaattgttttatgtacacttgtcaggcagaaaaggtagtgaccggcccggcgtgggcacacagacagcccgctttgttctttcatttcctccagcactttctttccgcctgagtccagcccaaggccttttattttgcgctgtgtaactgctgccagcttctctcttggccctgctcccagatggcggtctcctggcagcctcccctcagtcttcctccacccgctcttccttcccagcctgcctgcatgcatgtgcacccttggtcttcgctccatcgccttgaaagctctgaagaggccctgggttgccgcggcagcagtggtctgtttgatgctgccgtttgccgctgccggcccctcctcagactccgcctttgggagcacacctgctttgccttgctgcctgtgcaaatgttggacaagcagacacactcacactcgtccccagcttagcacagagctggagcgcccatttctggaattttccgtttgggaatctccacttctggggtttacctgttcggcctcctgtctatcagtgaggcatctctgactgtttcttctactgcttttcagttcccttccctgctgttctatttcctttgagtgtaaagactcacaggtgacctgctatcgagatagccagagggtcaggagagaatgggggaggaggcggtcaggctgctgaggaaacaccacaggctgaacgggggaggaatgcacatgccacgctgggtgtcccgggtcgcggggaggcagctcagctcttaggagcaagttgtgggggcttttcaagaggggccaggcttcctggagggtgactgatgtggccgaagcaggtgtccaggcaggtaggctgcagccaggagctccctggcaccgcaggacctcgtggtactcttgccttagattttacacacactccacagccaagcactgccacggtcctccaggacctgggaagcaaaggcacaggcccacggtggccagccattgtggtgccgccccagcttctggatacagccttttgggtaaacactgggaactccagaagttgtggggagagtggggaatcagacagccgcctctaggggctgggttctgctggggcctccttgttggtgctgtaggcacccgccagggagcagggacccgacttgcagacgcattgcccggtactaggaaggagtgaggtgtgttcccaccgtacacttcccacacgagctgcggctgccagcctcgggccatcagcctaggagagcagatgcagctccaggggctcgacttatagccagttacagctccccggctcttctgtgtggcagagcgtcgtttccgggccctcagggctggggagctcagttcccattgcttgtgctcagggctgagtcttaaagaagggtttgccggccctaacgctgcagcgcgtgcgcggtgagaggccctttttgagcctgtttactcctgtggccttgggcagaacagtaaatactctgtgcacggaggaaagacatgcccaagaggaaggaagtactgaccatcggctgcctgtgagcagcttagcaaggagcccttgctccctgggaaaggcggtgaacttgagtctaaagatgcagtgcctggcccttcctaaggtccctgcctggcatccgagtgtcggtgtgtggcacagaaggctcctgcttgcttccaaagtgatggacaggaaggggcagagtgagtcacggcccagactgggcaccttcgcgtctcagcctcagggagccccacagccccaagctcgctgaggcaacgtgagaacaggctatgggaaggctgcaaaggctgagaaatgcaaaggctcatatttataaatcccacccccagagtggggagggtcaggtgccagacctggactaaactgcaccaaggaaacacccagcagggtctcctgtgagccggggaccatgcagcccgaaacctccagtcactgcgcccggcaggagtcaggagccagggactgtgcagcctggaacctccagtcactgtgcccagcagggtgggctgtgcccagcaggagtcaggctaagaaacgccaggtctgcctgttcttgctgggcaatggctgatggctgccagtttctgctgatacacaggtaggatgggacccttcatgaatatctgactttaataagttggtaaggatatatttttttgtctatgttctgtttcaacttatgtagattattataaattgatgtaaaccacgtgagaggaaaatgttaataaaaaatgcaaagccccatcatttgcac

SEQ ID NO: 10424 - DNA, 690 bp, Homo sapiens
tctggaggtggggcttgagtttctgccaggaaagctgggagagccagggagaagccaagaggcgggagaaagtgcttcaagccgaggacctgccgttgttaaaggcctggaagtgagaacgtgccaggccctttgagaggttactgtcaacagtgagatgggtggaagcagggaaaggcctggagatgaggaagctggttctctcggggttcttggccagcgaagagatctacattaaccagctggaagccctgttgctgcccatgaaacccctgaaggccaccgccaccacctcccagcccgtgctcaccatccagcagatcgagaccatcttctacaagatccaggacatctatgagatccacaaggagttctatgacaacctgtgccccaaggtgcaacagtgggacagccaggtcaccatgggccacctcttccagaagctggccagccagctcggtgtgtacaaagcgtttgtcgataactataaagtcgctctggagacagctgagaagtgcagccagtccaacaaccagttccagaagatctcagaggaactcaaagtgaaaggtcccaaggactccaaggacagccacacgtctgtcaccatggaagctctgctctacaagcccattgaccgggtcactcggagcaccctagtcctacacgacctgctgaagcacacacctg

SEQ ID NO: 10425 - DNA, 549 bp, Homo sapiens
gccccaaggctgccggcacggtgatcttcgtgtctccaggacgccctgcggtgccagctcccgctggcccgcacgagtgctgaagcttacccctgctctgcgatgagtgtgagaggggtgtccaccccccgctggcggccccagcccaaggaggtccaccacagccctcgggagcaacactgccacgttctccgttgccagtcgtgacttcagctacgggacggacgagtacgacggagaggggaatgaggagcagaaggggcccccggagggctcagagaccatgccgtacatcgatgagtcgcccaccatgtccccgcagctcagcgcccgcagccagggcgggggggatggcgtctccccgactccacctgagggactggctcctggggtggaagcagggaaaggcctggagatgaggaagctggttctctcggggttcttggccagcgaagagatctacattaaccagctggaagccctgttgctgcccatgaaacccctgaaggccaccgccaccacctcccagcccgtgctcaccatccagca

SEQ ID NO: 10426 - DNA, 2945 bp, Homo sapiens
agactggagcttcagcccccacggaaggctgcttgcacccacgctccagcagcagaaggggtggagaaagagaatccaccgctggcaggatatgtccctactggcttaaccttagccacacagaccagggggtgtcctgttacgagacaggggatgccccagcacccaaggcctatgcagtcagctgcaggaagggggtctgctcccaccagccggcctcctggctgagttaccagtcgtggtggggcctcctggaggaagcagctgctgacagcccacccagacaccaggccctcccctgtggggtctgctccccaaaggcctggaagcctgggctctctcccgcaggggcccacagcctcacgaccacaggggccctggcggggagccccaggagccaaacgccacactggcccttctctcccacagccctgtcagaccctgctgccaaggaaaactgcatgatgcacctgctccgctccctgcccgaccccaacctcatcaccttcctcttcctgctggaacacttgaaaaggtaacggggagcggccccaaccccacctcctcagtccctcctcatgaaaaggtaacggggaggggccccaaccccacctcctcagtccctcctcgtgaaaaggtaacggggagtggccccaaccccacctcctcagtccctcctcgtgggcgctggcctccatcgggctgtctgtggggagtgagagtttgctttccaagttcttgcactcatgtttttctgttttgagaaatatttgggtcccgtaaccagtagtaacctcaaatattgaccatagaatgctcagaatggcagggtgagagcccaggactacaggcaggttttataatcagtgggtcccaacctactggtggttcattcaacgaatgtagccatttctagatgcagtggggggtggacagcagtggggggtggacagcagtggggggtggacagcagtggggaatggacagtagtggggatggacagcagtgggggaatggacagcagtggggatggacagcagtgggggacagacagcaggaggatacattgtaagccttgatgcaggtgctgcttttcagttacatagagacgtgtggactgtgttacagcatgggttgtattgtgggccacagtcaaaaaaggtgaaacccactggtcttggcccacacctcactagacatagggaaactgagtccccacaccaggcggagacttgcttgggttagtagcagacctgtccttagagccctcaacttccagatcctaaattcagacccttcttgccttcccaccaccctttctagtcaggtccaaccaagagtggctaaagttggttgtacttgtagcaaagttcagaggtcctcaggcttgcgtggggaggtggtccctgggcgtcccttaaacccacctgcacgccaggaccggggagccccctcagactgctctgcggaacaattcttccctgagctcagccccagctcagggccaggccccccgctgcagctcagccacgccaggctcgggagagccagtggagacctggacgcgcccggggctggtgtcttgtttttcccatcatgaaacatttttcctctggtttggccaggactagagccccaaccaattccgaaagcatttggcaagccttgtggggaggagtgggaagggaaaattcattcggcttccaccctgggaactgggcacagtctgttcccacatctgggcccctggctggaccgtgtgcgcgcgtgtggtgaggggctggccccgctgcacagctgcctgttggcatcacagtgtttgtttgcctgtttccaaagcaggcgcagccacagctcctgcctggagggtgggaatgatggtattgagggtgagaggcgctgcttagggtgggtgggtctcagcccagaaacattttttgagactgaaggagaaccagaggccctctgatatgtttgctgaccctgggcctgcctggacaccagccctgatggcagctcctgctgttaccccagggaagcatcgcagagcatctggcctgttgagtaagagaagcaggagaggatccagagggaggacaatcctgggtcccacgaggcagacggagaggcataggaggcagccctgggtcccatgaggcagacccttccggagaggcacaagaggaagccctgggtcccacgaggccgacctttccggacaggcacggggggacagtccccgggctcatctggaagtagggctgctcctgccccagcacagctggcagagccccgggtctagctagtgactcctgctgggctccaggccctgcctgcctttctcccctgccccacccaccttaactcttcttttgggccacttagcacatgagaaagcaacagagcggtaggtcctggaggcagctaccggggttcaaatcccagctctaccagttgctggctgtgtgaccttgggcaagtcacttaacccctctgtacttcggtttcttcatctacacgatgggggtgacgataatcatatttacctcaaaggactgcggcgagtgtgagttgttccagggagttttcagaacagtatctgctctcaggcaagggagctggagttggcatctgtgggctccctggctctggcagttcaccatcagttcagggggacccagcagctggagatgttagcacagaacactggcacatggctggggccctgctctcctggatgagtccccttcccccgggggaggtccccactcctaggagacagagacgaggtgaccccttccaggagtccttcaggagttcccacagcgaaggccaagggtcctggagctccgagtggctgctgaggaagggcttctttcctccccatcttctccttcttagggttgccgagaaggagcccatcaacaaaatgtcacttcacaacc

SEQ ID NO: 10427 - DNA, 579 bp, Homo sapiens
agactggagcttcagcccccacggaaggctgcttgcacccacgctccagcagcagaaggggtggagaaagagaatccaccgctggcaggatatgtccctactggcttaaccttagccacacagaccagggggtgtcctgttacgagacaggggatgccccagcacccaaggcctatgcagtcagctgcaggaagggggtctgctcccaccagccggcctcctggctgagttaccagtcgtggtggggcctcctggaggaagcagctgctgacagcccacccagacaccaggccctcccctgtggggtctgctccccaaaggcctggaagcctgggctctctcccgcaggggcccacagcctcacgaccacaggggccctggcggggagccccaggagccaaacgccacactggcccttctctcccacagccctgtcagaccctgctgccaaggaaaactgcatgatgcacctgctccgctccctgcccgaccccaacctcatcaccttcctcttcctgctggaacacttgaaaagggttgccgagaaggagcccatcaacaaaatgtcacttcacaacc

SEQ ID NO: 10428 - DNA, 29860 bp, Homo sapiens
agctgtttcgggcacatttgttctccagcccagactcccacctgctgtccctcttcaaggcaggtctagacgcctggttctccttggagagtgggcagcagagactgtcctgggtgggggaagtcgggggagggtccctcgagagtgcctgccctgccgtcgaaagcttttccaaacgtggggcacgaacctctctcgtcagccctgctcagctgcctccatcgcccaggtgttcctgattttgggagcctggactctgcccagtggattctgggcaggaagcatccagcaggaagcagatggaggtgtgagtcggctccccccgctcccctccacccctgggaagtgccgcctcagcaggcaggcttggcgcccgctccccctgacccgcctctgaagggtgggcaccatgcagagaagccggtccagacaggacctcaggagccgatgcagtcaggccctgagaacatccagcctcccgacagaccaaaaaaaggtgttctcagctctgggtgccgggctcccagactcagaggcacgggacctgggtttgatcttagccggccaacctcgggtgacccttcagagagtgtcctctcgggtccgtggcattcagcgaactcgccgaggcgaaagccgcagacatagattcctccccgtgagccgctaacctccctgctggcggaggctgctgcttcctcctaggaatccaaaggatcagctccagggttgtcccactttccgtgttttctgaaagcttcaagagaaggatgccacagaagggttgccagagaatttcttgagttagggctgaggctgcagatgaatgctgagcgggggtcacctttagggtgggctctgctggcctccctcaagcctgcggccaccgcagactcacagcagcccctcgtggccagccccgcccttgccgtggcctgggggcgtggacattggtggtgctgggcgagggtctaagccccagtgtagcctgtagctttgggctggggcagggagggatgggcacaccgtgttcacgccctcggaggcaagtgctgagctgccctggcttcaggaaagaccctagcgcggctggagacgcaagatgacccagacacacccgcctgacccactagacaggtgctgtcccctctcgaggctgccagggcgaacccacagccactgagcaaaagccctgagtttcccaaaggagggagagaagcagagacacgactggagctgcaggttcagcgtctgacccagaggtgtccttacaaagcccctaatctctcagacccccacgtcccccaccccgagggagagcgaggccttcgggagaactgcctctaggagctgctgggaacctaaggtttgagctgtagatgcctgaaaggagggcggggcgctgaggtgtgcctcagattctgcctgtggggcgtgggaattccggggagggacgtgagccccaaggcaggcgaggggtggtggaaaagcaggtgtgagccagtgggccccacgtcccctcttcagccagggcgcctgctctctctgcttctgcttttatccgacgaggtgggcagggagacgtcggcataaaatttcatttggaaaaaacggcaggggtgcgtcctcagcagaaaagaaatctcaccggagaccatgtgtctgttccgagctcctgatttgacagctgtggaaactgaacccagagaaaaacacagccgttgagtccacaggtccctggctcccagggctttgcttctggccaccatgagctcggagcttgggtggaagggaggtgttcgggaatccagaatgaagaaagagcagggaggctcggcgaccccatcccaccttcaggcctcagcccctcctgcctcaggctgcaatttatggctgtgctgggagacccggccacaccccctccttcccgggaggaggagcaggcaagcagcccaggggggctccagcggtagggacagcatactgaggggccacgccctgcccactctgtccctgggtgagttttgttctagataagcaagatgttcccaaaggctcaagtgcatttttcacccttttccatgaccaaatgtgctgtgagaatcgctagggtttgccagggacgggctgtcgggacacttctcctgcagcagacaagctcttgggctgtttcagcctctcctccgtacctagaaccaccgagcaccctggcgacaccagcctgacgtggccagagagaggctggaggtcaggcagagggaggctggagctgtgtgagaagcagcacgtactcgggactgccctatgagccggcacaggcctttggggagttgggaggacagcaggttaccttgggcaggcctaggtctgggccgtagagcaactgatttcatcctgactgccttcttccttacactgtgcccatcttcaaccttgagcccaccctggacccctctcccagccccacctggatggatgggtgggtgggtggatggatggatggatggatggaaggatgggtgggtgggtggatggatgggtggatggatggatggatgggtggatggatggaaggaaggaaggatggaaggaaggaaggatggaaggaaggaaagaaagaaacaaacatagctcctagggtctaatctgccattggctgctgggtgactcctgtccccaggctgaatgcaggctctgaacattgcaaatacccagaggtatccgatgggtggggagaaaaacctagagtgagtctcagtgtctcattctgggaagacatttggccttccagtccgcaggttttggttagggtcggtacaggaaatggtcagaacacacagtaagaatgcagtgaccacagagccaccgagttgggggacactcccgtccccactcccccacagctgtccccggaacgtgccatcctcccgcccaactcgcacgccctgtgtgggcgctgggcaccccgggctcccatgctcggcctgcttgtctctctctcatcctggagcctgcacctgtctttgggcaggagccactggcaggctctctgcagcccccaaagcctcgggtccgccctgctctcctccagcaccttcttgccccccagcctcgggtccgccctgctctcctccagcaccttcttgtcccccagctctggtcctctgatgcccagccggtgccctgatcctctggtgctgagagagggagtgttcttggcagacctgagccacatcccctcggtccccatcctcagctgggtgccaggctcctcctgggctctggactctctgggcggcctcttggggctctccccgccccaactggctcccaggctatccccactggggcgcctgtggccttggtctagctggctgctcagaaaccccctctcctggagtcatttgcgctagcggataggacgaggaatcggggttcaagtgtgggctgggggagaggagcgtcgttctggtgggaaaaaggaggtcactccaggaaagcggcagctgcatttctaggttctgaggcagaaccttcctcctggtgctcacaggctggaggatttgcctggaagccgtccccacccccagctgtcaccgaggcagccccactgcagcctttgcccctcccgctcgcacagggcaggatgtgaccttttttcctcgttgatgccgccactgaacaccttaacccgattttacctcagtcacagctgtgctgggtggcatgaccccctccctaggtgtaatgcggggtcccacccacgtctccccggggacagcccctctcactccccttgcagagagcctggggaggggctgagggaggatgggatggtccactaggaatgtttttaattccaaaggcagtgacatctgttcgtgggggccttaccaccaggctctgtttatccagccgggggagtcttgcaggtcgtctgaggagggctctggcaggtgtgggggatggaaggggtggggggagcaggtgtgggggatggaaggggtggggggagcaggtgtgggggatggaaggggtggggggagcaggtgggggtagaaagggtggggggagcaggtgtgggggatggaaggggtggggggagcaggtgtgggggatggaaggggtgggggaacaggtgtgggggatggaaggggtggggggagcaggtgtaggggatggaaggggtgggggagcaggtgtgggggatggaaggggtgggggagcaggtgtagggggtggaaggggtgggggggagcaggtttaggggatggaaggagtgagggaggaaggagagtggccccttcccaggtggttgggatagcctgagctgaacccagcagagatgaggaggggtccgtggtgggctgcagcgactagaattcagacttctgcttttgctggggacatctgtcttgcacagatcttcttccacccaagaccattgactccaggaagcaatgagtcgggcttgggggagagaaggcaagtctgcgctgtccccagaggaagcccccagtccatagggaggaagggaaagatgagcgtctcaggggaagactcccaactcggctacccatctgcgaaggcacttatgtcaccatggagaccagctggccatcgttcatccagtccgagcttgctttacctagacaagtattgagcctgtggtacctaagacagatgagtgccgggccttgggaacgggattcacacggcccccttctcccccacacccggcggcagggaggggcgtgcattctcgcagtctgcaccctgtggcctgggacccagcccgagggaaggggaccataggccagtgaggggccgattctgaagttaagtcacggcaccaggagcactgtggcgcaaacgtggagagcagttataatggcatcctaccagccagttacatgacagccattgcacgtttgctggagggaggtagagtaaagctgggacccagtgagggtggatggcctttccctacagccccgagggccccacgctgacccctctcctccaggaagccttccccagttgcctccagctggaaattgtatctctcgatgttcgtggcattttgtctgtcctgttctgaggccgtaatatgggattttgtgcgggttttgtccatctgggcgtggtgcctagtaggtgcacaagtgacccgtgccaaatgcacaaatgcttgtctgcctcctgttgatggacatctctgctttcttggctgcccctttgtcaagcactgacttttgattcgtctctgtgatgccttaacccccaccccagggtcgggcacgcagccaggccctcagtcactacctctagagtgacatgagtggggccaggtgcagtggttcatgcctgtaaacccagcactgtgggaggctgaggtcaggagtttgagaccagcctggccagcatggtgaaacctcgtctctgcgaaaaatacaaaaattagccgggcgtggtggtgggtgtgtgtagtcccatctactcaaggggctgaggcaggagagttgcttgagctggggaggcggaggctgcagtgagccaagattgcaccactgcactccagcctgggcaacagagcaagacactgcctcaaaaaaaaaaaaaaaaaaatgacatgagtgggaccaagcagtggggcctgaggagtgagcagagccttcctggaggagatggctttgtggctgtgtgaaggggctgtctgggtcctcctggagccctggaaggggcaggcgaaggaggggtggagaagggtgactgaggcctcagttaggggacacaggcatgttcctacctccgtccgtctctccacctccccctcaggcggtgctggtgaggctgttgtggctcagcccccacttagcagctcaggtttgaggaagttccgtgtgcaccgtccaggggtgcgtgtgacgtgtgagccaggaagaagtggagctggtctggccgcccctgcagggacagtgaagactgaggcccggttctagcccaggcaggacgccccaaggcccccctccaccagccaggtggaagatagtccagggccagatcctgccacactagggcatcacagtgagtgacaggggtgtgggctttggagttagccagacctccgtttgtgttccagcttgtcctggccttggacacgtagctcagcttgtcagagcccttcgtttcctcagaggtaaagcggggatgctggtactgacttcatacagttgggaggggtaagtgacttaatccatgatgcctggtccctgccagccttccacgaaggacagctctgactacggctgtctctgcagggaagccacctattcctcaaaaacaccaaggcctctgaggagaaatcccgacacctgcctggctggtgacgccggatgccgagggctcgtctctgggccccgacccacctgccttggggtcaaccaagaaatgtcctgacccagctctttttcctgaatccaaagcatcatccatgtttgagtaaggcacagtgcttgtgagcaccaagggctttggagggacctccccatcctcacttggcactgtgtaaccctggcaagaactggacctcctgaccccctgtcctcacctctctagaacagggcagtaacaccaacatgacaagaatgtgaggctcacatgcagtcgggcgtttgaaagacctggttcgcggttgccacggtgcaaatactggtttcctttctgtgccgtgctggggtctgcagaggtccgaggccccagacacccctgggttttgcatagttaaacatttgggattcagcctttctcttttctctgaataccgtactctaacttgcactgttaccttgagacgtaatttgtgtcctagtctctgcggttagaaagttcactaaataaattgaaggtcaagaacaagttcttctctctctcaaggcgcccagcacggacacgggtggttgcccgtggcgtcctctgcgcccagcacggacgcgggtggttgcccgtggcgtcctctgcgcccagcacggacgcgggtggttgcccgtggcgtcctctgcccctggcagcggaaaccttttttggtgaggtgcaaagggccatggttcaaagtgacccctcaagaggcatctctggctggacgtgtgacccgcgtcgtttcgggcttttgctcctgtccctgagcagatcagtgacccgattcccactgggattcccacactaggggtctcctttatccttacatttctcacctgaggaggcttctgagtgccggtccacaagggtctggccgggtcaccaagctggctctgaggaaggtgcctggggcagaagttgggggtggggaagtgcgaccccagggcagtcagagtcttttgcccggggaggagggcagctgtttgtggccaaaatgcagcccccgcctggcccccggcccctccgcttggcccctggagcagcccggtgggcaacacggggacccagcagggagggactggggtgtggggctggtgtaaactttattgcgagggagggcggcggggtcggggaggagcagcgcccttgccagggatgaaacccggggttggggcttggaggggcggccctgggcctgggaggcggcgctcagcctgggctgcagcctcgcggagggcggggaaggagggatgcggaggagggaggagggaggagggacgcggacggagggagggagggaggggagcgcggggagggagggagggagggaggcgagcgcggggaaagccggcgggactagggaactagcgggactggcagccgggactgagcgctccacaggcgccttctctccagcgccgcgtcccgtcccccccggcatgaccgacgtcctgccccagcccgactgcagcccgaaggcggggcgcgaacccctggcgctggaggagtcggggagcaagcgcccccccaacaccggcgcccggctctggggccgcgtgcgcaacaagctgctccgaaacaaggtgcccgcgggggctggaggttccggggggtgggggctcgggggcgctgcggggctcggggggctgcgggggctgcgggggctgatggggtcccgctcccgccccctccgtggagtcccgggacagagctggggtctgtgcgcgtccctctaagtggcttgaacttgatggcgaacgctggggccgcccccacccggaccctggcgctcgggcatctgcccctgcctcgggagaagggaggtttcttctcggcaggtggaccctgctttccactccgggagtgcaaacagcgcacggggagacgcctgcctctgggtctatgtcttgccgccctgttcagcctctacctgatccctgcatccagcgggccttgctggctgcccctttgctgaggggcgccgaccgcagcaccgtctgccgtgtgaggtttctctgtgcaggattgtggggaggggagatgctgccgggtctgggggctcgaggcttcccttcagggaccacccatctgactgtgggcccagtgcccgccgggcaccaggcgttccgtccatgtgccagggcagaccgccggtgcccctgcagccccagacctgagttgggattaaaatctgagatagaagccgactgtcctgcagctgggcaggctgcctcggggctggcttggggccctggcatcaggcacgtgaggaagagccagacccagcgcccagcgcacaggaagtgctcgataactctgcagatcaaatcaactgtccgagttagctgtctcagagtgccagtccggctggccagggctgggcccatccatcaagagagcaacaagggaggccttggccagtccgtggtggggatctgcagctcctcctgaggctcacaggacctctctgcaggctcttactgccagccggcattgaggctcctggcatcagccaggacgaagtgatcttgggctcactggcccctcgttttgtttcagctcctgccatggggcatacttgacctcccagaggtgacatcagccctggaaagtgctgggcagggcagcaacttgagctgtactgcactggcccctgtgtcaccttcagcctccctggggactgggctagcagagccctgctggccccagctgctgccagagcccctctgtgctgaggcagctgtctgtgcccggcagcgtggactcatcccctccccagcccctgctgaggccagcaggcaccagcccagagctcaccatccatccccaaacgtcagggttggcaagaaactgacctggcaggttccgggtccagcgccagccaaacagggcgcttccagtttacctgcccctttgaggaggtgcctggtgggcagggggcaacttttaaacctgaggtcccagactttcagttctttccctatgcatttgtggccggcagaactgagaagccccttcaagaattccttagctgggtttgcctctggcagtgcctggtggctccgtgtctgatggggatctctgggcaggggtggtggccaggcagacgccgggctattgagctgctgagcagttggcgtcagtgcagctcagggtggccccggccctgggctgctctgtgtgacgagcgattccatcccctaacgtgtgctgtgtgccacagtgtgtccgtgtcgtggacgcaggggtcagcgctgtggcggacggagggacgtctgccacagtgtgtccgtgtcgtggacgcaggggtcagcgctgtggtggacggagggacgtctgccacagtgtgtccgtgtcgtggacacgggtcagcgctgtggtggacggagggacgtctgccctgtgcttcccacctcactgtgcgcaggccagcgggtgagcagcagagtcaaagggccaggcctcttgctttctatcctcagccacattaacctggcattttcctgcaggagcttcacagttgggccgaggggctgggactaggcagtttcgtttcggtggggtaagggaagggtgcctggtactgcccagactggcaggagggattgcctcattaactcctcgttaactttgccctgagtgatgctgtgggtgcgagaaacaccggtggccctcctgcttccactgacctgaaggttcattaaaggctggaggcggggcgtgactcatccagggctgggattaaacaatctgttcagatggaaaggtctcatgatcagaactgagcctttaaatagtgcagggcctctggtttctgggggagaggaggcagggacactcacggaggatcctttgggtaccagcgggggtccctgtggttgggctgttcttgtcaccggaggagagttcaggggccaaagcctcattccagcccctgacttggcagtcagctttttgtgcgagtgtttagctgggagacacgtggcatctgggtttgtgggttcagccagggctctcggtattgaacttcgcgtttctacttttctttccttttccctgtttgtttttttttttttttgcctcaaatcacactcaagtagaccaggcccggtgccttcctctccctcccatccttccctcttctagattcttggttgagctttggatgggaaggggctgaattctagattctcgcttgagctttggaggggaaggggctgaaggaggaacccccccaccctgcccccgcagcatccccttgtgggagccgtgaggaggctaagagggcctgaagggaggccggtccagaagcatttgtctgtcggggaagttgaggcccttatagagcaaccaagtccaagacgctcctgacccagaccaggccagatgctggccggcggtggggactcaggctgagccggcagggtgtaaggagattgagtgcagcttcaggtgaccttgtctctgccctgaagcacagccatgtgggtctgagaatcccctacttccaaagagctcctcttaagctggacaccggcactgctgacccccacggtgagtcccgtgttctgtgatgggagctgctgcctttgcttcagagaggatcagaggtgttacctgaggaagggcggggtggagagcccctcttgggccattcggggaagcttcaggctcatgatggtcttagaagaaggtccctttcttggatcacctgatgtcaggagtccaagaccagcctggccaacatggagaagccccgtctcaactaacaatgcaaaaattagccaagtgtggtggctcacgcctgtcatcccagcactttgggaggcagaggcgggtggatcacctgaggtcaggcgttcgagaccagcctggccaacatggtgaaaccccgtgtctactaaaaatacaaaaaaaaaaaaaatagccgggcatggtggcgggcacctgtaatcccagctgctagggaggctgaggcaggagcatcgcttgaacctgggaggtggaggttgcagtgagccgagatcatgccactgcactccagcctgggcaacagagcgagactcggtcttggggtggggggaggaaagggtccctttctttgtcagcttgatcgccaccgcaggacaaccccacccctcacagagcctgtcgtttattccttcttgatggtaccaggtgtgcagaccacgtgcacaccccagaggttcactctaccactcacttggccatcgagggtacacaggtgctgggtacaagatacagatatgtcttgggctcgtctactttattttataatccagtctgggcgtcaggaaagatctcgcagccttctgcaatagaagtctggcctggcccggctgcccaccgcccttccttgtttcccggtgggaagaaagcttcatcgtgcgtcttctctgttcacacacacccccatagcgacccctcagccacagacaggggactacagtgctgcctcccccgagagctggaggcccctacaccagcccacctcttcctgggcctatgtgtgggtcctgactgcggccaggctggctgacaggttggcagtggggtcgggcgaccctccctcttttccacagcacttacccacctgccgagtgggcagacctcactgctggggcctcatgagtactctctgatctctctgccaggccagctcccaagaggcttgcttgagtccgcagagcgggaaccctggactctgagaatctgatgaaggttctggaggccactcagacacagagccaccccatgcacacactgtgtgcgacttcagagggggctgcagacatcaaggcgggaaccctgctctgagtgaacttggcaaggtgccgcttcttggtacctagggagggtagaagggcgctggtcctccccggcctccctgcaggccacagacggcttggccagccagcggtgctgggcgcggtgccccagcttttggatggctctggaccagggagaggagaacctgccaatcaagggggttcctcaaaggccaaagctgcctgagcccagtgttgctgtagtacccagaggcaatgaggccccagacattttggaaggagcccccaagcctgcaggtgtggctgggggagctgccccaggcattttggaaggagcccccaagcctgcaggtgtgagtctgggggagctgccccaggcattttggaaggagcccccaagcctgcaggtgtgagtctgggggagctgccccaggcattttggaagcgcccccaagcctgcaggtgtgagtctgggggagctgccaggtgttggccacagggcgctggtgctggagaggcctggccctctgctgagtggcctcgctcactgcccaggtggttgggaactggtcagcaggtgctgttctttgacctcgtttcccctgtgaactcatgctggggcaggaagatgtttgtgtcctgacggccccccagcaccttcgaggaacagacagtcccctgcgcctgtgacctgcctgccccaccctggggagaaacgcagcgtcagtcctgggtccagtgagccgtagacccttggccctccaggatgggccctggagaggcgggaggggcccgtggagctggtcctgggcttctgtagagaggccaggaggccccaggatccccacagagacttccccagtcccgcttcaagacagcggaaccagctcctgagccgaaatctggagggatctcctttctggaccgtgaccccagccggggctggtaccgatgaccggcacagccagagccgtgacatccacagcgcccttcccatccgatgcctggatgccgtggctgtgctcggggaggcctccggggtccccagcccctcaggctcatgtggcacaaggtgccagagaagacagggcgccaggccggtgggagtcaaggtttcccatttttctcgtctcagtctgctacttaactgctgtgtgcccgcgagtacatccctttgcctctctggttctctggtatcagctcaatgaaggagctgaacaggatgatctcctggaatccagttcatgtgatgatcttggccatgtctcaagattcctagtcctaaaccttaaaccctgagcaccctgggagagtctgtcacagggctgcacctgggccaatgccagccattcagtggacacgggagcagggggtttagtgggaacacagggcttcttgagccctgtcctgaagcagccccggcggggagccattgtcacctccttcccccatgccccagttggttcctctggcctgtgagtattgccggagcaccttccacgtgccaggcctgcaggaactagggacacagaggcgcccgagacagacgagaccctgtctgcaggaggagtccgtcaacaaatgagatccttgccggtcagatgagtgctgtgaaaaaaataaacacaactgggtaacgcagtagagagtgacggggggatgcctggcttgagaggatcacttttgaacgaagatttaaatgacaagaagaattcagccataaaaaacctgggggcagtgcattccaggccaaagaaccggcaaggtccacaccccgaggcaggtgtgctcagaggcagagggggacagtgtggggcgttacgtggggtcaggggacggcggccaggcgacgtggggccctgcggttcaggacagggcctttaatccgaatgcagtgggaagccgcggggtgttcaagcacagttctgtgacgatatgttttgaacacgtactgtacgaggcatcattcttagcctgtgacgcaactgaggtgacacttacaaggtgctgttattcacactgtttatttatttatttgtttgggttcttttgtttttgtttgctgttgttgttttgagacagagtcttgctgtgtcgcccaggctggagtgcaatggcgcgatctcggctcgctgcagcctccgcctcccgggttcaagcgattctcctgcctcagcctcctgagtagctgggattacaggtgcccgccaccacgcccggccaagttttgtatttttttttttttttttttgagacggagtctcgctgtcgcccaggctggagtgcagtggcgcaatcttggctcactgcaggctccgccccctggggttcacgccattctcctgcctcagcctcccgagtagctgggactacaggcgcccgccacctcgcccagctaattttttgtatttttagtagagacggggtttcaccgtgttagccaggctggtcttgaactcctgacctcaggtgatccacccgcctcagcttcccaaagtgctgagattacaggcgtgagtcactgcgccaggcctaaatgtgttttgaattttgttttacatttttaattttttttttttttttttttgtgggagtctcactctctcgcccaggctggagtgcagtggcaccatctcggctcactgcagcctccatctcccaggctcaagcaatcctcccacctcagcctcccaagtagctgggtctacaggcatgtaccaacatgcctggctaatttttgtattttttgtaaagacgaggtttcgttatgttgcgcaggctgatgttgaacttctggcttcagtggatccacctgcctccgcctcccacagtgctggattacaggcgggagcccccgtgcctggcccagactgtttttatatatgaggaatgaggctcagagagtgactcagatgaagtcacgtgagtggcttagccgaggggcgacgttcagaccccggccactcagcctcagcgcaggctctcacccgcggtgtcctgccttccgtggccggttggggttgggctgcgtgccccagatgggagcgtctggagacgccgggctcctgcccgtcaggcatcagtgtggtgcccgtcctggcacgctgtgcatagcaacaggcaagacggttcttctcgacgacgccactgaacgtgagactcggagcaaggcaaggcctgggaggggccgctcagagctgacctgggccctggaattgctggagcccctcacgtccccggcagcaagctccatgcccagaaagtgttctgggcccgggcagggagggtgaagctggtatcagagaaggctgttgatgctgctttttttttttttttttttttttttgagatggagtctcgctctgtcgcccaggctggagtacaatggcacaatctcggctcaccgcaacctccgcctcctgggttcaagcggttctcctgcctcagccccctgagtagctgggtttacaggcatgtgccaccacgccggggtaatttttgtatttttagtagagacagggtttctccatgttggccaggctggtctcgaactcctgacctcaggtgatcctcccacctaggcctcccacagtgctgggattacaggtgtgaaccaccgcgcccagccctgttaatgtttcttaaccactccaggtccagctcgaggcttcagagcccatggaggtctgacaggtccttggccttcccgtggcctccagcgtgaagcttcctggtcaggaccacagaaggcctctcatcttggactttgacctctgagggcgcccctttcctttcaggacagggcctccgtgttgctttggccctggcctgttccttttctcaagagggccccactgcccctgcccttgccactctggcatcctcgacctgccctgggctggggcagggccggcttcctggctggtatttgtagcccagttctgagctgaagctgaagcctccaggctgcctgcacagggaggcagtggtggggtgggctggccctgaggaagacggagccctaggccgctgggggagatgtgcctggctgtggggcctccaagagcagcccaggtttggattttgtctgcttctcctcaaggtcagccatgcccagcccgggggctaaaagcaaagtgggtgccagggcaggcagaggctctggagtggacgtggggccggcagaggcgctggagtggacgtggggccggcagaggcgctggagtggacgtggggccggcagaggcgctgtagtggacgtggggccggcagaggctctgcagtggacgtggggccggcagaggcgctggagcggacgtggggcaggcagaggctctgcagtggacgtggggccggcagaggctctggagcggacgtggggcaggcagaggtgctagaatggacgctggggaaggcaggttgctgcgggtgctaagaggctagcctgccttggacaaaagcgtcgttcagagctgctaatccccttcctcccatgaggcttggggaacttcgaagttctctggtgttggaggggaagccagccgaggccctgggacacggcatcagcccgagcctatctgtggctggcctgggtatggcaggtgggcacaccttggctgcaggacaccttggctacaagggagcctggctgaccctgcagggtgagggctggagaggcggagcctgcctggcctagcagtgtggatgccaagccatgggaagatgtgtggagagtttatggagcctggcccggtgtccccaacccagctgctgagctggaagccaggggtaggtcctggcagcccctccctctctgccctgcctctctcggagtcgctcggagcagtcacgttgacggaatcctccggcgcctcctcgagggaggagaggcagggtcttggcaactcccgtctcccccgttgccagcttgccagccccgccgtgcctctcacgcctgtggtctgccccaatgacaggccggcttcggtgtcccaaggggacccagccctgagcgtggggctgcccttgggggagggcaggggaaagccagcccgggctgccaccgtggccgctggcctgggagccccaggaaacgtgcccaccctcagacccgatgcctggctcagggcctgggctccgcggcccctccagggcaggcgtgaaatgtgcccacacagctccaccttccacgtggttccctgtccgggggccacttgcactgaggtccttctggagtcattttctgtttttttttttttttttttgagacagagtcttgctctgttgcccaggctggagtgcagtggtgctatcttggctcactgcaacccctgcctcccgggttcaagtgatttccggctaattttgtatttttagtagagatggggtttcgtcaggttggccaggctggtctcgaactcctgagctcgagtgatccgcccgcctctgcctcccagagtgctgggattacaggcatgagccaccgcgcccggctgggagtcattttctagcgttcctgtcccacctctcaggaacagatttaccacctttgttgtgaagaagcattttttttttttttctgccgccaggctggagtgcagtggcacaatctcaactccggctcactgcaacctccgcctcccgggttcaagcgattctcctgcctcagcctccccagtagctgggattacaggcacccgccaccacgcctggctaatttttgtatttttagtagagacggggtttcgccacgttggtcaggttggtctcgatctcctgaccttgtgatccgcccgcctcggcctcccaaagtgctgggatgacaggcgtgagccaccgcacctggctgaagaagcacttttttttatgaacctctgcaaccccctctgagggaaaccctcccgcattctgggatgccggggctcagagggtggagggtagaagagcgccagccgtgagaggcaggatggggcggcccccgagggcagggctgtgcctggaggcagggctcctcggggggtcagctcctgggcggtgggagtgaccgagtgggctcctgagggaagcggctttcaggaaggaggcggaggcctgggagctcttggggccctggcaaatgtggtcttcagattcccgtcgtccagtgagcccctggatcacgtcctgagtggcgtccactgaaggctgcttgggacctctgctcccccctccactgagacccccagtggccagttctaagtcccacctgccttgggcagggccaccacaggccccttactgtggattaaagggccctgggtgagggcttgtgggaggggaggtggtggaaaccatctccgaagaccttggggcgagctgcgtgctggagtggagagtgtggcccagcaggcaggagcactgggttggaatgggggctctgccacctccgagggagcaggagtggagaccggagggagcgtgcccctgaatccgagcacggggagctggccgggagcagccctccgggcagaggcaggagaaatggggtcacctgccccagggggtgagaggtgagccgagaggaagggctgagaccctcaggggcatccccaggatgttcctgaaactcagccctggaggacgctcaggtgtgcgtggagcaccctctgccctggagcctcaaatcctctccccgctgcggggccactttgctgattcctgccccaaacatgaggtcacttcggtccagaaaggcgaggcgacctccaccagccacctacgggattcttggcagagaatccacgctcaccttcgggtcttcactcctgctccctcggaggtgacggagccccatttcaacccggtgcccctgcctgctgggttttcgccgcaggggacctggtcgtctcctggacatgagcccccagcgccagcgtttctctttgggagaggcctgaatgcgcagtcatgatttgaccaggcgaagtgcccagacaaagagaaaacagtcggccggatgcaggggctcacgcctggaatcccagcactttgggaggccgaggcgggtggatcacctgaggtcaggagttggagaccagcctggccaacacggtgaaaccccgtctctactaaaaatacaaaaattagccgggcgtggtggctcgtgcctgtagccccagctactcgggaggctgaggcaggagaatcgctcgaacccgaaggtggaggttgcagtgagctgagatcgcgccactgcactccagcctgggcgacagagtgcgactccgtctcaaaaaaaaaaaagaaggaaatagttgagctgctctcagtgaccatgtacggcccagtcgtcgacccctggcccagtcgttcgtccgccttttggctccacgatgttttgcagcctgtttctgtctcctgcctgtggcccaccttggggaggccccagtgctcgtgtgcccctggtggtcttcccagcctgacccttcacgagctccctctgtctccctgcttcaggtgatcagacatcccccaagtacctgctcccctgggcccatggaaggcacctgtctgctgggaccagagggtgagcagtcaggtgtcccatccaccaacgtcccaggggccagcccctccaccccggtgctaatctcatcaggaaatagcacagtccacatttcccaggagttataaatagccagcgcagttgcgggcagcagcgtttctctggaaaatgtacgctgtgcctctccctccctcctctgtgtttaaatgatatcctgaaatagacttggtttctggaggctgatagcctcctgggaaacagagcgtcgttgtcagggcaccgtggggccaggcaggcctctctgagcggataccagggccacacctgcagcaggcaccagggccacacctgcagcagataccagggccacacctgcagcaggcaccaggaagatgtcagggcttgaggggcttacagcttaggaaagtgcccctggcccaggcctggcctcagaaggggctggagtgtgtgagacagcagcaagtgtcgcctgggaggctgcagagggtagatcttagtggagcaggaaggcagagaggacccaaagtttcccactgtgacctggggctctccgagaaggctctctggaggaggcggggcgagaactgggccttagcatcaggaggtgcagtcctgggtcagatgtgcccaggttgaacctggcagctggagcggaagtgatgggcacgaggcagcgggagggctgtactgggggtggcctcccagcaccaggtctgcccaccgggtcgggacacacaccaggaggcccgatgttgcctttctgaggaagcagcagttacagcagctgcgggtcatggacttcacacattctgcagtttcagcagagagggtgctgggggccttgattttgaaccccagctctgacttcctaggtgtgcactgggtaaattcctcactctcgttaagctgcagcatcctcatctgtgagatgggagcggctatgagagcttaaaccgcatatgtctgctatcatgatcatgaacgcagatgctgtgtgtagaggattcatcagtgtcagacttgcaggaagagctcgagataagtccgttgctctcactcttccataacagccctgtgagtcaggtgtggatgcctccatgaggaaattgaagttcacggaggtgaaaggccttgcccgagtgcgcacggttgaatgggagactcagatcagcctgcctccaaatcctgcacactccccccgaccaggttgtgtccaggtccccctgagacttgggaagggaccattggctcagcttcctgcagaagctgccaggaggcacccagtcgtgggaagctggggcggaggaggggctgtgggtgaatcggaccaggggccatggaattggcctgaggcttatgctgatgtgtggagagacctgcctcaagaaggggtggtctcaaaacatcgaactgcgccccataaatacatacaactgcaatgtgtcaattaaaaaataagggcccgggccaggcgtggtggctcacgcccgtaatcccagcactttgggaggccgaggtgggcgaatcacgaggtcaggagatcaagaccatcctggctaacacggtgaaaccccgtctctactaaaaatacaaaaaattagccgggggtggtggcgggcgcctgtagtcccagctactcaggaggctgaggcaggagaatggcgtgaacccgggaggcggagcttgcagtgagccaggatcgcgccacagcactccagcctgggcgacagagcaagactccgtctcaaaaataaataaataaataaaaaataagggcccacacagtggtacatgcctgtaatgccagctcttcaggaggctgaggcaggaggatcactgaagcccagggcaacatagcagcctggacggcacagtgagaccctgtctctagaaaaataaatacaggccgagtgcggtggctcacgcctgtcatcccagcactttgggaggccaaggtgggcggaccacctgaggtctggagttcaagaccagcctgggcaacatggtgaaaccccatctctactaaaaataaaaaaattggccaggcatggtggctcacacttgtaatcccagcactttgggaggccaaggtgggtgggtcatttgaggtcaggagttcgagaccagcctggccaacatggtgaaaccctgtctctactaaaaatacaaaaattagccgggtgtgatggtgcgcacctgtagtcccagctaattgggaggctgaggcagaagaatcggttgaacctgggagacgggttgcagtcagccgagatcacaccactgcactccagcctgggcaacaagagtgaaactctgtctcaaaaaaaaaaaaaaaaaaaaaagagggcatggccgctccagaatgtttcttccaagggtagcatctcagttgacaaagagcatttgattcctccaccctgtgtggctactgctgggggacagagctggggacagacccaggcccggctccgtgtccagacgagatgaaggaactacgagggacagcctgtgtgatccaggagggtttgcaaagaacagaagcagcttagaggggagagaggtttcgggaaagtaaggccagagctggggcttcctttgagaccctgtaggacccctgcctccagccgggctggtgatggcctcacgcttcccgtgtgtgaagaggtgcccggagcagtggttctccctgaggggcacttggttctctgcacacacccaacttctgtctcctgttctgggttccatcccttctctgggcagggcgaacccagtgcagacccagaccccgtcggaggcttgggtaccacctgcccccagccggtgtgtgggtgatagatgtgggaaggacctacatcgagctgcaggaagcccaaggctgacccagatccagtttcccttccgtgatgacagtggcctgttatagcaactgcgttcaaaccgtggcacgcacacctcagagtgcacagagacgttctgagggcgacgtgggcaggagagttttcaggaaatcagtttgcagattctcagctgccataggtgctattgccagaaagccatctgcctgagagccagcatctcgccatcctgtcctctgcagaggagaggcctgaggctggctgtcggggcttggcccggggtgcgcagacctcctgggtggggaacagaggggcttttagaaatgttggggtaggggccaggcatggtgggtcacacctgtaatcccagcactttgggaggccgaggcaggtggatcgcctgaggtcaggagctcgagaccagcctggccaacatggtgaaaccccatctccactacaaataaaaaattagctgggcgtggtggcaggcacctgtaatcccagctactcgggaggctgaggcaggagaatcacttgaacccgggaggtggagcttgcagtgagccgagactgcaccactgcactccagcctgggcgacagagcgagactccgtctcaaaaaaaaaaaaaaaaagaaacgttggggtcagtgttcagaaagtaaaagactctagtggccacttagaacctttcaaaagtcaggtggtatccagttctttgccttccacaaaactgatggaggactcaattttcaactgagagatcatttcaagtaattttcagtaataggtatatatgcgatttaaggcggatagcatggagagaggttaaagaatggtgtaacgcggctgtgataaaactcttttcgacctcatctacttctttatgtgaacaaaatgtttcattgttcacatatttcttgttcattttagagacatggtcctacattgcccaggctggtctcgaactcctgggctcaagtggtcctgtggctgggagccacagcacctgcacatctttacaacaaaaccagaaacatgaaccaaattgatgctgagcctcgtttcactctagcaaaaaataataccctatagatacgcgaactaaagcaaaaaatgttccgcccatctcattgagagagcattccaccaaaaagttactctgctacttaatatttattaaaatgtataatgaggccaggcgcggtggctcacgcctgtaatcccagcactttgggagaccgaggcgggtggatcacctgaggtcgggagttcgagatcagcctgaccaacatggagaaaccccatctctactaaaaatacaaaaaattagccgggtgtggttgtgtgtgtctgtaattccagctactcgggaggctgaggcaggagaatcgcttgaacccaggaggcggaggttgctgtgagccaagatcgcaccattgcactccggcctggacaataagagcgaaactctgtctcaaaaaaataaataaaatgtatataatgtgtcggcttactttttttttttttttcttgagacagggtctcactctgtcgccaggctggagtgcagtggtgtgatcttggctcaatgcaacctccacctcctgggttcaagcgattcttccatctcagcctcccaagtagtagcttggactacagtgcccgccaccacacccggctcacttttgtatttttagtagagacagggttttgtcatgttggccaggctggtctcgaattcctgacctcaggtgatccaccagcctcagcctcccaaagtgctgggattacaggcgtgagccaccgtgcctggctgtctttttaattatgtactgccaatcatggtactaactaatcctgaatatattttgaatatttggagccttgtggtctctggaaatttttgttttcaatgtatacagattttttttgtggaagcaaaatgtaatggtgaataaaggacttgaaaatataaaaatataaactaggacaacattctttaggagaaatggaatagaaacaaattcaaggagagaagatccaggagctctgtgagggaaagaagagcttgtttgtgtagttttttgttgttgttgttttttttgagacggagtctcactctgtcgcccaggctggagtgcagtggtgtgatctccgctcactgcaacctccacctactgggttcatgccattctcctgcctcagcctccccagcagctgggactacaggcgcccaccaccgcgcccggctaattttttgtatttttttttttttagtagagacggggtttcaccgtgttagccaggatggtctcgatctcctgacctcgtgatccgcctccctcggcctcccaaagtgctgggattacaggcatgagccaccgtgcctggcctgttttcttaatattgaattttgagagttttatataataagccctgaaattgggtaatattagccctatagctgtgttctttttcaacattgtttagatgttttttctttttttttgagacggagtctcgctctgtcgcccaggctggagtgcagtggcgcgatctcggctcactgcaagctctgcctcccgggttcacgctattctcctgcctcagcctcccaagtagctgggactacaggcgcccgccaccacgcccggctaattttttgtatttttagtagagacggggtttcaccgtgttagccaggatggtctcgatctcctgagctcgtgatctgcctgccttggcctctcaaagtgctgggattacaggcgtgagccgccacgcctggcctcgtgtagtttttaaatggatgagtgtgggtatcacgtcgctggggtatttagatcccactgaatccatgagaaggaatgatgtcacacttttattttaggatggcaatattgacatgattttggaaatcatactctttgcaactatttaaacttggaaatgttcagattttgacttcagaaagtgccagggagcgcacagttgctcagaattagttcgcaggtgcacaggcagacgggcgcgaaggcccccgagttacagaaacagaacgtggaacagtcctgtgtgagggttgcctctgacctcccctggggtccgcacctccctgggctccagcccgagcctggggacttcccctgtggaggatttgcttatttgggagccaatggcttgacccaagttttctccctgaatcttcccagcaatcccagggaggcaggttctgttgcagatggaataactgaggcttagtgagtttaaaacttgccaggattcaaacccaggcagcctcctgtgcgcgggctcctgactcttcaacacctccacgtggatgggctggttccctcctgatggacttgagcgcctcctaatcaggtgcttaccttttgtgagcctcagtttctgcatctgtgaaatggggtaataatacccatgtcccgggctggcagccaggagtgcctaacagggtgtgccctgcctcccccacggtgggtaacagagtgtgccctgcctcccccacggcgggtaacagggtgtgccctgcctcccccacggcgggtaacagggtgtgccctgcctcccccacggcggccacaggggcctgggggctagggtccccccaaagggttgatttccaggtaaacatcagcttatcccagctgctcacttccgccttcctgactgtgtagctggctctgagcagtgctgacccacggggagatctctggcttggcctccgagctggcacctctctcacccacattctctctctgcagctggacccacaaaccgtggagaccaagaactggcacacggacgtgattgagatgaacggggtgagccggggatgggaatgatcagtggcgtgagccgggaggtggaacgtctgtgcagcaggtgggcagcccggccctgtggctgctcctggggccgctgtgccgcctcgacctccccgcagcccagccccctctcccctcctgcccacaccctgcccgctgctgtcctgcaggtgttgtgttgagggagacctgggtgtgagctagccctcatttgcagtcttggggaggggacccctgtgttttgggggcattcctcgggcactcacaccctggggaatctttacctgcctcaccccccaaccagatcaaagtggaattttccatgaaattcaccagccgagatatgagcctgaagaggaccccgtccaaaaagcagaccggcgtcttcggtgtgaagatcagcgtggtgacgaagtaggtgctgcctcgggtctcccagtcctggcgtcggtgccccgggtcccccccagcccgggccccccagccctccccgccggtgcccatcctggcacctaatcagttaccccccgctcggcggtggcagatggccggtgtggatctagagtggccgcagaggcgctcacaggacacttcagaagcacgcgagccagcacctaaacgctggaaggtctcttgtgagatcccagatcgtctgctcctcgtaacaagcgggaagctctgtcagccgggggcctacgtttgggctcggcaccaacggggactggcggcccctcgggaaagggcacgtgtcccccggttcaccaccaccctggccccttgtctcaggcctgacccacctcctcatgtgggctgcctgctgggcctcctacaagcatctgaatctgggggacgttctttccctagagtctcggccttaccttcccaagttcccaaggcttctcctgcccacgtccgtcgatgccccttcggcaggcctcgggtgggctggctggggtggggtgcggtggcctctttctctgccctgcccctgcccccgccccagctctccatcccaaatgctagaagctctccagggtgtgtgtgtgctgggtgggggttgctacgggagagctgtcgtgggggctgccctccacccatcctcacgctccaccccaggcgggagcgctccaaggtgccctacatcgtccggcagtgtgtggaggaggtggagaagaggggtatcgaggaggttggcatctacaggatatcgggcgtggccacggacatccaggcgctcaaggccgtcttcgatgccagtgagtctgggaggcccagccggggcaggtgtggctgtgtctgagcaggctggtgggatggacaggagagctcgggggaaccaggagcctccctggagaggaggcttgctctgcttcagagtccccgtggcaagtgctttctcttgtaatcccctcccctccaatctcttgtcccttgctgcaggtaagcaactgcagaaactcacaagggccgactcacttgcccaggatgacccaacttgtaggttttggttctggacttaaaactcagatctgactccagtgtctttcttgctagttcctgggtgcctggtgagccgcagggaaagagctttgagcctgcacctgctgtctccagggccccaggtcccctctggggcagtgctgcctctgcgtgaagcccaccatggtgaggcctgacctttctggtttctcctccctgctcctgctggttcaggtgcagcagccacataccccactgtcaagaaacctgcactggccaggcagggatgaatccgtggggagcctggagtggaggacggggtggggcctgggaactggccggcgttggtgcctctgtgcagcctagaagctgaggctttgtcggaacatgcttttacgtgtgaaaagtgtgcaatgccttccagagaggggcttagcgatggagaggttccagtcggaaggaagctgcaggccacatggtatgaatgtggctctgaactctgggtgatggatttcactccccaaacaccctttcccaagcagccacagcagatggcccccaggctatctctccctgttcccccaaccccgacccacagagccgagtcacagacacctgtgggccctctctacatcctgctcttccaggggagaccagaaccagagctggagtgggtgggggctgtgtcaggatgggtcgggggtggaacggggctgctggcccagctaaggctgcctgacctcggccccacccctgcagataacaaggacatcctgctgatgctgagtgacatggacatcaacgccatcgccgggacgctcaagctgtacttccgggaactgcccgagccgctcctcacggaccgactctacccagccttcatggagggcatcggtgaggccctgagggctcctaggactgggctgggccagactgagccaggactccctgcccggagaagtaaccagcaggagaaatatctgtggcttcctttgctggctgaccttcccagtgcactggggcctgtggctgaggggtccgagggtgaggtgtggcctgctgggacctggtgcagacactgggccctttctcgcctgcctcttgcccctgatgtccccatgggcagccccttctgcttcctatttggacgttggcctcttgcttggaagctcgagcatccagggaagactgccctgaggtgagtggccagaagccagcatcccagaaccaaggaggaggctggcttaagccatagggcactcgagatgggttgtgctgagccttccagcgggaccacacaccgtcccgtcacctctgcggagggccccggccagcaggccttccgcctccacccacctgggccaaacccagccccaaggaatcccttcagccttctctgctcctggggcagactggagcttcagcccccacggaaggctgcttgcacccacgctccagcagcagaaggggtggagaaagagaatccaccgctggcaggatatgtccctactggcttaaccttagccacacagaccagggggtgtcctgttacgagacaggggatgccccagcacccaaggcctatgcagtcagctgcaggaagggggtctgctcccaccagccggcctcctggctgagttaccagtcgtggtggggcctcctggaggaagcagctgctgacagcccacccagacaccaggccctcccctgtggggtctgctccccaaaggcctggaagcctgggctctctcccgcaggggcccacagcctcacgaccacaggggccctggcggggagccccaggagccaaacgccacactggcccttctctcccacagccctgtcagaccctgctgccaaggaaaactgcatgatgcacctgctc

SEQ ID NO: 10429 - DNA, 551 bp, Homo sapiens
agctgtttcgggcacatttgttctccagcccagactcccacctgctgtccctcttcaagctggacccacaaaccgtggagaccaagaactggcacacggacgtgattgagatgaacgggatcaaagtggaattttccatgaaattcaccagccgagatatgagcctgaagaggaccccgtccaaaaagcagaccggcgtcttcggtgtgaagatcagcgtggtgacgaagcgggagcgctccaaggtgccctacatcgtccggcagtgtgtggaggaggtggagaagaggggtatcgaggaggttggcatctacaggatatcgggcgtggccacggacatccaggcgctcaaggccgtcttcgatgccaataacaaggacatcctgctgatgctgagtgacatggacatcaacgccatcgccgggacgctcaagctgtacttccgggaactgcccgagccgctcctcacggaccgactctacccagccttcatggagggcatcgccctgtcagaccctgctgccaaggaaaactgcatgatgcacctgctc

SEQ ID NO: 10430 - DNA, 3486 bp, Homo sapiens
acctctctcacccacattctctctctgcagctggacccacaaaccgtggagaccaagaactggcacacggacgtgattgagatgaacggggtgagccggggatgggaatgatcagtggcgtgagccgggaggtggaacgtctgtgcagcaggtgggcagcccggccctgtggctgctcctggggccgctgtgccgcctcgacctccccgcagcccagccccctctcccctcctgcccacaccctgcccgctgctgtcctgcaggtgttgtgttgagggagacctgggtgtgagctagccctcatttgcagtcttggggaggggacccctgtgttttgggggcattcctcgggcactcacaccctggggaatctttacctgcctcaccccccaaccagatcaaagtggaattttccatgaaattcaccagccgagatatgagcctgaagaggaccccgtccaaaaagcagaccggcgtcttcggtgtgaagatcagcgtggtgacgaagtaggtgctgcctcgggtctcccagtcctggcgtcggtgccccgggtcccccccagcccgggccccccagccctccccgccggtgcccatcctggcacctaatcagttaccccccgctcggcggtggcagatggccggtgtggatctagagtggccgcagaggcgctcacaggacacttcagaagcacgcgagccagcacctaaacgctggaaggtctcttgtgagatcccagatcgtctgctcctcgtaacaagcgggaagctctgtcagccgggggcctacgtttgggctcggcaccaacggggactggcggcccctcgggaaagggcacgtgtcccccggttcaccaccaccctggccccttgtctcaggcctgacccacctcctcatgtgggctgcctgctgggcctcctacaagcatctgaatctgggggacgttctttccctagagtctcggccttaccttcccaagttcccaaggcttctcctgcccacgtccgtcgatgccccttcggcaggcctcgggtgggctggctggggtggggtgcggtggcctctttctctgccctgcccctgcccccgccccagctctccatcccaaatgctagaagctctccagggtgtgtgtgtgctgggtgggggttgctacgggagagctgtcgtgggggctgccctccacccatcctcacgctccaccccaggcgggagcgctccaaggtgccctacatcgtccggcagtgtgtggaggaggtggagaagaggggtatcgaggaggttggcatctacaggatatcgggcgtggccacggacatccaggcgctcaaggccgtcttcgatgccagtgagtctgggaggcccagccggggcaggtgtggctgtgtctgagcaggctggtgggatggacaggagagctcgggggaaccaggagcctccctggagaggaggcttgctctgcttcagagtccccgtggcaagtgctttctcttgtaatcccctcccctccaatctcttgtcccttgctgcaggtaagcaactgcagaaactcacaagggccgactcacttgcccaggatgacccaacttgtaggttttggttctggacttaaaactcagatctgactccagtgtctttcttgctagttcctgggtgcctggtgagccgcagggaaagagctttgagcctgcacctgctgtctccagggccccaggtcccctctggggcagtgctgcctctgcgtgaagcccaccatggtgaggcctgacctttctggtttctcctccctgctcctgctggttcaggtgcagcagccacataccccactgtcaagaaacctgcactggccaggcagggatgaatccgtggggagcctggagtggaggacggggtggggcctgggaactggccggcgttggtgcctctgtgcagcctagaagctgaggctttgtcggaacatgcttttacgtgtgaaaagtgtgcaatgccttccagagaggggcttagcgatggagaggttccagtcggaaggaagctgcaggccacatggtatgaatgtggctctgaactctgggtgatggatttcactccccaaacaccctttcccaagcagccacagcagatggcccccaggctatctctccctgttcccccaaccccgacccacagagccgagtcacagacacctgtgggccctctctacatcctgctcttccaggggagaccagaaccagagctggagtgggtgggggctgtgtcaggatgggtcgggggtggaacggggctgctggcccagctaaggctgcctgacctcggccccacccctgcagataacaaggacatcctgctgatgctgagtgacatggacatcaacgccatcgccgggacgctcaagctgtacttccgggaactgcccgagccgctcctcacggaccgactctacccagccttcatggagggcatcggtgaggccctgagggctcctaggactgggctgggccagactgagccaggactccctgcccggagaagtaaccagcaggagaaatatctgtggcttcctttgctggctgaccttcccagtgcactggggcctgtggctgaggggtccgagggtgaggtgtggcctgctgggacctggtgcagacactgggccctttctcgcctgcctcttgcccctgatgtccccatgggcagccccttctgcttcctatttggacgttggcctcttgcttggaagctcgagcatccagggaagactgccctgaggtgagtggccagaagccagcatcccagaaccaaggaggaggctggcttaagccatagggcactcgagatgggttgtgctgagccttccagcgggaccacacaccgtcccgtcacctctgcggagggccccggccagcaggccttccgcctccacccacctgggccaaacccagccccaaggaatcccttcagccttctctgctcctggggcagactggagcttcagcccccacggaaggctgcttgcacccacgctccagcagcagaaggggtggagaaagagaatccaccgctggcaggatatgtccctactggcttaaccttagccacacagaccagggggtgtcctgttacgagacaggggatgccccagcacccaaggcctatgcagtcagctgcaggaagggggtctgctcccaccagccggcctcctggctgagttaccagtcgtggtggggcctcctggaggaagcagctgctgacagcccacccagacaccaggccctcccctgtggggtctgctccccaaaggcctggaagcctgggctctctcccgcaggggcccacagcctcacgaccacaggggccctggcggggagccccaggagccaaacgccacactggcccttctctcccacagccctgtcagaccctgctgccaaggaaaactgcatgatgcacctgctccgctccctgcccgaccccaacctcatcac

SEQ ID NO: 10431 - DNA, 551 bp, Homo sapiens
acctctctcacccacattctctctctgcagctggacccacaaaccgtggagaccaagaactggcacacggacgtgattgagatgaacgggatcaaagtggaattttccatgaaattcaccagccgagatatgagcctgaagaggaccccgtccaaaaagcagaccggcgtcttcggtgtgaagatcagcgtggtgacgaagcgggagcgctccaaggtgccctacatcgtccggcagtgtgtggaggaggtggagaagaggggtatcgaggaggttggcatctacaggatatcgggcgtggccacggacatccaggcgctcaaggccgtcttcgatgccaataacaaggacatcctgctgatgctgagtgacatggacatcaacgccatcgccgggacgctcaagctgtacttccgggaactgcccgagccgctcctcacggaccgactctacccagccttcatggagggcatcgccctgtcagaccctgctgccaaggaaaactgcatgatgcacctgctccgctccctgcccgaccccaacctcatcac

SEQ ID NO: 10432 - DNA, 807 bp, Homo sapiens
gtgctcgttccatgaaattgggggatgtggatgcttgaacgggctctcagctagtgtgccttccgtgcagaggaggtaacactccccagggcagccagacacccttgtggagtgggatggaaagctgggaggaaggggctggccggcaccatggagatattttggtttgcaggaggattctgggctttatgagcactttaatgcaaccagggcaggcagcaccacgggacgggaactgtaagctgcacctgttgaattctgaaggtccgggctgcccgtgggccccgggaagtgggggtgcccagcttgtggggtgcaggcggggaggggaccgtgtggtggtggagacgccatggtacagcctgtctcccgatcccccaggtcccctgaggccttagagatgaatctcccagaagtggcagccgcggcagggacaccaggatcatgaaggacctgggaggtgaacccgctgctcagttcctggccctcgtcccttagacccagtcctcggagcagaactgggggaagctgagatttctgtgggctgcgtgcccacctcctccctcttcgttggtcctcccacgcgcccgcccccgagtgggagcagagccatgtgagctgagttggagctgctcgctgccgagaattgcatcagccccgcctggcaggctggagcgggagcctgttgctatggtgaccaccaggcttcaaaccagtgagaaggatgagatggttgccgggcgaggttttctcaccatgtgatgcgtgtgacaggctgacaggttcggtagacctggacccagccct

SEQ ID NO: 10433 - DNA, 501 bp, Homo sapiens
gtgctcgttccatgaaattgggggatgtggatgcttgaacgggctctcagctagtgtgccttccgtgcagaggaggtcccctgaggccttagagatgaatctcccagaagtggcagccgcggcagggacaccaggatcatgaaggacctgggaggtgaacccgctgctcagttcctggccctcgtcccttagacccagtcctcggagcagaactgggggaagctgagatttctgtgggctgcgtgcccacctcctccctcttcgttggtcctcccacgcgcccgcccccgagtgggagcagagccatgtgagctgagttggagctgctcgctgccgagaattgcatcagccccgcctggcaggctggagcgggagcctgttgctatggtgaccaccaggcttcaaaccagtgagaaggatgagatggttgccgggcgaggttttctcaccatgtgatgcgtgtgacaggctgacaggttcggtagacctggacccagccct

SEQ ID NO: 10434 - DNA, 3431 bp, Homo sapiens
gagaccaagaactggcacacggacgtgattgagatgaacggggtgagccggggatgggaatgatcagtggcgtgagccgggaggtggaacgtctgtgcagcaggtgggcagcccggccctgtggctgctcctggggccgctgtgccgcctcgacctccccgcagcccagccccctctcccctcctgcccacaccctgcccgctgctgtcctgcaggtgttgtgttgagggagacctgggtgtgagctagccctcatttgcagtcttggggaggggacccctgtgttttgggggcattcctcgggcactcacaccctggggaatctttacctgcctcaccccccaaccagatcaaagtggaattttccatgaaattcaccagccgagatatgagcctgaagaggaccccgtccaaaaagcagaccggcgtcttcggtgtgaagatcagcgtggtgacgaagtaggtgctgcctcgggtctcccagtcctggcgtcggtgccccgggtcccccccagcccgggccccccagccctccccgccggtgcccatcctggcacctaatcagttaccccccgctcggcggtggcagatggccggtgtggatctagagtggccgcagaggcgctcacaggacacttcagaagcacgcgagccagcacctaaacgctggaaggtctcttgtgagatcccagatcgtctgctcctcgtaacaagcgggaagctctgtcagccgggggcctacgtttgggctcggcaccaacggggactggcggcccctcgggaaagggcacgtgtcccccggttcaccaccaccctggccccttgtctcaggcctgacccacctcctcatgtgggctgcctgctgggcctcctacaagcatctgaatctgggggacgttctttccctagagtctcggccttaccttcccaagttcccaaggcttctcctgcccacgtccgtcgatgccccttcggcaggcctcgggtgggctggctggggtggggtgcggtggcctctttctctgccctgcccctgcccccgccccagctctccatcccaaatgctagaagctctccagggtgtgtgtgtgctgggtgggggttgctacgggagagctgtcgtgggggctgccctccacccatcctcacgctccaccccaggcgggagcgctccaaggtgccctacatcgtccggcagtgtgtggaggaggtggagaagaggggtatcgaggaggttggcatctacaggatatcgggcgtggccacggacatccaggcgctcaaggccgtcttcgatgccagtgagtctgggaggcccagccggggcaggtgtggctgtgtctgagcaggctggtgggatggacaggagagctcgggggaaccaggagcctccctggagaggaggcttgctctgcttcagagtccccgtggcaagtgctttctcttgtaatcccctcccctccaatctcttgtcccttgctgcaggtaagcaactgcagaaactcacaagggccgactcacttgcccaggatgacccaacttgtaggttttggttctggacttaaaactcagatctgactccagtgtctttcttgctagttcctgggtgcctggtgagccgcagggaaagagctttgagcctgcacctgctgtctccagggccccaggtcccctctggggcagtgctgcctctgcgtgaagcccaccatggtgaggcctgacctttctggtttctcctccctgctcctgctggttcaggtgcagcagccacataccccactgtcaagaaacctgcactggccaggcagggatgaatccgtggggagcctggagtggaggacggggtggggcctgggaactggccggcgttggtgcctctgtgcagcctagaagctgaggctttgtcggaacatgcttttacgtgtgaaaagtgtgcaatgccttccagagaggggcttagcgatggagaggttccagtcggaaggaagctgcaggccacatggtatgaatgtggctctgaactctgggtgatggatttcactccccaaacaccctttcccaagcagccacagcagatggcccccaggctatctctccctgttcccccaaccccgacccacagagccgagtcacagacacctgtgggccctctctacatcctgctcttccaggggagaccagaaccagagctggagtgggtgggggctgtgtcaggatgggtcgggggtggaacggggctgctggcccagctaaggctgcctgacctcggccccacccctgcagataacaaggacatcctgctgatgctgagtgacatggacatcaacgccatcgccgggacgctcaagctgtacttccgggaactgcccgagccgctcctcacggaccgactctacccagccttcatggagggcatcggtgaggccctgagggctcctaggactgggctgggccagactgagccaggactccctgcccggagaagtaaccagcaggagaaatatctgtggcttcctttgctggctgaccttcccagtgcactggggcctgtggctgaggggtccgagggtgaggtgtggcctgctgggacctggtgcagacactgggccctttctcgcctgcctcttgcccctgatgtccccatgggcagccccttctgcttcctatttggacgttggcctcttgcttggaagctcgagcatccagggaagactgccctgaggtgagtggccagaagccagcatcccagaaccaaggaggaggctggcttaagccatagggcactcgagatgggttgtgctgagccttccagcgggaccacacaccgtcccgtcacctctgcggagggccccggccagcaggccttccgcctccacccacctgggccaaacccagccccaaggaatcccttcagccttctctgctcctggggcagactggagcttcagcccccacggaaggctgcttgcacccacgctccagcagcagaaggggtggagaaagagaatccaccgctggcaggatatgtccctactggcttaaccttagccacacagaccagggggtgtcctgttacgagacaggggatgccccagcacccaaggcctatgcagtcagctgcaggaagggggtctgctcccaccagccggcctcctggctgagttaccagtcgtggtggggcctcctggaggaagcagctgctgacagcccacccagacaccaggccctcccctgtggggtctgctccccaaaggcctggaagcctgggctctctcccgcaggggcccacagcctcacgaccacaggggccctggcggggagccccaggagccaaacgccacactggcccttctctcccacagccctgtcagaccctgctgccaaggaaaactgcatgatgcacctgctccgctccctgcccgaccccaacc

SEQ ID NO: 10435 - DNA, 557 bp, Homo sapiens
gagaccaagaactggcacacggacgtgattgagatgaacggggtgagccggggatgggaatgatcagtggcgtgagccgggaggtggaacgtctgtgcagcagatcaaagtggaattttccatgaaattcaccagccgagatatgagcctgaagaggaccccgtccaaaaagcagaccggcgtcttcggtgtgaagatcagcgtggtgacgaagcgggagcgctccaaggtgccctacatcgtccggcagtgtgtggaggaggtggagaagaggggtatcgaggaggttggcatctacaggatatcgggcgtggccacggacatccaggcgctcaaggccgtcttcgatgccaataacaaggacatcctgctgatgctgagtgacatggacatcaacgccatcgccgggacgctcaagctgtacttccgggaactgcccgagccgctcctcacggaccgactctacccagccttcatggagggcatcgccctgtcagaccctgctgccaaggaaaactgcatgatgcacctgctccgctccctgcccgaccccaacc

SEQ ID NO: 10436 - DNA, 878 bp, Homo sapiens
cggccgcagcgggggacccgcgacctggagcagcgggaggccgaggccaagggccgcccgggctcgcccctcgccgcggaggagacccccgggcgcgagcacctgcccccgtggcggcgccgcaggttcctgcgggtgcccgagcgggactcgcccggccacagctcgccggagagagacagcgacggcagccggcacagctccgaccgcgaggacgacttctccgcaggtgggcgccccccccagaccccgctcgaccccgccgcgcgccccccaccccgggctgccgggaccccttcccggccgactccgcggccctgtttaacctcgagctcggggccggggagcgggcgggaaggagggtgagctgcgcccgtgtaccccaaagccacctgtggagcttagaaaacacgtgcaaggcgacgttaagctcgggcgactctatgaaaatgaactggcggcggcggcagggccggcgcccgggcctttgcgctttgcgctccgtggccctgacatcccccagcccctccctccggcctggcccccgccagatcccttggcgccaccgggtgctgtcacccttctgtctgtcacccctctctgcacacaccccaggggcttcccatctcccggaaatccccgatccttctgagctccgctttcctaaccgcggaaggccgaaccttccactccattttctgaacttagtctcctcttctccaggctgctctgtgtgttggggccacgtgcaaacttcagggaagggccacggccctcaccagccccctctgcggactcgttttcttcttagaaggcggcgcccggcctcttggctttctaggagtctgggagcaagagggcaaggggaggcttaggcc

SEQ ID NO: 10437 - DNA, 384 bp, Homo sapiens
cggccgcagcgggggacccgcgacctggagcagcgggaggccgaggccaagggccgcccgggctcgcccctcgccgcggaggagacccccgggcgcgagcacctgcccccgtggcggcgccgcaggttcctgcgggtgcccgagcgggactcgcccggccacagctcgccggagagagacagcgacggcagccggcacagctccgaccgcgaggacgacttctccgcaggctgctctgtgtgttggggccacgtgcaaacttcagggaagggccacggccctcaccagccccctctgcggactcgttttcttcttagaaggcggcgcccggcctcttggctttctaggagtctgggagcaagagggcaaggggaggcttaggcc

SEQ ID NO: 10438 - DNA, 6186 bp, Homo sapiens
tcgaggaggttggcatctacaggatatcgggcgtggccacggacatccaggcgctcaaggccgtcttcgatgccagtgagtctgggaggcccagccggggcaggtgtggctgtgtctgagcaggctggtgggatggacaggagagctcgggggaaccaggagcctccctggagaggaggcttgctctgcttcagagtccccgtggcaagtgctttctcttgtaatcccctcccctccaatctcttgtcccttgctgcaggtaagcaactgcagaaactcacaagggccgactcacttgcccaggatgacccaacttgtaggttttggttctggacttaaaactcagatctgactccagtgtctttcttgctagttcctgggtgcctggtgagccgcagggaaagagctttgagcctgcacctgctgtctccagggccccaggtcccctctggggcagtgctgcctctgcgtgaagcccaccatggtgaggcctgacctttctggtttctcctccctgctcctgctggttcaggtgcagcagccacataccccactgtcaagaaacctgcactggccaggcagggatgaatccgtggggagcctggagtggaggacggggtggggcctgggaactggccggcgttggtgcctctgtgcagcctagaagctgaggctttgtcggaacatgcttttacgtgtgaaaagtgtgcaatgccttccagagaggggcttagcgatggagaggttccagtcggaaggaagctgcaggccacatggtatgaatgtggctctgaactctgggtgatggatttcactccccaaacaccctttcccaagcagccacagcagatggcccccaggctatctctccctgttcccccaaccccgacccacagagccgagtcacagacacctgtgggccctctctacatcctgctcttccaggggagaccagaaccagagctggagtgggtgggggctgtgtcaggatgggtcgggggtggaacggggctgctggcccagctaaggctgcctgacctcggccccacccctgcagataacaaggacatcctgctgatgctgagtgacatggacatcaacgccatcgccgggacgctcaagctgtacttccgggaactgcccgagccgctcctcacggaccgactctacccagccttcatggagggcatcggtgaggccctgagggctcctaggactgggctgggccagactgagccaggactccctgcccggagaagtaaccagcaggagaaatatctgtggcttcctttgctggctgaccttcccagtgcactggggcctgtggctgaggggtccgagggtgaggtgtggcctgctgggacctggtgcagacactgggccctttctcgcctgcctcttgcccctgatgtccccatgggcagccccttctgcttcctatttggacgttggcctcttgcttggaagctcgagcatccagggaagactgccctgaggtgagtggccagaagccagcatcccagaaccaaggaggaggctggcttaagccatagggcactcgagatgggttgtgctgagccttccagcgggaccacacaccgtcccgtcacctctgcggagggccccggccagcaggccttccgcctccacccacctgggccaaacccagccccaaggaatcccttcagccttctctgctcctggggcagactggagcttcagcccccacggaaggctgcttgcacccacgctccagcagcagaaggggtggagaaagagaatccaccgctggcaggatatgtccctactggcttaaccttagccacacagaccagggggtgtcctgttacgagacaggggatgccccagcacccaaggcctatgcagtcagctgcaggaagggggtctgctcccaccagccggcctcctggctgagttaccagtcgtggtggggcctcctggaggaagcagctgctgacagcccacccagacaccaggccctcccctgtggggtctgctccccaaaggcctggaagcctgggctctctcccgcaggggcccacagcctcacgaccacaggggccctggcggggagccccaggagccaaacgccacactggcccttctctcccacagccctgtcagaccctgctgccaaggaaaactgcatgatgcacctgctccgctccctgcccgaccccaacctcatcaccttcctcttcctgctggaacacttgaaaaggtaacggggagcggccccaaccccacctcctcagtccctcctcatgaaaaggtaacggggaggggccccaaccccacctcctcagtccctcctcgtgaaaaggtaacggggagtggccccaaccccacctcctcagtccctcctcgtgggcgctggcctccatcgggctgtctgtggggagtgagagtttgctttccaagttcttgcactcatgtttttctgttttgagaaatatttgggtcccgtaaccagtagtaacctcaaatattgaccatagaatgctcagaatggcagggtgagagcccaggactacaggcaggttttataatcagtgggtcccaacctactggtggttcattcaacgaatgtagccatttctagatgcagtggggggtggacagcagtggggggtggacagcagtggggggtggacagcagtggggaatggacagtagtggggatggacagcagtgggggaatggacagcagtggggatggacagcagtgggggacagacagcaggaggatacattgtaagccttgatgcaggtgctgcttttcagttacatagagacgtgtggactgtgttacagcatgggttgtattgtgggccacagtcaaaaaaggtgaaacccactggtcttggcccacacctcactagacatagggaaactgagtccccacaccaggcggagacttgcttgggttagtagcagacctgtccttagagccctcaacttccagatcctaaattcagacccttcttgccttcccaccaccctttctagtcaggtccaaccaagagtggctaaagttggttgtacttgtagcaaagttcagaggtcctcaggcttgcgtggggaggtggtccctgggcgtcccttaaacccacctgcacgccaggaccggggagccccctcagactgctctgcggaacaattcttccctgagctcagccccagctcagggccaggccccccgctgcagctcagccacgccaggctcgggagagccagtggagacctggacgcgcccggggctggtgtcttgtttttcccatcatgaaacatttttcctctggtttggccaggactagagccccaaccaattccgaaagcatttggcaagccttgtggggaggagtgggaagggaaaattcattcggcttccaccctgggaactgggcacagtctgttcccacatctgggcccctggctggaccgtgtgcgcgcgtgtggtgaggggctggccccgctgcacagctgcctgttggcatcacagtgtttgtttgcctgtttccaaagcaggcgcagccacagctcctgcctggagggtgggaatgatggtattgagggtgagaggcgctgcttagggtgggtgggtctcagcccagaaacattttttgagactgaaggagaaccagaggccctctgatatgtttgctgaccctgggcctgcctggacaccagccctgatggcagctcctgctgttaccccagggaagcatcgcagagcatctggcctgttgagtaagagaagcaggagaggatccagagggaggacaatcctgggtcccacgaggcagacggagaggcataggaggcagccctgggtcccatgaggcagacccttccggagaggcacaagaggaagccctgggtcccacgaggccgacctttccggacaggcacggggggacagtccccgggctcatctggaagtagggctgctcctgccccagcacagctggcagagccccgggtctagctagtgactcctgctgggctccaggccctgcctgcctttctcccctgccccacccaccttaactcttcttttgggccacttagcacatgagaaagcaacagagcggtaggtcctggaggcagctaccggggttcaaatcccagctctaccagttgctggctgtgtgaccttgggcaagtcacttaacccctctgtacttcggtttcttcatctacacgatgggggtgacgataatcatatttacctcaaaggactgcggcgagtgtgagttgttccagggagttttcagaacagtatctgctctcaggcaagggagctggagttggcatctgtgggctccctggctctggcagttcaccatcagttcagggggacccagcagctggagatgttagcacagaacactggcacatggctggggccctgctctcctggatgagtccccttcccccgggggaggtccccactcctaggagacagagacgaggtgaccccttccaggagtccttcaggagttcccacagcgaaggccaagggtcctggagctccgagtggctgctgaggaagggcttctttcctccccatcttctccttcttagggttgccgagaaggagcccatcaacaaaatgtcacttcacaacctggctaccgtgtttggacccacgttactgagaccctcagaagtggagagcaaagcacacctcacctcggctgcggacatctggtcccatgacgtcatggcgcaggtaccctggcaccgcccgggcccgtggctggcggagggtgacggtcccatgacgtcatggcgcaggtaccctggcaccgcccgggcccgtggctggcggagggtgacggtcccatgacgtcatggcgcaggtaccctggcaccgcccgggcccgtggctggcggagggtgacggtcccatgacgtcatggcgtaggtaccctggcaccgcccgggcccgtggctggcggagggtgacggtcccatgacgtcatggcgcaggtaccctggcaccgcccgggcccgtggctggcggagggtgacggtcccatgacgtcatggcgcaggtaccctggcaccgcccgggcccgtggctggcggagggtgacggtcccatgacgtcatggcgcaggtaccctggcaccgcccgggcccgtggctggcggagggtgagaccagccccttaggaggagagagaacagctcagagtccccacacctcttccctcgtgggaagctgggttgatgggctatggggtgtcaccagggaggcaggactgtagacacttctgcccctcccaggccaaaacaaacatgtgagcctagaccagggcccagagatgctggctgcattctcaggagggcctcagtctcagaaagcaagcccaggggtggggagatgctgggcccttgtcctcatgggtggaagctctgaggttgcttccaagggcgggaggcttccctgggattcctgcaagacccagagcaggggccggactgtggccgcctcaggacagagcagaagcttatggccaggttggggaagtggccctaggcccccgaccctctgccccgtagcaccttccacggctgcagaaaggcaaacacacctgggctccccaggaaggggcggtggccggagccagtctagggagtgggaggggcaacacaggctggagtcagcaaggacgaggcctaggacagggagcccagcctccgccttcctgtctccccacaggtccaggtcctcctctactacctgcagcacccccccatttccttcgcagaactcaagcggaacacactgtacttctccaccgacgtgtagcccgaggcagggtggctgcgggcgggtggtggaaccagcccctccagcctggggtccaactcagacttgaaagactgcaatagaaaactcccaaacccagcactccagactcgagggaagccagcttccaagaactggaatgcgtacgtcttttgtgccaccttgtacaaagccggctgcccagccccagcctcaccaccgcatcccacctcctgccctccatacctctagttgtgtctgatgctccgtgctgttcgggaattgttttatgtacacttgtcaggcagaaaaggtagtgaccggcccggcgtgggcacacagacagcccgctttgttctttcattt

SEQ ID NO: 10439 - DNA, 850 bp, Homo sapiens
tcgaggaggttggcatctacaggatatcgggcgtggccacggacatccaggcgctcaaggccgtcttcgatgccaataacaaggacatcctgctgatgctgagtgacatggacatcaacgccatcgccgggacgctcaagctgtacttccgggaactgcccgagccgctcctcacggaccgactctacccagccttcatggagggcatcgccctgtcagaccctgctgccaaggaaaactgcatgatgcacctgctccgctccctgcccgaccccaacctcatcaccttcctcttcctgctggaacacttgaaaagggttgccgagaaggagcccatcaacaaaatgtcacttcacaacctggctaccgtgtttggacccacgttactgagaccctcagaagtggagagcaaagcacacctcacctcggctgcggacatctggtcccatgacgtcatggcgcagaactcaagcggaacacactgtacttctccaccgacgtgtagcccgaggcagggtggctgcgggcgggtggtggaaccagcccctccagcctggggtccaactcagacttgaaagactgcaatagaaaactcccaaacccagcactccagactcgagggaagccagcttccaagaactggaatgcgtacgtcttttgtgccaccttgtacaaagccggctgcccagccccagcctcaccaccgcatcccacctcctgccctccatacctctagttgtgtctgatgctccgtgctgttcgggaattgttttatgtacacttgtcaggcagaaaaggtagtgaccggcccggcgtgggcacacagacagcccgctttgttctttcattt

SEQ ID NO: 10440 - DNA, 12006 bp, Homo sapiens
agctacaaacgtgctcctctttaggatgccagcaggctgctggctccctccctccctacccctcctccccttccccttccctcctctcctcgccacgcgcctccctcccctcccccttgctggaagagcactccggagcggctgcccgatgctggagtccgtgcggcagcatcagcaaggtggctgagtggccgggctgctggtgggcgccggggagcctggagcgatggctgcacgctcccgccgcggggacagaggctgccatggagattctcctcattattcgcttctgctgtaactgcacctatggtaacccaggtgctcgctgtgggaggtggcggaccctcccacctctgggggccggctggagtgggcttagatgtggccggggaggttagagggccgcagggaaggagggtgggcgagcggctggacctgaattcccccttcgttttggcggcatccagcctagagttgaaacctgggggctgctcagagcagggccgcttgcaaatggaaggaccaggctggaggggtccaggtggccccgaggatcggtggggaattggtgggctagtgtgagagaacttcctggaggggctgttagggagagacggcgacgagctgtgcccgcagacgtagtagccctgaggccagggagagggtctgcgggggccaggcacagcgtggcgatgggtggcgatggtccggacggcggcgttgccagccgagagggtgccagcgcgagccagagggagaagttgggagtttctttgtttctggagagaggcgcggaggctgggcggcacggtattgtgtgctccgcgcacatgcagcagtaggcggaggacacggaggggctgtgggagcaggaaggagaggtttgtttccagccgtgagagacccccagccgaggtctgggccctcaactgtggaaggcaggtcggcagggccagcgggagaggggtgtggcaagctactctgtgaaggtcacacacacacacacacacacacacaccacctttcggtggaagggacccggaccatcctccttgcagctcccgcagctggctgggggctggggggaagtcccgggacaggtgcatgtcatcaacacgactgtcggtcgtaggaggatgaagccggcccaggtagggaggtgtccagaagcccgtggaccctgcctcaagaggcaagacgtgccaaggggtgccctgcctgcctgtggcagggagtggggtgggcacgtgtggctcccaggccggctgctctgggcctgagtctgtgggagcagcaggcggctggttttaggaccttcctcttccttcccaccaggtgtttcggctctgcacccttctcagtcactttgctttcctatctccctggtaacctggagctccttggagctccttgtcgaaggctgacttgagggggatggtggcttgccggaagagagatggcaggtttcctgggctccttcccaggggcggctgtgctggaggggctgtgtggggccagtgccccctgaccttctcaggaccctcttgatggaagcaagctctgaggcagcctctctcctgcggcccagcagggcggctgcaggaaccctgttctcacttgaaattggcctggtcagcgatcagaggagaaatggtctttttggtctggcctaggagttggtcaggtcttgactctgcctccctgaaaaggaaacgtacccttggcttcctctcccttccccaaaaggaagcttcgactcagtgaaacggacctgggacctggagttcacgttgcttcggtctccgtgatactgttgttgaagtcggcttcaaagtggggaatgaggagtgaaagggccagctcgtgaggagggggctcaccccatcctggtcactctttccaagaacgctcctgtggttcattgaggttttacaggtgctgcctttccctgaagaaggtgcagctcaaagcaaggagtgcgggtggatctacccagctcccaccacttgtagccacaagtctctggcctcagttgccttgtctgtaaaatggggctagtgagaattgcttcccgttttaatcacaggaaataatgagagcaaagcagttaactcagtacccttgggcacagagcgagtacccagcaaactagagagagaccagcttgctgcccaagtcagtgtcagtggagagggagagtgggtgaggccgggcaggaagcaggccagcctgcaggagcccagggacaggggaagggccagagcgagtgcctcaccctgagttctcaggggaccccagcgtgcaggggccgtggggagcacaaacttcagggccgctcttattcccccggttccctccgtatctgatgtggtcccagtgccgccaccccccccacccccaccccccccgtgcacctgccctcctggccgcccttccagggctcattccacagccttactcaggtggactctggaggtgaccacagacatgttaataacccctctgaaacccaacctgccatgtgttcagacctctgagcttagtcagaaacctcttcctcttgggacccaagagagggctgcggggagccgataatgcagtgtcagctttctgtggagccgccactccggagcccaccctggcaggtgtctgctgagcttgtgctttcttttgggtctctggggttctccagtgtgattttttccccctgaagatgggctgagccacaggtgggtgccttaaacagcctcagaaatggatcccacctgagctaggacctgggctgcaccctcagtgccgaggataccccaagactggcctcattccttcaagcttccatggcccatggggagggtctctggaaactgctagataagaaagggctacagatatgtcatatgaagtgtatttacgtaaaccagtggttggccgggtactcatgcctgtaatcccaacttttggcagactgaggcaggaggattgcttgaggccaggagttcgagaccagcttgtatttggcttgaggccaggagttcgagaccagcaacatagtgagaccttgtctctatatttatttttatttaaacgaagactcactgtgtcgcccaggctggagtgcaatggcgcaatctcagctcactgcaacctctgcctcctggattcaagagattcccctgcctcagcctcccaagtagttgggattataggcgcctgccaccacacctggctaatttttgtatttttagtagagatggggtttcaccatgttggccaggctgttcttgaactcctgacctcaaatgatccacccgcttcggcctcccaaagtgctgggattacaggcgtgagccaccctgcccggcccctcgtctctatatttttaaaaaaattaaaataaatacataaataaaacataaagcagtggttttcaaccattattatacattcaaatcagtaaagaagctttatagaaatgctgatggcccttgtggtcttgcagagatttgggttgagttgacggggctggggagcagcatctgtatcttttaaccgctcccccagtgattccgacaggcagccaagctcggactgcgggtaaggctggtggccctgctgaggctgcattttcttcacagccagcagattgctccctgaagtgtctgcttagccgcgcacggggtatttatatctcaggctttggagaactatcaggtttggggcccggctagggcgtgcgtgttcacgctgggacctgtcacaacctggtcttatgggacacccagtctgggatccttcttcccagatgaccaacctgcctctgtcactgcccctgcggcaggaggcccaaggtcatgaccccagggacagagcatccaggtgcaggactgaagctgagcctcctgttgggagggtgggcgcagccgcgtacaggaagggtgttgggaagtgttgatccaccagctgccacctccacctgtccctgctgaatcccagccatcctcacttggtgtccgggttgtggagggtgtggctcttgggggcctgggctggccttgcctgcgtcctcccagcctctttggggctctcatatgtgaggcctaacctgagttgcttcaggaaacctttgcccctcaggctgccacgtgtttgagagcacagccttttttctttttttttgagatggagttttgctcttgttacccaggctggagtgcagtggcatgatcttggctcgctacaacttccgcctcccgggttcaagtgatttccctgcctcagcctcccaaatagctgggattacaggcatgtgccaccacgcctggctaatttttgtatttttaatagagatggggtttcactggttggccaggctggcctcggggagcagagcctttctgtggagatcaggccagcctcctggcctccagcctccctgcctccagccttcctgtgctttgctatctggggtttgaggatgtggggaggggtctttcctctgagagatgaggccagtcctgtggatcacagtgaggcatgccaatcccagctggctgtgcctggccttcagctccaggagcctgagaatgataaggtctggagagctgcccttcctggaaacacagcatgtctccttcccccattctggggtcctgcatgtggcaggtgtgctagactctgcagggcatggctgggtggagctgtgtgattctggggttctgcgtgtggcaggtatgctggactctgcggggcgtggctgggtggagctgtgtgattctggggtcctgcatgtggcaggtgtgctagactctgcagggcatggctgggtggagctgtgtgattctggggttctgcgtgtggcaggtgtgctggactctacggggcgtggctgggtggagctgtgtgattctggggtcctgcgtgtggcaggtgtgctagactctgcggggcgtggctgggtggagctgtgtgattctggggtcctgcgtgtggcaggtgtgctggactcttcggggcgtggctgggtggagctgtgtgattctggggtcctgcgtgtggcaggtgtgctggactcttcggggcgtggctgggtggagctgtgtgattcagggctgggggtccaggagagcatctgccttgagccaggtgaggccaggacaggcctggggaggggggcggggcggctctcgatgaagccatgtctgatgggagaggaggcagggctgcggagggagcaggggctgccagggctgtgtgtcacctgtgtctgctgtttggtcggcccggggagtgagaacagaggtgggggctgccgtgggctcactctggtgtccctcgaggggtgttcacgtgggaagcatgcgggtggggggacgaagctggtctctggggtgttgggttgccctcgtccatcatcctcttcctccttctccctgtctcccccgacagctctgctctacaagcccattgaccgggtcactcggagcaccctagtcctacacgtgagtgtcaagcctccgaatggccagagagggcttaggagttcagtggaagactgagcctgggtgagagggtgctggagtcaccgagaacagtccacctggggaatcaggggttcctaggctccaaggatgcctgtctggcccgcggtatccatgccgccaggctagggcctgaatacagcttggctactaagcttgacgtggccaggtgctcccggggaggcaggcattcctgcttccccacccgctgcctcctggtctccagtgtccttggagcagctgcagggcagacacagggtttctctcccagctgctcggggggatgagcctccacctggtctccacactggggagagagtatgactgtggccaggagaagagggggcagccagggccctctcccctgctgtgctggctctgattttttttttttttttttttttttgaggcggagtctcactctgtcacccaggctggagtgcagtggtgcgatctcggctcactgcaacctctgcctcctgggttcaagcaattctcctgcctcagcctcccgagtagctgggactacaggcgcccgccaccacgcccagctaatttttatatttttactagagatggggtttcaccacgttgcccaggctggtctcgaacttctgacctcaagagatcccccgcctcggcctcccaaagtgctgggatttcaggcatgagccgccgtgcccggcctgactctgatttgtagttcagattttgcgggaattaggcaggtccctgagtgcccaccctttggatggggactgagcactccccggtggccacacatcaggccccagagccgctcccctcaactcaccgcctcacccttcccaggacctgctgaagcacacacctgtggaccaccccgactacccgctgctgcaggatgccctccgcatctcccagaacttcctgtccagcatcaacgaggacatcgacccccgccggactgcagtgacaacgcccaagggggaggtgagctcagagcccggcacggcccctcacccaggctgagaagtatcaggtccctcgtccccttctctcacacacgggcggcaggtccctcgtccccttctctcacacacgggcggcaggtccctcgtccccttctctcacacacgggcggcaggtccctcgtccccttctctcacacacgggcggcaggtccctcgtccccttctctcacacacgggcggcaggtccctcgtccccttctctcacacacgggcggcaccgggtgcctcctgcctctccaatcctgatcccccattcccagccaaggagaggttttcagcccttggtcaccctgatgacctgcagctttccaggccctaggctgagaagtttaagtccagtgtctcattaatcctcataataatctagggaggccgggcacggtggctcacacctgtaatcccagcactttgggaggctgaggcaggtggatcacttgagttagaagtttgagaccagcctggccaacatggtgaagccccgtctttactaaaaatacaaaaattagctgggcgtggtggcggatgcctgtagtgccagctactcaggaggctgaggcaggagaattgcttgaacccaggaggcggaggttacagtgagccgagatcgcaccactgcactccagcctgggtgacagagtgagactccatctcagaaataataataacaatccagtgagccagaagaacctgaggctggggagtctctccaggtccaccacgcagtctttcagccactggtgtcagagctggattcctcacctgggactgtctggaggcccacgccggggaagtggcctccgggtgcctcattcttgaatgcagacacctgcctctggccagtgtgatgccgtcagggtctcctaggaagcgaagggagcaggagcttggagctgcttcagctcggcctgcacacgcagtggcttgcggggagcccacagcaggaaaggctggcgttggaggtggtggaggccgtccaggttgccggaatgtccagtgggcacctgcatgtgggacagccgttccctgggggcccttcttgatgcaagggtggggacagcccagcaaggggagtaccaggaagcatgagagggacagttgccttcgtggattggcagccgggcccgggtgaaaggcttcctgtccaggggaggccattaggcggccgttacgagtgaggctgacagggtgtctgctcctgtggtctgtttacgagcccccagggtctcctggggagaaagtggtgagggacaggcctggacagtgtccactgggcagagagagccgattccgtgcggctcctggtgctgatgtgcagcgtctggggatcccgtcgtctgttttactctggggatatctgaaaaatctccagagggcttagcgtaccctccgttttcagtcatcctttttttgagactgaatctcattccatcgtccaggctggagtgcaatggcgtgacctcagctccactgcagcctccaccctctgggttcaagcaattctcctgcctcatcctcccaagtagctgagattacaggcaggcgtcaccatgtctggctagtttttgtatttttagtagagacggggtttcgccacgttggccaggctggtctcaaactcctgacctcaggtgatccacccgcctcagcctcccaaattgctgggatgacaggtgtgaaccactgcgcccggcctcggtcatcttaattgtatactttgaatacgctcacctacgtattacagcagatgtaggtcacaccgtgtatcatacaggaaaggctggcacagatggggacgaccccccggctctgagcgggggttggaaactctggaactcccacgtggagcagaaaccacccagagcccaggttagagttggctgcaggtcccctctgggcactgctgcagtcccaggctggagggcccaggtctcatccccagggggctggagaagccagggaggagtagcacagacaggcctgagtgggtctcgggtctcgggtctcggttgagccggggctagatgaagttcgccgccgcggtcgggagggattgcaaacggggatgttcgtgccccagggtggagaaaccaggtcgtcccgggcagggggctccagggttagccgcggagagccccgtgcgttgcacacacttaatgtgccaggcactgtgctgtttcacatgcaccatctcgatgagtcaccttatgaggcagacctcactgtccgcacttaacagaaggtgaatctgggattcagagaggtcagggagcctgtctgagatcacagctgagaagcctgttggcattcaaacccatgcccatgtgactccaaaggcagtgcttgaaccacctttggttaagggatgacaggctatgccgcctctcggtccagtcctccctggctggccgtgcccccgtgtgcaggctctgccctcggccgcattcccctctgagcaggctggggggtctgccatctccctcagacgcgacagctggtgaaggacggcttcctggtggaagtgtcagagagctcccggaagctgcggcacgtcttcctctttacagatgtcctactgtgtgccaagctgaagaagacctctgcagggtgagtgtgtgagtccaggggcacggggcgggggagggggtccggacctctgcggggtgagtgtgcgagtccggggcgggggagggggtcctgacctctgcggggtgagtgtgcgagtccaggggcgggggagggggtccggacctctgcgaggtgagtgtgtgagtccaggggcgggggagggggtcctgacctctgcggggtgagtgtgtgagtccagtggcacagggcgggggagggaggccggaccctgccacccatggagccttcagcaactttgttggttttttttcttttgagacagggtcttgctctgttgcccaggctggagtgcagtggtgcgatctcggctcactgcaacctctgcctcccgggttcaagcgattttcctgcctcagcctcctgagtagctgggattacaggtgcacgccaccatgccaccatgtctggctaatttttgtatttttagtagagacggggttttgccatgttggccaggctgatctcaaactcccaacctcaggtgatctgcccgcctcggcctcccaaagtgctgggattacaggcatgagccaccgcgcctggccggttttttccttttaaaaactatattaattaacttaatttcactacatagccttttttcctgaaagtaagtcatgtttttaattataaagataatataaggccattggaggaaaccccgtcccccactgaagcatgaggtccgactcctgccgcgctgcttccttccctgtttttaaatgttctcatgtttcttcacacagtcgtaatcactgtgaatgcccaatttggggctctgctgtttctgtttcgtgtcataagcattttccctgttgctgcctcatcttcataatcatccttttactttcctgcacgatgttacccgtagatgtgccatcgtctacttaagcattctccttttattagacatctctgaatttctgctaactgcagtgctgtgaatattcaccacgtctcctgctactatttattgagggtttatgccatgccaggtgccgtgacacatgctttgaatacatgatttctagtcctcccaacacctccacaaagtagcgactgttgttccctaatcatagatgagagaggagtcttggagaaggtaaataagcagcccaagctcgcacagctagaggcacaggtgggactggaaccccaagctgacgtgcaaactcctttgagcctccttctctctacccgggagggtgggactggaaccccaagctgatgtgcaagctcctttgagcctccttctctctacccgggagtgtgggtctgctctgtgccttgagcagaggctcattctgcgttcattcacacattcttccacccacacttagtgatcaactgcagtgtgccaagcacaccccttctcacggctgagaagcggcagtctggattcaaacccgtgtctgtgggactcgtttaccatcaggctatcttgcctctcccttcagccctccctggttggctgtgcccccaagtacagcacaggggactccacagccagtgtgttacaccaccaggctatcctacctctcccttcagccctccctggctggctgtgcccccaagtatagctcagggggagcaagccccacgcccacctcaacactcaagggtcagaatgagaagtgcaaatctaagtcctaggggaaggatcgatgattatgaacgtcaataaagggatgactgggcgggcacggtggcttatgcctgtaatcccagcactttgggaggccaaggcgggtggatcacctgaggtcaggagtttgagaccagcctggccaacatggcaaaactccgtctctactgaaagtacaaaaattagctgggtgtgatggcaggcacctataatcccagctacttgggagaatgaggtgggagaatcgcttgaaccctggaggcagaggttggagtgagtggagatcgcgccattgcactccagcctgggaacaagagcaaaactccatctcacaaaataaaaataatttaaaaaataataataataaaggacatgactccctggaactagatcatgtttgagatagttctgaggcagagatggcaataataagcacacatgcttctgcctgtcgtcctttgcgatggcagacattactaatcacatatgcctctgcctgctgtcctttgccatggcagacatcactaatcaactagggcacactttcttgctagacttggatgtggctttgtaatcctccacccagtgttgacccatgtgaccactcttgataagaggtggcatttggaataacacctgtattccattgctagcctgaaggatattgaacacggatagtctagaagggagggaggggattgtggtggggaataggaaaatgtgagcccagccaggaaggcttcgctcttcttgatacctaagtggtttgggatgtttgacaacatgagtcatctgggccagaagcctggtaaggtgaaggggcggagttgctccctgcgggcggggcggaccccagaacccagctttcatcactccagtgtgtgtttcccaatcaggctcctcaggagcagggatcgttcttgcttctggcgagttctcagtcaacccctgtcagtggttctgtggttctggacccaagagttgaggctggaagagccaggctccctctggctcatggctccctctggctcgtttgcaggaagcaccagcagtatgactgtaagtggtacatccccctggccgacctggtgtttccatcccccgaggagtctgaggccagcccccaggtgcaccccttcccagaccatgagctggaggacatgaa

SEQ ID NO: 10441 - DNA, 760 bp, Homo sapiens
agctacaaacgtgctcctctttaggatgccagcaggctgctggctccctccctccctacccctcctccccttccccttccctcctctcctcgccacgcgcctccctcccctcccccttgctggaagagcactccggagcggctgcccgatgctggagtccgtgcggcagcatcagcaaggtggctgagtggccgggctgctggtgggcgccggggagcctggagcgatggctgcacgctcccgccgcggggacagaggctgccatggagattctcctcattattcgcttctgctgtaactgcacctatggtaacccagctctgctctacaagcccattgaccgggtcactcggagcaccctagtcctacacgacctgctgaagcacacacctgtggaccaccccgactacccgctgctgcaggatgccctccgcatctcccagaacttcctgtccagcatcaacgaggacatcgacccccgccggactgcagtgacaacgcccaagggggagacgcgacagctggtgaaggacggcttcctggtggaagtgtcagagagctcccggaagctgcggcacgtcttcctctttacagatgtcctactgtgtgccaagctgaagaagacctctgcagggaagcaccagcagtatgactgtaagtggtacatccccctggccgacctggtgtttccatcccccgaggagtctgaggccagcccccaggtgcaccccttcccagaccatgagctggaggacatgaa

SEQ ID NO: 10442 - DNA, 637 bp, Homo sapiens
tccgggacacagcggagcccaagtgggatgaggagtttgagatcgagctggagggctcccagtccctgaggatcctgtgctatgagaagtgctatgacaagaccaaggtcaacaaggacaacaatgagatcgtggacaagatcatgggcaaaggacagatccagctggacccacaaaccgtggagaccaagaactggcacacggacgtgattgagatgaacgggatcaaagtggaattttccatgaaattcaccagccgagatatgagcctgaagaggaccccgtccaaaaagcagaccggcgtcttcggtgtgaagatcagcgtggtgacgaaatggccggtgtggatctagagtggccgcagaggcgctcacaggacacttcagaagcacgcgagccagcacctaaacgctggaaggcgggagcgctccaaggtgccctacatcgtccggcagtgtgtggaggaggtggagaagaggggtatcgaggaggttggcatctacaggatatcgggcgtggccacggacatccaggcgctcaaggccgtcttcgatgccaataacaaggacatcctgctgatgctgagtgacatggacatcaacgccatcgccgggacgctcaagctgtacttccggga

SEQ ID NO: 10443 - DNA, 26793 bp, Homo sapiens
agccgggactgagcgctccacaggcgccttctctccagcgccgcgtcccgtcccccccggcatgaccgacgtcctgccccagcccgactgcagcccgaaggcggggcgcgaacccctggcgctggaggagtcggggagcaagcgcccccccaacaccggcgcccggctctggggccgcgtgcgcaacaagctgctccgaaacaaggtgcccgcgggggctggaggttccggggggtgggggctcgggggcgctgcggggctcggggggctgcgggggctgcgggggctgatggggtcccgctcccgccccctccgtggagtcccgggacagagctggggtctgtgcgcgtccctctaagtggcttgaacttgatggcgaacgctggggccgcccccacccggaccctggcgctcgggcatctgcccctgcctcgggagaagggaggtttcttctcggcaggtggaccctgctttccactccgggagtgcaaacagcgcacggggagacgcctgcctctgggtctatgtcttgccgccctgttcagcctctacctgatccctgcatccagcgggccttgctggctgcccctttgctgaggggcgccgaccgcagcaccgtctgccgtgtgaggtttctctgtgcaggattgtggggaggggagatgctgccgggtctgggggctcgaggcttcccttcagggaccacccatctgactgtgggcccagtgcccgccgggcaccaggcgttccgtccatgtgccagggcagaccgccggtgcccctgcagccccagacctgagttgggattaaaatctgagatagaagccgactgtcctgcagctgggcaggctgcctcggggctggcttggggccctggcatcaggcacgtgaggaagagccagacccagcgcccagcgcacaggaagtgctcgataactctgcagatcaaatcaactgtccgagttagctgtctcagagtgccagtccggctggccagggctgggcccatccatcaagagagcaacaagggaggccttggccagtccgtggtggggatctgcagctcctcctgaggctcacaggacctctctgcaggctcttactgccagccggcattgaggctcctggcatcagccaggacgaagtgatcttgggctcactggcccctcgttttgtttcagctcctgccatggggcatacttgacctcccagaggtgacatcagccctggaaagtgctgggcagggcagcaacttgagctgtactgcactggcccctgtgtcaccttcagcctccctggggactgggctagcagagccctgctggccccagctgctgccagagcccctctgtgctgaggcagctgtctgtgcccggcagcgtggactcatcccctccccagcccctgctgaggccagcaggcaccagcccagagctcaccatccatccccaaacgtcagggttggcaagaaactgacctggcaggttccgggtccagcgccagccaaacagggcgcttccagtttacctgcccctttgaggaggtgcctggtgggcagggggcaacttttaaacctgaggtcccagactttcagttctttccctatgcatttgtggccggcagaactgagaagccccttcaagaattccttagctgggtttgcctctggcagtgcctggtggctccgtgtctgatggggatctctgggcaggggtggtggccaggcagacgccgggctattgagctgctgagcagttggcgtcagtgcagctcagggtggccccggccctgggctgctctgtgtgacgagcgattccatcccctaacgtgtgctgtgtgccacagtgtgtccgtgtcgtggacgcaggggtcagcgctgtggcggacggagggacgtctgccacagtgtgtccgtgtcgtggacgcaggggtcagcgctgtggtggacggagggacgtctgccacagtgtgtccgtgtcgtggacacgggtcagcgctgtggtggacggagggacgtctgccctgtgcttcccacctcactgtgcgcaggccagcgggtgagcagcagagtcaaagggccaggcctcttgctttctatcctcagccacattaacctggcattttcctgcaggagcttcacagttgggccgaggggctgggactaggcagtttcgtttcggtggggtaagggaagggtgcctggtactgcccagactggcaggagggattgcctcattaactcctcgttaactttgccctgagtgatgctgtgggtgcgagaaacaccggtggccctcctgcttccactgacctgaaggttcattaaaggctggaggcggggcgtgactcatccagggctgggattaaacaatctgttcagatggaaaggtctcatgatcagaactgagcctttaaatagtgcagggcctctggtttctgggggagaggaggcagggacactcacggaggatcctttgggtaccagcgggggtccctgtggttgggctgttcttgtcaccggaggagagttcaggggccaaagcctcattccagcccctgacttggcagtcagctttttgtgcgagtgtttagctgggagacacgtggcatctgggtttgtgggttcagccagggctctcggtattgaacttcgcgtttctacttttctttccttttccctgtttgtttttttttttttttgcctcaaatcacactcaagtagaccaggcccggtgccttcctctccctcccatccttccctcttctagattcttggttgagctttggatgggaaggggctgaattctagattctcgcttgagctttggaggggaaggggctgaaggaggaacccccccaccctgcccccgcagcatccccttgtgggagccgtgaggaggctaagagggcctgaagggaggccggtccagaagcatttgtctgtcggggaagttgaggcccttatagagcaaccaagtccaagacgctcctgacccagaccaggccagatgctggccggcggtggggactcaggctgagccggcagggtgtaaggagattgagtgcagcttcaggtgaccttgtctctgccctgaagcacagccatgtgggtctgagaatcccctacttccaaagagctcctcttaagctggacaccggcactgctgacccccacggtgagtcccgtgttctgtgatgggagctgctgcctttgcttcagagaggatcagaggtgttacctgaggaagggcggggtggagagcccctcttgggccattcggggaagcttcaggctcatgatggtcttagaagaaggtccctttcttggatcacctgatgtcaggagtccaagaccagcctggccaacatggagaagccccgtctcaactaacaatgcaaaaattagccaagtgtggtggctcacgcctgtcatcccagcactttgggaggcagaggcgggtggatcacctgaggtcaggcgttcgagaccagcctggccaacatggtgaaaccccgtgtctactaaaaatacaaaaaaaaaaaaaatagccgggcatggtggcgggcacctgtaatcccagctgctagggaggctgaggcaggagcatcgcttgaacctgggaggtggaggttgcagtgagccgagatcatgccactgcactccagcctgggcaacagagcgagactcggtcttggggtggggggaggaaagggtccctttctttgtcagcttgatcgccaccgcaggacaaccccacccctcacagagcctgtcgtttattccttcttgatggtaccaggtgtgcagaccacgtgcacaccccagaggttcactctaccactcacttggccatcgagggtacacaggtgctgggtacaagatacagatatgtcttgggctcgtctactttattttataatccagtctgggcgtcaggaaagatctcgcagccttctgcaatagaagtctggcctggcccggctgcccaccgcccttccttgtttcccggtgggaagaaagcttcatcgtgcgtcttctctgttcacacacacccccatagcgacccctcagccacagacaggggactacagtgctgcctcccccgagagctggaggcccctacaccagcccacctcttcctgggcctatgtgtgggtcctgactgcggccaggctggctgacaggttggcagtggggtcgggcgaccctccctcttttccacagcacttacccacctgccgagtgggcagacctcactgctggggcctcatgagtactctctgatctctctgccaggccagctcccaagaggcttgcttgagtccgcagagcgggaaccctggactctgagaatctgatgaaggttctggaggccactcagacacagagccaccccatgcacacactgtgtgcgacttcagagggggctgcagacatcaaggcgggaaccctgctctgagtgaacttggcaaggtgccgcttcttggtacctagggagggtagaagggcgctggtcctccccggcctccctgcaggccacagacggcttggccagccagcggtgctgggcgcggtgccccagcttttggatggctctggaccagggagaggagaacctgccaatcaagggggttcctcaaaggccaaagctgcctgagcccagtgttgctgtagtacccagaggcaatgaggccccagacattttggaaggagcccccaagcctgcaggtgtggctgggggagctgccccaggcattttggaaggagcccccaagcctgcaggtgtgagtctgggggagctgccccaggcattttggaaggagcccccaagcctgcaggtgtgagtctgggggagctgccccaggcattttggaagcgcccccaagcctgcaggtgtgagtctgggggagctgccaggtgttggccacagggcgctggtgctggagaggcctggccctctgctgagtggcctcgctcactgcccaggtggttgggaactggtcagcaggtgctgttctttgacctcgtttcccctgtgaactcatgctggggcaggaagatgtttgtgtcctgacggccccccagcaccttcgaggaacagacagtcccctgcgcctgtgacctgcctgccccaccctggggagaaacgcagcgtcagtcctgggtccagtgagccgtagacccttggccctccaggatgggccctggagaggcgggaggggcccgtggagctggtcctgggcttctgtagagaggccaggaggccccaggatccccacagagacttccccagtcccgcttcaagacagcggaaccagctcctgagccgaaatctggagggatctcctttctggaccgtgaccccagccggggctggtaccgatgaccggcacagccagagccgtgacatccacagcgcccttcccatccgatgcctggatgccgtggctgtgctcggggaggcctccggggtccccagcccctcaggctcatgtggcacaaggtgccagagaagacagggcgccaggccggtgggagtcaaggtttcccatttttctcgtctcagtctgctacttaactgctgtgtgcccgcgagtacatccctttgcctctctggttctctggtatcagctcaatgaaggagctgaacaggatgatctcctggaatccagttcatgtgatgatcttggccatgtctcaagattcctagtcctaaaccttaaaccctgagcaccctgggagagtctgtcacagggctgcacctgggccaatgccagccattcagtggacacgggagcagggggtttagtgggaacacagggcttcttgagccctgtcctgaagcagccccggcggggagccattgtcacctccttcccccatgccccagttggttcctctggcctgtgagtattgccggagcaccttccacgtgccaggcctgcaggaactagggacacagaggcgcccgagacagacgagaccctgtctgcaggaggagtccgtcaacaaatgagatccttgccggtcagatgagtgctgtgaaaaaaataaacacaactgggtaacgcagtagagagtgacggggggatgcctggcttgagaggatcacttttgaacgaagatttaaatgacaagaagaattcagccataaaaaacctgggggcagtgcattccaggccaaagaaccggcaaggtccacaccccgaggcaggtgtgctcagaggcagagggggacagtgtggggcgttacgtggggtcaggggacggcggccaggcgacgtggggccctgcggttcaggacagggcctttaatccgaatgcagtgggaagccgcggggtgttcaagcacagttctgtgacgatatgttttgaacacgtactgtacgaggcatcattcttagcctgtgacgcaactgaggtgacacttacaaggtgctgttattcacactgtttatttatttatttgtttgggttcttttgtttttgtttgctgttgttgttttgagacagagtcttgctgtgtcgcccaggctggagtgcaatggcgcgatctcggctcgctgcagcctccgcctcccgggttcaagcgattctcctgcctcagcctcctgagtagctgggattacaggtgcccgccaccacgcccggccaagttttgtatttttttttttttttttttgagacggagtctcgctgtcgcccaggctggagtgcagtggcgcaatcttggctcactgcaggctccgccccctggggttcacgccattctcctgcctcagcctcccgagtagctgggactacaggcgcccgccacctcgcccagctaattttttgtatttttagtagagacggggtttcaccgtgttagccaggctggtcttgaactcctgacctcaggtgatccacccgcctcagcttcccaaagtgctgagattacaggcgtgagtcactgcgccaggcctaaatgtgttttgaattttgttttacatttttaattttttttttttttttttttgtgggagtctcactctctcgcccaggctggagtgcagtggcaccatctcggctcactgcagcctccatctcccaggctcaagcaatcctcccacctcagcctcccaagtagctgggtctacaggcatgtaccaacatgcctggctaatttttgtattttttgtaaagacgaggtttcgttatgttgcgcaggctgatgttgaacttctggcttcagtggatccacctgcctccgcctcccacagtgctggattacaggcgggagcccccgtgcctggcccagactgtttttatatatgaggaatgaggctcagagagtgactcagatgaagtcacgtgagtggcttagccgaggggcgacgttcagaccccggccactcagcctcagcgcaggctctcacccgcggtgtcctgccttccgtggccggttggggttgggctgcgtgccccagatgggagcgtctggagacgccgggctcctgcccgtcaggcatcagtgtggtgcccgtcctggcacgctgtgcatagcaacaggcaagacggttcttctcgacgacgccactgaacgtgagactcggagcaaggcaaggcctgggaggggccgctcagagctgacctgggccctggaattgctggagcccctcacgtccccggcagcaagctccatgcccagaaagtgttctgggcccgggcagggagggtgaagctggtatcagagaaggctgttgatgctgctttttttttttttttttttttttttgagatggagtctcgctctgtcgcccaggctggagtacaatggcacaatctcggctcaccgcaacctccgcctcctgggttcaagcggttctcctgcctcagccccctgagtagctgggtttacaggcatgtgccaccacgccggggtaatttttgtatttttagtagagacagggtttctccatgttggccaggctggtctcgaactcctgacctcaggtgatcctcccacctaggcctcccacagtgctgggattacaggtgtgaaccaccgcgcccagccctgttaatgtttcttaaccactccaggtccagctcgaggcttcagagcccatggaggtctgacaggtccttggccttcccgtggcctccagcgtgaagcttcctggtcaggaccacagaaggcctctcatcttggactttgacctctgagggcgcccctttcctttcaggacagggcctccgtgttgctttggccctggcctgttccttttctcaagagggccccactgcccctgcccttgccactctggcatcctcgacctgccctgggctggggcagggccggcttcctggctggtatttgtagcccagttctgagctgaagctgaagcctccaggctgcctgcacagggaggcagtggtggggtgggctggccctgaggaagacggagccctaggccgctgggggagatgtgcctggctgtggggcctccaagagcagcccaggtttggattttgtctgcttctcctcaaggtcagccatgcccagcccgggggctaaaagcaaagtgggtgccagggcaggcagaggctctggagtggacgtggggccggcagaggcgctggagtggacgtggggccggcagaggcgctggagtggacgtggggccggcagaggcgctgtagtggacgtggggccggcagaggctctgcagtggacgtggggccggcagaggcgctggagcggacgtggggcaggcagaggctctgcagtggacgtggggccggcagaggctctggagcggacgtggggcaggcagaggtgctagaatggacgctggggaaggcaggttgctgcgggtgctaagaggctagcctgccttggacaaaagcgtcgttcagagctgctaatccccttcctcccatgaggcttggggaacttcgaagttctctggtgttggaggggaagccagccgaggccctgggacacggcatcagcccgagcctatctgtggctggcctgggtatggcaggtgggcacaccttggctgcaggacaccttggctacaagggagcctggctgaccctgcagggtgagggctggagaggcggagcctgcctggcctagcagtgtggatgccaagccatgggaagatgtgtggagagtttatggagcctggcccggtgtccccaacccagctgctgagctggaagccaggggtaggtcctggcagcccctccctctctgccctgcctctctcggagtcgctcggagcagtcacgttgacggaatcctccggcgcctcctcgagggaggagaggcagggtcttggcaactcccgtctcccccgttgccagcttgccagccccgccgtgcctctcacgcctgtggtctgccccaatgacaggccggcttcggtgtcccaaggggacccagccctgagcgtggggctgcccttgggggagggcaggggaaagccagcccgggctgccaccgtggccgctggcctgggagccccaggaaacgtgcccaccctcagacccgatgcctggctcagggcctgggctccgcggcccctccagggcaggcgtgaaatgtgcccacacagctccaccttccacgtggttccctgtccgggggccacttgcactgaggtccttctggagtcattttctgtttttttttttttttttttgagacagagtcttgctctgttgcccaggctggagtgcagtggtgctatcttggctcactgcaacccctgcctcccgggttcaagtgatttccggctaattttgtatttttagtagagatggggtttcgtcaggttggccaggctggtctcgaactcctgagctcgagtgatccgcccgcctctgcctcccagagtgctgggattacaggcatgagccaccgcgcccggctgggagtcattttctagcgttcctgtcccacctctcaggaacagatttaccacctttgttgtgaagaagcattttttttttttttctgccgccaggctggagtgcagtggcacaatctcaactccggctcactgcaacctccgcctcccgggttcaagcgattctcctgcctcagcctccccagtagctgggattacaggcacccgccaccacgcctggctaatttttgtatttttagtagagacggggtttcgccacgttggtcaggttggtctcgatctcctgaccttgtgatccgcccgcctcggcctcccaaagtgctgggatgacaggcgtgagccaccgcacctggctgaagaagcacttttttttatgaacctctgcaaccccctctgagggaaaccctcccgcattctgggatgccggggctcagagggtggagggtagaagagcgccagccgtgagaggcaggatggggcggcccccgagggcagggctgtgcctggaggcagggctcctcggggggtcagctcctgggcggtgggagtgaccgagtgggctcctgagggaagcggctttcaggaaggaggcggaggcctgggagctcttggggccctggcaaatgtggtcttcagattcccgtcgtccagtgagcccctggatcacgtcctgagtggcgtccactgaaggctgcttgggacctctgctcccccctccactgagacccccagtggccagttctaagtcccacctgccttgggcagggccaccacaggccccttactgtggattaaagggccctgggtgagggcttgtgggaggggaggtggtggaaaccatctccgaagaccttggggcgagctgcgtgctggagtggagagtgtggcccagcaggcaggagcactgggttggaatgggggctctgccacctccgagggagcaggagtggagaccggagggagcgtgcccctgaatccgagcacggggagctggccgggagcagccctccgggcagaggcaggagaaatggggtcacctgccccagggggtgagaggtgagccgagaggaagggctgagaccctcaggggcatccccaggatgttcctgaaactcagccctggaggacgctcaggtgtgcgtggagcaccctctgccctggagcctcaaatcctctccccgctgcggggccactttgctgattcctgccccaaacatgaggtcacttcggtccagaaaggcgaggcgacctccaccagccacctacgggattcttggcagagaatccacgctcaccttcgggtcttcactcctgctccctcggaggtgacggagccccatttcaacccggtgcccctgcctgctgggttttcgccgcaggggacctggtcgtctcctggacatgagcccccagcgccagcgtttctctttgggagaggcctgaatgcgcagtcatgatttgaccaggcgaagtgcccagacaaagagaaaacagtcggccggatgcaggggctcacgcctggaatcccagcactttgggaggccgaggcgggtggatcacctgaggtcaggagttggagaccagcctggccaacacggtgaaaccccgtctctactaaaaatacaaaaattagccgggcgtggtggctcgtgcctgtagccccagctactcgggaggctgaggcaggagaatcgctcgaacccgaaggtggaggttgcagtgagctgagatcgcgccactgcactccagcctgggcgacagagtgcgactccgtctcaaaaaaaaaaaagaaggaaatagttgagctgctctcagtgaccatgtacggcccagtcgtcgacccctggcccagtcgttcgtccgccttttggctccacgatgttttgcagcctgtttctgtctcctgcctgtggcccaccttggggaggccccagtgctcgtgtgcccctggtggtcttcccagcctgacccttcacgagctccctctgtctccctgcttcaggtgatcagacatcccccaagtacctgctcccctgggcccatggaaggcacctgtctgctgggaccagagggtgagcagtcaggtgtcccatccaccaacgtcccaggggccagcccctccaccccggtgctaatctcatcaggaaatagcacagtccacatttcccaggagttataaatagccagcgcagttgcgggcagcagcgtttctctggaaaatgtacgctgtgcctctccctccctcctctgtgtttaaatgatatcctgaaatagacttggtttctggaggctgatagcctcctgggaaacagagcgtcgttgtcagggcaccgtggggccaggcaggcctctctgagcggataccagggccacacctgcagcaggcaccagggccacacctgcagcagataccagggccacacctgcagcaggcaccaggaagatgtcagggcttgaggggcttacagcttaggaaagtgcccctggcccaggcctggcctcagaaggggctggagtgtgtgagacagcagcaagtgtcgcctgggaggctgcagagggtagatcttagtggagcaggaaggcagagaggacccaaagtttcccactgtgacctggggctctccgagaaggctctctggaggaggcggggcgagaactgggccttagcatcaggaggtgcagtcctgggtcagatgtgcccaggttgaacctggcagctggagcggaagtgatgggcacgaggcagcgggagggctgtactgggggtggcctcccagcaccaggtctgcccaccgggtcgggacacacaccaggaggcccgatgttgcctttctgaggaagcagcagttacagcagctgcgggtcatggacttcacacattctgcagtttcagcagagagggtgctgggggccttgattttgaaccccagctctgacttcctaggtgtgcactgggtaaattcctcactctcgttaagctgcagcatcctcatctgtgagatgggagcggctatgagagcttaaaccgcatatgtctgctatcatgatcatgaacgcagatgctgtgtgtagaggattcatcagtgtcagacttgcaggaagagctcgagataagtccgttgctctcactcttccataacagccctgtgagtcaggtgtggatgcctccatgaggaaattgaagttcacggaggtgaaaggccttgcccgagtgcgcacggttgaatgggagactcagatcagcctgcctccaaatcctgcacactccccccgaccaggttgtgtccaggtccccctgagacttgggaagggaccattggctcagcttcctgcagaagctgccaggaggcacccagtcgtgggaagctggggcggaggaggggctgtgggtgaatcggaccaggggccatggaattggcctgaggcttatgctgatgtgtggagagacctgcctcaagaaggggtggtctcaaaacatcgaactgcgccccataaatacatacaactgcaatgtgtcaattaaaaaataagggcccgggccaggcgtggtggctcacgcccgtaatcccagcactttgggaggccgaggtgggcgaatcacgaggtcaggagatcaagaccatcctggctaacacggtgaaaccccgtctctactaaaaatacaaaaaattagccgggggtggtggcgggcgcctgtagtcccagctactcaggaggctgaggcaggagaatggcgtgaacccgggaggcggagcttgcagtgagccaggatcgcgccacagcactccagcctgggcgacagagcaagactccgtctcaaaaataaataaataaataaaaaataagggcccacacagtggtacatgcctgtaatgccagctcttcaggaggctgaggcaggaggatcactgaagcccagggcaacatagcagcctggacggcacagtgagaccctgtctctagaaaaataaatacaggccgagtgcggtggctcacgcctgtcatcccagcactttgggaggccaaggtgggcggaccacctgaggtctggagttcaagaccagcctgggcaacatggtgaaaccccatctctactaaaaataaaaaaattggccaggcatggtggctcacacttgtaatcccagcactttgggaggccaaggtgggtgggtcatttgaggtcaggagttcgagaccagcctggccaacatggtgaaaccctgtctctactaaaaatacaaaaattagccgggtgtgatggtgcgcacctgtagtcccagctaattgggaggctgaggcagaagaatcggttgaacctgggagacgggttgcagtcagccgagatcacaccactgcactccagcctgggcaacaagagtgaaactctgtctcaaaaaaaaaaaaaaaaaaaaaagagggcatggccgctccagaatgtttcttccaagggtagcatctcagttgacaaagagcatttgattcctccaccctgtgtggctactgctgggggacagagctggggacagacccaggcccggctccgtgtccagacgagatgaaggaactacgagggacagcctgtgtgatccaggagggtttgcaaagaacagaagcagcttagaggggagagaggtttcgggaaagtaaggccagagctggggcttcctttgagaccctgtaggacccctgcctccagccgggctggtgatggcctcacgcttcccgtgtgtgaagaggtgcccggagcagtggttctccctgaggggcacttggttctctgcacacacccaacttctgtctcctgttctgggttccatcccttctctgggcagggcgaacccagtgcagacccagaccccgtcggaggcttgggtaccacctgcccccagccggtgtgtgggtgatagatgtgggaaggacctacatcgagctgcaggaagcccaaggctgacccagatccagtttcccttccgtgatgacagtggcctgttatagcaactgcgttcaaaccgtggcacgcacacctcagagtgcacagagacgttctgagggcgacgtgggcaggagagttttcaggaaatcagtttgcagattctcagctgccataggtgctattgccagaaagccatctgcctgagagccagcatctcgccatcctgtcctctgcagaggagaggcctgaggctggctgtcggggcttggcccggggtgcgcagacctcctgggtggggaacagaggggcttttagaaatgttggggtaggggccaggcatggtgggtcacacctgtaatcccagcactttgggaggccgaggcaggtggatcgcctgaggtcaggagctcgagaccagcctggccaacatggtgaaaccccatctccactacaaataaaaaattagctgggcgtggtggcaggcacctgtaatcccagctactcgggaggctgaggcaggagaatcacttgaacccgggaggtggagcttgcagtgagccgagactgcaccactgcactccagcctgggcgacagagcgagactccgtctcaaaaaaaaaaaaaaaaagaaacgttggggtcagtgttcagaaagtaaaagactctagtggccacttagaacctttcaaaagtcaggtggtatccagttctttgccttccacaaaactgatggaggactcaattttcaactgagagatcatttcaagtaattttcagtaataggtatatatgcgatttaaggcggatagcatggagagaggttaaagaatggtgtaacgcggctgtgataaaactcttttcgacctcatctacttctttatgtgaacaaaatgtttcattgttcacatatttcttgttcattttagagacatggtcctacattgcccaggctggtctcgaactcctgggctcaagtggtcctgtggctgggagccacagcacctgcacatctttacaacaaaaccagaaacatgaaccaaattgatgctgagcctcgtttcactctagcaaaaaataataccctatagatacgcgaactaaagcaaaaaatgttccgcccatctcattgagagagcattccaccaaaaagttactctgctacttaatatttattaaaatgtataatgaggccaggcgcggtggctcacgcctgtaatcccagcactttgggagaccgaggcgggtggatcacctgaggtcgggagttcgagatcagcctgaccaacatggagaaaccccatctctactaaaaatacaaaaaattagccgggtgtggttgtgtgtgtctgtaattccagctactcgggaggctgaggcaggagaatcgcttgaacccaggaggcggaggttgctgtgagccaagatcgcaccattgcactccggcctggacaataagagcgaaactctgtctcaaaaaaataaataaaatgtatataatgtgtcggcttactttttttttttttttcttgagacagggtctcactctgtcgccaggctggagtgcagtggtgtgatcttggctcaatgcaacctccacctcctgggttcaagcgattcttccatctcagcctcccaagtagtagcttggactacagtgcccgccaccacacccggctcacttttgtatttttagtagagacagggttttgtcatgttggccaggctggtctcgaattcctgacctcaggtgatccaccagcctcagcctcccaaagtgctgggattacaggcgtgagccaccgtgcctggctgtctttttaattatgtactgccaatcatggtactaactaatcctgaatatattttgaatatttggagccttgtggtctctggaaatttttgttttcaatgtatacagattttttttgtggaagcaaaatgtaatggtgaataaaggacttgaaaatataaaaatataaactaggacaacattctttaggagaaatggaatagaaacaaattcaaggagagaagatccaggagctctgtgagggaaagaagagcttgtttgtgtagttttttgttgttgttgttttttttgagacggagtctcactctgtcgcccaggctggagtgcagtggtgtgatctccgctcactgcaacctccacctactgggttcatgccattctcctgcctcagcctccccagcagctgggactacaggcgcccaccaccgcgcccggctaattttttgtatttttttttttttagtagagacggggtttcaccgtgttagccaggatggtctcgatctcctgacctcgtgatccgcctccctcggcctcccaaagtgctgggattacaggcatgagccaccgtgcctggcctgttttcttaatattgaattttgagagttttatataataagccctgaaattgggtaatattagccctatagctgtgttctttttcaacattgtttagatgttttttctttttttttgagacggagtctcgctctgtcgcccaggctggagtgcagtggcgcgatctcggctcactgcaagctctgcctcccgggttcacgctattctcctgcctcagcctcccaagtagctgggactacaggcgcccgccaccacgcccggctaattttttgtatttttagtagagacggggtttcaccgtgttagccaggatggtctcgatctcctgagctcgtgatctgcctgccttggcctctcaaagtgctgggattacaggcgtgagccgccacgcctggcctcgtgtagtttttaaatggatgagtgtgggtatcacgtcgctggggtatttagatcccactgaatccatgagaaggaatgatgtcacacttttattttaggatggcaatattgacatgattttggaaatcatactctttgcaactatttaaacttggaaatgttcagattttgacttcagaaagtgccagggagcgcacagttgctcagaattagttcgcaggtgcacaggcagacgggcgcgaaggcccccgagttacagaaacagaacgtggaacagtcctgtgtgagggttgcctctgacctcccctggggtccgcacctccctgggctccagcccgagcctggggacttcccctgtggaggatttgcttatttgggagccaatggcttgacccaagttttctccctgaatcttcccagcaatcccagggaggcaggttctgttgcagatggaataactgaggcttagtgagtttaaaacttgccaggattcaaacccaggcagcctcctgtgcgcgggctcctgactcttcaacacctccacgtggatgggctggttccctcctgatggacttgagcgcctcctaatcaggtgcttaccttttgtgagcctcagtttctgcatctgtgaaatggggtaataatacccatgtcccgggctggcagccaggagtgcctaacagggtgtgccctgcctcccccacggtgggtaacagagtgtgccctgcctcccccacggcgggtaacagggtgtgccctgcctcccccacggcgggtaacagggtgtgccctgcctcccccacggcggccacaggggcctgggggctagggtccccccaaagggttgatttccaggtaaacatcagcttatcccagctgctcacttccgccttcctgactgtgtagctggctctgagcagtgctgacccacggggagatctctggcttggcctccgagctggcacctctctcacccacattctctctctgcagctggacccacaaaccgtggagaccaagaactggcacacggacgtgattgagatgaacggggtgagccggggatgggaatgatcagtggcgtgagccgggaggtggaacgtctgtgcagcaggtgggcagcccggccctgtggctgctcctggggccgctgtgccgcctcgacctccccgcagcccagccccctctcccctcctgcccacaccctgcccgctgctgtcctgcaggtgttgtgttgagggagacctgggtgtgagctagccctcatttgcagtcttggggaggggacccctgtgttttgggggcattcctcgggcactcacaccctggggaatctttacctgcctcaccccccaaccagatcaaagtggaattttccatgaaattcaccagccgagatatgagcctgaagaggaccccgtccaaaaagcagaccggcgtcttcggtgtgaagatcagcgtggtgacgaagtaggtgctgcctcgggtctcccagtcctggcgtcggtgccccgggtcccccccagcccgggccccccagccctccccgccggtgcccatcctggcacctaatcagttaccccccgctcggcggtggcagatggccggtgtggatctagagtggccgcagaggcgctcacaggacacttcagaagcacgcgagccagcacctaaacgctggaaggtctcttgtgagatcccagatcgtctgctcctcgtaacaagcgggaagctctgtcagccgggggcctacgtttgggctcggcaccaacggggactggcggcccctcgggaaagggcacgtgtcccccggttcaccaccaccctggccccttgtctcaggcctgacccacctcctcatgtgggctgcctgctgggcctcctacaagcatctgaatctgggggacgttctttccctagagtctcggccttaccttcccaagttcccaaggcttctcctgcccacgtccgtcgatgccccttcggcaggcctcgggtgggctggctggggtggggtgcggtggcctctttctctgccctgcccctgcccccgccccagctctccatcccaaatgctagaagctctccagggtgtgtgtgtgctgggtgggggttgctacgggagagctgtcgtgggggctgccctccacccatcctcacgctccaccccaggcgggagcgctccaaggtgccctacatcgtccggcagtgtgtggaggaggtggagaagaggggtatcgaggaggttggcatctacaggatatcgggcgtggccacggacatccaggcgctcaaggccgtcttcgatgccagtgagtctgggaggcccagccggggcaggtgtggctgtgtctgagcaggctggtgggatggacaggagagctcgggggaaccaggagcctccctggagaggaggcttgctctgcttcagagtccccgtggcaagtgctttctcttgtaatcccctcccctccaatctcttgtcccttgctgcaggtaagcaactgcagaaactcacaagggccgactcacttgcccaggatgacccaacttgtaggttttggttctggacttaaaactcagatctgactccagtgtctttcttgctagttcctgggtgcctggtgagccgcagggaaagagctttgagcctgcacctgctgtctccagggccccaggtcccctctggggcagtgctgcctctgcgtgaagcccaccatggtgaggcctgacctttctggtttctcctccctgctcctgctggttcaggtgcagcagccacataccccactgtcaagaaacctgcactggccaggcagggatgaatccgtggggagcctggagtggaggacggggtggggcctgggaactggccggcgttggtgcctctgtgcagcctagaagctgaggctttgtcggaacatgcttttacgtgtgaaaagtgtgcaatgccttccagagaggggcttagcgatggagaggttccagtcggaaggaagctgcaggccacatggtatgaatgtggctctgaactctgggtgatggatttcactccccaaacaccctttcccaagcagccacagcagatggcccccaggctatctctccctgttcccccaaccccgacccacagagccgagtcacagacacctgtgggccctctctacatcctgctcttccaggggagaccagaaccagagctggagtgggtgggggctgtgtcaggatgggtcgggggtggaacggggctgctggcccagctaaggctgcctgacctcggccccacccctgcagataacaaggacatcctgctgatgctgagtgacatggacatcaacgccatcgccgggacgctcaagctgtacttccgggaactgcccgagccgctcctcacggaccgactctacccagccttcatggagggcatcggtgaggccctgagggctcctaggactgggctgggccagactgagccaggactccctgcccggagaagtaaccagcaggagaaatatctgtggcttcctttgctggctgaccttcccagtgcactggggcctgtggctgaggggtccgagggtgaggtgtggcctgctgggacctggtgcagacactgggccctttctcgcctgcctcttgcccctgatgtccccatgggcagccccttctgcttcctatttggacgttggcctcttgcttggaagctcgagcatccagggaagactgccctgaggtgagtggccagaagccagcatcccagaaccaaggaggaggctggcttaagccatagggcactcgagatgggttgtgctgagccttccagcgggaccacacaccgtcccgtcacctctgcggagggccccggccagcaggccttccgcctccacccacctgggccaaacccagccccaaggaatcccttcagccttctctgctcctggggcagactggagcttcagcccccacggaaggctgcttgcacccacgctccagcagcagaaggggtggagaaagagaatccaccgctggcaggatatgtccctactggcttaaccttagccacacagaccagggggtgtcctgttacgagacaggggatgccccagcacccaaggcctatgcagtcagctgcaggaagggggtctgctcccaccagccggcctcctggctgagttaccagtcgtggtggggcctcctggaggaagcagctgctgacagcccacccagacaccaggccctcccctgtggggtctgctccccaaaggcctggaagcctgggctctctcccgcaggggcccacagcctcacgaccacaggggccctggcggggagccccaggagccaaacgccacactggcccttctctcccacagccctgtcagaccctgctgccaaggaaaactgcatgatgcacctgctccgctccctgcccgaccccaacctcatcaccttcctcttcctgctggaacacttgaaaaggtaacggggagcggccccaaccccacctcctcagtccctcctcatgaaaaggtaacggggaggggccccaaccccacctcctcagtccctcctcgtgaaaaggtaacggggagtggccccaaccccacctcctcagtccctcctcgtgggcgctggcctccatcgggctgtctgtggggagtgagagtttgctttccaagttcttgcactcatgtttttctgttttgagaaatatttgggtcccgtaaccagtagtaacctcaaatattgaccatagaatgctcagaatggcagggtgagagcccaggactacaggcaggttttataatcagtgggtcccaacctactggtggttcattcaacgaatgtagccatttctagatgcagtggggggtggacagcagtggggggtggacagcagtggggggtggacagcagtggggaatggacagtagtggggatggacagcagtgggggaatggacagcagtggggatggacagcagtgggggacagacagcaggaggatacattgtaagccttgatgcaggtgctgcttttcagttacatagagacgtgtggactgtgttacagcatgggttgtattgtgggccacagtcaaaaaaggtgaaacccactggtcttggcccacacctcactagacatagggaaactgagtccccacaccaggcggagacttgcttgggttagtagcagacctgtccttagagccctcaacttccagatcctaaattcagacccttcttgccttcccaccaccctttctagtcaggtccaaccaagagtggctaaagttggttgtacttgtagcaaagttcagaggtcctcaggcttgcgtggggaggtggtccctgggcgtcccttaaacccacctgcacgccaggaccggggagccccctcagactgctctgcggaacaattcttccctgagctcagccccagctcagggccaggccccccgctgcagctcagccacgccaggctcgggagagccagtggagacctggacgcgcccggggctggtgtcttgtttttcccatcatgaaacatttttcctctggtttggccaggactagagccccaaccaattccgaaagcatttggcaagccttgtggggaggagtgggaagggaaaattcattcggcttccaccctgggaactgggcacagtctgttcccacatctgggcccctggctggaccgtgtgcgcgcgtgtggtgaggggctggccccgctgcacagctgcctgttggcatcacagtgtttgtttgcctgtttccaaagcaggcgcagccacagctcctgcctggagggtgggaatgatggtattgagggtgagaggcgctgcttagggtgggtgggtctcagcccagaaacattttttgagactgaaggagaaccagaggccctctgatatgtttgctgaccctgggcctgcctggacaccagccctgatggcagctcctgctgttaccccagggaagcatcgcagagcatctggcctgttgagtaagagaagcaggagaggatccagagggaggacaatcctgggtcccacgaggcagacggagaggcataggaggcagccctgggtcccatgaggcagacccttccggagaggcacaagaggaagccctgggtcccacgaggccgacctttccggacaggcacggggggacagtccccgggctcatctggaagtagggctgctcctgccccagcacagctggcagagccccgggtctagctagtgactcctgctgggctccaggccctgcctgcctttctcccctgccccacccaccttaactcttcttttgggccacttagcacatgagaaagcaacagagcggtaggtcctggaggcagctaccggggttcaaatcccagctctaccagttgctggctgtgtgaccttgggcaagtcacttaacccctctgtacttcggtttcttcatctacacgatgggggtgacgataatcatatttacctcaaaggactgcggcgagtgtgagttgttccagggagttttcagaacagtatctgctctcaggcaagggagctggagttggcatctgtgggctccctggctctggcagttcaccatcagttcagggggacccagcagctggagatgttagcacagaacactggcacatggctggggccctgctctcctggatgagtccccttcccccgggggaggtccccactcctaggagacagagacgaggtgaccccttccaggagtccttcaggagttcccacagcgaaggccaagggtcctggagctccgagtggctgctgaggaagggcttctttcctccccatcttctccttcttagggttgccgagaaggagcccatcaacaaaatgtcacttcacaacctggctaccgtgtttggacccacgttactgagaccctcagaagtggagagcaaagcacacctcacctcggctgcggacatctggtcccatgacgtcatggcgcaggtaccctggcaccgcccgggcccgtggctggcggagggtgacggtcccatgacgtcatggcgcaggtaccctggcaccgcccgggcccgtggctggcggagggtgacggtcccatgacgtcatggcgcaggtaccctggcaccgcccgggcccgtggctggcggagggtgacggtcccatgacgtcatggcgtaggtaccctggcaccgcccgggcccgtggctggcggagggtgacggtcccatgacgtcatggcgcaggtaccctggcaccgcccgggcccgtggctggcggagggtgacggtcccatgacgtcatggcgcaggtaccctggcaccgcccgggcccgtggctggcggagggtgacggtcccatgacgtcatggcgcaggtaccctggcaccgcccgggcccgtggctggcggagggtgagaccagccccttaggaggagagagaacagctcagagtccccacacctcttccctcgtgggaagctgggttgatgggctatggggtgtcaccagggaggcaggactgtagacacttctgcccctcccaggccaaaacaaacatgtgagcctagaccagggcccagagatgctggctgcattctcaggagggcctcagtctcagaaagcaagcccaggggtggggagatgctgggcccttgtcctcatgggtggaagctctgaggttgcttccaagggcgggaggcttccctgggattcctgcaagacccagagcaggggccggactgtggccgcctcaggacagagcagaagcttatggccaggttggggaagtggccctaggcccccgaccctctgccccgtagcaccttccacggctgcagaaaggcaaacacacctgggctccccaggaaggggcggtggccggagccagtctagggagtgggaggggcaacacaggctggagtcagcaaggacgaggcctaggacagggagcccagcctccgccttcctgtctccccacaggtccaggtcctcctctactacctgcagcacccccccatttccttcgcagaactcaagcggaacacactgtacttctccaccgacgtgtagcccgaggcagggtggctgcgggcgggtggtggaaccagcccctccagcctggggtccaactcagacttgaaagactgcaatagaaaactcccaaacccagcactccagactcgagggaagccagcttccaagaactggaatgcgtacgtcttttgtgccaccttgtacaaagccggctgcccagccccagcctcaccaccgcatcccacctcctgccctccatacctctagttgtgtctgatgctccgtgctgttcgggaattgttttatgtacacttgtcaggcagaaaaggtagtgaccggcccggcgtgggcacacagacagcccgctttgttctttcatttcctccagcactttctttccgcctgagtccagcccaaggccttttattttgcgctgtgtaactgctgccagcttctctcttggccctgctcccagatggcggtctcctggcagcctcccctcagtcttcctccacccgctcttccttcccagcctgcctgcatgcatgtgcacccttggtcttcgctccatcgccttgaaagctctgaagaggccctgggttgccgcggcagcagtggtctgtttgatgctgccgtttgccgctgccggcccctcctcagactccgcctttgggagcacacctgctttgccttgctgcctgtgcaaatgttggacaagcagacacactcacactcgtccccagcttagcacagagctggagcgcccatttctggaattttccgtttgggaatctccacttctggggtttacctgttcggcctcctgtctatcagtgaggcatctctgactgtttcttctactgcttttcagttcccttccctgctgttctatttcctttgagtgtaaagactcacaggtgacctgctatcgagatagccagagggtcaggagagaatgggggaggaggcggtcaggctgctgaggaaacaccacaggctgaacgggggaggaatgcacatgccacgctgggtgtcccgggtcgcggggaggcagctcagctcttaggagcaagttgtgggggcttttcaagaggggccaggcttcc

SEQ ID NO: 10444 - DNA, 563 bp, Homo sapiens
agccgggactgagcgctccacaggcgccttctctccagcgccgcgtcccgtcccccccggcatgaccgacgtcctgccccagcccgactgcagcccgaaggcggggcgcgaacccctggcgctggaggagtcggggagcaagcgcccccccaacaccggcgcccggctctggggccgcgtgcgcaacaagctgctccgaaacaagctggacccacaaaccgtggagaccaagaactggcacacggacgtgattgagatgaacgggatcaaagtggaattttccatgaaattcaccagccgagatatgagcctgaagaggaccccgtccaaaaagcagaccggcgtcttcggtgtgaagatcagcgtggtgacgaagcgggagcgctccaaggtgccctacatcgtccggcagtgtgtggaggaggcggtcaggctgctgaggaaacaccacaggctgaacgggggaggaatgcacatgccacgctgggtgtcccgggtcgcggggaggcagctcagctcttaggagcaagttgtgggggcttttcaagaggggccaggcttcc

SEQ ID NO: 10445 - DNA, 9063 bp, Homo sapiens
ctaatcagttaccccccgctcggcggtggcagatggccggtgtggatctagagtggccgcagaggcgctcacaggacacttcagaagcacgcgagccagcacctaaacgctggaaggtctcttgtgagatcccagatcgtctgctcctcgtaacaagcgggaagctctgtcagccgggggcctacgtttgggctcggcaccaacggggactggcggcccctcgggaaagggcacgtgtcccccggttcaccaccaccctggccccttgtctcaggcctgacccacctcctcatgtgggctgcctgctgggcctcctacaagcatctgaatctgggggacgttctttccctagagtctcggccttaccttcccaagttcccaaggcttctcctgcccacgtccgtcgatgccccttcggcaggcctcgggtgggctggctggggtggggtgcggtggcctctttctctgccctgcccctgcccccgccccagctctccatcccaaatgctagaagctctccagggtgtgtgtgtgctgggtgggggttgctacgggagagctgtcgtgggggctgccctccacccatcctcacgctccaccccaggcgggagcgctccaaggtgccctacatcgtccggcagtgtgtggaggaggtggagaagaggggtatcgaggaggttggcatctacaggatatcgggcgtggccacggacatccaggcgctcaaggccgtcttcgatgccagtgagtctgggaggcccagccggggcaggtgtggctgtgtctgagcaggctggtgggatggacaggagagctcgggggaaccaggagcctccctggagaggaggcttgctctgcttcagagtccccgtggcaagtgctttctcttgtaatcccctcccctccaatctcttgtcccttgctgcaggtaagcaactgcagaaactcacaagggccgactcacttgcccaggatgacccaacttgtaggttttggttctggacttaaaactcagatctgactccagtgtctttcttgctagttcctgggtgcctggtgagccgcagggaaagagctttgagcctgcacctgctgtctccagggccccaggtcccctctggggcagtgctgcctctgcgtgaagcccaccatggtgaggcctgacctttctggtttctcctccctgctcctgctggttcaggtgcagcagccacataccccactgtcaagaaacctgcactggccaggcagggatgaatccgtggggagcctggagtggaggacggggtggggcctgggaactggccggcgttggtgcctctgtgcagcctagaagctgaggctttgtcggaacatgcttttacgtgtgaaaagtgtgcaatgccttccagagaggggcttagcgatggagaggttccagtcggaaggaagctgcaggccacatggtatgaatgtggctctgaactctgggtgatggatttcactccccaaacaccctttcccaagcagccacagcagatggcccccaggctatctctccctgttcccccaaccccgacccacagagccgagtcacagacacctgtgggccctctctacatcctgctcttccaggggagaccagaaccagagctggagtgggtgggggctgtgtcaggatgggtcgggggtggaacggggctgctggcccagctaaggctgcctgacctcggccccacccctgcagataacaaggacatcctgctgatgctgagtgacatggacatcaacgccatcgccgggacgctcaagctgtacttccgggaactgcccgagccgctcctcacggaccgactctacccagccttcatggagggcatcggtgaggccctgagggctcctaggactgggctgggccagactgagccaggactccctgcccggagaagtaaccagcaggagaaatatctgtggcttcctttgctggctgaccttcccagtgcactggggcctgtggctgaggggtccgagggtgaggtgtggcctgctgggacctggtgcagacactgggccctttctcgcctgcctcttgcccctgatgtccccatgggcagccccttctgcttcctatttggacgttggcctcttgcttggaagctcgagcatccagggaagactgccctgaggtgagtggccagaagccagcatcccagaaccaaggaggaggctggcttaagccatagggcactcgagatgggttgtgctgagccttccagcgggaccacacaccgtcccgtcacctctgcggagggccccggccagcaggccttccgcctccacccacctgggccaaacccagccccaaggaatcccttcagccttctctgctcctggggcagactggagcttcagcccccacggaaggctgcttgcacccacgctccagcagcagaaggggtggagaaagagaatccaccgctggcaggatatgtccctactggcttaaccttagccacacagaccagggggtgtcctgttacgagacaggggatgccccagcacccaaggcctatgcagtcagctgcaggaagggggtctgctcccaccagccggcctcctggctgagttaccagtcgtggtggggcctcctggaggaagcagctgctgacagcccacccagacaccaggccctcccctgtggggtctgctccccaaaggcctggaagcctgggctctctcccgcaggggcccacagcctcacgaccacaggggccctggcggggagccccaggagccaaacgccacactggcccttctctcccacagccctgtcagaccctgctgccaaggaaaactgcatgatgcacctgctccgctccctgcccgaccccaacctcatcaccttcctcttcctgctggaacacttgaaaaggtaacggggagcggccccaaccccacctcctcagtccctcctcatgaaaaggtaacggggaggggccccaaccccacctcctcagtccctcctcgtgaaaaggtaacggggagtggccccaaccccacctcctcagtccctcctcgtgggcgctggcctccatcgggctgtctgtggggagtgagagtttgctttccaagttcttgcactcatgtttttctgttttgagaaatatttgggtcccgtaaccagtagtaacctcaaatattgaccatagaatgctcagaatggcagggtgagagcccaggactacaggcaggttttataatcagtgggtcccaacctactggtggttcattcaacgaatgtagccatttctagatgcagtggggggtggacagcagtggggggtggacagcagtggggggtggacagcagtggggaatggacagtagtggggatggacagcagtgggggaatggacagcagtggggatggacagcagtgggggacagacagcaggaggatacattgtaagccttgatgcaggtgctgcttttcagttacatagagacgtgtggactgtgttacagcatgggttgtattgtgggccacagtcaaaaaaggtgaaacccactggtcttggcccacacctcactagacatagggaaactgagtccccacaccaggcggagacttgcttgggttagtagcagacctgtccttagagccctcaacttccagatcctaaattcagacccttcttgccttcccaccaccctttctagtcaggtccaaccaagagtggctaaagttggttgtacttgtagcaaagttcagaggtcctcaggcttgcgtggggaggtggtccctgggcgtcccttaaacccacctgcacgccaggaccggggagccccctcagactgctctgcggaacaattcttccctgagctcagccccagctcagggccaggccccccgctgcagctcagccacgccaggctcgggagagccagtggagacctggacgcgcccggggctggtgtcttgtttttcccatcatgaaacatttttcctctggtttggccaggactagagccccaaccaattccgaaagcatttggcaagccttgtggggaggagtgggaagggaaaattcattcggcttccaccctgggaactgggcacagtctgttcccacatctgggcccctggctggaccgtgtgcgcgcgtgtggtgaggggctggccccgctgcacagctgcctgttggcatcacagtgtttgtttgcctgtttccaaagcaggcgcagccacagctcctgcctggagggtgggaatgatggtattgagggtgagaggcgctgcttagggtgggtgggtctcagcccagaaacattttttgagactgaaggagaaccagaggccctctgatatgtttgctgaccctgggcctgcctggacaccagccctgatggcagctcctgctgttaccccagggaagcatcgcagagcatctggcctgttgagtaagagaagcaggagaggatccagagggaggacaatcctgggtcccacgaggcagacggagaggcataggaggcagccctgggtcccatgaggcagacccttccggagaggcacaagaggaagccctgggtcccacgaggccgacctttccggacaggcacggggggacagtccccgggctcatctggaagtagggctgctcctgccccagcacagctggcagagccccgggtctagctagtgactcctgctgggctccaggccctgcctgcctttctcccctgccccacccaccttaactcttcttttgggccacttagcacatgagaaagcaacagagcggtaggtcctggaggcagctaccggggttcaaatcccagctctaccagttgctggctgtgtgaccttgggcaagtcacttaacccctctgtacttcggtttcttcatctacacgatgggggtgacgataatcatatttacctcaaaggactgcggcgagtgtgagttgttccagggagttttcagaacagtatctgctctcaggcaagggagctggagttggcatctgtgggctccctggctctggcagttcaccatcagttcagggggacccagcagctggagatgttagcacagaacactggcacatggctggggccctgctctcctggatgagtccccttcccccgggggaggtccccactcctaggagacagagacgaggtgaccccttccaggagtccttcaggagttcccacagcgaaggccaagggtcctggagctccgagtggctgctgaggaagggcttctttcctccccatcttctccttcttagggttgccgagaaggagcccatcaacaaaatgtcacttcacaacctggctaccgtgtttggacccacgttactgagaccctcagaagtggagagcaaagcacacctcacctcggctgcggacatctggtcccatgacgtcatggcgcaggtaccctggcaccgcccgggcccgtggctggcggagggtgacggtcccatgacgtcatggcgcaggtaccctggcaccgcccgggcccgtggctggcggagggtgacggtcccatgacgtcatggcgcaggtaccctggcaccgcccgggcccgtggctggcggagggtgacggtcccatgacgtcatggcgtaggtaccctggcaccgcccgggcccgtggctggcggagggtgacggtcccatgacgtcatggcgcaggtaccctggcaccgcccgggcccgtggctggcggagggtgacggtcccatgacgtcatggcgcaggtaccctggcaccgcccgggcccgtggctggcggagggtgacggtcccatgacgtcatggcgcaggtaccctggcaccgcccgggcccgtggctggcggagggtgagaccagccccttaggaggagagagaacagctcagagtccccacacctcttccctcgtgggaagctgggttgatgggctatggggtgtcaccagggaggcaggactgtagacacttctgcccctcccaggccaaaacaaacatgtgagcctagaccagggcccagagatgctggctgcattctcaggagggcctcagtctcagaaagcaagcccaggggtggggagatgctgggcccttgtcctcatgggtggaagctctgaggttgcttccaagggcgggaggcttccctgggattcctgcaagacccagagcaggggccggactgtggccgcctcaggacagagcagaagcttatggccaggttggggaagtggccctaggcccccgaccctctgccccgtagcaccttccacggctgcagaaaggcaaacacacctgggctccccaggaaggggcggtggccggagccagtctagggagtgggaggggcaacacaggctggagtcagcaaggacgaggcctaggacagggagcccagcctccgccttcctgtctccccacaggtccaggtcctcctctactacctgcagcacccccccatttccttcgcagaactcaagcggaacacactgtacttctccaccgacgtgtagcccgaggcagggtggctgcgggcgggtggtggaaccagcccctccagcctggggtccaactcagacttgaaagactgcaatagaaaactcccaaacccagcactccagactcgagggaagccagcttccaagaactggaatgcgtacgtcttttgtgccaccttgtacaaagccggctgcccagccccagcctcaccaccgcatcccacctcctgccctccatacctctagttgtgtctgatgctccgtgctgttcgggaattgttttatgtacacttgtcaggcagaaaaggtagtgaccggcccggcgtgggcacacagacagcccgctttgttctttcatttcctccagcactttctttccgcctgagtccagcccaaggccttttattttgcgctgtgtaactgctgccagcttctctcttggccctgctcccagatggcggtctcctggcagcctcccctcagtcttcctccacccgctcttccttcccagcctgcctgcatgcatgtgcacccttggtcttcgctccatcgccttgaaagctctgaagaggccctgggttgccgcggcagcagtggtctgtttgatgctgccgtttgccgctgccggcccctcctcagactccgcctttgggagcacacctgctttgccttgctgcctgtgcaaatgttggacaagcagacacactcacactcgtccccagcttagcacagagctggagcgcccatttctggaattttccgtttgggaatctccacttctggggtttacctgttcggcctcctgtctatcagtgaggcatctctgactgtttcttctactgcttttcagttcccttccctgctgttctatttcctttgagtgtaaagactcacaggtgacctgctatcgagatagccagagggtcaggagagaatgggggaggaggcggtcaggctgctgaggaaacaccacaggctgaacgggggaggaatgcacatgccacgctgggtgtcccgggtcgcggggaggcagctcagctcttaggagcaagttgtgggggcttttcaagaggggccaggcttcctggagggtgactgatgtggccgaagcaggtgtccaggcaggtaggctgcagccaggagctccctggcaccgcaggacctcgtggtactcttgccttagattttacacacactccacagccaagcactgccacggtcctccaggacctgggaagcaaaggcacaggcccacggtggccagccattgtggtgccgccccagcttctggatacagccttttgggtaaacactgggaactccagaagttgtggggagagtggggaatcagacagccgcctctaggggctgggttctgctggggcctccttgttggtgctgtaggcacccgccagggagcagggacccgacttgcagacgcattgcccggtactaggaaggagtgaggtgtgttcccaccgtacacttcccacacgagctgcggctgccagcctcgggccatcagcctaggagagcagatgcagctccaggggctcgacttatagccagttacagctccccggctcttctgtgtggcagagcgtcgtttccgggccctcagggctggggagctcagttcccattgcttgtgctcagggctgagtcttaaagaagggtttgccggccctaacgctgcagcgcgtgcgcggtgagaggccctttttgagcctgtttactcctgtggccttgggcagaacagtaaatactctgtgcacggaggaaagacatgcccaagaggaaggaagtactgaccatcggctgcctgtgagcagcttagcaaggagcccttgctccctgggaaaggcggtgaacttgagtctaaagatgcagtgcctggcccttcctaaggtccctgcctggcatccgagtgtcggtgtgtggcacagaaggctcctgcttgcttccaaagtgatggacaggaaggggcagagtgagtcacggcccagactgggcaccttcgcgtctcagcctcagggagccccacagccccaagctcgctgaggcaacgtgagaacaggctatgggaaggctgcaaaggctgagaaatgcaaaggctcatatttataaatcccacccccagagtggggagggtcaggtgccagacctggactaaactgcaccaaggaaacacccagcagggtctcctgtgagccggggaccatgcagcccgaaacctccagtcactgcgcccggcaggagtcaggagccagggactgtgcagcctggaacctccagtcactgtgcccagcagggtgggctgtgcccagcaggagtcaggctaagaaacgccaggtctgcctgttcttgctgggcaatggctgatggctgccagtttctgctgatacacaggtaggatgggacccttcatgaatatctgactttaataagttggtaaggatatatttttttgtctatgttctgtttcaacttatgtagattattataaattgatgtaaaccacgtgagaggaaaatgttaataaaaaatgcaaagccccatcatttgcac

SEQ ID NO: 10446 - DNA, 3776 bp, Homo sapiens
ctaatcagttaccccccgctcggcggtggcagatggccggtgtggatctagagtggccgcagaggcgctcacaggacacttcagaagcacgcgagccagcacctaaacgctggaaggtctcttgtgagatcccagatcgtctgctcctcgtaacaagcgggaagctctgtcagccgggggcctacgtttgggctcggcaccaacggggactggcggcccctcgggaaagggcacgtgtcccccggttcaccaccaccctggccccttgtctcaggcctgacccacctcctcatgtgggctgcctgctgggcctcctacaagcatctgaatctgggggacgttctttccctagagtctcggccttaccttcccaagttcccaaggcttctcctgcccacgtccgtcgatgccccttcggcaggcctcgggtgggctggctggggtggggtgcggtggcctctttctctgccctgcccctgcccccgccccagctctccatcccaaatgctagaagctctccagggtgtgtgtgtgctgggtgggggttgctacgggagagctgtcgtgggggctgccctccacccatcctcacgctccaccccaggcgggagcgctccaaggtgccctacatcgtccggcagtgtgtggaggaggtggagaagaggggtatcgaggaggttggcatctacaggatatcgggcgtggccacggacatccaggcgctcaaggccgtcttcgatgccaataacaaggacatcctgctgatgctgagtgacatggacatcaacgccatcgccgggacgctcaagctgtacttccgggaactgcccgagccgctcctcacggaccgactctacccagccttcatggagggcatcgccctgtcagaccctgctgccaaggaaaactgcatgatgcacctgctccgctccctgcccgaccccaacctcatcaccttcctcttcctgctggaacacttgaaaagggttgccgagaaggagcccatcaacaaaatgtcacttcacaacctggctaccgtgtttggacccacgttactgagaccctcagaagtggagagcaaagcacacctcacctcggctgcggacatctggtcccatgacgtcatggcgcaggtccaggtcctcctctactacctgcagcacccccccatttccttcgcagaactcaagcggaacacactgtacttctccaccgacgtgtagcccgaggcagggtggctgcgggcgggtggtggaaccagcccctccagcctggggtccaactcagacttgaaagactgcaatagaaaactcccaaacccagcactccagactcgagggaagccagcttccaagaactggaatgcgtacgtcttttgtgccaccttgtacaaagccggctgcccagccccagcctcaccaccgcatcccacctcctgccctccatacctctagttgtgtctgatgctccgtgctgttcgggaattgttttatgtacacttgtcaggcagaaaaggtagtgaccggcccggcgtgggcacacagacagcccgctttgttctttcatttcctccagcactttctttccgcctgagtccagcccaaggccttttattttgcgctgtgtaactgctgccagcttctctcttggccctgctcccagatggcggtctcctggcagcctcccctcagtcttcctccacccgctcttccttcccagcctgcctgcatgcatgtgcacccttggtcttcgctccatcgccttgaaagctctgaagaggccctgggttgccgcggcagcagtggtctgtttgatgctgccgtttgccgctgccggcccctcctcagactccgcctttgggagcacacctgctttgccttgctgcctgtgcaaatgttggacaagcagacacactcacactcgtccccagcttagcacagagctggagcgcccatttctggaattttccgtttgggaatctccacttctggggtttacctgttcggcctcctgtctatcagtgaggcatctctgactgtttcttctactgcttttcagttcccttccctgctgttctatttcctttgagtgtaaagactcacaggtgacctgctatcgagatagccagagggtcaggagagaatgggggaggaggcggtcaggctgctgaggaaacaccacaggctgaacgggggaggaatgcacatgccacgctgggtgtcccgggtcgcggggaggcagctcagctcttaggagcaagttgtgggggcttttcaagaggggccaggcttcctggagggtgactgatgtggccgaagcaggtgtccaggcaggtaggctgcagccaggagctccctggcaccgcaggacctcgtggtactcttgccttagattttacacacactccacagccaagcactgccacggtcctccaggacctgggaagcaaaggcacaggcccacggtggccagccattgtggtgccgccccagcttctggatacagccttttgggtaaacactgggaactccagaagttgtggggagagtggggaatcagacagccgcctctaggggctgggttctgctggggcctccttgttggtgctgtaggcacccgccagggagcagggacccgacttgcagacgcattgcccggtactaggaaggagtgaggtgtgttcccaccgtacacttcccacacgagctgcggctgccagcctcgggccatcagcctaggagagcagatgcagctccaggggctcgacttatagccagttacagctccccggctcttctgtgtggcagagcgtcgtttccgggccctcagggctggggagctcagttcccattgcttgtgctcagggctgagtcttaaagaagggtttgccggccctaacgctgcagcgcgtgcgcggtgagaggccctttttgagcctgtttactcctgtggccttgggcagaacagtaaatactctgtgcacggaggaaagacatgcccaagaggaaggaagtactgaccatcggctgcctgtgagcagcttagcaaggagcccttgctccctgggaaaggcggtgaacttgagtctaaagatgcagtgcctggcccttcctaaggtccctgcctggcatccgagtgtcggtgtgtggcacagaaggctcctgcttgcttccaaagtgatggacaggaaggggcagagtgagtcacggcccagactgggcaccttcgcgtctcagcctcagggagccccacagccccaagctcgctgaggcaacgtgagaacaggctatgggaaggctgcaaaggctgagaaatgcaaaggctcatatttataaatcccacccccagagtggggagggtcaggtgccagacctggactaaactgcaccaaggaaacacccagcagggtctcctgtgagccggggaccatgcagcccgaaacctccagtcactgcgcccggcaggagtcaggagccagggactgtgcagcctggaacctccagtcactgtgcccagcagggtgggctgtgcccagcaggagtcaggctaagaaacgccaggtctgcctgttcttgctgggcaatggctgatggctgccagtttctgctgatacacaggtaggatgggacccttcatgaatatctgactttaataagttggtaaggatatatttttttgtctatgttctgtttcaacttatgtagattattataaattgatgtaaaccacgtgagaggaaaatgttaataaaaaatgcaaagccccatcatttgcac

SEQ ID NO: 10447 - DNA, 3559 bp, Homo sapiens
gtacttccgggaactgcccgagccgctcctcacggaccgactctacccagccttcatggagggcatcggtgaggccctgagggctcctaggactgggctgggccagactgagccaggactccctgcccggagaagtaaccagcaggagaaatatctgtggcttcctttgctggctgaccttcccagtgcactggggcctgtggctgaggggtccgagggtgaggtgtggcctgctgggacctggtgcagacactgggccctttctcgcctgcctcttgcccctgatgtccccatgggcagccccttctgcttcctatttggacgttggcctcttgcttggaagctcgagcatccagggaagactgccctgaggtgagtggccagaagccagcatcccagaaccaaggaggaggctggcttaagccatagggcactcgagatgggttgtgctgagccttccagcgggaccacacaccgtcccgtcacctctgcggagggccccggccagcaggccttccgcctccacccacctgggccaaacccagccccaaggaatcccttcagccttctctgctcctggggcagactggagcttcagcccccacggaaggctgcttgcacccacgctccagcagcagaaggggtggagaaagagaatccaccgctggcaggatatgtccctactggcttaaccttagccacacagaccagggggtgtcctgttacgagacaggggatgccccagcacccaaggcctatgcagtcagctgcaggaagggggtctgctcccaccagccggcctcctggctgagttaccagtcgtggtggggcctcctggaggaagcagctgctgacagcccacccagacaccaggccctcccctgtggggtctgctccccaaaggcctggaagcctgggctctctcccgcaggggcccacagcctcacgaccacaggggccctggcggggagccccaggagccaaacgccacactggcccttctctcccacagccctgtcagaccctgctgccaaggaaaactgcatgatgcacctgctccgctccctgcccgaccccaacctcatcaccttcctcttcctgctggaacacttgaaaaggtaacggggagcggccccaaccccacctcctcagtccctcctcatgaaaaggtaacggggaggggccccaaccccacctcctcagtccctcctcgtgaaaaggtaacggggagtggccccaaccccacctcctcagtccctcctcgtgggcgctggcctccatcgggctgtctgtggggagtgagagtttgctttccaagttcttgcactcatgtttttctgttttgagaaatatttgggtcccgtaaccagtagtaacctcaaatattgaccatagaatgctcagaatggcagggtgagagcccaggactacaggcaggttttataatcagtgggtcccaacctactggtggttcattcaacgaatgtagccatttctagatgcagtggggggtggacagcagtggggggtggacagcagtggggggtggacagcagtggggaatggacagtagtggggatggacagcagtgggggaatggacagcagtggggatggacagcagtgggggacagacagcaggaggatacattgtaagccttgatgcaggtgctgcttttcagttacatagagacgtgtggactgtgttacagcatgggttgtattgtgggccacagtcaaaaaaggtgaaacccactggtcttggcccacacctcactagacatagggaaactgagtccccacaccaggcggagacttgcttgggttagtagcagacctgtccttagagccctcaacttccagatcctaaattcagacccttcttgccttcccaccaccctttctagtcaggtccaaccaagagtggctaaagttggttgtacttgtagcaaagttcagaggtcctcaggcttgcgtggggaggtggtccctgggcgtcccttaaacccacctgcacgccaggaccggggagccccctcagactgctctgcggaacaattcttccctgagctcagccccagctcagggccaggccccccgctgcagctcagccacgccaggctcgggagagccagtggagacctggacgcgcccggggctggtgtcttgtttttcccatcatgaaacatttttcctctggtttggccaggactagagccccaaccaattccgaaagcatttggcaagccttgtggggaggagtgggaagggaaaattcattcggcttccaccctgggaactgggcacagtctgttcccacatctgggcccctggctggaccgtgtgcgcgcgtgtggtgaggggctggccccgctgcacagctgcctgttggcatcacagtgtttgtttgcctgtttccaaagcaggcgcagccacagctcctgcctggagggtgggaatgatggtattgagggtgagaggcgctgcttagggtgggtgggtctcagcccagaaacattttttgagactgaaggagaaccagaggccctctgatatgtttgctgaccctgggcctgcctggacaccagccctgatggcagctcctgctgttaccccagggaagcatcgcagagcatctggcctgttgagtaagagaagcaggagaggatccagagggaggacaatcctgggtcccacgaggcagacggagaggcataggaggcagccctgggtcccatgaggcagacccttccggagaggcacaagaggaagccctgggtcccacgaggccgacctttccggacaggcacggggggacagtccccgggctcatctggaagtagggctgctcctgccccagcacagctggcagagccccgggtctagctagtgactcctgctgggctccaggccctgcctgcctttctcccctgccccacccaccttaactcttcttttgggccacttagcacatgagaaagcaacagagcggtaggtcctggaggcagctaccggggttcaaatcccagctctaccagttgctggctgtgtgaccttgggcaagtcacttaacccctctgtacttcggtttcttcatctacacgatgggggtgacgataatcatatttacctcaaaggactgcggcgagtgtgagttgttccagggagttttcagaacagtatctgctctcaggcaagggagctggagttggcatctgtgggctccctggctctggcagttcaccatcagttcagggggacccagcagctggagatgttagcacagaacactggcacatggctggggccctgctctcctggatgagtccccttcccccgggggaggtccccactcctaggagacagagacgaggtgaccccttccaggagtccttcaggagttcccacagcgaaggccaagggtcctggagctccgagtggctgctgaggaagggcttctttcctccccatcttctccttcttagggttgccgagaaggagcccatcaacaaaatgtcacttcacaacctggctaccgtgtttggacccacgttactgag

SEQ ID NO: 10448 - DNA, 553 bp, Homo sapiens
gtacttccgggaactgcccgagccgctcctcacggaccgactctacccagccttcatggagggcatcggtgaggccctgagggctcctaggactgggctgggccagactgagccaggactccctgcccggagaagtaaccagcaggagaaatatctgtggcttcctttgctggctgaccttcccagtgcactggggcctgtggctgaggggtccgagggtgaggtgtggcctgctgggacctggtgcagacactgggccctttctcgcctgcctcttgcccctgatgtccccatgggcagccccttctgcttcctatttggacgttggcctcttgcttggaagctcgagcatccagggaagactgccctgagccctgtcagaccctgctgccaaggaaaactgcatgatgcacctgctccgctccctgcccgaccccaacctcatcaccttcctcttcctgctggaacacttgaaaagggttgccgagaaggagcccatcaacaaaatgtcacttcacaacctggctaccgtgtttggacccacgttactgag

SEQ ID NO: 10449 - DNA, 8508 bp, Homo sapiens
ctacaagatccaggacatctatgagatccacaaggagttctatgacaacctgtgccccaaggtgcaacagtgggacagccaggtcaccatgggccacctcttccagaagctggtgagtctgccagggatggagggtcctcacgcagggcctcagtggagcccatagtgttgcaggagcctcaggagaggaccgggcagccctctcggactccttgaaggcctgagacctctccgagtccgggaggaaggcctgggcctgtgtgttatggggtgcctggggccggggccttgactctaggcctcccctggtgcagccctgggagcttctggggtggtggagacaggctgtgtggataggtccttccaggggtggtggagatgggctgtgtggatgggcacttctgtgggagcaccatctctctcccggagggtgctccttctccctcccggagggtgctccgtctttcccggacggtgctccctctctctcccggagggtgctctgaggaaccagccctggaatgaaggcttcttgctgggcttcagtctcctgtccctcagtgaacagaggggcacatgccgggttaggggcatgaggactgctcccctgagacctcgggtctgtaaaaggaagcagttgggcacactggccgatgatcctctcctgaggtcccaagagcaggaagcactgaagcccagccctgctcaccactgcagggtcgggagcggcaggagtgggtgggttaacatgcagacctcgtgttgggaaacgttcacagaagtcttctggttccctgtgcttctgtgacaccctctcccccagctctgccccatctctggctgtgtcccctggaggacccccaggtcagactcatggagctccctccccacctctgctacgtaacgtctgaccgcccagcaggcaagagggagactgggagtccaggccgcggttcttctctgggtgtgagtggccagaggaccttctcctccttcctgccctgttctctgggtgtgagaggctggaggcctcctcccctcccctgccgtgttctggctgaatggacagggctctgcctttctcacgctggagaagactctccctctcctgcctggacactcctaggacctctagctgagtgtgttcagagctgagctccctgcctccggcgtcacctgctccgcttcctgtctttacctcaccgagtgcttcagactctttctggctgcaccccctcccccacctgtcctgtggactccactttttggccgttgctcacagccgccttttcctcttcttggccacccatggccctcacctggacagctgcgtatcctcctgtgtggctcctgcctccaggcccactcacctcccacccccacctctccttagaggggagagagtcactgaaacctcgacggccccttcagcggatccccacggccctcggatgaaggtcaggctccgaggaatggctcgagagaccctttgcacactgacccgtgtccagccccagccttggcagcttcctccccgcacctctgtgctcctgacactggactttctgttctcagttcccagggcaggcactttcttaactcttggtacttgaggccccgtgtgcctgaaacgtccttccccctctcgtctggcctcccctggtcagttcccagcttagaagggacctcctccaagaaggctttccaagtcgccaaatgcaggccttgtgccagtcctcgtagtgagcactagtaactgcctgactcccccaaaccacaagttccaggaggacggactgcatttcctttttttgttgagacggagtctcactcctgtcgcccaggctggagtgcagtggcgtgatctcggctcactgcaacctcctcctcgcgggttcaagtgattctcctgcctcagcatcccgagtagctgggattacaggcgcccaccatcacacccggctaatttttgtatttttagtagagacggggtttcgccatgtcggccaggctggtctcgaactcctgacctcaggtgatccgcccgcctcggcctcccgaagtgctgggattacaggcgtgagccaccgcgcccggcctgcatttccttcttcttagactcccagaaccagcccagtggtcactgcttgaatgagtgaatgcaccgtgaccttgaccactgggcctcgggagaactcggaagggcatggagggagacgttgcagggcctgagatttctgtcctgagagtcctgtttctccagcacagcttctagagccgtgtcacaaagtgggcttgaatcccagcgctgccagattaaacctgcaactgggcaacttacccaaccgctctgaatcagcttcctcatctgtaaaaaacaggatagtaacagtatttacctcattgggtgattttgaggagttaatatctgaaaactgcatggggctgagtgtggtggctgacgcctgtaatcccagcactttgggaggctgaggctggaagatcacttgaggcttagagttcaagaccagcctgggcaacatagcaagaccctatctctacaaagaaatagaataggcctgactgagcgtggtggctcacgcctgtaatcccagcactttgggaggccggggtgggtggatcgtgaggtcaggagttcgagaccagcctggcctacatggtggaaccccatctctactaaaaatacaaaaaaattagcagggtgtggtggaatgcacctgtagtcccagctactcagggggctgaggcgggagaatcgcttgaacctgggaggcagaggttgcagtgagccaaaaccacaccattgcactccagcctggatgacagactgagactctgtctcaaaaaaaaaaaaaaaaaaaaatggctgggcacagtggctcacgcttataatcccagcaacactttgggaggccaaggtgggcggatcacctgaggtcaggagttcaagaccagcttggccaacatggtgaaaccccgtttctactaaaaatacaaaaattagccgggcatgataacacgcacctgtgatcccagctactactcgggaggctgaggtgggagaatcgcttgaactcgggaggcagaggttgtagtgagccgagatcgtgccactccactccagcctgggcgacaagagcaagactctgtctcaaaaaaagaaatagaatacaataaagtaaaagaaaaagtgcttggaacagggcctggaacatcataaattaataagtactcaataactggtcattatcatcagtgccattattattattattattattattattattattattattattaaattgggaagaggcaccctggaaggtatccttccaagggaatgccacactctggttctagcatacccccccctgctccctccggttcagggatggtgaacacctgtcatcactgcctgctcacctgagctgagtggcctggggggcatcctctcctcatccctcaggagggtagaggagagcaaacctagggttgctggaaacgctgtcacagtttatctttgtcacttggacctggctgtccccggttctggtcttggctccacaggcctggccgtgaatctgctacccaccactttccctccccagcatcgtgaaccgatgcctgaggcccctggggctgcagatttgggagggcccggggggagccgggtcaggtctggcatccggaggtggtttattttcagccgaagactctgggtatttgattattcgttactgagagaagggaattagcgtctctgctgtttgttttatgagatcactccagtgccaggctgctgtttccaggcaacctgcacttcccagttaatgaacctgccaagccaggcctcgggccctaccgcctggggtgactgtggcagcggcagtccctgagattaccgtgaccctggacgcaggcctccgcacggctggctcctgcccctggctcctgggagggtggtgtgccaacccgggcctccaggctttctccttcttgtgggaaagggggcaagaggagccttttcctggaagaatatcggtgatctgactttggcttaggcagcgactgtctagtatgcctcgtgtagcgtgggcattgatgggccgggcctcagtactccctggaaaaggaaataaactccctcccgtccggccccgcccccttttaaggtcaggccccaccccctttaaaactcaggccccgccctcttttaaaagtccggccctgcccccttttaaagtcctgcccttctgcagctgagacctgaatgcctctggccttggcgtcacgccgggcgtccccactcgcgctcccctctggcttttccagatgccccccgctcccctgccccaccagcttcctcaaagggctctgcctctgtactgggaggctccaggctcagccgatgctgcggccagcctgcccccacccctacccccaccccagcctctctgggtccttggggagcatgaggatcctgcagaaagcagagtggtccggggtgggggtccacagcagcccacttcccccagcaccttggtgggaagcagaggcccctgaggaagccaggcagcagctgtatcccccttgctgctgtattgaaaaacatttaaaccagaaactccaaagaataacagcagaaccttctaatgaagaaaatacagcgtcacacatgaaggtggagtctcccctccctcctccctcttgaagcagctactggcatgaatttggtggatagccttccagactgcagtttgtgtgtttactacatatctgtatctattttgggttggcctgtactttaaaaaaaaaaaaaggtcttgctatgttgtccaggctggacttgaactcgggctcaagtgatcctcccacctcagtctcccaagtagcgagggctataggtgtgtgtaccacagctcccagctgcatgtactttaaaaatgtgtctaagccaggcgtggtggctcacgcccgtaatcccagcactttgggaggcggaggcgggtggatcacctgaggtcaggagttcaagaccagcctgaccaatatgacgaaaccctgtctctactaaaaatacaaaaactagccgggtgtggtggtgcgtgcctgtagtcccagttagtcaggaggctgaggcaggagaatcacttgaacccaggaggcggagtttgcagtgagccaagatcgtgccagtgcactccggcctggttgacagagcgagactccatctcaaaaaaaaaaaaaaaagtgtataagtatacacatatatcatattttacagttcaacccatgttcgttttggagcttgtcagcaatcgtattttacagttcaacccatgttcgttttggagcttgtcagcaatgctatgtgtaaatcgggtgcatccatgttcatggctgtgtgcgcggcttcccccgtttgtgagcatttgttaccagtccctccactatgaggaggaaaagtgagatggtgaacacccttgagtcccctggggcacacacataggccatttgctccagagcactgctgtctaatggaaatagcttatgagccacgtacatcatttcacattttctaatacccaccttttttttgtttttttgagacggggtcttgctcttgtcacccaggctggagtgcagtgatgcaatctgggctcactgcaacctccacctcctgggttcaagcgattctcctgccttgtcctcccaagtagctgggactacagatgcgtgccaccacgcccggataattttgtatctttagtggagacagggtttcaccattttggccaggctggtctcgaactgccaaccttaggtgatctgcccgcctcggcctcccaaagtgctgggattacagttgtgagccaccgcgcctggcccctaatacccacatttttaaaagtaaaaataggcaggtgaaattaattttgagaatatcttttatttattcccgcagatccaaatattatttgaacatgtaatcagtatttaaaaattaacgaggtaatttacattctcttttacatactaaggctttggaacccactgtgtattttacatgtccggcacgtctcagtttgaaccggccgtatctcaggtgcttggtagcctcaggtagctggtggcgactgcactgaacgatacggctctgcagtttgtatgtaaaagtggatttgctaagcaatcgatgggctgtgcctatccacactgttattagttcaactgaaaataggccatgcctattctcagctttattagttattaacaaattgctctccaaataattgtactaatttacacttccccgagtagtctaagagtttaaattggccgggcgcggtggctcacgcctgtaatcccagcactttgggaggccgaggcgggtggatcacgaggtcaggagatcgacaccatcctggctaacatggtgaaaccccgtctctactaaaaaaaaatacaaaaaattagcctggcgtggtggcgggcgcctgtagtcccaaccactcaggaggctgaggcaggagaatggcgcgaacctgggaggtggagcttgtagtgagccgagatggcatcactgcattccagcctgggtgacagagcgagactccatctcaaaaaaaaaaaaaaaaaaaagttttaattggccgggcgcagtggctcacacctgtaatcccagcactttgggaggccgaggcaggtggatcacctgaggttgggagtttgagaccagcctgaccaatatggagaaacgccgtctctactaaaaatacaagattagccaggcgtggtggcgggcgcctgtaacgccagctactcgggaggctgaggcaggagaatcccttgaatccgggaggttgcggtgagccgagatcgcaccactgtactgcagcctgggcaacaagagcgaaactccatctcaaaacaaaaacaaaaacagggagtttaaatttccccatatgcttgccagccgttgctgtcaattagacttttaaattttgacccttctgatgagtataaaatatctcgtgatggctttaatttgaatttctaccctttggtcccttaagaggaagtgcttatatacagcgcagcgaagcctttccataaatatttggggaattgacttatggagcctcggtttccccttttgcagaaaggggcgatggggtctgccctgcctctcagaagaggcgaggctctgtgtggttgtgactcaggttgtgactgtgtgagtgacaggcaaacgtgtagtgaggctggggctttggctccttggaggtagaggaggtggaagaggtgaggacggggcctcaaggccaagggaaatggaaagacagcatcttcatttgttgttttgttttctttttgagacggagtcttactctgtcacccaggctggagtgcagtgacacgatcttggttcactgcagcctccacctcttgggttcaagcgattctcctgcctcattctcctgagtacctgggattacaggcacgcgccaccatgcccagctaatttttgtatttttagtagagacggggtttcgccatgttggccaggctggtctggaactcctgacctcaggcctcccaaagtgctggggttacaggcgtgagccgccacgcccggccaagacagcacctttaaatgtcgttccccacgctgcacgtggggagggaggcctgagcaggccacacgtgccagctccccccagcacacacacccccctctctccctgctccggctaattccaggatgtgaaggaagtatgagacattaagggatttcaaaccctgggagaccttcaccgtgctgaggaaagctggatgctgtgaagagttgaatttctagcaggccaacaaaggccctagcctggtctccccaaccccagaccccctcattaaccttattggctgagctggtttccatggaaactgtccagttcaaagggacactgtaatatgttcatccctgcgtttccccaagttcccaacgagctgagtgagaggttttcagtgcaggggagctcccggtgctccgtgaagctttcatccattcattaatcctctcccctcccaccctcctctccctctgttccctgactcctccctgcaggccagccagctcggtgtgtacaaagcgtttgtcgataactataaagtcgctctggagacagctgagaagtgcagccagtccaacaaccagttccagaagatctcagaggtaggccgctccccacatagccaccctgagggacaaggagctttgggggctgctcagagcccttggtctcccctccctcgcttgccagtcggtgaagtggttactctaatgggtaacacttagcctgatatttgctttcttgcacctgacattttccctcttaatagaaaacgatctattttatttatttttttattattctctttcagattagagagaggaacaggggaggcaaaaaaaaaaaaaaaaaa

SEQ ID NO: 10450 - DNA, 471 bp, Homo sapiens
ctacaagatccaggacatctatgagatccacaaggagttctatgacaacctgtgccccaaggtgcaacagtgggacagccaggtcaccatgggccacctcttccagaagctggccagccagctcggtgtgtacaaagcgtttgtcgataactataaagtcgctctggagacagctgagaagtgcagccagtccaacaaccagttccagaagatctcagaggtaggccgctccccacatagccaccctgagggacaaggagctttgggggctgctcagagcccttggtctcccctccctcgcttgccagtcggtgaagtggttactctaatgggtaacacttagcctgatatttgctttcttgcacctgacattttccctcttaatagaaaacgatctattttatttatttttttattattctctttcagattagagagaggaacaggggaggcaaaaaaaaaaaaaaaaaa

SEQ ID NO: 10451 - DNA, 5271 bp, Homo sapiens
gtgcagcagccacataccccactgtcaagaaacctgcactggccaggcagggatgaatccgtggggagcctggagtggaggacggggtggggcctgggaactggccggcgttggtgcctctgtgcagcctagaagctgaggctttgtcggaacatgcttttacgtgtgaaaagtgtgcaatgccttccagagaggggcttagcgatggagaggttccagtcggaaggaagctgcaggccacatggtatgaatgtggctctgaactctgggtgatggatttcactccccaaacaccctttcccaagcagccacagcagatggcccccaggctatctctccctgttcccccaaccccgacccacagagccgagtcacagacacctgtgggccctctctacatcctgctcttccaggggagaccagaaccagagctggagtgggtgggggctgtgtcaggatgggtcgggggtggaacggggctgctggcccagctaaggctgcctgacctcggccccacccctgcagataacaaggacatcctgctgatgctgagtgacatggacatcaacgccatcgccgggacgctcaagctgtacttccgggaactgcccgagccgctcctcacggaccgactctacccagccttcatggagggcatcggtgaggccctgagggctcctaggactgggctgggccagactgagccaggactccctgcccggagaagtaaccagcaggagaaatatctgtggcttcctttgctggctgaccttcccagtgcactggggcctgtggctgaggggtccgagggtgaggtgtggcctgctgggacctggtgcagacactgggccctttctcgcctgcctcttgcccctgatgtccccatgggcagccccttctgcttcctatttggacgttggcctcttgcttggaagctcgagcatccagggaagactgccctgaggtgagtggccagaagccagcatcccagaaccaaggaggaggctggcttaagccatagggcactcgagatgggttgtgctgagccttccagcgggaccacacaccgtcccgtcacctctgcggagggccccggccagcaggccttccgcctccacccacctgggccaaacccagccccaaggaatcccttcagccttctctgctcctggggcagactggagcttcagcccccacggaaggctgcttgcacccacgctccagcagcagaaggggtggagaaagagaatccaccgctggcaggatatgtccctactggcttaaccttagccacacagaccagggggtgtcctgttacgagacaggggatgccccagcacccaaggcctatgcagtcagctgcaggaagggggtctgctcccaccagccggcctcctggctgagttaccagtcgtggtggggcctcctggaggaagcagctgctgacagcccacccagacaccaggccctcccctgtggggtctgctccccaaaggcctggaagcctgggctctctcccgcaggggcccacagcctcacgaccacaggggccctggcggggagccccaggagccaaacgccacactggcccttctctcccacagccctgtcagaccctgctgccaaggaaaactgcatgatgcacctgctccgctccctgcccgaccccaacctcatcaccttcctcttcctgctggaacacttgaaaaggtaacggggagcggccccaaccccacctcctcagtccctcctcatgaaaaggtaacggggaggggccccaaccccacctcctcagtccctcctcgtgaaaaggtaacggggagtggccccaaccccacctcctcagtccctcctcgtgggcgctggcctccatcgggctgtctgtggggagtgagagtttgctttccaagttcttgcactcatgtttttctgttttgagaaatatttgggtcccgtaaccagtagtaacctcaaatattgaccatagaatgctcagaatggcagggtgagagcccaggactacaggcaggttttataatcagtgggtcccaacctactggtggttcattcaacgaatgtagccatttctagatgcagtggggggtggacagcagtggggggtggacagcagtggggggtggacagcagtggggaatggacagtagtggggatggacagcagtgggggaatggacagcagtggggatggacagcagtgggggacagacagcaggaggatacattgtaagccttgatgcaggtgctgcttttcagttacatagagacgtgtggactgtgttacagcatgggttgtattgtgggccacagtcaaaaaaggtgaaacccactggtcttggcccacacctcactagacatagggaaactgagtccccacaccaggcggagacttgcttgggttagtagcagacctgtccttagagccctcaacttccagatcctaaattcagacccttcttgccttcccaccaccctttctagtcaggtccaaccaagagtggctaaagttggttgtacttgtagcaaagttcagaggtcctcaggcttgcgtggggaggtggtccctgggcgtcccttaaacccacctgcacgccaggaccggggagccccctcagactgctctgcggaacaattcttccctgagctcagccccagctcagggccaggccccccgctgcagctcagccacgccaggctcgggagagccagtggagacctggacgcgcccggggctggtgtcttgtttttcccatcatgaaacatttttcctctggtttggccaggactagagccccaaccaattccgaaagcatttggcaagccttgtggggaggagtgggaagggaaaattcattcggcttccaccctgggaactgggcacagtctgttcccacatctgggcccctggctggaccgtgtgcgcgcgtgtggtgaggggctggccccgctgcacagctgcctgttggcatcacagtgtttgtttgcctgtttccaaagcaggcgcagccacagctcctgcctggagggtgggaatgatggtattgagggtgagaggcgctgcttagggtgggtgggtctcagcccagaaacattttttgagactgaaggagaaccagaggccctctgatatgtttgctgaccctgggcctgcctggacaccagccctgatggcagctcctgctgttaccccagggaagcatcgcagagcatctggcctgttgagtaagagaagcaggagaggatccagagggaggacaatcctgggtcccacgaggcagacggagaggcataggaggcagccctgggtcccatgaggcagacccttccggagaggcacaagaggaagccctgggtcccacgaggccgacctttccggacaggcacggggggacagtccccgggctcatctggaagtagggctgctcctgccccagcacagctggcagagccccgggtctagctagtgactcctgctgggctccaggccctgcctgcctttctcccctgccccacccaccttaactcttcttttgggccacttagcacatgagaaagcaacagagcggtaggtcctggaggcagctaccggggttcaaatcccagctctaccagttgctggctgtgtgaccttgggcaagtcacttaacccctctgtacttcggtttcttcatctacacgatgggggtgacgataatcatatttacctcaaaggactgcggcgagtgtgagttgttccagggagttttcagaacagtatctgctctcaggcaagggagctggagttggcatctgtgggctccctggctctggcagttcaccatcagttcagggggacccagcagctggagatgttagcacagaacactggcacatggctggggccctgctctcctggatgagtccccttcccccgggggaggtccccactcctaggagacagagacgaggtgaccccttccaggagtccttcaggagttcccacagcgaaggccaagggtcctggagctccgagtggctgctgaggaagggcttctttcctccccatcttctccttcttagggttgccgagaaggagcccatcaacaaaatgtcacttcacaacctggctaccgtgtttggacccacgttactgagaccctcagaagtggagagcaaagcacacctcacctcggctgcggacatctggtcccatgacgtcatggcgcaggtaccctggcaccgcccgggcccgtggctggcggagggtgacggtcccatgacgtcatggcgcaggtaccctggcaccgcccgggcccgtggctggcggagggtgacggtcccatgacgtcatggcgcaggtaccctggcaccgcccgggcccgtggctggcggagggtgacggtcccatgacgtcatggcgtaggtaccctggcaccgcccgggcccgtggctggcggagggtgacggtcccatgacgtcatggcgcaggtaccctggcaccgcccgggcccgtggctggcggagggtgacggtcccatgacgtcatggcgcaggtaccctggcaccgcccgggcccgtggctggcggagggtgacggtcccatgacgtcatggcgcaggtaccctggcaccgcccgggcccgtggctggcggagggtgagaccagccccttaggaggagagagaacagctcagagtccccacacctcttccctcgtgggaagctgggttgatgggctatggggtgtcaccagggaggcaggactgtagacacttctgcccctcccaggccaaaacaaacatgtgagcctagaccagggcccagagatgctggctgcattctcaggagggcctcagtctcagaaagcaagcccaggggtggggagatgctgggcccttgtcctcatgggtggaagctctgaggttgcttccaagggcgggaggcttccctgggattcctgcaagacccagagcaggggccggactgtggccgcctcaggacagagcagaagcttatggccaggttggggaagtggccctaggcccccgaccctctgccccgtagcaccttccacggctgcagaaaggcaaacacacctgggctccccaggaaggggcggtggccggagccagtctagggagtgggaggggcaacacaggctggagtcagcaaggacgaggcctaggacagggagcccagcctccgccttcctgtctccccacaggtccaggtcctcctctactacctgcagcacccccccatttccttcgcagaac

SEQ ID NO: 10452 - DNA, 685 bp, Homo sapiens
gtgcagcagccacataccccactgtcaagaaacctgcactggccaggcagggatgaatccgtggggagcctggagtggaggacggggtggggcctgggaactggccggcgttggtgcctctgtgcagcctagaagctgaggctttgtcggaacatgcttttacgtgtgaaaagtgtgcaatgccttccagagaggggcttagcgatggagaggttccagtcggaaggaagctgcaggccacatgataacaaggacatcctgctgatgctgagtgacatggacatcaacgccatcgccgggacgctcaagctgtacttccgggaactgcccgagccgctcctcacggaccgactctacccagccttcatggagggcatcgccctgtcagaccctgctgccaaggaaaactgcatgatgcacctgctccgctccctgcccgaccccaacctcatcaccttcctcttcctgctggaacacttgaaaagggttgccgagaaggagcccatcaacaaaatgtcacttcacaacctggctaccgtgtttggacccacgttactgagaccctcagaagtggagagcaaagcacacctcacctcggctgcggacatctggtcccatgacgtcatggcgcaggtccaggtcctcctctactacctgcagcacccccccatttccttcgcagaac

SEQ ID NO: 10453 - DNA, 13734 bp, Homo sapiens
ctgcgtttccccaagttcccaacgagctgagtgagaggttttcagtgcaggggagctcccggtgctccgtgaagctttcatccattcattaatcctctcccctcccaccctcctctccctctgttccctgactcctccctgcaggccagccagctcggtgtgtacaaagcgtttgtcgataactataaagtcgctctggagacagctgagaagtgcagccagtccaacaaccagttccagaagatctcagaggtaggccgctccccacatagccaccctgagggacaaggagctttgggggctgctcagagcccttggtctcccctccctcgcttgccagtcggtgaagtggttactctaatgggtaacacttagcctgatatttgctttcttgcacctgacattttccctcttaatagaaaacgatctattttatttatttttttattattctctttcagattagagagaggaacaggggaggcaaaaaaaaaaaaaaaaaaaaaaaatccaaggcagtgttctcccacaccacactatggtgaccttgagcaagtcacgtcccccctcttggcttttatgtcctgtccggtagaatgaggggtttagaaatggccagataatccttttttttttttttttttttttgagacagagtcttgctctgtcgcccaggctggagtgcagtggcgcggtctcggctcactgcaacctctaccccctgggttcaagtgattctcctgcctcagcctcccaagtagctgggattacaggcgcacaccaccacgcctggctaaggtttgtatttttagtagagatgaggttttgccgtgttggccaggctggtctcgaactcgggtgatgtgcccgtctcagcctcccaaagtgctgacattacaggtgcgagccactgagtccagcttggccagctaatcctgaccttgcttgataagaatcactggggcattgtttaaaacacagatttcctggcaccttccccggagcttctgattcagaaggctttgcgtggggcccaagattctatatttgaacaagcttctgggtaatatttatgacagggaagtcttgaggaaatttggactataggtcgtcttttaaggttcttgccaactctaagactgccatcccataaacacaaaaagggtaagagccacttatgtggagaaggagccttagaatccctggccgggaacacgcgtgcttctgctcctgaggcccagccttcctggccaggaacacgcgtgcttctgctcctgaggcccagcctacctggccgggagcacacgtgcttctgctcctgaggcccagccttcctggctgggaacacgcgtgcttctgctcctgaggcccagccttcctcccgcactcctccacagggcagaggtgcagtcctatctgccatcaacatttctacctaagaggtggcatggagggacagttgcttaggatccttcaggacagagcccagttcatccctttgtccaaaaagacctcagtggcacccctgaagcactggcctgagaggaacagcccccagctcagggcaagagaacctccatcctagaaaaggggagaagcttctgcagttttgggagtcctgccgtaaaggcccctcttggccctttgtgttcccgtctcagctctaacgctagaagagttggggaaacgcagggtagttttcctgaaacttcaggggtgacggtcgatgcccacgtttagaatccaccgagaggcagcagagaagctgacagttggagatgaacatgtcaccttcattactgttaaaaaaatgcagcttggaaaatgtggatttggatctgtagccacagtgggcttgctgacacttcgcctctggaatgaaacgtacctatagaagccgggcgtggcggctcacacctgtcatcccagcactttgggaggccgaggcgggcggatcacctgaggtcaggagtttgagaccagcctggccaacgtggcgaaacgccgtctctactaaagatacaaaaattagccgggcgtggtggtgcacacttgtaatcccagctatttgggaggctgagacaggagaatctcttgaacccgggaggtggaggttgcagtgagctgcgatcacgccactgcactccagtctggtgacagagcgagaccctgtctggaaaaaaaaaagtatctattgagtcccttgcaggaataggaaaacacaggcccctctccacaatgaggacagagcccacgcctcttacccagtgtgcagagagaggatggctgaccatagtttcttctcccagacccatggagcagatgtgtcaccctctgcctgggaggacgaagtgcagggtggggaagtccctctccatggagtcaagtggctggagaggccaggtgcagtggctcacgcctgtaatcccagcactttgggaggccgaggcgggagattggcttgagcccaggagttcaagaccggcctgggaaacatggtgaaaccccgtctctattaaaaatacaaataaaaggggctggagaaatggtgctttccctgcggtttccagcccaacccaggaactacctggactcccctggtctgtgttcagatcagccctgccaaggccgcccaagatcccggggtcagacatggtgcagagagtgtggggtcttctcttggcctgggctgattgcctgttctctgtgcctaggcagaaacccccacacccaaccataagcccctcacagcctgcccaccctggagggcagagccaggcccctggctttctgccaggtggcttctcatcctgactcactcgatgacgtgcttgcttcctgctgaggctgccacttaattactgcaattaggctcctctctgcagcaggagtgatttcataccctagacttcactggagggggcgtgaggaaacattcccgaaatctgggagtccaggcaccagccagagacacaggctggggacgctgagtatcccccacccccccgccccccaaaatatacacacacccaagctccatctccaggagttttctctgtctagaaacagcttgagacagaagtaggaagttcctgctgtctgagcgcttcctcccctgcagaccaagcaggtggcatcacctcggcagctgaccttggcctcatcacctgggcagctgaccttggcctcatcacctgggcacctgaccctggcctcatcacctgggcacctgaccgtggcctcaccttgcctcctgccttccctcccacacccctctttgaggctccgtgtgctccgtctgccaagtggggatggtattacagctccagttgcaggctgcactgtcctgttagcaaaagctggggctggaacgtctctaaaggaggataaagaggcttggagcagatgagtcatcccgggggtctttccagtactcactacctgctgcctggcttgggatccaggaggggcattggctgttcctccctcgaagcttcctctcggacccccagcatgggcagtggtgggtggggagtgtcgggggtgctgggggctgagtaagtgctctctgatgggggtaggatgcagctcactgtcctggggagctcagcatctctgccgaaggtccaccacttccctgctggcgtgtgggacccttccttcctacctcatgggttcctcatgccctaaagattggctggagtacctggcgctggtcaactcaaaccctgtctgcccttggccgacgtgtagggttcctgagtcggggttcctgtaatcacagggctccctgccagcctctctcatctctgggacctggagtcccttccttcttgcccacgccccagccactggactccacgaggctccaggagttcacaggtgtggtgcaggggattggggtggcagaggcagcccatggccatggggctcctttgtctttctttttttttttttttttttttttttttttttttttttttgagacagagtctcgccctgttgcccaggctggagtgcaatggtgtgatcttggctcactgcaacctccgcctcccaggttcaagcgattctcctgccccagcctcccaagtagctgggattacaggcacctgacaccacacctggctaacttttgtatttttagtagagatggggtttcaccgtgttgaccaggctggtctcgaacttccgacctcaggtgatccgcccaccacggcctctcaaagtgctgggatgactggcgtgagccgccacacccggcctctgttctcatatgtacaccctgagtttcagaactccccttcttgccaggctcacagtgggggctgggagaggtgagggacagaacaggccatgactcctctcctccctttggcaggaactcaaagtgaaaggtcccaaggactccaaggacagccacacgtctgtcaccatggaaggtacctcggggagcgggctggattacaggcacctacctttgtctggctgtgcaggcaacaggctgcgtgaacgcggcgcccttccccttgtgtgtgcgtgtgtgtgagcgcgtgtgagcgtgagcgtgtgtgagcgcgtgtgagtgtgagctgagtgcgcgtgtgcgcgcacgcgaggactctagcctcgtgcccaggcagccagccagctacaaacgtgctcctctttaggatgccagcaggctgctggctccctccctccctacccctcctccccttccccttccctcctctcctcgccacgcgcctccctcccctcccccttgctggaagagcactccggagcggctgcccgatgctggagtccgtgcggcagcatcagcaaggtggctgagtggccgggctgctggtgggcgccggggagcctggagcgatggctgcacgctcccgccgcggggacagaggctgccatggagattctcctcattattcgcttctgctgtaactgcacctatggtaacccaggtgctcgctgtgggaggtggcggaccctcccacctctgggggccggctggagtgggcttagatgtggccggggaggttagagggccgcagggaaggagggtgggcgagcggctggacctgaattcccccttcgttttggcggcatccagcctagagttgaaacctgggggctgctcagagcagggccgcttgcaaatggaaggaccaggctggaggggtccaggtggccccgaggatcggtggggaattggtgggctagtgtgagagaacttcctggaggggctgttagggagagacggcgacgagctgtgcccgcagacgtagtagccctgaggccagggagagggtctgcgggggccaggcacagcgtggcgatgggtggcgatggtccggacggcggcgttgccagccgagagggtgccagcgcgagccagagggagaagttgggagtttctttgtttctggagagaggcgcggaggctgggcggcacggtattgtgtgctccgcgcacatgcagcagtaggcggaggacacggaggggctgtgggagcaggaaggagaggtttgtttccagccgtgagagacccccagccgaggtctgggccctcaactgtggaaggcaggtcggcagggccagcgggagaggggtgtggcaagctactctgtgaaggtcacacacacacacacacacacacacaccacctttcggtggaagggacccggaccatcctccttgcagctcccgcagctggctgggggctggggggaagtcccgggacaggtgcatgtcatcaacacgactgtcggtcgtaggaggatgaagccggcccaggtagggaggtgtccagaagcccgtggaccctgcctcaagaggcaagacgtgccaaggggtgccctgcctgcctgtggcagggagtggggtgggcacgtgtggctcccaggccggctgctctgggcctgagtctgtgggagcagcaggcggctggttttaggaccttcctcttccttcccaccaggtgtttcggctctgcacccttctcagtcactttgctttcctatctccctggtaacctggagctccttggagctccttgtcgaaggctgacttgagggggatggtggcttgccggaagagagatggcaggtttcctgggctccttcccaggggcggctgtgctggaggggctgtgtggggccagtgccccctgaccttctcaggaccctcttgatggaagcaagctctgaggcagcctctctcctgcggcccagcagggcggctgcaggaaccctgttctcacttgaaattggcctggtcagcgatcagaggagaaatggtctttttggtctggcctaggagttggtcaggtcttgactctgcctccctgaaaaggaaacgtacccttggcttcctctcccttccccaaaaggaagcttcgactcagtgaaacggacctgggacctggagttcacgttgcttcggtctccgtgatactgttgttgaagtcggcttcaaagtggggaatgaggagtgaaagggccagctcgtgaggagggggctcaccccatcctggtcactctttccaagaacgctcctgtggttcattgaggttttacaggtgctgcctttccctgaagaaggtgcagctcaaagcaaggagtgcgggtggatctacccagctcccaccacttgtagccacaagtctctggcctcagttgccttgtctgtaaaatggggctagtgagaattgcttcccgttttaatcacaggaaataatgagagcaaagcagttaactcagtacccttgggcacagagcgagtacccagcaaactagagagagaccagcttgctgcccaagtcagtgtcagtggagagggagagtgggtgaggccgggcaggaagcaggccagcctgcaggagcccagggacaggggaagggccagagcgagtgcctcaccctgagttctcaggggaccccagcgtgcaggggccgtggggagcacaaacttcagggccgctcttattcccccggttccctccgtatctgatgtggtcccagtgccgccaccccccccacccccaccccccccgtgcacctgccctcctggccgcccttccagggctcattccacagccttactcaggtggactctggaggtgaccacagacatgttaataacccctctgaaacccaacctgccatgtgttcagacctctgagcttagtcagaaacctcttcctcttgggacccaagagagggctgcggggagccgataatgcagtgtcagctttctgtggagccgccactccggagcccaccctggcaggtgtctgctgagcttgtgctttcttttgggtctctggggttctccagtgtgattttttccccctgaagatgggctgagccacaggtgggtgccttaaacagcctcagaaatggatcccacctgagctaggacctgggctgcaccctcagtgccgaggataccccaagactggcctcattccttcaagcttccatggcccatggggagggtctctggaaactgctagataagaaagggctacagatatgtcatatgaagtgtatttacgtaaaccagtggttggccgggtactcatgcctgtaatcccaacttttggcagactgaggcaggaggattgcttgaggccaggagttcgagaccagcttgtatttggcttgaggccaggagttcgagaccagcaacatagtgagaccttgtctctatatttatttttatttaaacgaagactcactgtgtcgcccaggctggagtgcaatggcgcaatctcagctcactgcaacctctgcctcctggattcaagagattcccctgcctcagcctcccaagtagttgggattataggcgcctgccaccacacctggctaatttttgtatttttagtagagatggggtttcaccatgttggccaggctgttcttgaactcctgacctcaaatgatccacccgcttcggcctcccaaagtgctgggattacaggcgtgagccaccctgcccggcccctcgtctctatatttttaaaaaaattaaaataaatacataaataaaacataaagcagtggttttcaaccattattatacattcaaatcagtaaagaagctttatagaaatgctgatggcccttgtggtcttgcagagatttgggttgagttgacggggctggggagcagcatctgtatcttttaaccgctcccccagtgattccgacaggcagccaagctcggactgcgggtaaggctggtggccctgctgaggctgcattttcttcacagccagcagattgctccctgaagtgtctgcttagccgcgcacggggtatttatatctcaggctttggagaactatcaggtttggggcccggctagggcgtgcgtgttcacgctgggacctgtcacaacctggtcttatgggacacccagtctgggatccttcttcccagatgaccaacctgcctctgtcactgcccctgcggcaggaggcccaaggtcatgaccccagggacagagcatccaggtgcaggactgaagctgagcctcctgttgggagggtgggcgcagccgcgtacaggaagggtgttgggaagtgttgatccaccagctgccacctccacctgtccctgctgaatcccagccatcctcacttggtgtccgggttgtggagggtgtggctcttgggggcctgggctggccttgcctgcgtcctcccagcctctttggggctctcatatgtgaggcctaacctgagttgcttcaggaaacctttgcccctcaggctgccacgtgtttgagagcacagccttttttctttttttttgagatggagttttgctcttgttacccaggctggagtgcagtggcatgatcttggctcgctacaacttccgcctcccgggttcaagtgatttccctgcctcagcctcccaaatagctgggattacaggcatgtgccaccacgcctggctaatttttgtatttttaatagagatggggtttcactggttggccaggctggcctcggggagcagagcctttctgtggagatcaggccagcctcctggcctccagcctccctgcctccagccttcctgtgctttgctatctggggtttgaggatgtggggaggggtctttcctctgagagatgaggccagtcctgtggatcacagtgaggcatgccaatcccagctggctgtgcctggccttcagctccaggagcctgagaatgataaggtctggagagctgcccttcctggaaacacagcatgtctccttcccccattctggggtcctgcatgtggcaggtgtgctagactctgcagggcatggctgggtggagctgtgtgattctggggttctgcgtgtggcaggtatgctggactctgcggggcgtggctgggtggagctgtgtgattctggggtcctgcatgtggcaggtgtgctagactctgcagggcatggctgggtggagctgtgtgattctggggttctgcgtgtggcaggtgtgctggactctacggggcgtggctgggtggagctgtgtgattctggggtcctgcgtgtggcaggtgtgctagactctgcggggcgtggctgggtggagctgtgtgattctggggtcctgcgtgtggcaggtgtgctggactcttcggggcgtggctgggtggagctgtgtgattctggggtcctgcgtgtggcaggtgtgctggactcttcggggcgtggctgggtggagctgtgtgattcagggctgggggtccaggagagcatctgccttgagccaggtgaggccaggacaggcctggggaggggggcggggcggctctcgatgaagccatgtctgatgggagaggaggcagggctgcggagggagcaggggctgccagggctgtgtgtcacctgtgtctgctgtttggtcggcccggggagtgagaacagaggtgggggctgccgtgggctcactctggtgtccctcgaggggtgttcacgtgggaagcatgcgggtggggggacgaagctggtctctggggtgttgggttgccctcgtccatcatcctcttcctccttctccctgtctcccccgacagctctgctctacaagcccattgaccgggtcactcggagcaccctagtcctacacgtgagtgtcaagcctccgaatggccagagagggcttaggagttcagtggaagactgagcctgggtgagagggtgctggagtcaccgagaacagtccacctggggaatcaggggttcctaggctccaaggatgcctgtctggcccgcggtatccatgccgccaggctagggcctgaatacagcttggctactaagcttgacgtggccaggtgctcccggggaggcaggcattcctgcttccccacccgctgcctcctggtctccagtgtccttggagcagctgcagggcagacacagggtttctctcccagctgctcggggggatgagcctccacctggtctccacactggggagagagtatgactgtggccaggagaagagggggcagccagggccctctcccctgctgtgctggctctgattttttttttttttttttttttttgaggcggagtctcactctgtcacccaggctggagtgcagtggtgcgatctcggctcactgcaacctctgcctcctgggttcaagcaattctcctgcctcagcctcccgagtagctgggactacaggcgcccgccaccacgcccagctaatttttatatttttactagagatggggtttcaccacgttgcccaggctggtctcgaacttctgacctcaagagatcccccgcctcggcctcccaaagtgctgggatttcaggcatgagccgccgtgcccggcctgactctgatttgtagttcagattttgcgggaattaggcaggtccctgagtgcccaccctttggatggggactgagcactccccggtggccacacatcaggccccagagccgctcccctcaactcaccgcctcacccttcccaggacctgctgaagcacacacctgtggaccaccccgactacccgctgctgcaggatgccctccgcatctcccagaacttcctgtccagcatcaacgaggacatcgacccccgccggactgcagtgacaacgcccaagggggaggtgagctcagagcccggcacggcccctcacccaggctgagaagtatcaggtccctcgtccccttctctcacacacgggcggcaggtccctcgtccccttctctcacacacgggcggcaggtccctcgtccccttctctcacacacgggcggcaggtccctcgtccccttctctcacacacgggcggcaggtccctcgtccccttctctcacacacgggcggcaggtccctcgtccccttctctcacacacgggcggcaccgggtgcctcctgcctctccaatcctgatcccccattcccagccaaggagaggttttcagcccttggtcaccctgatgacctgcagctttccaggccctaggctgagaagtttaagtccagtgtctcattaatcctcataataatctagggaggccgggcacggtggctcacacctgtaatcccagcactttgggaggctgaggcaggtggatcacttgagttagaagtttgagaccagcctggccaacatggtgaagccccgtctttactaaaaatacaaaaattagctgggcgtggtggcggatgcctgtagtgccagctactcaggaggctgaggcaggagaattgcttgaacccaggaggcggaggttacagtgagccgagatcgcaccactgcactccagcctgggtgacagagtgagactccatctcagaaataataataacaatccagtgagccagaagaacctgaggctggggagtctctccaggtccaccacgcagtctttcagccactggtgtcagagctggattcctcacctgggactgtctggaggcccacgccggggaagtggcctccgggtgcctcattcttgaatgcagacacctgcctctggccagtgtgatgccgtcagggtctcctaggaagcgaagggagcaggagcttggagctgcttcagctcggcctgcacacgcagtggcttgcggggagcccacagcaggaaaggctggcgttggaggtggtggaggccgtccaggttgccggaatgtccagtgggcacctgcatgtgggacagccgttccctgggggcccttcttgatgcaagggtggggacagcccagcaaggggagtaccaggaagcatgagagggacagttgccttcgtggattggcagccgggcccgggtgaaaggcttcctgtccaggggaggccattaggcggccgttacgagtgaggctgacagggtgtctgctcctgtggtctgtttacgagcccccagggtctcctggggagaaagtggtgagggacaggcctggacagtgtccactgggcagagagagccgattccgtgcggctcctggtgctgatgtgcagcgtctggggatcccgtcgtctgttttactctggggatatctgaaaaatctccagagggcttagcgtaccctccgttttcagtcatcctttttttgagactgaatctcattccatcgtccaggctggagtgcaatggcgtgacctcagctccactgcagcctccaccctctgggttcaagcaattctcctgcctcatcctcccaagtagctgagattacaggcaggcgtcaccatgtctggctagtttttgtatttttagtagagacggggtttcgccacgttggccaggctggtctcaaactcctgacctcaggtgatccacccgcctcagcctcccaaattgctgggatgacaggtgtgaaccactgcgcccggcctcggtcatcttaattgtatactttgaatacgctcacctacgtattacagcagatgtaggtcacaccgtgtatcatacaggaaaggctggcacagatggggacgaccccccggctctgagcgggggttggaaactctggaactcccacgtggagcagaaaccacccagagcccaggttagagttggctgcaggtcccctctgggcactgctgcagtcccaggctggagggcccaggtctcatccccagggggctggagaagccagggaggagtagcacagacaggcctgagtgggtctcgggtctcgggtctcggttgagccggggctagatgaagttcgccgccgcggtcgggagggattgcaaacggggatgttcgtgccccagggtggagaaaccaggtcgtcccgggcagggggctccagggttagccgcggagagccccgtgcgttgcacacacttaatgtgccaggcactgtgctgtttcacatgcaccatctcgatgagtcaccttatgaggcagacctcactgtccgcacttaacagaaggtgaatctgggattcagagaggtcagggagcctgtctgagatcacagctgagaagcctgttggcattcaaacccatgcccatgtgactccaaaggcagtgcttgaaccacctttggttaagggatgacaggctatgccgcctctcggtccagtcctccctggctggccgtgcccccgtgtgcaggctctgccctcggccgcattcccctctgagcaggctggggggtctgccatctccctcagacgcgacagctggtgaaggacggcttcctggtggaagtgtcagagagctcccg

SEQ ID NO: 10454 - DNA, 560 bp, Homo sapiens
ctgcgtttccccaagttcccaacgagctgagtgagaggttttcagtgcaggggagctcccggtgctccgtgaagctttcatccattcattaatcctctcccctcccaccctcctctccctctgttccctgactcctccctgcaggccagccagctcggtgtgtacaaagcgtttgtcgataactataaagtcgctctggagacagctgagaagtgcagccagtccaacaaccagttccagaagatctcagaggaactcaaagtgaaaggtcccaaggactccaaggacagccacacgtctgtcaccatggaagctctgctctacaagcccattgaccgggtcactcggagcaccctagtcctacacgacctgctgaagcacacacctgtggaccaccccgactacccgctgctgcaggatgccctccgcatctcccagaacttcctgtccagcatcaacgaggacatcgacccccgccggactgcagtgacaacgcccaagggggagacgcgacagctggtgaaggacggcttcctggtggaagtgtcagagagctcccg

SEQ ID NO: 10455 - DNA, 2765 bp, Homo sapiens
agagttacctgttcctactgtcctcggactacgagaggtcagagtggagagaagcaattcagaaactacagaagaagggtaaattcctgcctcttccacgctccccaatgatgtccgtggcattgatgggccttttgtatttctaagcgtttcatgtccagtatcacgtctttggccctcgcagtcaccctcagaggtgccagggtgagcgtttaaggatgttacggattaattgagacccaaagaatctaactgattggctgaaagacatgatgatttagtcctgggactggacccagagcccagcctgggctttctctctctctctacctctctctctctctcacacacacacacacagagacacacacacacacacacacacacacatacacacatacacagaggctgggtacggtggcttacgcctgtaatcccagtcaggagtttgagatcagcctgggcaacgtggtgaaaccccgtctctactaaaaacacaaaaattagccaggtgtggtggtgggcacctgtaatcccagctactcaggaggctgaagcaggagaatcccttgaacctgagaggcggaggttgcagtgagctgagatcacagcactgcactccagcctgggcgacagagtgagactccgtttaaaaaaaaaacgaaaacaaaacgcatacaccacacacacacacacacacacacacacacacacacacacacacacacacacacacacaaacctcttcagttagattctcctactctgacccctctcgcagcatctacaccagtcctgctgtgtccacaaatccttccccctccctcgcaaggaccaagtctgccccagggattaagccgtcttcctgcagcagcccccagggaagagcagccggtcctggtggaccagtgcccacgctcccttctctctcggctctccctccagatctccaggcctttgtcctgagctcagtggagctccaggtgctcacaggatcctgtttcaagcttaggactgtacacaacattcctgtcaccagcaataaagacggtaagctcgggaaccagaggtggcccaaccggcaggtcccagccctcagagcgtggccggcttcccgtaaggactcagacagacatgtggctgtaaatggctgatccctgctcggctgtgctgagactgttgagtggccaggacacagcttgggtaggggtgactgtctactgagttcccagatgaccccagcttttccttgggcccctctgtctggcttgggagaactggcaccctggtgcactgagattgtgctgttaatatattcatgagagagcagacccggtagataaaatggtgtatgggaaatgaggctggaagtttccagggaccagctcttgaaaggccttgaatcccaagcaagggagtttggaattcatgctgtaagcccgggagtctgggggggttttgagcagtggggagctgtgatcagggctgggaactgaccggagtgggtgtattctagctgcctgtgtgctgggaaagggtccactttgtgaacggggtcctgaaggcaagctttcctcgacataaatcattagcagaatgatttatcatattggtcagttttcagtgccaggataggcaggatttggagggagagacagtacccatggggaatggtactaagtccctgggccaggatggtgggtgtgctggacccccccaggctgagtggaggagagaaggaccccctagccctaccccgggcagctcacatataaggccgccgtggccttcggaaactttttcatctggccaccaggtggtgatgttggaccaagactcagctgagtctcataccccgtctgcctcccgccggcctggggtggaggctgaggggatccgctgaccaccctctgccctgggggcttttctctcttgcagacgatgagtctccaggactctatggcttccttcatgtcatcgtccactctgccaagggatttaagcaatcagccagtaagtgccctggccaggacgaggttgggtgggccattgtggattctgcactgctctgcccaggatggggccctgccagcacgcctttagacatggggcattcccctggaggccagaaaccagctcctcttggcagggaggtcacccctggcctttgtctccaaagtcctctttctcaagccctccctgaagctgtctgaaacctaggggccgggcgcggtggctcacccctgtaatcccagcactttgggaggcccaggcgggcggatcacgaggtcaggagttcgagaccatccgggccaacatggtgaaaccccgtctctactaaaaatactaaaattagcgtgggcatggcggtggacgcctgtagtcccagctacttgggaggctgaggccagagaatcccttgaacccgggaggcggaggttgctgtgagctgagatcatggcattgcactccaccctgggcgacagagcgagaatccgtctcaaaaaaaaaaaaaagaaaccgagtgcgacaaacacgtggactccaacttcatatctgagggcgacaaacacgtggactccaacttcatatctgcccatgacaagctgtgtgaccttgggcaagtttcttaacctctctgggcctccactaaaaggcagtcacgcttgtgaattttgacccgagagcaggctgggatatgatcgtgtgtgtgcaacgctggtgtgctgccacgctcatcgctttttctccccttcccccttgtg

SEQ ID NO: 10456 - DNA, 1010 bp, Homo sapiens
agagttacctgttcctactgtcctcggactacgagaggtcagagtggagagaagcaattcagaaactacagaagaaggatctccaggcctttgtcctgagctcagtggagctccaggtgctcacaggatcctgtttcaagcttaggactgtacacaacattcctgtcaccagcaataaagacgacgatgagtctccaggactctatggcttccttcatgtcatcgtccactctgccaagggatttaagcaatcagccagtaagtgccctggccaggacgaggttgggtgggccattgtggattctgcactgctctgcccaggatggggccctgccagcacgcctttagacatggggcattcccctggaggccagaaaccagctcctcttggcagggaggtcacccctggcctttgtctccaaagtcctctttctcaagccctccctgaagctgtctgaaacctaggggccgggcgcggtggctcacccctgtaatcccagcactttgggaggcccaggcgggcggatcacgaggtcaggagttcgagaccatccgggccaacatggtgaaaccccgtctctactaaaaatactaaaattagcgtgggcatggcggtggacgcctgtagtcccagctacttgggaggctgaggccagagaatcccttgaacccgggaggcggaggttgctgtgagctgagatcatggcattgcactccaccctgggcgacagagcgagaatccgtctcaaaaaaaaaaaaaagaaaccgagtgcgacaaacacgtggactccaacttcatatctgagggcgacaaacacgtggactccaacttcatatctgcccatgacaagctgtgtgaccttgggcaagtttcttaacctctctgggcctccactaaaaggcagtcacgcttgtgaattttgacccgagagcaggctgggatatgatcgtgtgtgtgcaacgctggtgtgctgccacgctcatcgctttttctccccttcccccttgtg

SEQ ID NO: 10457 - DNA, 1143 bp, Homo sapiens
ggtcccagagcaggccctgtttgtgctgaggccccgccaggattgggtggatgccttggtgagggccaggtaggagggaacaaatgcagggtgggaagtggctgctggaatggggaagggagcggggcctgcaggagggaagcattcttggcactagtggcatcgtcaccaggacaccggccttgggagggcgagcactacatccatgggtaggcgccggagccctgaggacacggcattgccaagctcttgtcctgtggcttccttccctgtgtccgcagtgtgtggggggtgggcgggcaggcaggacgaggtgacccccatcctttctgtgtgctcgttccatgaaattgggggatgtggatgcttgaacgggctctcagctagtgtgccttccgtgcagaggaggtaacactccccagggcagccagacacccttgtggagtgggatggaaagctgggaggaaggggctggccggcaccatggagatattttggtttgcaggaggattctgggctttatgagcactttaatgcaaccagggcaggcagcaccacgggacgggaactgtaagctgcacctgttgaattctgaaggtccgggctgcccgtgggccccgggaagtgggggtgcccagcttgtggggtgcaggcggggaggggaccgtgtggtggtggagacgccatggtacagcctgtctcccgatcccccaggtcccctgaggccttagagatgaatctcccagaagtggcagccgcggcagggacaccaggatcatgaaggacctgggaggtgaacccgctgctcagttcctggccctcgtcccttagacccagtcctcggagcagaactgggggaagctgagatttctgtgggctgcgtgcccacctcctccctcttcgttggtcctcccacgcgcccgcccccgagtgggagcagagccatgtgagctgagttggagctgctcgctgccgagaattgcatcagccccgcctggcaggctggagcgggagcctgttgctatggtgaccaccaggcttcaaaccagtgagaaggatgagatggttgccgggcgaggttttctcaccatgtgatgcgtgtgacaggctgacaggttcggtagacctggacccagccctccc

SEQ ID NO: 10458 - DNA, 563 bp, Homo sapiens
ggtcccagagcaggccctgtttgtgctgaggccccgccaggattgggtggatgccttggtgagggccaggaggattctgggctttatgagcactttaatgcaaccagggcaggcagcaccacgggacgggaactgtcccctgaggccttagagatgaatctcccagaagtggcagccgcggcagggacaccaggatcatgaaggacctgggaggtgaacccgctgctcagttcctggccctcgtcccttagacccagtcctcggagcagaactgggggaagctgagatttctgtgggctgcgtgcccacctcctccctcttcgttggtcctcccacgcgcccgcccccgagtgggagcagagccatgtgagctgagttggagctgctcgctgccgagaattgcatcagccccgcctggcaggctggagcgggagcctgttgctatggtgaccaccaggcttcaaaccagtgagaaggatgagatggttgccgggcgaggttttctcaccatgtgatgcgtgtgacaggctgacaggttcggtagacctggacccagccctccc

SEQ ID NO: 10459 - DNA, 1412 bp, Homo sapiens
agaggaagaagacggggaggaggcgcgagggcggaaggggacacttgactttccctctggtctcttcgggggccgcggggaagggtcggcgcggacggagctcggggcatgtgggacccccgcgcgttcgagcggcgctggcgggccgagttccccggggcggaggcgccggtcccgaggctggagtcggtgcgggacgcggagcgggagctggagcgccgcagactcaacctggagcggctgcaacaggtgctggcggaggagcagctcaaagcctcgctcccgcaggccgcgctggcccggggcggcggcggagactccggggagcccgggcgccccgaccccgaggccgagtctccccgcggggaccccgggcgccccgaccccgaggccgagtctccccgcggggacctgcccgccgggcccggggcggccggagaagccggcgggggaaggagctgggccgacgccgtccaccggcagctcctgcagccccagctgcggttccgggcccgggaggacgacgcgcccctcggggacccccaggcggctcccggcacggacgaggggggcgacggcggcgaccacgacttcgagatggtggatttcaacgagaagttcatcctcagccactggctggtggccccttgccggttcgggacccgcgagcgggcgcgcagcccccgccgctggatgcacctgatccccggggggcggcggccgcagcgggggacccgcgacctggagcagcgggaggccgaggccaagggccgcccgggctcgcccctcgccgcggaggagacccccgggcgcgagcacctgcccccgtggcggcgccgcaggttcctgcgggtgcccgagcgggactcgcccggccacagctcgccggagagagacagcgacggcagccggcacagctccgaccgcgaggacgacttctccgcagacttcagctacgggacggacgagtacgacggagaggggaatgaggagcagaaggggcccccggagggctcagagaccatgccgtacatcgatgagtcgcccaccatgtccccgcagctcagcgcccgcagccagggcgggggggatggcgtctccccgactccacctgagggactggctcctggggtggaagcagggaaaggcctggagatgaggaagctggttctctcggggttcttggccagcgaagagatctacattaaccagctggaagccctgttgctgcccatgaaacccctgaaggccaccgccaccacctcccagcccgtgctcaccatccagcagatcgagaccatcttctacaagatccaggacatctatgagatccacaaggagttctatgacaacctgtgccccaaggtgcaacagtgggacagccaggtcaccatgggccacctcttccagaa

SEQ ID NO: 10460 - DNA, 532 bp, Homo sapiens
aagaccaaggtcaacaaggacaacaatgagatcgtggacaagatcatgggcaaaggacagatccagctggacccacaaaccgtggagaccaagaactggcacacggacgtgattgagatgaacgggatcaaagtggaattttccatgaaattcaccagccgagatatgagcctgaagaggaccccgtccaaaaagcagaccggcgtcttcggtgtgaagatcagcgtggtgacgaaatggccggtgtggatctagagtggccgcagaggcgctcacaggacacttcagaagcacgcgagccagcacctaaacgctggaaggtctcttgtgagatcccagatcgtctgctcctcgtaacaagcgggaagctctgtcagccgggggcctacgtttgggctcggcaccaacggggactggcggcccctcgggaaagggcacgtgtcccccggttcaccaccaccctggccccttgtctcaggcctgacccacctcctcatgtgggctgcctgctgggcctcctacaagcatctga

SEQ ID NO: 10461 - DNA, 597 bp, Homo sapiens
ctcctttgttgcgcgatgagggtcgggtttcggatctgaccgagccgccgccgcgggatggagccgctcagccaccggggcctgccgcgcctgtcctggatcgacaccctctacagcagagctgtccttgtgatggttcattctgctttggtttctcaacatcaaaggggcaaagccggatcccctgggcataggtcctgtgccaggtgccgccgctccatctgctccttcccctgcagaggccagcgtcgttgggtgaagacttcagctacgggacggacgagtacgacggagaggggaatgaggagcagaaggggcccccggagggctcagagaccatgccgtacatcgatgagtcgcccaccatgtccccgcagctcagcgcccgcagccagggcgggggggatggcgtctccccgactccacctgagggactggctcctggggtggaagcagggaaaggcctggagatgaggaagctggttctctcggggttcttggccagcgaagagatctacattaaccagctggaagccctgttgctgcccatgaaacccctgaaggccaccgccaccacctcccagcccgtgctcacca

SEQ ID NO: 10462 - DNA, 3196 bp, Homo sapiens
ataaaaagcaaaatggtgactcagagaggagagttggaagcgtcctgcctcttgctcccactgttaatttttacacttggaattaggcagaaggcaaagaaaacagcagcttgaaatacgcggctgacatgctcttcatcgggtagcaacagcagagccgctcctccccgcctcccagcagccccggagcgggcagggcccggtgcctgctggctctcccccgcccctcaccaggcccaggcccccgcacagcccccgcccgggccaggcgtggatggtgcggccggggccatggctgccgggggccgccgccggcgcccactacgctaccagtccctggcagctctggtggaggattctcagtggcctttcttgttccttgtctcagacttcagctacgggacggacgagtacgacggagaggggaatgaggagcagaaggggcccccggagggctcagagaccatgccgtacatcgatgagtcgcccaccatgtccccgcagctcagcgcccgcagccagggcgggggggatggcgtctccccgactccacctgagggactggctcctggggtggaagcagggaaaggcctggagatgaggaagctggttctctcggggttcttggccagcgaagagatctacattaaccagctggaagccctgttgctgcccatgaaacccctgaaggccaccgccaccacctcccagcccgtgctcaccatccagcagatcgagaccatcttctacaagatccaggacatctatgagatccacaaggagttctatgacaacctgtgccccaaggtgcaacagtgggacagccaggtcaccatgggccacctcttccagaagctggccagccagctcggtgtgtacaaagcgtttgtcgataactataaagtcgctctggagacagctgagaagtgcagccagtccaacaaccagttccagaagatctcagaggaactcaaagtgaaaggtcccaaggactccaaggacagccacacgtctgtcaccatggaagctctgctctacaagcccattgaccgggtcactcggagcaccctagtcctacacgacctgctgaagcacacacctgtggaccaccccgactacccgctgctgcaggatgccctccgcatctcccagaacttcctgtccagcatcaacgaggacatcgacccccgccggactgcagtgacaacgcccaagggggagacgcgacagctggtgaaggacggcttcctggtggaagtgtcagagagctcccggaagctgcggcacgtcttcctctttacagatgtcctactgtgtgccaagctgaagaagacctctgcagggaagcaccagcagtatgactgtaagtggtacatccccctggccgacctggtgtttccatcccccgaggagtctgaggccagcccccaggtgcaccccttcccagaccatgagctggaggacatgaagatgaagatctctgccctcaagagtgaaatccagaaggagaaagccaacaaaggccagagccgggccatcgagcgcctgaagaagaagatgtttgagaatgagttcctgctgctgctcaactcccccacaatcccgttcaggatccacaatcggaatggaaagagttacctgttcctactgtcctcggactacgagaggtcagagtggagagaagcaattcagaaactacagaagaaggatctccaggcctttgtcctgagctcagtggagctccaggtgctcacaggatcctgtttcaagcttaggactgtacacaacattcctgtcaccagcaataaagacgacgatgagtctccaggactctatggcttccttcatgtcatcgtccactctgccaagggatttaagcaatcagccaacctgtactgtaccctggaggtggattccttcggctattttgtcagcaaagccaaaaccagggtgttccgggacacagcggagcccaagtgggatgaggagtttgagatcgagctggagggctcccagtccctgaggatcctgtgctatgagaagtgctatgacaagaccaaggtcaacaaggacaacaatgagatcgtggacaagatcatgggcaaaggacagatccagctggacccacaaaccgtggagaccaagaactggcacacggacgtgattgagatgaacgggatcaaagtggaattttccatgaaattcaccagccgagatatgagcctgaagaggaccccgtccaaaaagcagaccggcgtcttcggtgtgaagatcagcgtggtgacgaagcgggagcgctccaaggtgccctacatcgtccggcagtgtgtggaggaggtggagaagaggggtatcgaggaggttggcatctacaggatatcgggcgtggccacggacatccaggcgctcaaggccgtcttcgatgccaataacaaggacatcctgctgatgctgagtgacatggacatcaacgccatcgccgggacgctcaagctgtacttccgggaactgcccgagccgctcctcacggaccgactctacccagccttcatggagggcatcgccctgtcagaccctgctgccaaggaaaactgcatgatgcacctgctccgctccctgcccgaccccaacctcatcaccttcctcttcctgctggaacacttgaaaagggttgccgagaaggagcccatcaacaaaatgtcacttcacaacctggctaccgtgtttggacccacgttactgagaccctcagaagtggagagcaaagcacacctcacctcggctgcggacatctggtcccatgacgtcatggcgcaggtccaggtcctcctctactacctgcagcacccccccatttccttcgcagaactcaagcggaacacactgtacttctccaccgacgtgtagcccgaggcagggtggctgcgggcgggtggtggaaccagcccctccagcctggggtccaactcagacttgaaagactgcaatagaaaactcccaaacccagcactccagactcgagggaagccagcttccaagaactggaatgcgtacgtcttttgtgccaccttgtacaaagccggctgcccagccccagcctcaccaccgcatcccacctcctgccctccatacctctagttgtgtctgatgctccgtgctgttcgggaattgttttatgtacacttgtcaggcagaa

SEQ ID NO: 10463 - DNA, 19430 bp, Homo sapiens
gaagacctctgcagggtgagtgtgtgagtccaggggcacggggcgggggagggggtccggacctctgcggggtgagtgtgcgagtccggggcgggggagggggtcctgacctctgcggggtgagtgtgcgagtccaggggcgggggagggggtccggacctctgcgaggtgagtgtgtgagtccaggggcgggggagggggtcctgacctctgcggggtgagtgtgtgagtccagtggcacagggcgggggagggaggccggaccctgccacccatggagccttcagcaactttgttggttttttttcttttgagacagggtcttgctctgttgcccaggctggagtgcagtggtgcgatctcggctcactgcaacctctgcctcccgggttcaagcgattttcctgcctcagcctcctgagtagctgggattacaggtgcacgccaccatgccaccatgtctggctaatttttgtatttttagtagagacggggttttgccatgttggccaggctgatctcaaactcccaacctcaggtgatctgcccgcctcggcctcccaaagtgctgggattacaggcatgagccaccgcgcctggccggttttttccttttaaaaactatattaattaacttaatttcactacatagccttttttcctgaaagtaagtcatgtttttaattataaagataatataaggccattggaggaaaccccgtcccccactgaagcatgaggtccgactcctgccgcgctgcttccttccctgtttttaaatgttctcatgtttcttcacacagtcgtaatcactgtgaatgcccaatttggggctctgctgtttctgtttcgtgtcataagcattttccctgttgctgcctcatcttcataatcatccttttactttcctgcacgatgttacccgtagatgtgccatcgtctacttaagcattctccttttattagacatctctgaatttctgctaactgcagtgctgtgaatattcaccacgtctcctgctactatttattgagggtttatgccatgccaggtgccgtgacacatgctttgaatacatgatttctagtcctcccaacacctccacaaagtagcgactgttgttccctaatcatagatgagagaggagtcttggagaaggtaaataagcagcccaagctcgcacagctagaggcacaggtgggactggaaccccaagctgacgtgcaaactcctttgagcctccttctctctacccgggagggtgggactggaaccccaagctgatgtgcaagctcctttgagcctccttctctctacccgggagtgtgggtctgctctgtgccttgagcagaggctcattctgcgttcattcacacattcttccacccacacttagtgatcaactgcagtgtgccaagcacaccccttctcacggctgagaagcggcagtctggattcaaacccgtgtctgtgggactcgtttaccatcaggctatcttgcctctcccttcagccctccctggttggctgtgcccccaagtacagcacaggggactccacagccagtgtgttacaccaccaggctatcctacctctcccttcagccctccctggctggctgtgcccccaagtatagctcagggggagcaagccccacgcccacctcaacactcaagggtcagaatgagaagtgcaaatctaagtcctaggggaaggatcgatgattatgaacgtcaataaagggatgactgggcgggcacggtggcttatgcctgtaatcccagcactttgggaggccaaggcgggtggatcacctgaggtcaggagtttgagaccagcctggccaacatggcaaaactccgtctctactgaaagtacaaaaattagctgggtgtgatggcaggcacctataatcccagctacttgggagaatgaggtgggagaatcgcttgaaccctggaggcagaggttggagtgagtggagatcgcgccattgcactccagcctgggaacaagagcaaaactccatctcacaaaataaaaataatttaaaaaataataataataaaggacatgactccctggaactagatcatgtttgagatagttctgaggcagagatggcaataataagcacacatgcttctgcctgtcgtcctttgcgatggcagacattactaatcacatatgcctctgcctgctgtcctttgccatggcagacatcactaatcaactagggcacactttcttgctagacttggatgtggctttgtaatcctccacccagtgttgacccatgtgaccactcttgataagaggtggcatttggaataacacctgtattccattgctagcctgaaggatattgaacacggatagtctagaagggagggaggggattgtggtggggaataggaaaatgtgagcccagccaggaaggcttcgctcttcttgatacctaagtggtttgggatgtttgacaacatgagtcatctgggccagaagcctggtaaggtgaaggggcggagttgctccctgcgggcggggcggaccccagaacccagctttcatcactccagtgtgtgtttcccaatcaggctcctcaggagcagggatcgttcttgcttctggcgagttctcagtcaacccctgtcagtggttctgtggttctggacccaagagttgaggctggaagagccaggctccctctggctcatggctccctctggctcgtttgcaggaagcaccagcagtatgactgtaagtggtacatccccctggccgacctggtgtttccatcccccgaggagtctgaggccagcccccaggtgcaccccttcccagaccatgagctggaggacatgaagatgaagatctctgccctcaagagtgaaatccagaaggaggtgagcagagcttggtatctgagcctggggccctttgagccagctgtgttgggggaggtggaggcaggaagttgtaaggtttgagactttgagagggagccttgagtgtgtagttactaagggaaagaccccgactacagtagctccaagcagatcgagggggtcagtgctcaggatttcatagggctaacatgggaagtgccctggaaagcagtgcatgttgaacacgatagaaaggggaagcaagtagccaggcgcagtggctcacacctgtaatcccagcactttggaaggccgaggcaggtggatcacctgaggccaggagttcgagaccagcctggccaacatggcaaaaccctgtctctactaaaagtacaaaaattagcagagtgtggtggtgggcacctgtaatcccagctactcgggaggctgaggcagtagaatggcttgaacccgggaggtggaggttgcagtgagccaagaacatgccaatgcactccagtctaggcaatagagtgagattctgtcaaaaacaaaaaaaaaaagtggaggtagagggaagcaagagaagaaaaagcaggcttttgtaaggaaaagcaggacctgtgcaaggaaaaggacctgggaggcctctcagaaactgacagatcaagtaggcaaataaataaggagagagaggacctgaatgccacaattaacatgcttgacttaaaaatgcagagaagcttgtgccctgacagaaaactgagattcttgtcacacacgtttgggaccttcacatttatcctataataggccactaaggaaatctcaaaatttttctgcaagttgatagcatacaagtcatgttcacagaccacagtggagtaaaattagaagtgaacaagaatattggtcagcctgggtgcagtggctcacacctttaatcccagaactttgggaggctgaggatggtggatcgcctgaggtcaggaattcaagatcagcctggccaacatggtaaaaatccatctctactaaaaatacaaaattatccaggcgtggtggatcatgcctgtaatcccagcactttaggaggcccaggcaggcaggtcacctgaggtcaggagtttgagaccagcctggccaacatggtgaaaccccatttctactgaaaatacaaaattagcctggcgtggtggcttccgcctgtaatcccagctactcaggaggctgagacaggagaattgcttgaacctgggaggcagaggttgcattgagctgagattccgctgctgcactccagcctgagcaacagagtgagactgtctcaaaaaaaaaaaaaaaaaaaaaaagcattggtttggaaagttcaaactgacaaggtaaagaggaaatcaaaattcaaaatgagaactgcaaactgtttagtgctgtctggaaatgagtgtactacataccagtacccatggatgcagccaaagtgctgtttagaggaacatgaatagccctcagttcacataacaacagtgtctagaggaacatgcatagccctcagttcacataacaacagcgtctagaggaacatgcatagccctcagttcacataacaacagcgtctagaggaacatgcatagccctcagttcacataacaacagcgtctagaggaacatgcatagccctcagttcacgtaacagcagcgtctagaggaacatgcatagccctcagttcacgtaacagcagcatctagaggaacatgcatagccctcagttcacgtaacaacagtgtctagaggaacatgcatagccctcagttcacgtaacagcagtgtctagaggaacatgcatagccctcagttcacgtaacagcagtgtctagaggaacatgcatagccctcagttcacataacaacagcgtctagaggaacatgcatagccctcagttcacgtaacagcagcgtctagaggaacatgcatagccctcagttcacgtaacagcagcgtctagaggaacatgcatagccctcagttcacgtaacaacagtgtctagaggaacatgcatagccctcagttcacgtaacagcagtgtctagaggaacatgcatagccctcagttcacgtaacagcagtgtctagaggaacatgcatagccctcagttcacataacagcagtgtctagaggaacatgcatagccctcagttcacataacaacagtgtctagaggaacatgcatagccctcagttcatgtaacaacagtgtctagaggaacatgcatagccctcagttcacataacaacagtgtctagaggaacatgcatagccctcagttcacataacaacagtgtctagaggaacatgcatagccctcagttcacgtaacagcagtgtctagaggaacatgtatagccctcagttcacgtaacaacagtgtctagaggaacatgcatagccctcagttcacataacaacagtgtctagaggaacatacatagccctcagttcacataacagcagtgtctagaggaacatgcatagccctcagttcacataacaacagtgtctagaggaacatgcatagccctcagttcacataacaacagtgtctagaggaacatgcatagccctcagttcacgtaacagcagtgctagaggaacatgcatagccctcagttcacataacaacagtgtctagaggaacatgcatagccctcagttcacataacagcagtgtctagaggaacatgcatagccctcagttcacataacaacagcgtctggaggaacatgcatagccctcagttcacataacaacagtgtctggaggaacatgcatagccctcagtttacataacagcagcgtctagaggaacatgcatagccctcagttcacgtaacaacagtgtctagaggaacatgcatagccctcagttcacataacagtgtctagaggaacatgcatagccctcagttcacataacaacagtgtctagaggaacatgtatagccctcagttcacgtaacaacagtgtctagaggaacatgcatagccctcagttcacataacaacagtgtctagaggaacatgcataaccctcagttcacataacagtgtctagaggaacatgcatagccctcagttcacataacaacagtgtctagaggaacatgcatagccctcagttcacataacaacagtgtctggaggaacatgcatagccctcagttcacgtaacagcagtgctagaggaacatgcatagccctcagttcacgtaacaacagtgtctagaggaacatgcatagccctcagttcacataacagcagtgtctagaggaacatgcatagccctcagttcacataacaacagtgtctggaggaacatgcatagccctcagttcacataacaacagtgtctagaggaacatgcatagccctcagttcacataacagcagcgtctagaggaacatgcatagccctcagttcacgtaacaacagtgtctagagcaacatgcatagccctcagttcacataacagtgtctagaggaacatgcatagccctcagttcacataacaacagtgtctagaggaacatgcatagccctcagttcacataacaacagcgtctagaggaacatgcatagccctcagttcacgtaacaacagtgtctagaggaacatgcatagccctcagttcacgtaacagcagtgtctagaggaacatgtatagccctcagttcacgtaacaacagtgtctagaggaacatgcatagccctcagttcacgtaacagcagtgtctagaggaacatgcatagccctcagttcacgtaacagcagtgtctagaggaacatgtatagccctcagttcacgtaacaacagtgtctagaggaacatgcatagccctcagttcacgtaacagcagtgctagaggaacatgcatagccctcagttcacataacaacagtgtctagaggaacatgcatagccctcagttcacataacagcagtgtctagaggaacatgcatagccctcagttcacataacaacagcgtctagaggaacatgcatagccctcagttcacataacaacagtgtctagaggaacatgcatagccctcagttcacataacagcagcatctagaggaacatgcatagccctcagttcacgtaacaacagcatctagaggaacatgcatagccctcagttcacataacagtgtctagaggaacatgcatagccctcagttcacataacaacagtgtctagaggaacatgcatagccctcagttcacataacaacagcgtctagaggaacatgcatagccctcagttcacgtaacaacagtgtctagaggaacatgcatagccctcagttcacataatagcagtgtctagaggaacatgtatagccctcagttcacataacaacagtgtctagaggaacatgcatagccctcagttcacataacaacagtgtctagaggaacatgcataaccctcagttcacataacagtgtctagaggaacatgcatagccctcagttcacataacaacagtgtctagaggaacatgcatatccctcagttcacataacaacagtgtctggaggaacatgcatagccctcagttcacgtaacagcagtgctagaggaacatgcatagccctcagttcacgtaacaacagtgtctagaggaacatgcatagccctcagttcacataacagcagcgtctagaggaacatgcatagccctcagttcacataacaacagtgtctggaggaacatgcatagccctcagttcacataacaacagtgtctagaggaacatgcatagccctcagttcacataacagcagcgtctagaggaacatgcatagccctcagttcacgtaacaacagtgtctagaggaaggcaccacgggaggagcatccctgtgagtggaggaagggcctggagcggtttggtcagcttggtctgttttcctcacctctcaggttcagcttaggcctcaccacccctgggaagcttctctgacacccacgcccaccacagtcttggttgggtgccctgtccccagatcctgtggctttttgttcacctgtggctttgcttaaatggtactgaattgtaattgcattgtcagactcctctcttccccactggaatttgaactccagggacagcgctattttcttctgttccatgttcctcatattcgacacgtagaaaacaggtggttagggcccagcatggtggtttacaccggtaatcccagtactttgggaggctgagacgggtgggtcacttgaggccaggagttcaagaccagcctggccaacatcatgaagccccgtctctatgaaaaatacaaaagttagccgggtgtggtggtgggtgcctgtaatcccagccacatgggaggctgaggcaaaagaattgtgtgaacccgggaggtggaggttgcagtgagccgagatcacgccactgcactccagcctgggcaacagagtgagtgggactccatctcaaaaaaaaaaaggcacttagtaaacaaacaattattgaagaaaacataaccagatggcctctctgaggatcctttcaactcaagcatctccctttgaacaggggaaagcaagatcaccattacagccccaggagtgttcagggctgggggatgtcctaggacagagggtccaactggtggtacatctgcccagagggcttcctcgccagcacagctgtccccctcctgaacggctgggccctgcccacagtgcccgcccaggagcatcctgcgtgcctgtttcccacccgcccctgggaggcttgctgcctccccgttgccccagctgtgcagacgtggccttgtgcccagtcgagtcaacagtcaacactcagtgagccccactggctgtgctgcctggggtgtgccgggtgcctcatgtatatccctgtccagtggaggaagcagacacgccccttgctgaccacagagtgtggtacatgtgagtcactggagaggcacaggtgccgtcctctgagtcacagaagaagcagtgatttgttttttgttttttgtttttttttgagatggagtctcactttgtcactgtcgcccaggctggagtgcagtggcacaatctcggctcactgcaacctccacctcccgggttcaagcaattcttctacctcagcctcctgagtagctgggaataaaggcgtccgccaccacgcctggctaattttttgtatttttagtagagacggggtttcaccgtgttagccaggctggtctcaaactcctgacctcatgatccacccgccccggcctcccaaagtgctgggatgacaggtgtgagccaccgtgctcagccttgttctcttgataataattttttaaattttcatgttttttctaatccccaatataatactggctggttttaatgagaaatgctcgtagtaccagcatgtacagggtaaagctggtcgccactcacctcccactgctgacagtttgaggtgtattcttctgaactcttctttgcttatgctggtgtgcgcccgcgtgtccaatgagactagactacacgtgctgttttgcaacttcagcattttactccacagtgggtctttgagccctttggatgtatcagattctttttctttctttttgaggtagagtctcgctctgtcacccaggctggagtgcactggtgagatttgggctcactggaacttccacctcccgggttcaagcgattctcgtgcctcagcctcccgagtagctgggattacaggcgcccgccaccacgcccggtagtttttgcatttttagtagagacggagtttcaccacgttggccagggtggtctcgaactcctgacctcaaacgatccgcccacctcggcctcccaaagtgctgggattacaggcgtgagccaccgcgcctggcagtatcagattctttttaacaactgcctcctgctctgtcgcttggctgcatacaaatgtttttgggtgtttggattgtctctgattcttcgctcttagcaggcaagtcaacagtaaacatcactgcgcaggtgcctctgcagtaggttccctccaggtgggatgggcagggcagggtgagtgtgcgcttaattgacaggcttttacctctgaaaaagctgtgactggtggcattccccctgcggtgtgtgagggtgactgtcccccacagtgtcacaacactggctgtgaacattctttacaattttgccagtccagtgggttaaaaagaacaaaacaccatagaggtgaattctaactgaggagcttgaggatggccttgggagctgagacttgaagcataatggtggttaataaaagggagggggtcctttacgaaacagacagaaacttggaacattgagggagcaggctctgcccgcagaggatgaatgtctggtgagagggggaggctgagccgacgggacctggtgggttgtctgccgggcagggaggctggaaccctgccatgggggccttggtgccaggctagcaggtggggcttcaggctgaaaggtgtctgaggtttctttaagcaggtgtctctgttgtacccaggatttaatgtgtagaggcagcagagtgacagtacagagaggttaatactactgtaatatttgtattatttagggttctcaagagaaggaggcatagcaccccgcccagggccacgtggagaggtgccagctttgaacaggaggcaggaatggaaagaaagtgtggccacagcttttctgtggagaaacagggcagggaaagggcttggcaccagctggcttccgttatgtcggcagccctgggctagaggagtggtctctggtgacctggtccctggccctgggtgacgtggggcagaggagatgctggcttggcgagtgagcgtcaggtagagaaggtggttggggacatgggctctggatcagtgggtgtgtgtatgaaagctgtgctcatagggcatcactgacaggcttaggaattagtgagccctgtgggggagcagtttctcacccagctacccgcctctcctgccacaagatgtcaaaacatcacgaaatacggaaaatgtaaagagcatgttaacacacagtggagtgtcgtgcttagtgctgctcgtgagaaaggcccgagtgtgaggggaaccctctgtgtccccatctcctgcagaaagccaacaaaggccagagccgggccatcgagcgcctgaagaagaagatgtttgagaatgagttcctgctgctgctcaactcccccacaatcccgttcaggatccacaatcggaatggaaaggtcaggatgggtgggggtgggaccaagacagccccttccttagtccagagcagcccactctgtggctcctggccctgacctgtacgaaccggaaactcaggccccctcttcctgaggaggctgccatggctccagctgttgactcgctctcccctctcgtgtggaatgagtgccctctgctggccgtccctggcacagccgctcctgtcaccttggcttcccaggaaggagctcccccttcacccacccacccccagctgcctcctcctgcaaggtcagctgtgcctggataaggaggagctttgggccgggcacagtggctcatgcctgtcatcccagcactttgggaggctgaggcaggcgaatcacctgaggtcaagagtttgagaccagcctggccaacatggcaaaactctgtctctactaaaaacacaaaaattagccgggcgtggtggtgggcacctgtaatcccagctactcaggaggctgaggcaggagattggcgtgaacccgggaggtggaggttgcagtgagccgagattttgccattgcactagagcctgggcaacaagagcgagactctgtctcaaaaaaaaaaaaaaaaaaaagataaaaggagctttgttggggtccccaggatctgggagtacgctttgcctgactgtggtcacccactttatgcttatctcctctcttcagagttacctgttcctactgtcctcggactacgagaggtcagagtggagagaagcaattcagaaactacagaagaagggtaaattcctgcctcttccacgctccccaatgatgtccgtggcattgatgggccttttgtatttctaagcgtttcatgtccagtatcacgtctttggccctcgcagtcaccctcagaggtgccagggtgagcgtttaaggatgttacggattaattgagacccaaagaatctaactgattggctgaaagacatgatgatttagtcctgggactggacccagagcccagcctgggctttctctctctctctacctctctctctctctcacacacacacacacagagacacacacacacacacacacacacacatacacacatacacagaggctgggtacggtggcttacgcctgtaatcccagtcaggagtttgagatcagcctgggcaacgtggtgaaaccccgtctctactaaaaacacaaaaattagccaggtgtggtggtgggcacctgtaatcccagctactcaggaggctgaagcaggagaatcccttgaacctgagaggcggaggttgcagtgagctgagatcacagcactgcactccagcctgggcgacagagtgagactccgtttaaaaaaaaaacgaaaacaaaacgcatacaccacacacacacacacacacacacacacacacacacacacacacacacacacacacacaaacctcttcagttagattctcctactctgacccctctcgcagcatctacaccagtcctgctgtgtccacaaatccttccccctccctcgcaaggaccaagtctgccccagggattaagccgtcttcctgcagcagcccccagggaagagcagccggtcctggtggaccagtgcccacgctcccttctctctcggctctccctccagatctccaggcctttgtcctgagctcagtggagctccaggtgctcacaggatcctgtttcaagcttaggactgtacacaacattcctgtcaccagcaataaagacggtaagctcgggaaccagaggtggcccaaccggcaggtcccagccctcagagcgtggccggcttcccgtaaggactcagacagacatgtggctgtaaatggctgatccctgctcggctgtgctgagactgttgagtggccaggacacagcttgggtaggggtgactgtctactgagttcccagatgaccccagcttttccttgggcccctctgtctggcttgggagaactggcaccctggtgcactgagattgtgctgttaatatattcatgagagagcagacccggtagataaaatggtgtatgggaaatgaggctggaagtttccagggaccagctcttgaaaggccttgaatcccaagcaagggagtttggaattcatgctgtaagcccgggagtctgggggggttttgagcagtggggagctgtgatcagggctgggaactgaccggagtgggtgtattctagctgcctgtgtgctgggaaagggtccactttgtgaacggggtcctgaaggcaagctttcctcgacataaatcattagcagaatgatttatcatattggtcagttttcagtgccaggataggcaggatttggagggagagacagtacccatggggaatggtactaagtccctgggccaggatggtgggtgtgctggacccccccaggctgagtggaggagagaaggaccccctagccctaccccgggcagctcacatataaggccgccgtggccttcggaaactttttcatctggccaccaggtggtgatgttggaccaagactcagctgagtctcataccccgtctgcctcccgccggcctggggtggaggctgaggggatccgctgaccaccctctgccctgggggcttttctctcttgcagacgatgagtctccaggactctatggcttccttcatgtcatcgtccactctgccaagggatttaagcaatcagccagtaagtgccctggccaggacgaggttgggtgggccattgtggattctgcactgctctgcccaggatggggccctgccagcacgcctttagacatggggcattcccctggaggccagaaaccagctcctcttggcagggaggtcacccctggcctttgtctccaaagtcctctttctcaagccctccctgaagctgtctgaaacctaggggccgggcgcggtggctcacccctgtaatcccagcactttgggaggcccaggcgggcggatcacgaggtcaggagttcgagaccatccgggccaacatggtgaaaccccgtctctactaaaaatactaaaattagcgtgggcatggcggtggacgcctgtagtcccagctacttgggaggctgaggccagagaatcccttgaacccgggaggcggaggttgctgtgagctgagatcatggcattgcactccaccctgggcgacagagcgagaatccgtctcaaaaaaaaaaaaaagaaaccgagtgcgacaaacacgtggactccaacttcatatctgagggcgacaaacacgtggactccaacttcatatctgcccatgacaagctgtgtgaccttgggcaagtttcttaacctctctgggcctccactaaaaggcagtcacgcttgtgaattttgacccgagagcaggctgggatatgatcgtgtgtgtgcaacgctggtgtgctgccacgctcatcgctttttctccccttcccccttgtgggttcctcatactaaatctgtttttagtgtctcacaaagtaggattgcactttttaatttttaaaaaatttttttttagagacaggttctccccatgttggccaggctggtcttgaactcctgggctcaagccatcctcccacctcagcctcccaaagtgctgagattacaggcgtgagctgctgcgcccggcctggttgcgctttttatctacctgttatccacacgggaatctgtgagtcagttagacagctaatagtttctacccatttgccagaggaggtaaccgagtcacagagaggagaaaagacttaacatcacagaggatcagaaaccctgactctctccctctccacctgcccctcccactccctgctcttcactggcaggtggggtctgccctcacccctccctgcagcgccccacacagaggtgactccccgggccgttagagcagcctttcccaggaagcctccctgagttcctgggggcaaactggcctcccttctttgtcccttctttgtgcccacatcccctcaggttccttgtgcccccatcccctcaggttccttgtgcccccatcccctgaggttccttgtgcccccatcccctcaggttccttgtgcccccatcccctgaggttccttgtgcccacatcccctgaggttccttgtgcccccatcccctcaggttccttgtgcccccatcccctcaggttctttgtgcccccgtcccctcaggttctttgtgcccccatcccctgaggttccttgtatccccatccctttgaggttccttgtgcccccatcccctgaggttccttgtgcccccatcctgctcagggcaagctggttatggcacctgtcatgctgttttgtcacttaacaatttgcgtctcccactgtgagttctctgagggcgggaaccaggtctcctttaccctgggatgcatgggagctcagaaatgtggaatgaagtcgttaatttacacagcacctaccgtgcacctggagaaggtgagaacatggctggcgtgtggacgtactcacatgtgcaaagcctgtggcgtgttcagagcctctcagtctcacggtccgctctgagcctccggcatcccgccgaggtcacggaaaccatccctgttttacacacgaggacgccgaggctcggaggggctcaaggttccttcctggagtcacacagtagcaggtggtgcagcagaatccacgtcttccggcaccagagccggagctctaaccttttgggcacttctcgatgtctggccgggaacaccacacggtccctcaggctgcttgttaccgtggaagcttcctgaactctctccagacccacagacctcccttcttgggggctgccgctgaggagcttctggctagtgagctctgaagcactgtcccacccatgtctggaccaggcgccaccactccatgtccccagatgccgcccctccctctcctgcttcccgttggccgggaggtcctcgcctcagggagccgacccgtggcctcccagcctgggcgggtgtcagagccggctgagctgctccaaaatctctctttacccccagattatcctcactcccttcgccgccgccacccctgacccactcatatgtctgttctcactcagaggtgaggccctgtgtcttcagccgtggtaaactcaggacctctggacaggcaggcccagggtgtaggcaccatgacttttcctgctgtgcagacaggaacctggggagagaagggaggtgatctgtgcagagctggggtgtggacccagatggtctgactccggaaccctcgctctgaccctgtgagccgtccccagctccttccggaaccctccctctgaccctgtgaaccctcccccagcccgttccggaaccctccctctgaccctgtgagccctcccccagccccttctcgaaccctccctctgaccctgtgaaccctcccccagccccttccggaaccctccctctgaccctgtgaaccctcccccagccccttccggaaccctccctctgaccctgtgagccctcccccagccccttccggaaccctccctctgaccctgtgacccctcccccagccccttccggaaccctccctctgaccctgtgacccctcccccagccccttccggaaccctccctctgaccctgtgacccctcccccagccccttccggaaccctccctctgaccctgtgaaccctcccccagccccttccggaaccctccctctgaccctgtgagccctcccccagccccttccggaaccctcgctctgaccctgtgacccctcccccagccccttccggaaccctccctctgaccctgtgagccctcccccagccccttcctgaaccctccctctgaccctgtgacccctcccccagccccttccggaaccctccctctgaccctgtgaaccctcccccagccccttccggaaccctccctctgaccctgtgaaccctcccccagccccttccggaaccctccctctgaccctgtgagccgtcccccagccccttccggaaccctccctctgaccctgtgaaccctcccccagccccttccggaaccctccctctgaccctgtgacccctcccccagccccttccggaaccctccctctgaccctgtgacccctcccccagccccttccggaaccctccctctgaccctgtgacccctcccccagccccttccggcaccctccctctgaccctgtgaaccctcccccagccccttccggaaccctccctctgaccctgtgagccctcccccagccccttccggaaccctccctctgaccctgtgaaccctcccccagccccttccggaaccctccctctgaccctgtgagccctcccccagccccttccggaaccctccctctgaccctgtgagccctccccagcccctcgaggaggggctcacaccgagatcaatccatgatgacagcacttcatggcccgtctcaaacacacaggcccactccctggtctggcccaggctggggtgctcagggcctctgtgttgttcacctgcaaatccccagccccgttctgtgtgttctgaggcccacctgggtcttctttctgttgctccagctggaggcttcttggggtagctgcactgtcctttctgcaggaaagctggtttttttggtttttttttttttgagaaagagtcacttggtcgcccaggctggagtgcagtggtgccatctcagctcactgcaacttccacaccccaggttcaagcgattgtcctgcctcagcctcccgagtagctgggactacaggcatgtgccaccacgccgggctcacttttgtatttttagtagagatggggtttcaccatgttggtcaggctggtctcaaactcctgacctcaggtgatctgcccaccttggcctcccaaagtgctgggatttacaggcgtgagccaccttgcccggccaggaaagctgttctgatggagaatggcccagctgggcagctgcaggggctaagtggagtaagccacctgcactgtatgcccgcactgtgacctctgacgttgtttcacgctgcagagggttggccatagtgtcccaaaggcacctcccacaccacctctggtaccctgggaacaacctcggcatctccctggaggtgggaggactgctggggtccgagcccagggcgggtgtgggtttgcagagggcctggggtccgtgccggtgctgtggcctcagcagttgggtcccaaggtagattttcagcctgaaggccagggtggaagatggaaatgccggggaaagcccccggccctgccctcccgccccagccctccactgccttgttacctggagcgcttggtggtggtgggagcctcgttcaccgtgtgccagctgggttcccagccctgttcttggtactgcgggtacaccggcaggcaggaaaacccaggcttctctccacatggtgtttacgtcgtggggggagagagactagggacgcacgagtagagaagatccctttggtttatgttaagtgcagcggaggaaaccacagcaccctgggcttggggatgtgggcgttgttggtcgtcaccgcggcaggggatgctccgagcattcaggacccagaggcagggctgctaaacgcctcccaccccaaatgccgctgttgaggcctgggcacccatgttacggggagaggtggctccagggcggtcagtgaagagtttgtggtgtcgtctccatggtgaggaagatgtggagacggaacagtcaagggccctttagagggaggaggaggccagagtgtggggagggccgaggtgggaagggcagagtgtggggagggccgaggtgggaagggcagagtgtggggagggctgaggtaggaagggcagagtgtggggtgagccgaggtggggagggctgagcccctaagaagggggcaggggagaagccagatggtcccgggcttcagggaggagagagccaagatgccatccgtggggacgttggaaaggacagatgcgatgtccccctccatcctgagtgccgccccagctgccccaccctggccccactcactcagtatctccgtctgtccttcccccacagacctgtactgtaccctggaggtggattccttcggctattttgtcagcaaagccaaaaccagggtgttccgggacacagcgg

SEQ ID NO: 10464 - DNA, 566 bp, Homo sapiens
gaagacctctgcagggaagcaccagcagtatgactgtaagtggtacatccccctggccgacctggtgtttccatcccccgaggagtctgaggccagcccccaggtgcaccccttcccagaccatgagctggaggacatgaagatgaagatctctgccctcaagagtgaaatccagaaggagaaagccaacaaaggccagagccgggccatcgagcgcctgaagaagaagatgtttgagaatgagttcctgctgctgctcaactcccccacaatcccgttcaggatccacaatcggaatggaaagagttacctgttcctactgtcctcggactacgagaggtcagagtggagagaagcaattcagaaactacagaagaaggatctccaggcctttgtcctgagctcagtggagctccaggtgctcacaggatcctgtttcaagcttaggactgtacacaacattcctgtcaccagcaataaagacgacctgtactgtaccctggaggtggattccttcggctattttgtcagcaaagccaaaaccagggtgttccgggacacagcgg

SEQ ID NO: 10465 - DNA, 29485 bp, Homo sapiens
ttcttggcactagtggcatcgtcaccaggacaccggccttgggagggcgagcactacatccatgggtaggcgccggagccctgaggacacggcattgccaagctcttgtcctgtggcttccttccctgtgtccgcagtgtgtggggggtgggcgggcaggcaggacgaggtgacccccatcctttctgtgtgctcgttccatgaaattgggggatgtggatgcttgaacgggctctcagctagtgtgccttccgtgcagaggaggtaacactccccagggcagccagacacccttgtggagtgggatggaaagctgggaggaaggggctggccggcaccatggagatattttggtttgcaggaggattctgggctttatgagcactttaatgcaaccagggcaggcagcaccacgggacgggaactgtaagctgcacctgttgaattctgaaggtccgggctgcccgtgggccccgggaagtgggggtgcccagcttgtggggtgcaggcggggaggggaccgtgtggtggtggagacgccatggtacagcctgtctcccgatcccccaggtcccctgaggccttagagatgaatctcccagaagtggcagccgcggcagggacaccaggatcatgaaggacctgggaggtgaacccgctgctcagttcctggccctcgtcccttagacccagtcctcggagcagaactgggggaagctgagatttctgtgggctgcgtgcccacctcctccctcttcgttggtcctcccacgcgcccgcccccgagtgggagcagagccatgtgagctgagttggagctgctcgctgccgagaattgcatcagccccgcctggcaggctggagcgggagcctgttgctatggtgaccaccaggcttcaaaccagtgagaaggatgagatggttgccgggcgaggttttctcaccatgtgatgcgtgtgacaggctgacaggttcggtagacctggacccagccctcccgtaggtgtgcctggacccccagccctcccgcaggtgtgcctggacccccagccctcccgcaggtgtgcctggacccccagccctcccgtaggtgtgcctggacccccagccctcccgcaggtgtgcctggacccccagccctcccgcaggtgtgcctgggtccccagccctcccgtaggtgtgcctggacccccagccctcccgcaggtgtgcctgggtccccagccctcccgcaggtgtgcctggacccccagccctcccgcaggtgtgcctgggtccccagccctccccgcaggtgtgcctggacccccagccctcccgtaggtgtgcctggacccccagccctcccgcaggtgtgcctggacccccagccctcccgcaggtgtgcctggacccccagccctcccgcaggtgtgcctggatccccagccctcccgcaggtgtgccatctgctggggggcatgatgggcactgtcccaaaagccatctgggcattggccaggctggggggtatgactgagggacacagggggccacgccaggcccatgtagtgtcagggggccttccttggtccttctgcctagttgtgggggaaggggtatggtggggatttgaccaagtgcacctgatgatggggcaagaaaggggtccagactggtccccatctcccagaacagagggcggctctggatcacagctgattaaacctgcccaggctgtgtcaaaaattttttttttaacggagtttcactcttgttgctcaggctggagtgcaatggtgcaatctcggctcattggttcaggcgattctcctgcctcagcccaagtagctgggactacaggcgtgcaccaccatgcctggctaattttgtattgtcagtagagacaggtttcactgtgttggccaggctggtctcaaactcctgacctcatgtgatccacccaccttggcctcccaaagtgctgggattacaggcatgacccaccgcgcccggcctgtgtcagaattttttttgttaaccacgtgacaaagctcatcatcttgctaaagataacagagcgcttggccaagccagtgcaatgcctgggttcagatctcctctctcatcttttgcctacaacgggaaaggaggtaaaaagtctgtgttccaggtgtgctgagcacttgttgtgtgccgggagttgtagtagacactgtcctgtctttttttttttttgagacagagtttcactcttgttctccaggctggagtgcagtggcgcgatctcggctcactgtaacttccacctcctggactcaagtgattcttctgcttcagcctcccgagtagctgagattacaggcacgcaccaccacgcccggctaattttttgtatttttagtagagatggggtttccccatgttgaccaggctggtctcaaactcctgacctcaggtgatccacccacctcagcctcccaaagtgctgggattacaggcatcagccaccagcccagcctgtcctgtctttttttttttttttttgagacagagtctcgctctgtagcccaggctggagcgcagtggcgcgatctcggctcactgcaagctctaggttcacgccattctcctgcctcagcctcccgagtagatgggactacaggcacctgccaccacacctagctaacttttttgtatttttagtagagacggggtttccccgtgttaaccaggatggtctcgatttcctgacctcgtgatccacctgctttggcctcccaaagtgctgggactacaggtgctcaccaccacgcctggctaacttttttgtatttttagtagaggcggggtttccccgtgttagccaggatggtctcgatctcctgacctcgtgatccacctgcttcggcctctcaaagtgctgggactacaggcgctcatcaccacgcccggctaacttttttgtatttttagtagagacggagtttcctcgtgttagccgggatggatgtcctgtctttctattgtatcctctccctcacttggggaggaggcagtgatgttcctgttttgcagaagagccggatcgggcagccagagagttgaagtgacctgcccaaaaagggttcaacctaaatccttgggcttcctgtccagggctctgtaggatgtcagccatccccagaatcaggcattctcaggatgtcctgtgaagaaacacacttctccatcccctgctggaaaaaccatgacaatctctccgcagggaagaacgcggctttgaggtggggagtggctgaccgaggccctttgtggtttctaaatggcagaatgagagaggtgggggcgttgagggtgtcacgcccaggaagcagttggggagggcagggctggacactgaccaagcctagcctgggtgcaggaactgagcttgggatttttgcttggggccctctagggattaggatgaattgtcagatgagttctcagcagacagggctttagggaactggtccagggaaataagacgtagagccagaggggaaccagggcctctgtgagagcctggcagtcatgagatctgacttgctgagcttctgaggtgtggtaataggaactaatcctctcttcggtgtgctttagatgtttactcgtttcatcctcacagaaaccctgtgaacttgggtgctactgttactccatgttgaaggtaaaacagaggcacagagaggttatgtgacttgcccaaggtcacacagctggtaaggggtggagcctgtgattcagacccagtcagtctggctgcagagcatgagctctgaatcaaatgttctcctgcctccattcttaccttttagaaagatgacagcaagttgcatacgtgacctcctcacccccaggagtgtgtgtgtgcacatgtgtatatatatgcacacatacgcgcaccagtagctcagcaagggagggaggctcaggaatgggctcgtgggcctctgtgtgttgatggctgggtttgcagaacctagggagtccggcgtctgtgtgcgtgatgctcctcccttcgtccctccctgctcgcgtggttcccagtgggtggggtgccctgttgcctctggtttagagccgtgcaggatgttaccacagaccgtgtaccaggagtgttcacccaaacttgtgaagggccctggactcccaggaaggagctcagatctaggactgggagtggacggcggccgccggaggagtgagagggggcagtgcgcttgccatgcccggggcccgtcctcctgggcctctctcggcgcttgggcaacctgtgtattgcccacacgtgtgccgctgcttgcagctcctggccaccaccctcctctttgtgtctggacgaatctgactgctctgagcacctcttcagagtggaatcatacaggacagtgtctaccgcaactcccagcacacagcaagtgctcagcacacccggaacacagacttcttacctcctttcccattgtgggcaaaagatgagagaggagatctgagtgcagacatcgcgctggcttggccaagtgctctgttatctttagcaagatgaagagctttgtcaggtgggtaacaaaaaaaattctgacacaggccgggcgcggtggctcacgtctgtaatctcagcgctttgagaagtgtgtcagcccttgagaagacaccgggcaagctggccttcctctcggtgtctctcccaggccgggactatggggagaaatcataacaacagggacaacagcagtgacaacgtcagtgacgacaataacagccactaacgttataccacgtgccaggccctgttcttagaacttcgcctggactaactcattcaactgtcacaaaagctgcatgggatgatgttgttatgttattatcttcatttgacaaatgaggacactaaagcacagagagatgaagcaacttgccccaggacacacagctaaaactgggagtggaattcggagagcctggctcctggcatttggagctgacaggtgcccggcaacccctacctatggccgagctgagctcgtcttgtgccagggagttggcggcaaaacagaaatgagctctgggccgggcacagtgcctcacgcctgtaaccccagcactttgagaggctaaggtgggtagatcacctgaggtcaggagttcgagaccagctggccaacatggtgaaaccccatctctactaaaaatacaaaaattagctgggtgtggtggtgcatgcctgtaatcccacctactcgggaggctgagacaggagaatctcttgaacccgggaggtggaagttgctgagatcacaccaccgcactccagcctgggtgacagagtgagattctgtctcaaaaaaaaaaaaaaaaactaaaaccagaaatgaattctggaggtgggatcttcctttgtaattcagaaggtgactcccaacccctcttcagaagctgggtgggctccaggcctggttcagccccctggcctcctgtcgatacccatgggggggtctctgtccctggtattactcctttcctgtctactttttttttaaatttagattttattctatttttttaaattatggcaaaataggccgggcgctaggtagctcacgcctgtaatcccagcactttgggaggccgaggtgggtggaccacgaggtcaggagatcgagaccatcccggctaacacggtgaaaccccgtctctactaaaaatacaaaaaaatttagccaggcatggtggcaggcacctgtcgtcccagctacttgggaggctgaggcaggagaatggcgtgaacccaggaggcggagcttgcagtgagccgagatggcgccactgcactccagcctgggtgacagagtgagactctgtctcaaaaaaaacaaaaacaaaaacaaaaaacaaaagaaaatcatggcaaaatacacatgcctaaaattttccatccagtgtacgcatcagtggcccgaggcacgttcacactctggtgcggccatcagcaccgtcatctccggaactctcacctggctaaactgagactccgcatctgtgaaaccagcgcaccagggaccggcttcgtggaagacactttttccacggaccggggaagggtggggagcgctttcgggatggaactgcgatccctcgcacgcgcagatcacgacagggctcacgctcctacgagaacctaatgccgctgctgctcggatgggaagtggggttcagggggtgacgcttgctcacccaccactcacctccggctgtgcatcctggttcccaacaggccacggactggtgccggtccatgcccgggggggctggggacccctgtattgaacaacagctccccgtttctccagcccccagctcctggccaccaccctcctactttctgacttgatgaatctaactgctctaagcacctcatccgagtggaatcatgtggtatttgcctttctgtgaccagcttctttcacgtagcctaatgcccccaaggttcatcgatgtcagaattggcctgtgtcggaatataagccgaataatatccgttttatgtaaaggccgcgttttgtgtatccattcatccacccatagacacttgaggtgtttctgttttttggcaagtgtcaataatgctcttaggaatgcgggtatttccccgacaacctttgggcttacttcactcatcagcagcaagcaggccatccttgaagcttaccgtggggtgggcccattgaccagcctggggagagtgggtgggtcattgaccagcctggggccatcatgctggctgggaaggcgtggccctcaggtgccagcttctacccaacactaagccgttggtgctcctggcacttacttacttgctggaagacattccaccttgctttcccgtctttccccagaagagggtgctgggtttctgcttctctcctgaatgggaaaagggcggctgcagcttgccatgaggctggcgtgggtggggttaggagaaaggactgtcaggtgctgtgttgggaagtgtgtgtggagcttccgtgaggctggggttggccttctgagcatacatggaagggctgagtgggagcagggtgttagggtagccggtcatgccgtagaaccaaattaatgctgaaggccgggcgtggtagctcacactaatcccggcactttgggaggctgaggcgggtgggtcacctgaggtcaggagtttgagaccagcctggccaacattgggaaatcccatctctactaaaaatataaaaattagctgagtgtggtagtgggtgactgtaatcccagctactcaggaggctgaggcaggagactcacttgaactcaggaggcagaggttgcagtgagccaagattgtgccactgcactccaggctgggcgacagagtgagactctgtgtcaaaaaaaaaaaaaacaaccaaaaccccccacaaattactgctgaaatcctcatcacttaacacaagcaagctgctgcttgctcacagtggtcctggtagacggggggctctgctccccgtggtcatgccgggacccagcctgatggagactgcaccatttggaatatgtggcctccaagggtcacagagggaggagaaagggagaaagagctgtgtgtaatttttcactgttcagccgtgaaatgatacttgtcatgtccacttacagtttgttagccaggactgagcacctggccctgcccagggactgccaagtggccagacagtacggccttccatgtgcccagaaagacaggaggatggggatattgctgggcactggtcgtgttgaccacatagtggcaggtggcttatgtgaaggatgaaggcccttgagcctgctctgtggccagggcagtggtgtcatggtggcagtggtggcagtggcggcagtggtgtcatgtagcaatggtggcagtggtggcagtggtggcctggtggcagtggtgtcgtgtggcagtggtggcctggtggcagtggtggcatggtggcagtggtggcctggtggcagtggtgtcatgtggcagtggtggcagtggtgtcgtgtggcaatggtggcagtagtggcagtggtggcatggtggcagtggtgtcgtgtggcagtggtggcctggtggcagtggtggcatgtggcagtggtggcatgtggcagtggtggcagtggtgtcatgtggcagtggtggcatggtggcaggtgtctgggcactgaagggacttgggtgtaactgacttctaggggaagtggcagaatcatggtcatcttcatgtgccccgcactgtgctgagctgtttacagacgtcatctcatggaatccccacaacaatcctatcattccgtttcacctttggggaagccagagctcaggaccacagcctccaagtgatggctgtgcttgctggtaggagggtgcttatggcagcagagaggccgggggctgaatggagtgtgggggccagaggtggtggggccacaaggatgtgatgtgtgtgtgtgtgtgtgtgtgtgtgtgtgtgtgtgtctccatgtgcctgcgtggatagaaacaagcagagacaagctggctgggcttttgcccttccccagctccgcgcacacctagctttgcaccactctggaggaatggtgacgtcgaatgtccaaggaagaggctaacctgggcacgtcctcttacctgccctccttgaatgacacaagacattggaagtggaagtcacagtcaccggtgctctggagctgggagtggggagaaggaggtgacttttgaggcactctgtgacagcccagttcaacagtagaattatgtttaaggcccaggaaggctctgggtggagagccagcattttgagccgaaggccagtgaacgtggccacccagcagcactgggcagaggtgcggctgcttctgcaggtgtatgtgtgaaggggtgcaagtggacgccttgggcgacttctgcggacaggggcaggagcccggagctgcgtggctctgggattgaagggcaccctggggtggaaggcaggggtcgtgcatcctggtcctggctgctgccaccctgcagggctgctttgagagtcttgctggcctctctggacctggcattacttgtctgttctctgaattgcctcttcctacttctcagcactagattgtcatttaatttttcataaataccctaaggacttacaaagccatagatgggaggggggctccgaggaggccatcccaggcaggtggtgagcaccgttggattgaaaggtcctcccaggtcatcgcctcctggccacccgccttctgcagctctggggctgagtggcatttcccacagggaaagacaggaggaagagcagagccttaaatcaaatcagcccaggattattacttgttatcaattcttgaggaggttcggaggggaagcaggaagtaggctgaagctgttaactctaataagggttagaactcctatgggatttgtcagaaggacttcctggcccccagaccctaaataattgaattggttgttatgggaagagatgaggaggattattaggagatcgtatcactcagccagcagttactgagcattggctctgcgtgagtcctgtcctgggcgccacaaataacaggcagtgagcagaagagggccaccacctcgcggggaagacagaatataccgataacccaaacgaactcagacttgctttctttgtagaggatttattttctttctttttttcctttatttttatttatttattttttttgagacagagtctcactctgtcacccaggctggagtgccgtggcaccatctggcctactgcaacctccacctcctgggttcaagtgattctcctgccacagcctcccgagtagctggaattacaggggcccgccacacacccagctaatttttgtatttttagcagagatagggtttcaccatgttggtctcaaactcctgacctcaggtgatctgcccgccccggcctcccaaagtgctgggattacaggcagaagccactgcacccagccctaatttttgtatttttagtagagacggggcttcaccatgttgaccaggctggtctcgaactcctgacctcaggtgatccacccacctcagcctcccaaagtgctgggattgcaggcgtgagccactgagcctggcccctgcccctttttttttttttgcctgattgactgaacgcgttattgtttgtgaaatgctctttttatctggtatctcttgtcactccacaggggcagccctgtgaactgcgcagggcagctgtgtcttgcccattttacagataaggaagtggcggcacctagagattaggtctggacgcgggacccagatctgcctcctggccccatgcccacctcgttgaatcccgttgcctttccatgggcgactcgtaacggagctgggggtgctggagtctgtgcccgcccctgcatctggtgtgtgatagcttaggagatgtttgttgagtggctgttgcttgcgtacacatgccgtcagctttcgtcgtatcatggcaaggttatacggcccgtctgcaatatgattcctctatgttcggtgggcacataactgtctttcctacagagagatgaggaattttagttccctctgccaaggtggggggattttgtcaaatcgcaggaaacaatggccttggtgcaaagagtagctttaatctgtggctcagctgtttctcagccaggtggccttggatgagactcagaagcctcagttttcccccgtgtcaaagggggccattcatagctactttgacaacctccctgggctgtggggatgaaatgagatcctggccgtgggctcaccgtgtaaaacactgcgcagataatactcagcatgtcccatccatccccaagagctggagactggtgaagccacatgcgcttctctgcccagggctgctggccaccctgacaccctgggcctcagcctctgcccttgatgtccaagaactatgattcctttgtctcaggctgtggagccctgagcttctccaggcggccacttctccaggcggctacggtctctgcctccctcttccaaggatcttggaggtggatgattggatttcatctccatggcaaccagagaggccataacacccgcccatggtggggcctcgagtctgttcccagcagtggaggcagagccggagcaaacaactcctgcaacagcagctgtcccccaggaatgagctgtcccccaggagcgagctgtcccccaggagcgagctgccccccaggagcgagctgccccccaggaatgagctgccccccaggagcgagctgtcccccaggaatgagctgtcccccaggagcgagctgccccccaggagcgagctgtcccccaggaatgagctgtcccccaggagcgagctgccccccaggagtgagctgtcccccaggaatgagctgtcccccaggagcgagctgccccccaggagcgagctgtcccccaggagcgagctgtcccccaggaatgagctgtcccccaggagcgagctgccccccaggagcgagctgtcccccaggaatgagctgtcccccaggagcgagctgccccccaggagcgagctgtcccccaggaatgagctgtcccccaggagcgagctgccccccaggagcgagctgtcccccaggaatgagctgtcccccaggagcgagctgccccccaggagcgagctgccccccaggaatgagctgtcccccaggagcgagctgtccccaggaatgagctgtcccccaggagcgagctgtcccccaggagtgagcttcctcccaggagtgagctgccccacagcctctgcccggcctccagttgccgctttgctgggctaatgaggggctccaggcctcggggtgagggtggcgctgtctgtgctcccagtggctgctacaggccaggccgagggtcctgagtgaatgagacaggggccgacccccacccacccctgcctgtctgtggttcacaatcagagcaaagccctttccgtccgtcttgtcttctcttccccagcgaatcccacagtccccaagactgaggacaagccctgcctcttccgggcagccttccctgtgctggctgaattgatcacgcgcctggctgatggcttcataggctgcttcagagtattttttttttttttttgagatggagtttcgctcttatcgcccaggctggagtgcaatggtgtgatctcagctcactgcaacatccgcctcccgggttcaagcgattctcctgcctcagccccccgagtagctgggattacagacatctgtcaccatacccggctaatttttatatttttagtagagacggggtttctctatgttggccaggctggtctcgaactctcgacttcaggtgatccgcctgcctcggcctcccaaagtgctgggatgacaggcgtgagccactgtgcccagcaagagtcttagttccatttggttgtaaagacgctcacttcagtgtccctgtctgaacctggcggctcttggccttcctatacattagagtcacctggggagcttttaacaggcctgatgcccaggccattccataccaattcagtagcaatccctggggtaggagccagagagcttcccaactccccagggattccagtgtgcagtgaagattggaacagttatcttaggattcaagtcatgaactggccgggcgcagtggctcacacctgtaatcccagcactttgggaggccgaggcaggtggatcacctgaggtcaggagtttgagaccatcctggctaacatggtgaaaccctacctctactaaaaatacaaaattatccgggcgtggtggcgggcacctgtaatcccagctactcaggagactgaggcaggagaattgcttgaaccggggaggtggaggttgcagtgagccaagattgtgccattgtactctagcgtgggagacagagcaagactctgtctccaaaaaaaaaaagaatttaagtcgtaactagtccaccagcctgtgctgaatggaggctgactgatgaacagcagagttagctgacaaagcttgctgtagtcttaactcactgcaaattgccaaagccctggtttgttttttaagggctgggaggtccctaagggttcttggtactcaggaaggagagcaggggaataatgataatagctgccgttttgttagcgccagctttgggtgccttgcatagcatatatttcctcattgtaacctcgcaaaagcttcatgaggtatagatcttgtttttatcctcattttagagatgagaaaactgaggctctgaatggctaagtagcttgcccaaggtcacatggctaaggtcacattcccgaagtgctaatctcaggaatggaacccgagtgtgattccaaagcctctgcccttgaccactgagctgtcctggctccccaacctctgctccatcaatcaaagaatggggggccctgagaaggaggtggcttgtcccgtgggaaagatgctggtttccaggattcctccccttggagccaggccctgactgaggggctcccgatggtattaaatatctcctggatcagctggggtcacctggaccctgaaggtgtctactttcccgttgcctacgacacccactcggcttcagctgagctttcccaaggacccttctgccctgatactgtgcccagttctttaacctacatcatgttatttaatgtcattttcacaaccaccctgtgacatggtatcgttatcctcatcttgtttctttgagacagtctcactctgtcacccaggctggagtgctgtggtgcgatctcagctcactgcaacctctgcctcccagtgcaatagaagactggccgggcgcggtggctcacacttgtcatctcagcactttgggaagccgaggtgggcggatcacttgaggtcaggagttcgagaccagcctggccaacatggtgaaaccccatctctactaaaaatacaaaaattagccgggcatggtggcgggtgcctgtgatcccagctacttgggaggctgagacaggagaattgcttgaacctgggaggcggaggttgcagtgagctgagatcccaccactgcactccagcctgggtgacagattgagacttcgtctccaaaaataaataaatcaataaaataaagtgcagtagaagacagtgtccttattgttgtaggtgaggtggtagattttgtatctgagccaccatccctgctgaaattgccccggacaggctgatctggtacaggtggcacctgggaagtggcagcctcgcttccgctggccagttccctggttcagggttgccggcctcccagatccacacctgtggtccagactctgctgtctggctgcccgttggatcttctgacagggatggccatgagtcttctcagtccagacatgtctccacctggacttagggtctgttcccccggaaccagctcccccttcctgtccatcgctcagccctccaagcccagaggaccctgctgtggccgcattttcagtcaactctcccatcgccagactttgcccttggttcccaccatggtcacctttgacaaagcacggaggggcggtttgccccgttccacatcatctcatgcaccacagtcagcttcgttttcctgaagtcacctctgaaatcaccttgccattttggcatccgtggctcccagcgtgcgtgaaatctgactattcaggatagtgttccaggccctctgcagtctgacccctccagagctcggcttcagtggtaccagtctgttcatcagggccaacctcctgcgtcctgcccccattctgcacgctgataccctgccgcaaatggaccttttccttcctcacgctctgtgactggttgtttcttccatatgaacccctcagggcagcccacacacttcgtgtttggtatttgtatgagtcctacatatgataacattttaagagcaaaggttgtggagttggatgacctgtgtccatctggtttcccacctgactgccgtgaaatcttgggcgagtaacttaactccctgcgctttcatttcctccattgtaaatgagtcataatggtacggaggcagaaatttaaaaacaaatatgtatgtatttactccaagaaaagtaacaggcaaggcaagggttaaaaagaaaaaaaaaacaggccgggcacggtggctcacgcctgtaatcccagcattttgggaggccgaggcgggtggatcacgaggtcaggagatggagaccatcttggctaacacggtgaaaccctgtctctactaaaaatacaaaaaaattagccgggcatgatggcaggcacctgtagtcccagctactcgggaggctgaggcaggagaatggcttgaacccgggaggcggagcttgcagtgagccgagatggcgccactgcactccagcctgggcgacagagcgagactccatctcaaaaaacaaaaaacaaaggaacaaaaaaaacctctttttttttctgcctagcaagctcactttaaggagttataagataacgctgtttaagaagccaaggctaaagaaatgggctccacacacccgccttttagagcaaggttgaaggaaaaaagaaagagaaattcctttactgttactcctttccctggcttcctaagcataactgtgtttacaaatgtctggatttagccagtccttgtttttcttttgacacagctacaagccacaagttatgcactatatgattaactgcttttgttttacttttgtgaagtctgcttataaaaaccccattctgtctttattcaatgctaagctttttaaatgcaaatccactgagctagtgcatacctaaaataaacagtccttcccttctccatatcggtctctccggtcctcagtttcctgcaacagtacaacttagattttaaatttttaagaagtttttcaggcagagtgtggtggctcatgcctataatcccagcactttgggaggccaaagtggaggactctttgaggccaggagttcaagaccagcccggcccacatagcaagaccctgtgtctacaaaaactttttcgaatcagccaggcatggttgtgcatgcctgtggtctcagctacttgggaggctgaggcagggggatcatctgagcccaggagtttgaggctgcaatgagctatgtttgtgccactgcactccagcctgggcaacagagcgagactctgtctctaaaaaaaacaaaaaacaaaaatcaaaaaacaaaaaaaagcttttcaagtgcaccagtcttaagcatagagcttggtgaatatttccatatgtctgcttgtgtaactaacacccagatcaagatatggaacatcttcagtgtcctggaaagttgcttcctgccccttcccagccaacactccctgtccccgtcgtccacccccagaaagccactgccatggacttctatcaccatccatttgtttcgcctgttcttgagctttgtatttaggctggtgcaaaagtagttgagagctggacgtggtgggtcacacctgtaatcccagcactttgggaggctgaggcgggtggatcacctgaggtcaggagcttgagaccaacctggccaacatgctgaaaccccatctctactaaaaaaaaaaaaaaattagccgggtgttggtggtgggcacctgtaatcccagctactcaggaggctgaggcaggagaattgcttgaacccaggaggcggaggttgcagtgagccgaaattgtgccactgctctccagcctgggtgacagagtgagaccccgtctcaaaaaaaaaaaaaaagtaattgtggtttttaccattatatattacctttgctccaacctaaagtaaatagcctcctgcggtgcaggcatacctcgctttacggcactcctgtgatgcgggcgtaccttgctttacggcactcatgtgcaggcgtacctcgctttacggcacctccatgcttagttgagcttcaaagatgctgcgttttttttcaccagttggaagtgtgtggccacctcgcattctctctgtgttacgtgttggtggttctcacgatctttcagacttttttattgttatgacacctgttacagtgatctgtgatcagcgatcctccatgttagcattgtcattgttttgggcaccacagaccggacccggcaaccttcatctatgaacgttgtgtgttctggctgttccgcccaccagcctttcccagcctctctcctctccccgctccagcctccctattccctgagacacaaaaatatccaagttagtccagtgagtaaccctacagtggcctcgaggtgtgcgtctgtcactttaaatcaaaagctagaaatggttcagtttagcccgggctcggtggctcacgcctgtaatcccagcactttgggaggccgaggcgggcagatcacgaggtcaggagttcaagaccagcctggccaacatggtgaaaccccatcgctactaaaaatagagaaattagccgggcgtggtggcgggcgcctgtaattccagctactcaggagtctgaggtgggagactcacttgaacctgggaggcagaggttgcagtgagctgagattgtgccgctgcactccagcctgggtgatagagactgtctagaaaagaaagaaagagggagagagagaaggaagagagaaagagagagagagagagaaaaaagaaatgatttagtgtagtgaggaaggcttgttgaaagccaagataggctggaagcggagcctctcctaccagttagccaaattgtgaacacacaggaaaagtgttttaaggaaattcaaagtgcttctccagtgaacacaagaatgataagggaaacagccccactgctgatatggagaaagtttgagtggtcggataaagatcaaaccagccacaacgttcccctgagccggagcccaatccagagcaaggccctcgcactctgcaagtctgtgaaggctgagagaggtgaggaagctgcagaggaaagtttgaagctggcagagatttgttcatgaggggtcaggaaagaagccgctttcataacagaaaaaggcaaagtgaagcagcaagtacggatggagaagctgcggccagttgtgcagaagatgtagcaaagactgtaaaggaaggtcaccgcactaaacatcagatttttggccaggcgcggtggctcacgcctgtaatcccagcactgtgggaggccgaggtgggtggatcacttgaggtcaggagttcaagatcagcctggcctacatggtgaaaccctgtctttactaaaaatacaaaaatcagccaggcctggtggtgcacatctgtaatcccagctactcaggaggctgaggcaagagaatcacttgaacctgggaggtggagcttgcagtgagctgagatcgcgccattgcactccagcctgggcaacagagccagactctatttcaaacaacaacaacaaaaccaaacaaaacaaaaacaaaacagatcagattttcaatgtagacaaaacagccttctattggaagaagacatatgtaggactttcatcctagaaaagggatccgtgcctggcttcgaagtttcaaaggacagaaggacaggctgactctagtgttaggggccagtgcaggggtgactttaaaccagtgctcactgaccattctgaatatcccagggactttaggagtaatgctcaaacaatggtattcttcacagaaatagaaaaaaaaaaatgctaaaatttatatggaaccaaaacaaaaataacaaaactggaagaatcacattacctgactttatttgtttattttttttgagacagagccttgctctgtcacccaggctggagtgcagtggcccaatcttgcctcactgcaacctccgcctcccgggttcaagtgaatctcctgcctcagccccccgaatagctgggattacaggcacctgccaccaagcccagctgatttttgtatttttagtagagacaggctttcaccatgttgaccaggctggtctcaaactcctgacctccggtgatctgcctgctccagcctcccacagtgctgggattacaggtgtgagacaccgcacctggcctctctgaagacttttgatgcagctttggtggaataatggtcagggctgggctccctcagctgctcttccctctctcattcccatcctcaattcttgggcagaaaataagtttatcacttaacagtcagcctctgtatcacccttgcgacaggctggagggtgtcgctccagcctgggcaacaagagtgaaactctgtctcaaaaaaaaaaaaaaaagacaaaaagaaaaagaataaaaaataaagttagcaatattcagcaatgatgtggccggcaagagcctgcagaggatcatgggccaggtcacccatcctcactgagtcctgcacggctctcggctcagctcacgaggctctcaggagcaagtccctgcctcctctccagcacggccctctccccctctgctcactctgtgttctagccctcctggctatttatagtcccctccaggggccctgctgtttcccactgggtgccactgccaagcctcctctcaccgcctgaaactctgctcctgtcccccacccgcctggcaggcacccacacagctttcaagatccaattaataacagtaataatagcagctgagatggattgggtgcttcctatgtgctaagtgccgtatgcgtgtcatccagtttaacccccgcagcggcccgtgcacttgatcctgtgtcgtcccccgtttcacacggatttgctaaacccgtatccatttagtagcagccaccctgtgccaggcactcctcggaggcacagagaggttaggaagtgccagagcgtgggctggaacctccgctgccggaccgcagggtccctgctctcagccacagcgatgaactgtcttccttagcgtggcaccaaagcctccccagccacctcccctccccgagtgttgcccacaccctccggtccgccttgccgggcctttgaggcctctgtcgtagcatctcggagatttgattgctgattggactcgcttcctctctgggctgtgaggatatcatttggaaatgtgttcattgtaagcagcagaaaacccaatatatagggacttgtatttcccatgagcaggaaatgagacaggctcttcctagtgtggctcagctgaacagcatgagggaaatggctctgttcttttatttatttaatttaatttaattaattaatttttatttttttgagagggagtcttgctctgttgccccggctggagtgcagtgctacaatctcagctcactgcaacctctgcctcctgggttcaagtgatctcctgcctcagcctcctgcgtagctgggattacaggtgtgtgcaaccatacctggctaatttttgtatttttagtacagacggggtttcatcatgttgagcaggctggtctcaaacttctgacctcaggtgatccacctgcctcagcctcccaaagtgctgggattacaggcgtgagtcaccacccggctaatttttgtagtttctgtagagatggggtttcaccatcttgcccaggctggtctcgaactcctgacctcaggtgatctgcccgccttggcctcccaaattgctgggatgacaggcatgagccacgcgcccggcctctgttctttcttgacctgttcctggtggcagcagtaaagccaccgtaactccaatcatcacccatgagttcaaggcaaaatgtctctttgtaatcatcaaagtcagggccttgccagaggtcccagcatgcttcacttgggtctcagtggccagaatggtgtagggcagccgttcctggtaatgagagaggcagagaaagcgggtatcttgcctgggactggtctgttgccacttcctagaaaacgagggtagagtaagcaaggaagaagggaagacgggtgtcgggtgtctgccagtgccctagagcgcagagaccgtacattaattttttcaaaatttccagaatcggaaggctctaatgattttgtgttgtagccttccagtcttttttctatgcacgtatgtttttacttttttcagacattgtaacatactttaattattgttattaatctctttttgcacttgataagatgctattcatcatccatatagtttttaatgctatatagcagcccatcttgtagaaaaaccataattgactcaaccagtctcataattcaggttgtttttaatatttcacacttacagacagccctgtgacttacaactttatttttatgttcatttataactagtatcatagatcataatcttattacgctgggtataaactgtaccaaccactaaaccttttgataccagttaccagattgactctagaaaagttgggccaactttttttttttttttcgagacggagttttgctcttgctgccaaggctggagagcaatgttgtgatcttggctcaccgcaacctccacctcccaggttcaagcgattatcctgcctcagccttcccaagtagctgggattataggcatgtgctaccacgcctggctaattttgtattttagtagagatggggtttctccgtgtgggtcagcctggtctcgaactcctgacctcaggtgatccgtccacttcggcctcccaaagacctggggttacaggcgtgagccactgtgcccagccaaagttgtgccagttataggcagcctccaagagtttctgtgagtacctatgccctgacagctctggatattgttattattatcttaaaatccttgccaatttgacacgaacagtgaaaactatatagaactttacattttctttcattacaaatgaggttaacattctttttaatgcattttgaatatttgtagttctcttttaaattttctgttcatttcccttacacatttagaaagttgaggttttcatcttttctcattggcttgtaaaagtgctttattggccaggtgtggtggctcacgcctgtaatcccagcactttgggaggccgaggtgggtggatcacaaggtcaggagttggagaccatcccggctaacacggtgaaaccccgtctttactaaaaatacaacaattagccaggcatggtggtgcatgcctataatcccagctactcgggaggctgagacgggagaatcgcttgaacctggcaggtggaggttgcagtgagctgagatcgtgccaatgcattccagcctgggtgacagagcgagactccatctcaaaaaaaaaaaaaaaaaaagtgctttcggtattcaagtattatcataatatgtagaatacaggaaagttcctgggagagggcacagatgaggcagatttgagggcaaaacaggatttcaccaggtggacaaggggtaaggagaggtatatatatatgtgtatgtgtgtgtgtgcgtgtctttgtgtgtgtgtgtgttcatagagacagagtctccttatgttggccaggctggtctcaaactcctgggctcaagtgatcctcctgccttggaggatgccccacatcatagtgatgggatgacaggcgtgagccaccgcgcccagcaaggagggttttctaggcacgggagcagtgtgtgcaaagaggggggagctgtgtgcgtggcaggcactgcatttggtgtgcaaagaggggggagctgtgcgcgtggcaggcactgcatttggtgtgcaaagaggggggagctgtgcgcgtggcaggcactgcatttggtgtgcaaagaggggggagctgtgcgcgtggcaggcactgcatttggtgtgcaaagggggggagctgtgcgcgtggcaggcactgcatttggtgtgcaaagggggggagctgtgcgcgtggcaggcactgcatttggtgtgcaaagaggggggagctctgcgcgtggcaggcactgcatttggtgtgcaaaggggggagctgtgcgcgtggcaggcactgcatttggtgtgcaaagggggagctgtgtgcgtgtcaggcactgcatttggtgtgcaaaggggggagctgtgtgcgtgtcaggcactgcatttggtgtgcaaaggggggagctgtgtgcgtggcaggcactgcatttggtgtgcaaagagggggagctgtgcgcgtggcaggcactgcatttggtgtgcaaaggggggagctgtgcgcgtggcaggcactgcatttggtgtgcaaagaggggggagctgtgcgcgtggcaggcactgcatttggtgtgcaaaggggggagctgtgtgcgtgtcaggcactgcatttggtgtgcaaaggggggagctgtgtgcgtgtcaggcactgcatttggtgtgcaaaggggggagctgtgtgcgtggcaggcactgcatttggtgtgcaaaggggggagctgtgtgcgtggcaggcactgcatttggtgtgcaaagaggggggagctgtgtgcgtggcaggcactgcatttggtgtgcaaaggggggagctgtgcgcgtggcaggcactgcatttggtgtgcaaagaggggggagctgtgcgcgtggcaggcactgcatttggtgtgcaaaggggcgagctgtgtgcgtggcaggcactgcatttggtgtgcaaaggggagagctgtgtgcgtgtcaggcgctgcatttgtggcttaatgctgccattagagattgccatgaacttgatggcttagaacagcagaaatcgatgctctcgcagtctgaagaccagaagtctgaaatcaaagtcccagcccctccccaggctgccggggcagagttcccacttactcccctctttcagtgtctggtggctccaggcattccttggttggtggcagccccagtccaaaccttgcctctgtcttctcttctgtctgtgttttccccctttctctttccatagggacacagcattggatttaggacccaccggttaatcgacaatgatctcatcttgagacccttcatttattcacatctacaaagaatgttttccaaataaggtcacattcccaggtcccaggaattagaatctggacataccttgtgggggggccactactgaacccaccgcagggagctagaaggagtccgatgtcacagggcaggagaataggaccctggagaggtggagcaggtgcagaccacaaagggccttgagctgaggagcggggctgtgtccctaagtgaatggggggcaacacggtctgatttgtgacccggctgctgtggggagggtgctggaattgtccttgtaagagttggtgagggtggggaggagcggggatgcctcacagtgcaggagatgaggggcgggaatgtggaggcatctagaatggctcccaggttccctacgtgtgtggtctttgggaaaaggctgcgtttgaggctcctaaaggtggagatgcccaggagtctgcagacctgacttcttccgggagcaggaacacaattcgggagaggaaggtgatgcgaggttgatggaagctggcgagtaccagtccctgccaccaccaccattttatcatgaacaattgtaagcacacagaaaagttgaaagaattcacagtgaacacccattcacctgctgtctaacgttcccagtgatgatttttatgcgcttgctttatcacacagctgtccatctttccatccctctgaacatcatcattccatcttggtttttttgttgttggttggttggttgtttcgagacagagtctcactctgtcacccaggctggcgtgcaatggtgcaatctcagctcatcacaacccccacctcccgggttcaagcagttctcctgcctcagcctcccaagttgctgggattacaggcacccgccatcgcacccagctaatttttgtatttttagtagagagggggtttcaccatgttggccaggctgttcttgaactcctaacctcgtgatccacctgcctcggcctcccaaagtgctgggattacaggtgtgagccaccgcgttcagcccatcttattttttatgtatttcggagtaagttgcagagagttgtacacttcactccagcatgtcactcactggagcccaacatttgctgaagtgcatgaatctttttttgttcttgtttttgtttttgtttttttgagacggagtcttgatctgtcgcccagtctggagtgcagtgtcgcgatctcagctcactgcaagccccgcctcctgggtccacaccattcttctgcctcagcctcctaagtagctgggacaacaggcgccaaccaccacgcctggctaatttttttgtagccagtatggcttcaccatattggccagtatggtcttgatctcctgacctcagatgatccgcccgcctcggcctcccacagtgctgggattacaggcgtgagcccctgtgcctggccctgtcatctaggttttaagcccctcgtgcattaggtatttgtcctaatgctctccctccccttgccctccaccctccaacaggccccagtgtgtgacgttcccctccatgggaacagcaatttttaagggatgggtagagaaagaagatttcaccaaggagcctgagaaggacggtgacagtcagaggaaaagcaccgaagcggggacgtcagggaagatcacctgggtcagttaccttaggtttgactgcagataatagaaaaaccaagtaacagaggctcaaattgcatttggcactttttctttcttttatgtaaaaacgccccgaggtagaccttcctggggtgggctccactgtgccctcagtgacctggactcccagcttgtgaaaacgtcccgaggtagaccttcctggggtgggctccactgtgccctcagtgacctggactcccagcttgtgaaaacgtcccgaggtagaccttcctggggtgggctccactgtgccctcagtgacctggactcccagctttctgctcagctgtcttcagtggtggcttctatcctcagctcacctcatggttcaggatggctgctggggctccagccatcccatcaactctccaaaccagcaacagaaggaggaacaagggcagtgtggatagtgtacctttcggctaaatcagtctcttccagcagcttcctgcaagttccacacatatccctgtaacatcttgttgtctagaacgtaatcatatggctcacaccatcaggaaaggtgtctttgaactagctgctgggtgcactgccgctccgaatacagtaggatttctgttagtcggcggggaaatggatattggctgccagcagcctttgccttgtctgccttttcttcttttttgagatctggtgcccaagccgctgtctgctcagcatacccacctgtggccgtcggagactgaagcctgtgctcagtaggtccccatcttcctcccccagggttcctgccttctccgaggattggtttccccatcttttctgtaccccttttcctggttggagtctcctgggctctcatggttttgtgggggcagaaatgaaaggggaaggccctggaaatgttcgcaggccgagccctttcgccgcccctgggcctccgcccaccagcaccctgtcctcaggccccctgcgttcagctccatggtcagccccccttaaccaggagggatatggaaggggacttctttggagtgagattcagagggaaagggagggcatttgagacctgggttctgatcctgtgatcttcggcaattgtatgtaaattgggaaaaataagaactgcctccccgcggaacatccaggctggaaggagcaggggatggcagggcccgtggtcctctgctctgatcaggatgaactgtgcatgtggggagactggcagagaccttccctaccgtcccttcccccccgttgatcttggacgatctcccaagtgtgtggggtccattcctgcgacccctgggaattggtcagtgtacaggagagtctgcttggccggctggaatctaaactgtgggcaaagccgcggtccactattgcttattttccctggactccaggcaccaacagggcagcctggagcctcctggagaggaggagggaggagggaggggccggcgggaggctgccttccatcccctcctgtgcttctccagagtgagggggtgtcaccaaacggccaggcccttcacggacccagactcaggccagctgggtgccgctgtgcctcttcctcctccccctggaaggaccagagtcatttcacatcccttcagccacagacacaagtgtcatggtctccagggcactgggccttatgtcctaggtgcgtggcctacacacatctcagtgggagggcatcctgggtcctgcccaggtacgtggcgtacacgcgtctcagtgatggggcatccctgggtcctgcccgggtgtgtggtgtacactcatctcagtgatggggcatccctgggtcctgtggttcttcatacacaaccctgtctagggaaaaaactagtccatgtcccctggcagctgaatggggcattggctcagggacgaggagaggcagccgacagaagcaggtgcagcgagcctaggggaagcgctcggctgccaaaaggccagattgggcagagtgtggccacggccaggcgtcccggtgacctgttgacaccattctccagctgctggttgcctgtgggctggtgtgttgtgacagaggagggaagagctggggcccccgtggagaacttggctggctgggacttggctgaagcctcagacctgagacagacggtgcgatcctctgctcattcattcgctccacgcactttccccgagagcctgccacaggtggggttgtgggtgctggcgtacagtgatgactcagatgctcacctcctgccccaggggctcaaggacaaaggggcaggattcactaaggtgccagggggccaggtgccatggggagggtgacctggaggaaaggatgtctgggcagatggcagggcaggctcagccagcctcccccatcacactgtgcgagatccgaagatgcctggccagggagtcccgcccggaagatacccggggaggtttaacaagcggacgccgccactgggcagtccagtgcgtaggaggctcctgctggccccaaggctgccggcacggtgatcttcgtgtctccaggacgccctgcggtgccagctcccgctggcccgcacgagtgctgaagcttacccctgctctgcgatgagtgtgagaggggtgtccaccccccgctggcggccccagcccaaggaggtccaccacagccctcgggagcaacactgccacgttctccgttgccagtcgtggtgggtcagagctggggagcaaacaggccaaggggcaggggccggtttgtgggagggtccctcctatagccatgctggtggggctggacgcaggggcctttccgaggccgccctcgtaacccttttggaaaatgtgaagccctgagctgctgacctgcacaccccgctcgctgcactggctcagcctcccctcccaaggtgggtgggctccgtgcctgggctctggagcccaagtggtgctggcagccctggggggttaatgcggctcaacttcccggtcgcctttccttccctcctcctttgaaggaagcccacactggggtgatagaaataagcaccggctccgaggagtctgctgtgagcccctgtccctgccaggcctgggcacagcctcctcgcccacgccctgctgccttgggctccgtcctccgtgcggggccttgttctgagggctgagggctcccctcccacactccagaacctgccctggacccctggagggagtgggctcagtacaaatggtacccaaggaggagggccacaggaagtgacatcgaccggccccccccacctccttattccctataaaaagcaaaatggtgactcagagaggagagttggaagcgtcctgcctcttgctcccactgttaatttttacacttggaattaggcagaaggcaaagaaaacagcagcttgaaatacgcggctgacatgctcttcatcgggtagcaacagcagagccgctcctccccgcctcccagcagccccggagcgggcagggcccggtgcctgctggctctcccccgcccctcaccaggcccaggcccccgcacagcccccgcccgggccaggcgtggatggtgcggccggggccatggctgccgggggccgccgccggcgcccactacgctaccagtccctggcagctctggtggaggattctcagtggcctttcttgttccttgtctcagacttcagctacgggacggacgagtacgacggagaggggaatgag

SEQ ID NO: 10466 - DNA, 538 bp, Homo sapiens
ttcttggcactagtggcatcgtcaccaggacaccggccttgggagggcgagcactacatccatgggtcccctgaggccttagagatgaatctcccagaagtggcagccgcggcagggacaccaggatcatgaaggacctgggaggtgaacccgctgctcagttcctggccctcgtcccttagacccagtcctcggagcagaactgggggaagctgagatttctgtgggctgcgtgcccacctcctccctcttcgttggtcctcccacgcgcccgcccccgagtgggagcagagccatgtgagctgagttggagctgctcgctgccgagaattgcatcagccccgcctggcaggctggagcgggagcctgttgctatggtgaccaccaggcttcaaaccagtgagaaggatgagatggttgccgggcgaggttttctcaccatgtgatgcgtgtgacaggctgacaggttcggtagacctggacccagccctcccacttcagctacgggacggacgagtacgacggagaggggaatgag

SEQ ID NO: 10467 - DNA, 594 bp, Homo sapiens
ggtgttccgggacacagcggagcccaagtgggatgaggtgagtggcaggggctggcatctctgtggggaccccaccaccccgtgctcgtggcttgtctgctggggacggccagcccattggttggaccagctatgtctgcacccccctttctgctccctgctcctctggcttctgatcgcggtgtgtgtctgggtgtcagaccctgtggtgtcagctcaggcccccagactccaggggtgatgggaggcctctgggagctccagaaaatctgacgtgtccttcgtgggccgtgcttactccctcctccttgcaaagctgaggcacgcacctgccggaaagccaggcctcccagcttcggaggttcagggccctttgtcccatctttccccaggagtttgagatcgagctggagggctcccagtccctgaggatcctgtgctatgagaagtgctatgacaagaccaaggtcaacaaggacaacaatgagatcgtggacaagatcatgggcaaaggacagatccaggtgaggccagggcgccggggcgaggctgagggagcctccaggaggtggttccagttgaaaaggaattctg

SEQ ID NO: 10468 - DNA, 239 bp, Homo sapiens
ggtgttccgggacacagcggagcccaagtgggatgaggagtttgagatcgagctggagggctcccagtccctgaggatcctgtgctatgagaagtgctatgacaagaccaaggtcaacaaggacaacaatgagatcgtggacaagatcatgggcaaaggacagatccaggtgaggccagggcgccggggcgaggctgagggagcctccaggaggtggttccagttgaaaaggaattctg

SEQ ID NO: 10469 - DNA, 8701 bp, Homo sapiens
ggaaaggtcaggatgggtgggggtgggaccaagacagccccttccttagtccagagcagcccactctgtggctcctggccctgacctgtacgaaccggaaactcaggccccctcttcctgaggaggctgccatggctccagctgttgactcgctctcccctctcgtgtggaatgagtgccctctgctggccgtccctggcacagccgctcctgtcaccttggcttcccaggaaggagctcccccttcacccacccacccccagctgcctcctcctgcaaggtcagctgtgcctggataaggaggagctttgggccgggcacagtggctcatgcctgtcatcccagcactttgggaggctgaggcaggcgaatcacctgaggtcaagagtttgagaccagcctggccaacatggcaaaactctgtctctactaaaaacacaaaaattagccgggcgtggtggtgggcacctgtaatcccagctactcaggaggctgaggcaggagattggcgtgaacccgggaggtggaggttgcagtgagccgagattttgccattgcactagagcctgggcaacaagagcgagactctgtctcaaaaaaaaaaaaaaaaaaaagataaaaggagctttgttggggtccccaggatctgggagtacgctttgcctgactgtggtcacccactttatgcttatctcctctcttcagagttacctgttcctactgtcctcggactacgagaggtcagagtggagagaagcaattcagaaactacagaagaagggtaaattcctgcctcttccacgctccccaatgatgtccgtggcattgatgggccttttgtatttctaagcgtttcatgtccagtatcacgtctttggccctcgcagtcaccctcagaggtgccagggtgagcgtttaaggatgttacggattaattgagacccaaagaatctaactgattggctgaaagacatgatgatttagtcctgggactggacccagagcccagcctgggctttctctctctctctacctctctctctctctcacacacacacacacagagacacacacacacacacacacacacacatacacacatacacagaggctgggtacggtggcttacgcctgtaatcccagtcaggagtttgagatcagcctgggcaacgtggtgaaaccccgtctctactaaaaacacaaaaattagccaggtgtggtggtgggcacctgtaatcccagctactcaggaggctgaagcaggagaatcccttgaacctgagaggcggaggttgcagtgagctgagatcacagcactgcactccagcctgggcgacagagtgagactccgtttaaaaaaaaaacgaaaacaaaacgcatacaccacacacacacacacacacacacacacacacacacacacacacacacacacacacacaaacctcttcagttagattctcctactctgacccctctcgcagcatctacaccagtcctgctgtgtccacaaatccttccccctccctcgcaaggaccaagtctgccccagggattaagccgtcttcctgcagcagcccccagggaagagcagccggtcctggtggaccagtgcccacgctcccttctctctcggctctccctccagatctccaggcctttgtcctgagctcagtggagctccaggtgctcacaggatcctgtttcaagcttaggactgtacacaacattcctgtcaccagcaataaagacggtaagctcgggaaccagaggtggcccaaccggcaggtcccagccctcagagcgtggccggcttcccgtaaggactcagacagacatgtggctgtaaatggctgatccctgctcggctgtgctgagactgttgagtggccaggacacagcttgggtaggggtgactgtctactgagttcccagatgaccccagcttttccttgggcccctctgtctggcttgggagaactggcaccctggtgcactgagattgtgctgttaatatattcatgagagagcagacccggtagataaaatggtgtatgggaaatgaggctggaagtttccagggaccagctcttgaaaggccttgaatcccaagcaagggagtttggaattcatgctgtaagcccgggagtctgggggggttttgagcagtggggagctgtgatcagggctgggaactgaccggagtgggtgtattctagctgcctgtgtgctgggaaagggtccactttgtgaacggggtcctgaaggcaagctttcctcgacataaatcattagcagaatgatttatcatattggtcagttttcagtgccaggataggcaggatttggagggagagacagtacccatggggaatggtactaagtccctgggccaggatggtgggtgtgctggacccccccaggctgagtggaggagagaaggaccccctagccctaccccgggcagctcacatataaggccgccgtggccttcggaaactttttcatctggccaccaggtggtgatgttggaccaagactcagctgagtctcataccccgtctgcctcccgccggcctggggtggaggctgaggggatccgctgaccaccctctgccctgggggcttttctctcttgcagacgatgagtctccaggactctatggcttccttcatgtcatcgtccactctgccaagggatttaagcaatcagccagtaagtgccctggccaggacgaggttgggtgggccattgtggattctgcactgctctgcccaggatggggccctgccagcacgcctttagacatggggcattcccctggaggccagaaaccagctcctcttggcagggaggtcacccctggcctttgtctccaaagtcctctttctcaagccctccctgaagctgtctgaaacctaggggccgggcgcggtggctcacccctgtaatcccagcactttgggaggcccaggcgggcggatcacgaggtcaggagttcgagaccatccgggccaacatggtgaaaccccgtctctactaaaaatactaaaattagcgtgggcatggcggtggacgcctgtagtcccagctacttgggaggctgaggccagagaatcccttgaacccgggaggcggaggttgctgtgagctgagatcatggcattgcactccaccctgggcgacagagcgagaatccgtctcaaaaaaaaaaaaaagaaaccgagtgcgacaaacacgtggactccaacttcatatctgagggcgacaaacacgtggactccaacttcatatctgcccatgacaagctgtgtgaccttgggcaagtttcttaacctctctgggcctccactaaaaggcagtcacgcttgtgaattttgacccgagagcaggctgggatatgatcgtgtgtgtgcaacgctggtgtgctgccacgctcatcgctttttctccccttcccccttgtgggttcctcatactaaatctgtttttagtgtctcacaaagtaggattgcactttttaatttttaaaaaatttttttttagagacaggttctccccatgttggccaggctggtcttgaactcctgggctcaagccatcctcccacctcagcctcccaaagtgctgagattacaggcgtgagctgctgcgcccggcctggttgcgctttttatctacctgttatccacacgggaatctgtgagtcagttagacagctaatagtttctacccatttgccagaggaggtaaccgagtcacagagaggagaaaagacttaacatcacagaggatcagaaaccctgactctctccctctccacctgcccctcccactccctgctcttcactggcaggtggggtctgccctcacccctccctgcagcgccccacacagaggtgactccccgggccgttagagcagcctttcccaggaagcctccctgagttcctgggggcaaactggcctcccttctttgtcccttctttgtgcccacatcccctcaggttccttgtgcccccatcccctcaggttccttgtgcccccatcccctgaggttccttgtgcccccatcccctcaggttccttgtgcccccatcccctgaggttccttgtgcccacatcccctgaggttccttgtgcccccatcccctcaggttccttgtgcccccatcccctcaggttctttgtgcccccgtcccctcaggttctttgtgcccccatcccctgaggttccttgtatccccatccctttgaggttccttgtgcccccatcccctgaggttccttgtgcccccatcctgctcagggcaagctggttatggcacctgtcatgctgttttgtcacttaacaatttgcgtctcccactgtgagttctctgagggcgggaaccaggtctcctttaccctgggatgcatgggagctcagaaatgtggaatgaagtcgttaatttacacagcacctaccgtgcacctggagaaggtgagaacatggctggcgtgtggacgtactcacatgtgcaaagcctgtggcgtgttcagagcctctcagtctcacggtccgctctgagcctccggcatcccgccgaggtcacggaaaccatccctgttttacacacgaggacgccgaggctcggaggggctcaaggttccttcctggagtcacacagtagcaggtggtgcagcagaatccacgtcttccggcaccagagccggagctctaaccttttgggcacttctcgatgtctggccgggaacaccacacggtccctcaggctgcttgttaccgtggaagcttcctgaactctctccagacccacagacctcccttcttgggggctgccgctgaggagcttctggctagtgagctctgaagcactgtcccacccatgtctggaccaggcgccaccactccatgtccccagatgccgcccctccctctcctgcttcccgttggccgggaggtcctcgcctcagggagccgacccgtggcctcccagcctgggcgggtgtcagagccggctgagctgctccaaaatctctctttacccccagattatcctcactcccttcgccgccgccacccctgacccactcatatgtctgttctcactcagaggtgaggccctgtgtcttcagccgtggtaaactcaggacctctggacaggcaggcccagggtgtaggcaccatgacttttcctgctgtgcagacaggaacctggggagagaagggaggtgatctgtgcagagctggggtgtggacccagatggtctgactccggaaccctcgctctgaccctgtgagccgtccccagctccttccggaaccctccctctgaccctgtgaaccctcccccagcccgttccggaaccctccctctgaccctgtgagccctcccccagccccttctcgaaccctccctctgaccctgtgaaccctcccccagccccttccggaaccctccctctgaccctgtgaaccctcccccagccccttccggaaccctccctctgaccctgtgagccctcccccagccccttccggaaccctccctctgaccctgtgacccctcccccagccccttccggaaccctccctctgaccctgtgacccctcccccagccccttccggaaccctccctctgaccctgtgacccctcccccagccccttccggaaccctccctctgaccctgtgaaccctcccccagccccttccggaaccctccctctgaccctgtgagccctcccccagccccttccggaaccctcgctctgaccctgtgacccctcccccagccccttccggaaccctccctctgaccctgtgagccctcccccagccccttcctgaaccctccctctgaccctgtgacccctcccccagccccttccggaaccctccctctgaccctgtgaaccctcccccagccccttccggaaccctccctctgaccctgtgaaccctcccccagccccttccggaaccctccctctgaccctgtgagccgtcccccagccccttccggaaccctccctctgaccctgtgaaccctcccccagccccttccggaaccctccctctgaccctgtgacccctcccccagccccttccggaaccctccctctgaccctgtgacccctcccccagccccttccggaaccctccctctgaccctgtgacccctcccccagccccttccggcaccctccctctgaccctgtgaaccctcccccagccccttccggaaccctccctctgaccctgtgagccctcccccagccccttccggaaccctccctctgaccctgtgaaccctcccccagccccttccggaaccctccctctgaccctgtgagccctcccccagccccttccggaaccctccctctgaccctgtgagccctccccagcccctcgaggaggggctcacaccgagatcaatccatgatgacagcacttcatggcccgtctcaaacacacaggcccactccctggtctggcccaggctggggtgctcagggcctctgtgttgttcacctgcaaatccccagccccgttctgtgtgttctgaggcccacctgggtcttctttctgttgctccagctggaggcttcttggggtagctgcactgtcctttctgcaggaaagctggtttttttggtttttttttttttgagaaagagtcacttggtcgcccaggctggagtgcagtggtgccatctcagctcactgcaacttccacaccccaggttcaagcgattgtcctgcctcagcctcccgagtagctgggactacaggcatgtgccaccacgccgggctcacttttgtatttttagtagagatggggtttcaccatgttggtcaggctggtctcaaactcctgacctcaggtgatctgcccaccttggcctcccaaagtgctgggatttacaggcgtgagccaccttgcccggccaggaaagctgttctgatggagaatggcccagctgggcagctgcaggggctaagtggagtaagccacctgcactgtatgcccgcactgtgacctctgacgttgtttcacgctgcagagggttggccatagtgtcccaaaggcacctcccacaccacctctggtaccctgggaacaacctcggcatctccctggaggtgggaggactgctggggtccgagcccagggcgggtgtgggtttgcagagggcctggggtccgtgccggtgctgtggcctcagcagttgggtcccaaggtagattttcagcctgaaggccagggtggaagatggaaatgccggggaaagcccccggccctgccctcccgccccagccctccactgccttgttacctggagcgcttggtggtggtgggagcctcgttcaccgtgtgccagctgggttcccagccctgttcttggtactgcgggtacaccggcaggcaggaaaacccaggcttctctccacatggtgtttacgtcgtggggggagagagactagggacgcacgagtagagaagatccctttggtttatgttaagtgcagcggaggaaaccacagcaccctgggcttggggatgtgggcgttgttggtcgtcaccgcggcaggggatgctccgagcattcaggacccagaggcagggctgctaaacgcctcccaccccaaatgccgctgttgaggcctgggcacccatgttacggggagaggtggctccagggcggtcagtgaagagtttgtggtgtcgtctccatggtgaggaagatgtggagacggaacagtcaagggccctttagagggaggaggaggccagagtgtggggagggccgaggtgggaagggcagagtgtggggagggccgaggtgggaagggcagagtgtggggagggctgaggtaggaagggcagagtgtggggtgagccgaggtggggagggctgagcccctaagaagggggcaggggagaagccagatggtcccgggcttcagggaggagagagccaagatgccatccgtggggacgttggaaaggacagatgcgatgtccccctccatcctgagtgccgccccagctgccccaccctggccccactcactcagtatctccgtctgtccttcccccacagacctgtactgtaccctggaggtggattccttcggctattttgtcagcaaagccaaaaccagggtgttccgggacacagcggagcccaagtgggatgaggtgagtggcaggggctggcatctctgtggggaccccaccaccccgtgctcgtggcttgtctgctggggacggccagcccattggttggaccagctatgtctgcacccccctttctgctccctgctcctctggcttctgatcgcggtgtgtgtctgggtgtcagaccctgtggtgtcagctcaggcccccagactccaggggtgatgggaggcctctgggagctccagaaaatctgacgtgtccttcgtgggccgtgcttactccctcctccttgcaaagctgaggcacgcacctgccggaaagccaggcctcccagcttcggaggttcagggccctttgtcccatctttccccaggagtttgagatcgagctggagggctcccagtccctgaggatcctgtgctatgagaagtgctatgacaagaccaaggtcaacaaggacaacaatgagatcgtggacaagatcatgggcaaaggacagatccag

SEQ ID NO: 10470 - DNA, 618 bp, Homo sapiens
ggaaagagttacctgttcctactgtcctcggactacgagaggtcagagtggagagaagcaattcagaaactacagaagaagggtaaattcctgcctcttccacgctccccaatgatgtccgtggcattgatgggccttttgtatttctaagcgtttcatgtccagtatcacgtctttggccctcgcagtcaccctcagaggtgccaggatctccaggcctttgtcctgagctcagtggagctccaggtgctcacaggatcctgtttcaagcttaggactgtacacaacattcctgtcaccagcaataaagacgacgatgagtctccaggactctatggcttccttcatgtcatcgtccactctgccaagggatttaagcaatcagccaacctgtactgtaccctggaggtggattccttcggctattttgtcagcaaagccaaaaccagggtgttccgggacacagcggagcccaagtgggatgaggagtttgagatcgagctggagggctcccagtccctgaggatcctgtgctatgagaagtgctatgacaagaccaaggtcaacaaggacaacaatgagatcgtggacaagatcatgggcaaaggacagatccag

SEQ ID NO: 10471 - DNA, 689 bp, Homo sapiens
ccgcgacctggagcagcgggaggccgaggccaagggccgcccgggctcgcccctcgccgcggaggagacccccgggcgcgagcacctgcccccgtggcggcgccgcaggttcctgcgggtgcccgagcgggactcgcccggccacagctcgccggagagagacagcgacggcagccggcacagctccgaccgcgaggacgacttctccgcagacttcagctacgggacggacgagtacgacggagaggggaatgaggagcagaaggggcccccggagggctcagagaccatgccgtacatcgatgagtcgcccaccatgtccccgcagctcagcgcccgcagccagggcgggggggatggcgtctccccgactccacctgagggactggctcctgggcccatgaaacccctgaaggccaccgccaccacctcccagcccgtgctcaccatccagcagatcgagaccatcttctacaagatccaggacatctatgagatccacaaggagttctatgacaacctgtgccccaaggtgcaacagtgggacagccaggtcaccatgggccacctcttccagaagctggccagccagctcggtgtgtacaaagcgtttgtcgataactataaagtcgctctggagacagctgagaagtgcagccagtccaacaaccagttccagaagatctcag

SEQ ID NO: 10472 - DNA, 19423 bp, Homo sapiens
aactagcgggactggcagccgggactgagcgctccacaggcgccttctctccagcgccgcgtcccgtcccccccggcatgaccgacgtcctgccccagcccgactgcagcccgaaggcggggcgcgaacccctggcgctggaggagtcggggagcaagcgcccccccaacaccggcgcccggctctggggccgcgtgcgcaacaagctgctccgaaacaaggtgcccgcgggggctggaggttccggggggtgggggctcgggggcgctgcggggctcggggggctgcgggggctgcgggggctgatggggtcccgctcccgccccctccgtggagtcccgggacagagctggggtctgtgcgcgtccctctaagtggcttgaacttgatggcgaacgctggggccgcccccacccggaccctggcgctcgggcatctgcccctgcctcgggagaagggaggtttcttctcggcaggtggaccctgctttccactccgggagtgcaaacagcgcacggggagacgcctgcctctgggtctatgtcttgccgccctgttcagcctctacctgatccctgcatccagcgggccttgctggctgcccctttgctgaggggcgccgaccgcagcaccgtctgccgtgtgaggtttctctgtgcaggattgtggggaggggagatgctgccgggtctgggggctcgaggcttcccttcagggaccacccatctgactgtgggcccagtgcccgccgggcaccaggcgttccgtccatgtgccagggcagaccgccggtgcccctgcagccccagacctgagttgggattaaaatctgagatagaagccgactgtcctgcagctgggcaggctgcctcggggctggcttggggccctggcatcaggcacgtgaggaagagccagacccagcgcccagcgcacaggaagtgctcgataactctgcagatcaaatcaactgtccgagttagctgtctcagagtgccagtccggctggccagggctgggcccatccatcaagagagcaacaagggaggccttggccagtccgtggtggggatctgcagctcctcctgaggctcacaggacctctctgcaggctcttactgccagccggcattgaggctcctggcatcagccaggacgaagtgatcttgggctcactggcccctcgttttgtttcagctcctgccatggggcatacttgacctcccagaggtgacatcagccctggaaagtgctgggcagggcagcaacttgagctgtactgcactggcccctgtgtcaccttcagcctccctggggactgggctagcagagccctgctggccccagctgctgccagagcccctctgtgctgaggcagctgtctgtgcccggcagcgtggactcatcccctccccagcccctgctgaggccagcaggcaccagcccagagctcaccatccatccccaaacgtcagggttggcaagaaactgacctggcaggttccgggtccagcgccagccaaacagggcgcttccagtttacctgcccctttgaggaggtgcctggtgggcagggggcaacttttaaacctgaggtcccagactttcagttctttccctatgcatttgtggccggcagaactgagaagccccttcaagaattccttagctgggtttgcctctggcagtgcctggtggctccgtgtctgatggggatctctgggcaggggtggtggccaggcagacgccgggctattgagctgctgagcagttggcgtcagtgcagctcagggtggccccggccctgggctgctctgtgtgacgagcgattccatcccctaacgtgtgctgtgtgccacagtgtgtccgtgtcgtggacgcaggggtcagcgctgtggcggacggagggacgtctgccacagtgtgtccgtgtcgtggacgcaggggtcagcgctgtggtggacggagggacgtctgccacagtgtgtccgtgtcgtggacacgggtcagcgctgtggtggacggagggacgtctgccctgtgcttcccacctcactgtgcgcaggccagcgggtgagcagcagagtcaaagggccaggcctcttgctttctatcctcagccacattaacctggcattttcctgcaggagcttcacagttgggccgaggggctgggactaggcagtttcgtttcggtggggtaagggaagggtgcctggtactgcccagactggcaggagggattgcctcattaactcctcgttaactttgccctgagtgatgctgtgggtgcgagaaacaccggtggccctcctgcttccactgacctgaaggttcattaaaggctggaggcggggcgtgactcatccagggctgggattaaacaatctgttcagatggaaaggtctcatgatcagaactgagcctttaaatagtgcagggcctctggtttctgggggagaggaggcagggacactcacggaggatcctttgggtaccagcgggggtccctgtggttgggctgttcttgtcaccggaggagagttcaggggccaaagcctcattccagcccctgacttggcagtcagctttttgtgcgagtgtttagctgggagacacgtggcatctgggtttgtgggttcagccagggctctcggtattgaacttcgcgtttctacttttctttccttttccctgtttgtttttttttttttttgcctcaaatcacactcaagtagaccaggcccggtgccttcctctccctcccatccttccctcttctagattcttggttgagctttggatgggaaggggctgaattctagattctcgcttgagctttggaggggaaggggctgaaggaggaacccccccaccctgcccccgcagcatccccttgtgggagccgtgaggaggctaagagggcctgaagggaggccggtccagaagcatttgtctgtcggggaagttgaggcccttatagagcaaccaagtccaagacgctcctgacccagaccaggccagatgctggccggcggtggggactcaggctgagccggcagggtgtaaggagattgagtgcagcttcaggtgaccttgtctctgccctgaagcacagccatgtgggtctgagaatcccctacttccaaagagctcctcttaagctggacaccggcactgctgacccccacggtgagtcccgtgttctgtgatgggagctgctgcctttgcttcagagaggatcagaggtgttacctgaggaagggcggggtggagagcccctcttgggccattcggggaagcttcaggctcatgatggtcttagaagaaggtccctttcttggatcacctgatgtcaggagtccaagaccagcctggccaacatggagaagccccgtctcaactaacaatgcaaaaattagccaagtgtggtggctcacgcctgtcatcccagcactttgggaggcagaggcgggtggatcacctgaggtcaggcgttcgagaccagcctggccaacatggtgaaaccccgtgtctactaaaaatacaaaaaaaaaaaaaatagccgggcatggtggcgggcacctgtaatcccagctgctagggaggctgaggcaggagcatcgcttgaacctgggaggtggaggttgcagtgagccgagatcatgccactgcactccagcctgggcaacagagcgagactcggtcttggggtggggggaggaaagggtccctttctttgtcagcttgatcgccaccgcaggacaaccccacccctcacagagcctgtcgtttattccttcttgatggtaccaggtgtgcagaccacgtgcacaccccagaggttcactctaccactcacttggccatcgagggtacacaggtgctgggtacaagatacagatatgtcttgggctcgtctactttattttataatccagtctgggcgtcaggaaagatctcgcagccttctgcaatagaagtctggcctggcccggctgcccaccgcccttccttgtttcccggtgggaagaaagcttcatcgtgcgtcttctctgttcacacacacccccatagcgacccctcagccacagacaggggactacagtgctgcctcccccgagagctggaggcccctacaccagcccacctcttcctgggcctatgtgtgggtcctgactgcggccaggctggctgacaggttggcagtggggtcgggcgaccctccctcttttccacagcacttacccacctgccgagtgggcagacctcactgctggggcctcatgagtactctctgatctctctgccaggccagctcccaagaggcttgcttgagtccgcagagcgggaaccctggactctgagaatctgatgaaggttctggaggccactcagacacagagccaccccatgcacacactgtgtgcgacttcagagggggctgcagacatcaaggcgggaaccctgctctgagtgaacttggcaaggtgccgcttcttggtacctagggagggtagaagggcgctggtcctccccggcctccctgcaggccacagacggcttggccagccagcggtgctgggcgcggtgccccagcttttggatggctctggaccagggagaggagaacctgccaatcaagggggttcctcaaaggccaaagctgcctgagcccagtgttgctgtagtacccagaggcaatgaggccccagacattttggaaggagcccccaagcctgcaggtgtggctgggggagctgccccaggcattttggaaggagcccccaagcctgcaggtgtgagtctgggggagctgccccaggcattttggaaggagcccccaagcctgcaggtgtgagtctgggggagctgccccaggcattttggaagcgcccccaagcctgcaggtgtgagtctgggggagctgccaggtgttggccacagggcgctggtgctggagaggcctggccctctgctgagtggcctcgctcactgcccaggtggttgggaactggtcagcaggtgctgttctttgacctcgtttcccctgtgaactcatgctggggcaggaagatgtttgtgtcctgacggccccccagcaccttcgaggaacagacagtcccctgcgcctgtgacctgcctgccccaccctggggagaaacgcagcgtcagtcctgggtccagtgagccgtagacccttggccctccaggatgggccctggagaggcgggaggggcccgtggagctggtcctgggcttctgtagagaggccaggaggccccaggatccccacagagacttccccagtcccgcttcaagacagcggaaccagctcctgagccgaaatctggagggatctcctttctggaccgtgaccccagccggggctggtaccgatgaccggcacagccagagccgtgacatccacagcgcccttcccatccgatgcctggatgccgtggctgtgctcggggaggcctccggggtccccagcccctcaggctcatgtggcacaaggtgccagagaagacagggcgccaggccggtgggagtcaaggtttcccatttttctcgtctcagtctgctacttaactgctgtgtgcccgcgagtacatccctttgcctctctggttctctggtatcagctcaatgaaggagctgaacaggatgatctcctggaatccagttcatgtgatgatcttggccatgtctcaagattcctagtcctaaaccttaaaccctgagcaccctgggagagtctgtcacagggctgcacctgggccaatgccagccattcagtggacacgggagcagggggtttagtgggaacacagggcttcttgagccctgtcctgaagcagccccggcggggagccattgtcacctccttcccccatgccccagttggttcctctggcctgtgagtattgccggagcaccttccacgtgccaggcctgcaggaactagggacacagaggcgcccgagacagacgagaccctgtctgcaggaggagtccgtcaacaaatgagatccttgccggtcagatgagtgctgtgaaaaaaataaacacaactgggtaacgcagtagagagtgacggggggatgcctggcttgagaggatcacttttgaacgaagatttaaatgacaagaagaattcagccataaaaaacctgggggcagtgcattccaggccaaagaaccggcaaggtccacaccccgaggcaggtgtgctcagaggcagagggggacagtgtggggcgttacgtggggtcaggggacggcggccaggcgacgtggggccctgcggttcaggacagggcctttaatccgaatgcagtgggaagccgcggggtgttcaagcacagttctgtgacgatatgttttgaacacgtactgtacgaggcatcattcttagcctgtgacgcaactgaggtgacacttacaaggtgctgttattcacactgtttatttatttatttgtttgggttcttttgtttttgtttgctgttgttgttttgagacagagtcttgctgtgtcgcccaggctggagtgcaatggcgcgatctcggctcgctgcagcctccgcctcccgggttcaagcgattctcctgcctcagcctcctgagtagctgggattacaggtgcccgccaccacgcccggccaagttttgtatttttttttttttttttttgagacggagtctcgctgtcgcccaggctggagtgcagtggcgcaatcttggctcactgcaggctccgccccctggggttcacgccattctcctgcctcagcctcccgagtagctgggactacaggcgcccgccacctcgcccagctaattttttgtatttttagtagagacggggtttcaccgtgttagccaggctggtcttgaactcctgacctcaggtgatccacccgcctcagcttcccaaagtgctgagattacaggcgtgagtcactgcgccaggcctaaatgtgttttgaattttgttttacatttttaattttttttttttttttttttgtgggagtctcactctctcgcccaggctggagtgcagtggcaccatctcggctcactgcagcctccatctcccaggctcaagcaatcctcccacctcagcctcccaagtagctgggtctacaggcatgtaccaacatgcctggctaatttttgtattttttgtaaagacgaggtttcgttatgttgcgcaggctgatgttgaacttctggcttcagtggatccacctgcctccgcctcccacagtgctggattacaggcgggagcccccgtgcctggcccagactgtttttatatatgaggaatgaggctcagagagtgactcagatgaagtcacgtgagtggcttagccgaggggcgacgttcagaccccggccactcagcctcagcgcaggctctcacccgcggtgtcctgccttccgtggccggttggggttgggctgcgtgccccagatgggagcgtctggagacgccgggctcctgcccgtcaggcatcagtgtggtgcccgtcctggcacgctgtgcatagcaacaggcaagacggttcttctcgacgacgccactgaacgtgagactcggagcaaggcaaggcctgggaggggccgctcagagctgacctgggccctggaattgctggagcccctcacgtccccggcagcaagctccatgcccagaaagtgttctgggcccgggcagggagggtgaagctggtatcagagaaggctgttgatgctgctttttttttttttttttttttttttgagatggagtctcgctctgtcgcccaggctggagtacaatggcacaatctcggctcaccgcaacctccgcctcctgggttcaagcggttctcctgcctcagccccctgagtagctgggtttacaggcatgtgccaccacgccggggtaatttttgtatttttagtagagacagggtttctccatgttggccaggctggtctcgaactcctgacctcaggtgatcctcccacctaggcctcccacagtgctgggattacaggtgtgaaccaccgcgcccagccctgttaatgtttcttaaccactccaggtccagctcgaggcttcagagcccatggaggtctgacaggtccttggccttcccgtggcctccagcgtgaagcttcctggtcaggaccacagaaggcctctcatcttggactttgacctctgagggcgcccctttcctttcaggacagggcctccgtgttgctttggccctggcctgttccttttctcaagagggccccactgcccctgcccttgccactctggcatcctcgacctgccctgggctggggcagggccggcttcctggctggtatttgtagcccagttctgagctgaagctgaagcctccaggctgcctgcacagggaggcagtggtggggtgggctggccctgaggaagacggagccctaggccgctgggggagatgtgcctggctgtggggcctccaagagcagcccaggtttggattttgtctgcttctcctcaaggtcagccatgcccagcccgggggctaaaagcaaagtgggtgccagggcaggcagaggctctggagtggacgtggggccggcagaggcgctggagtggacgtggggccggcagaggcgctggagtggacgtggggccggcagaggcgctgtagtggacgtggggccggcagaggctctgcagtggacgtggggccggcagaggcgctggagcggacgtggggcaggcagaggctctgcagtggacgtggggccggcagaggctctggagcggacgtggggcaggcagaggtgctagaatggacgctggggaaggcaggttgctgcgggtgctaagaggctagcctgccttggacaaaagcgtcgttcagagctgctaatccccttcctcccatgaggcttggggaacttcgaagttctctggtgttggaggggaagccagccgaggccctgggacacggcatcagcccgagcctatctgtggctggcctgggtatggcaggtgggcacaccttggctgcaggacaccttggctacaagggagcctggctgaccctgcagggtgagggctggagaggcggagcctgcctggcctagcagtgtggatgccaagccatgggaagatgtgtggagagtttatggagcctggcccggtgtccccaacccagctgctgagctggaagccaggggtaggtcctggcagcccctccctctctgccctgcctctctcggagtcgctcggagcagtcacgttgacggaatcctccggcgcctcctcgagggaggagaggcagggtcttggcaactcccgtctcccccgttgccagcttgccagccccgccgtgcctctcacgcctgtggtctgccccaatgacaggccggcttcggtgtcccaaggggacccagccctgagcgtggggctgcccttgggggagggcaggggaaagccagcccgggctgccaccgtggccgctggcctgggagccccaggaaacgtgcccaccctcagacccgatgcctggctcagggcctgggctccgcggcccctccagggcaggcgtgaaatgtgcccacacagctccaccttccacgtggttccctgtccgggggccacttgcactgaggtccttctggagtcattttctgtttttttttttttttttttgagacagagtcttgctctgttgcccaggctggagtgcagtggtgctatcttggctcactgcaacccctgcctcccgggttcaagtgatttccggctaattttgtatttttagtagagatggggtttcgtcaggttggccaggctggtctcgaactcctgagctcgagtgatccgcccgcctctgcctcccagagtgctgggattacaggcatgagccaccgcgcccggctgggagtcattttctagcgttcctgtcccacctctcaggaacagatttaccacctttgttgtgaagaagcattttttttttttttctgccgccaggctggagtgcagtggcacaatctcaactccggctcactgcaacctccgcctcccgggttcaagcgattctcctgcctcagcctccccagtagctgggattacaggcacccgccaccacgcctggctaatttttgtatttttagtagagacggggtttcgccacgttggtcaggttggtctcgatctcctgaccttgtgatccgcccgcctcggcctcccaaagtgctgggatgacaggcgtgagccaccgcacctggctgaagaagcacttttttttatgaacctctgcaaccccctctgagggaaaccctcccgcattctgggatgccggggctcagagggtggagggtagaagagcgccagccgtgagaggcaggatggggcggcccccgagggcagggctgtgcctggaggcagggctcctcggggggtcagctcctgggcggtgggagtgaccgagtgggctcctgagggaagcggctttcaggaaggaggcggaggcctgggagctcttggggccctggcaaatgtggtcttcagattcccgtcgtccagtgagcccctggatcacgtcctgagtggcgtccactgaaggctgcttgggacctctgctcccccctccactgagacccccagtggccagttctaagtcccacctgccttgggcagggccaccacaggccccttactgtggattaaagggccctgggtgagggcttgtgggaggggaggtggtggaaaccatctccgaagaccttggggcgagctgcgtgctggagtggagagtgtggcccagcaggcaggagcactgggttggaatgggggctctgccacctccgagggagcaggagtggagaccggagggagcgtgcccctgaatccgagcacggggagctggccgggagcagccctccgggcagaggcaggagaaatggggtcacctgccccagggggtgagaggtgagccgagaggaagggctgagaccctcaggggcatccccaggatgttcctgaaactcagccctggaggacgctcaggtgtgcgtggagcaccctctgccctggagcctcaaatcctctccccgctgcggggccactttgctgattcctgccccaaacatgaggtcacttcggtccagaaaggcgaggcgacctccaccagccacctacgggattcttggcagagaatccacgctcaccttcgggtcttcactcctgctccctcggaggtgacggagccccatttcaacccggtgcccctgcctgctgggttttcgccgcaggggacctggtcgtctcctggacatgagcccccagcgccagcgtttctctttgggagaggcctgaatgcgcagtcatgatttgaccaggcgaagtgcccagacaaagagaaaacagtcggccggatgcaggggctcacgcctggaatcccagcactttgggaggccgaggcgggtggatcacctgaggtcaggagttggagaccagcctggccaacacggtgaaaccccgtctctactaaaaatacaaaaattagccgggcgtggtggctcgtgcctgtagccccagctactcgggaggctgaggcaggagaatcgctcgaacccgaaggtggaggttgcagtgagctgagatcgcgccactgcactccagcctgggcgacagagtgcgactccgtctcaaaaaaaaaaaagaaggaaatagttgagctgctctcagtgaccatgtacggcccagtcgtcgacccctggcccagtcgttcgtccgccttttggctccacgatgttttgcagcctgtttctgtctcctgcctgtggcccaccttggggaggccccagtgctcgtgtgcccctggtggtcttcccagcctgacccttcacgagctccctctgtctccctgcttcaggtgatcagacatcccccaagtacctgctcccctgggcccatggaaggcacctgtctgctgggaccagagggtgagcagtcaggtgtcccatccaccaacgtcccaggggccagcccctccaccccggtgctaatctcatcaggaaatagcacagtccacatttcccaggagttataaatagccagcgcagttgcgggcagcagcgtttctctggaaaatgtacgctgtgcctctccctccctcctctgtgtttaaatgatatcctgaaatagacttggtttctggaggctgatagcctcctgggaaacagagcgtcgttgtcagggcaccgtggggccaggcaggcctctctgagcggataccagggccacacctgcagcaggcaccagggccacacctgcagcagataccagggccacacctgcagcaggcaccaggaagatgtcagggcttgaggggcttacagcttaggaaagtgcccctggcccaggcctggcctcagaaggggctggagtgtgtgagacagcagcaagtgtcgcctgggaggctgcagagggtagatcttagtggagcaggaaggcagagaggacccaaagtttcccactgtgacctggggctctccgagaaggctctctggaggaggcggggcgagaactgggccttagcatcaggaggtgcagtcctgggtcagatgtgcccaggttgaacctggcagctggagcggaagtgatgggcacgaggcagcgggagggctgtactgggggtggcctcccagcaccaggtctgcccaccgggtcgggacacacaccaggaggcccgatgttgcctttctgaggaagcagcagttacagcagctgcgggtcatggacttcacacattctgcagtttcagcagagagggtgctgggggccttgattttgaaccccagctctgacttcctaggtgtgcactgggtaaattcctcactctcgttaagctgcagcatcctcatctgtgagatgggagcggctatgagagcttaaaccgcatatgtctgctatcatgatcatgaacgcagatgctgtgtgtagaggattcatcagtgtcagacttgcaggaagagctcgagataagtccgttgctctcactcttccataacagccctgtgagtcaggtgtggatgcctccatgaggaaattgaagttcacggaggtgaaaggccttgcccgagtgcgcacggttgaatgggagactcagatcagcctgcctccaaatcctgcacactccccccgaccaggttgtgtccaggtccccctgagacttgggaagggaccattggctcagcttcctgcagaagctgccaggaggcacccagtcgtgggaagctggggcggaggaggggctgtgggtgaatcggaccaggggccatggaattggcctgaggcttatgctgatgtgtggagagacctgcctcaagaaggggtggtctcaaaacatcgaactgcgccccataaatacatacaactgcaatgtgtcaattaaaaaataagggcccgggccaggcgtggtggctcacgcccgtaatcccagcactttgggaggccgaggtgggcgaatcacgaggtcaggagatcaagaccatcctggctaacacggtgaaaccccgtctctactaaaaatacaaaaaattagccgggggtggtggcgggcgcctgtagtcccagctactcaggaggctgaggcaggagaatggcgtgaacccgggaggcggagcttgcagtgagccaggatcgcgccacagcactccagcctgggcgacagagcaagactccgtctcaaaaataaataaataaataaaaaataagggcccacacagtggtacatgcctgtaatgccagctcttcaggaggctgaggcaggaggatcactgaagcccagggcaacatagcagcctggacggcacagtgagaccctgtctctagaaaaataaatacaggccgagtgcggtggctcacgcctgtcatcccagcactttgggaggccaaggtgggcggaccacctgaggtctggagttcaagaccagcctgggcaacatggtgaaaccccatctctactaaaaataaaaaaattggccaggcatggtggctcacacttgtaatcccagcactttgggaggccaaggtgggtgggtcatttgaggtcaggagttcgagaccagcctggccaacatggtgaaaccctgtctctactaaaaatacaaaaattagccgggtgtgatggtgcgcacctgtagtcccagctaattgggaggctgaggcagaagaatcggttgaacctgggagacgggttgcagtcagccgagatcacaccactgcactccagcctgggcaacaagagtgaaactctgtctcaaaaaaaaaaaaaaaaaaaaaagagggcatggccgctccagaatgtttcttccaagggtagcatctcagttgacaaagagcatttgattcctccaccctgtgtggctactgctgggggacagagctggggacagacccaggcccggctccgtgtccagacgagatgaaggaactacgagggacagcctgtgtgatccaggagggtttgcaaagaacagaagcagcttagaggggagagaggtttcgggaaagtaaggccagagctggggcttcctttgagaccctgtaggacccctgcctccagccgggctggtgatggcctcacgcttcccgtgtgtgaagaggtgcccggagcagtggttctccctgaggggcacttggttctctgcacacacccaacttctgtctcctgttctgggttccatcccttctctgggcagggcgaacccagtgcagacccagaccccgtcggaggcttgggtaccacctgcccccagccggtgtgtgggtgatagatgtgggaaggacctacatcgagctgcaggaagcccaaggctgacccagatccagtttcccttccgtgatgacagtggcctgttatagcaactgcgttcaaaccgtggcacgcacacctcagagtgcacagagacgttctgagggcgacgtgggcaggagagttttcaggaaatcagtttgcagattctcagctgccataggtgctattgccagaaagccatctgcctgagagccagcatctcgccatcctgtcctctgcagaggagaggcctgaggctggctgtcggggcttggcccggggtgcgcagacctcctgggtggggaacagaggggcttttagaaatgttggggtaggggccaggcatggtgggtcacacctgtaatcccagcactttgggaggccgaggcaggtggatcgcctgaggtcaggagctcgagaccagcctggccaacatggtgaaaccccatctccactacaaataaaaaattagctgggcgtggtggcaggcacctgtaatcccagctactcgggaggctgaggcaggagaatcacttgaacccgggaggtggagcttgcagtgagccgagactgcaccactgcactccagcctgggcgacagagcgagactccgtctcaaaaaaaaaaaaaaaaagaaacgttggggtcagtgttcagaaagtaaaagactctagtggccacttagaacctttcaaaagtcaggtggtatccagttctttgccttccacaaaactgatggaggactcaattttcaactgagagatcatttcaagtaattttcagtaataggtatatatgcgatttaaggcggatagcatggagagaggttaaagaatggtgtaacgcggctgtgataaaactcttttcgacctcatctacttctttatgtgaacaaaatgtttcattgttcacatatttcttgttcattttagagacatggtcctacattgcccaggctggtctcgaactcctgggctcaagtggtcctgtggctgggagccacagcacctgcacatctttacaacaaaaccagaaacatgaaccaaattgatgctgagcctcgtttcactctagcaaaaaataataccctatagatacgcgaactaaagcaaaaaatgttccgcccatctcattgagagagcattccaccaaaaagttactctgctacttaatatttattaaaatgtataatgaggccaggcgcggtggctcacgcctgtaatcccagcactttgggagaccgaggcgggtggatcacctgaggtcgggagttcgagatcagcctgaccaacatggagaaaccccatctctactaaaaatacaaaaaattagccgggtgtggttgtgtgtgtctgtaattccagctactcgggaggctgaggcaggagaatcgcttgaacccaggaggcggaggttgctgtgagccaagatcgcaccattgcactccggcctggacaataagagcgaaactctgtctcaaaaaaataaataaaatgtatataatgtgtcggcttactttttttttttttttcttgagacagggtctcactctgtcgccaggctggagtgcagtggtgtgatcttggctcaatgcaacctccacctcctgggttcaagcgattcttccatctcagcctcccaagtagtagcttggactacagtgcccgccaccacacccggctcacttttgtatttttagtagagacagggttttgtcatgttggccaggctggtctcgaattcctgacctcaggtgatccaccagcctcagcctcccaaagtgctgggattacaggcgtgagccaccgtgcctggctgtctttttaattatgtactgccaatcatggtactaactaatcctgaatatattttgaatatttggagccttgtggtctctggaaatttttgttttcaatgtatacagattttttttgtggaagcaaaatgtaatggtgaataaaggacttgaaaatataaaaatataaactaggacaacattctttaggagaaatggaatagaaacaaattcaaggagagaagatccaggagctctgtgagggaaagaagagcttgtttgtgtagttttttgttgttgttgttttttttgagacggagtctcactctgtcgcccaggctggagtgcagtggtgtgatctccgctcactgcaacctccacctactgggttcatgccattctcctgcctcagcctccccagcagctgggactacaggcgcccaccaccgcgcccggctaattttttgtatttttttttttttagtagagacggggtttcaccgtgttagccaggatggtctcgatctcctgacctcgtgatccgcctccctcggcctcccaaagtgctgggattacaggcatgagccaccgtgcctggcctgttttcttaatattgaattttgagagttttatataataagccctgaaattgggtaatattagccctatagctgtgttctttttcaacattgtttagatgttttttctttttttttgagacggagtctcgctctgtcgcccaggctggagtgcagtggcgcgatctcggctcactgcaagctctgcctcccgggttcacgctattctcctgcctcagcctcccaagtagctgggactacaggcgcccgccaccacgcccggctaattttttgtatttttagtagagacggggtttcaccgtgttagccaggatggtctcgatctcctgagctcgtgatctgcctgccttggcctctcaaagtgctgggattacaggcgtgagccgccacgcctggcctcgtgtagtttttaaatggatgagtgtgggtatcacgtcgctggggtatttagatcccactgaatccatgagaaggaatgatgtcacacttttattttaggatggcaatattgacatgattttggaaatcatactctttgcaactatttaaacttggaaatgttcagattttgacttcagaaagtgccagggagcgcacagttgctcagaattagttcgcaggtgcacaggcagacgggcgcgaaggcccccgagttacagaaacagaacgtggaacagtcctgtgtgagggttgcctctgacctcccctggggtccgcacctccctgggctccagcccgagcctggggacttcccctgtggaggatttgcttatttgggagccaatggcttgacccaagttttctccctgaatcttcccagcaatcccagggaggcaggttctgttgcagatggaataactgaggcttagtgagtttaaaacttgccaggattcaaacccaggcagcctcctgtgcgcgggctcctgactcttcaacacctccacgtggatgggctggttccctcctgatggacttgagcgcctcctaatcaggtgcttaccttttgtgagcctcagtttctgcatctgtgaaatggggtaataatacccatgtcccgggctggcagccaggagtgcctaacagggtgtgccctgcctcccccacggtgggtaacagagtgtgccctgcctcccccacggcgggtaacagggtgtgccctgcctcccccacggcgggtaacagggtgtgccctgcctcccccacggcggccacaggggcctgggggctagggtccccccaaagggttgatttccaggtaaacatcagcttatcccagctgctcacttccgccttcctgactgtgtagctggctctgagcagtgctgacccacggggagatctctggcttggcctccgagctggcacctctctcacccacattctctctctgcagctggacccacaaaccgtggagaccaagaactggcacacggacgtgattgagatgaacggggtgagccggggatgggaatgatcagtggcgtgagccgggaggtggaacgtctgtgcagcaggtgggcagcccggccctgtggctgctcctggggccgctgtgccgcctcgacctccccgcagcccagccccctctcccctcctgcccacaccctgcccgctgctgtcctgcaggtgttgtgttgagggagacctgggtgtgagctagccctcatttgcagtcttggggaggggacccctgtgttttgggggcattcctcgggcactcacaccctggggaatctttacctgcctcaccccccaaccagatcaaagtggaattttccatgaaattcaccagccgagatatgagcctgaagaggaccccgtccaaaaagcagaccggcgtcttcggtgtgaagatcagcgtggtgacgaagtaggtgctgcctcgggtctcccagtcctggcgtcggtgccccgggtcccccccagcccgggccccccagccctccccgccggtgcccatcctggcacctaatcagttaccccccgctcggcggtggcagatggccggtgtggatctagagtggccgcagaggcgctcacaggacacttcagaagcacgcgagccagcacctaaacgctggaaggtctcttgtgagatcccagatcgtctgctcctcgtaacaagcgggaagctctgtcagccgggggcctacgtttgggct

SEQ ID NO: 10473 - DNA, 553 bp, Homo sapiens
aactagcgggactggcagccgggactgagcgctccacaggcgccttctctccagcgccgcgtcccgtcccccccggcatgaccgacgtcctgccccagcccgactgcagcccgaaggcggggcgcgaacccctggcgctggaggagtcggggagcaagcgcccccccaacaccggcgcccggctctggggccgcgtgcgcaacaagctgctccgaaacaagctggacccacaaaccgtggagaccaagaactggcacacggacgtgattgagatgaacgggatcaaagtggaattttccatgaaattcaccagccgagatatgagcctgaagaggaccccgtccaaaaagcagaccggcgtcttcggtgtgaagatcagcgtggtgacgaaatggccggtgtggatctagagtggccgcagaggcgctcacaggacacttcagaagcacgcgagccagcacctaaacgctggaaggtctcttgtgagatcccagatcgtctgctcctcgtaacaagcgggaagctctgtcagccgggggcctacgtttgggct

SEQ ID NO: 10474 - DNA, 574 bp, Homo sapiens
actataaagtcgctctggagacagctgagaagtgcagccagtccaacaaccagttccagaagatctcagaggaactcaaagtgaaaggtcccaaggactccaaggacagccacacgtctgtcaccatggaagctctgctctacaagcccattgaccgggtcactcggagcaccctagtcctacacgacctgctgaagcacacacctgtggaccaccccgactacccgctgctgcaggatgccctccgcatctcccagaacttcctgtccagcatcaacgaggacatcgacccccgccggactgcagtgacaacgcccaagggggagacgcgacagctggtgaaggacggcttcctggtggaagtgtcagagagctcccggaagctgcggcacgtcttcctctttacagatgtcctactgtgtgccaagctgaagaagacctctgcagggaagcaccagcagtatgactgtaagtggtacatccccctggccgacctggtgtttccatcccccgaggagtctgaggatcctgtgctatgagaagtgctatgacaagaccaaggtcaacaaggaca

SEQ ID NO: 10475 - DNA, 20243 bp, Homo sapiens
aactagcgggactggcagccgggactgagcgctccacaggcgccttctctccagcgccgcgtcccgtcccccccggcatgaccgacgtcctgccccagcccgactgcagcccgaaggcggggcgcgaacccctggcgctggaggagtcggggagcaagcgcccccccaacaccggcgcccggctctggggccgcgtgcgcaacaagctgctccgaaacaaggtgcccgcgggggctggaggttccggggggtgggggctcgggggcgctgcggggctcggggggctgcgggggctgcgggggctgatggggtcccgctcccgccccctccgtggagtcccgggacagagctggggtctgtgcgcgtccctctaagtggcttgaacttgatggcgaacgctggggccgcccccacccggaccctggcgctcgggcatctgcccctgcctcgggagaagggaggtttcttctcggcaggtggaccctgctttccactccgggagtgcaaacagcgcacggggagacgcctgcctctgggtctatgtcttgccgccctgttcagcctctacctgatccctgcatccagcgggccttgctggctgcccctttgctgaggggcgccgaccgcagcaccgtctgccgtgtgaggtttctctgtgcaggattgtggggaggggagatgctgccgggtctgggggctcgaggcttcccttcagggaccacccatctgactgtgggcccagtgcccgccgggcaccaggcgttccgtccatgtgccagggcagaccgccggtgcccctgcagccccagacctgagttgggattaaaatctgagatagaagccgactgtcctgcagctgggcaggctgcctcggggctggcttggggccctggcatcaggcacgtgaggaagagccagacccagcgcccagcgcacaggaagtgctcgataactctgcagatcaaatcaactgtccgagttagctgtctcagagtgccagtccggctggccagggctgggcccatccatcaagagagcaacaagggaggccttggccagtccgtggtggggatctgcagctcctcctgaggctcacaggacctctctgcaggctcttactgccagccggcattgaggctcctggcatcagccaggacgaagtgatcttgggctcactggcccctcgttttgtttcagctcctgccatggggcatacttgacctcccagaggtgacatcagccctggaaagtgctgggcagggcagcaacttgagctgtactgcactggcccctgtgtcaccttcagcctccctggggactgggctagcagagccctgctggccccagctgctgccagagcccctctgtgctgaggcagctgtctgtgcccggcagcgtggactcatcccctccccagcccctgctgaggccagcaggcaccagcccagagctcaccatccatccccaaacgtcagggttggcaagaaactgacctggcaggttccgggtccagcgccagccaaacagggcgcttccagtttacctgcccctttgaggaggtgcctggtgggcagggggcaacttttaaacctgaggtcccagactttcagttctttccctatgcatttgtggccggcagaactgagaagccccttcaagaattccttagctgggtttgcctctggcagtgcctggtggctccgtgtctgatggggatctctgggcaggggtggtggccaggcagacgccgggctattgagctgctgagcagttggcgtcagtgcagctcagggtggccccggccctgggctgctctgtgtgacgagcgattccatcccctaacgtgtgctgtgtgccacagtgtgtccgtgtcgtggacgcaggggtcagcgctgtggcggacggagggacgtctgccacagtgtgtccgtgtcgtggacgcaggggtcagcgctgtggtggacggagggacgtctgccacagtgtgtccgtgtcgtggacacgggtcagcgctgtggtggacggagggacgtctgccctgtgcttcccacctcactgtgcgcaggccagcgggtgagcagcagagtcaaagggccaggcctcttgctttctatcctcagccacattaacctggcattttcctgcaggagcttcacagttgggccgaggggctgggactaggcagtttcgtttcggtggggtaagggaagggtgcctggtactgcccagactggcaggagggattgcctcattaactcctcgttaactttgccctgagtgatgctgtgggtgcgagaaacaccggtggccctcctgcttccactgacctgaaggttcattaaaggctggaggcggggcgtgactcatccagggctgggattaaacaatctgttcagatggaaaggtctcatgatcagaactgagcctttaaatagtgcagggcctctggtttctgggggagaggaggcagggacactcacggaggatcctttgggtaccagcgggggtccctgtggttgggctgttcttgtcaccggaggagagttcaggggccaaagcctcattccagcccctgacttggcagtcagctttttgtgcgagtgtttagctgggagacacgtggcatctgggtttgtgggttcagccagggctctcggtattgaacttcgcgtttctacttttctttccttttccctgtttgtttttttttttttttgcctcaaatcacactcaagtagaccaggcccggtgccttcctctccctcccatccttccctcttctagattcttggttgagctttggatgggaaggggctgaattctagattctcgcttgagctttggaggggaaggggctgaaggaggaacccccccaccctgcccccgcagcatccccttgtgggagccgtgaggaggctaagagggcctgaagggaggccggtccagaagcatttgtctgtcggggaagttgaggcccttatagagcaaccaagtccaagacgctcctgacccagaccaggccagatgctggccggcggtggggactcaggctgagccggcagggtgtaaggagattgagtgcagcttcaggtgaccttgtctctgccctgaagcacagccatgtgggtctgagaatcccctacttccaaagagctcctcttaagctggacaccggcactgctgacccccacggtgagtcccgtgttctgtgatgggagctgctgcctttgcttcagagaggatcagaggtgttacctgaggaagggcggggtggagagcccctcttgggccattcggggaagcttcaggctcatgatggtcttagaagaaggtccctttcttggatcacctgatgtcaggagtccaagaccagcctggccaacatggagaagccccgtctcaactaacaatgcaaaaattagccaagtgtggtggctcacgcctgtcatcccagcactttgggaggcagaggcgggtggatcacctgaggtcaggcgttcgagaccagcctggccaacatggtgaaaccccgtgtctactaaaaatacaaaaaaaaaaaaaatagccgggcatggtggcgggcacctgtaatcccagctgctagggaggctgaggcaggagcatcgcttgaacctgggaggtggaggttgcagtgagccgagatcatgccactgcactccagcctgggcaacagagcgagactcggtcttggggtggggggaggaaagggtccctttctttgtcagcttgatcgccaccgcaggacaaccccacccctcacagagcctgtcgtttattccttcttgatggtaccaggtgtgcagaccacgtgcacaccccagaggttcactctaccactcacttggccatcgagggtacacaggtgctgggtacaagatacagatatgtcttgggctcgtctactttattttataatccagtctgggcgtcaggaaagatctcgcagccttctgcaatagaagtctggcctggcccggctgcccaccgcccttccttgtttcccggtgggaagaaagcttcatcgtgcgtcttctctgttcacacacacccccatagcgacccctcagccacagacaggggactacagtgctgcctcccccgagagctggaggcccctacaccagcccacctcttcctgggcctatgtgtgggtcctgactgcggccaggctggctgacaggttggcagtggggtcgggcgaccctccctcttttccacagcacttacccacctgccgagtgggcagacctcactgctggggcctcatgagtactctctgatctctctgccaggccagctcccaagaggcttgcttgagtccgcagagcgggaaccctggactctgagaatctgatgaaggttctggaggccactcagacacagagccaccccatgcacacactgtgtgcgacttcagagggggctgcagacatcaaggcgggaaccctgctctgagtgaacttggcaaggtgccgcttcttggtacctagggagggtagaagggcgctggtcctccccggcctccctgcaggccacagacggcttggccagccagcggtgctgggcgcggtgccccagcttttggatggctctggaccagggagaggagaacctgccaatcaagggggttcctcaaaggccaaagctgcctgagcccagtgttgctgtagtacccagaggcaatgaggccccagacattttggaaggagcccccaagcctgcaggtgtggctgggggagctgccccaggcattttggaaggagcccccaagcctgcaggtgtgagtctgggggagctgccccaggcattttggaaggagcccccaagcctgcaggtgtgagtctgggggagctgccccaggcattttggaagcgcccccaagcctgcaggtgtgagtctgggggagctgccaggtgttggccacagggcgctggtgctggagaggcctggccctctgctgagtggcctcgctcactgcccaggtggttgggaactggtcagcaggtgctgttctttgacctcgtttcccctgtgaactcatgctggggcaggaagatgtttgtgtcctgacggccccccagcaccttcgaggaacagacagtcccctgcgcctgtgacctgcctgccccaccctggggagaaacgcagcgtcagtcctgggtccagtgagccgtagacccttggccctccaggatgggccctggagaggcgggaggggcccgtggagctggtcctgggcttctgtagagaggccaggaggccccaggatccccacagagacttccccagtcccgcttcaagacagcggaaccagctcctgagccgaaatctggagggatctcctttctggaccgtgaccccagccggggctggtaccgatgaccggcacagccagagccgtgacatccacagcgcccttcccatccgatgcctggatgccgtggctgtgctcggggaggcctccggggtccccagcccctcaggctcatgtggcacaaggtgccagagaagacagggcgccaggccggtgggagtcaaggtttcccatttttctcgtctcagtctgctacttaactgctgtgtgcccgcgagtacatccctttgcctctctggttctctggtatcagctcaatgaaggagctgaacaggatgatctcctggaatccagttcatgtgatgatcttggccatgtctcaagattcctagtcctaaaccttaaaccctgagcaccctgggagagtctgtcacagggctgcacctgggccaatgccagccattcagtggacacgggagcagggggtttagtgggaacacagggcttcttgagccctgtcctgaagcagccccggcggggagccattgtcacctccttcccccatgccccagttggttcctctggcctgtgagtattgccggagcaccttccacgtgccaggcctgcaggaactagggacacagaggcgcccgagacagacgagaccctgtctgcaggaggagtccgtcaacaaatgagatccttgccggtcagatgagtgctgtgaaaaaaataaacacaactgggtaacgcagtagagagtgacggggggatgcctggcttgagaggatcacttttgaacgaagatttaaatgacaagaagaattcagccataaaaaacctgggggcagtgcattccaggccaaagaaccggcaaggtccacaccccgaggcaggtgtgctcagaggcagagggggacagtgtggggcgttacgtggggtcaggggacggcggccaggcgacgtggggccctgcggttcaggacagggcctttaatccgaatgcagtgggaagccgcggggtgttcaagcacagttctgtgacgatatgttttgaacacgtactgtacgaggcatcattcttagcctgtgacgcaactgaggtgacacttacaaggtgctgttattcacactgtttatttatttatttgtttgggttcttttgtttttgtttgctgttgttgttttgagacagagtcttgctgtgtcgcccaggctggagtgcaatggcgcgatctcggctcgctgcagcctccgcctcccgggttcaagcgattctcctgcctcagcctcctgagtagctgggattacaggtgcccgccaccacgcccggccaagttttgtatttttttttttttttttttgagacggagtctcgctgtcgcccaggctggagtgcagtggcgcaatcttggctcactgcaggctccgccccctggggttcacgccattctcctgcctcagcctcccgagtagctgggactacaggcgcccgccacctcgcccagctaattttttgtatttttagtagagacggggtttcaccgtgttagccaggctggtcttgaactcctgacctcaggtgatccacccgcctcagcttcccaaagtgctgagattacaggcgtgagtcactgcgccaggcctaaatgtgttttgaattttgttttacatttttaattttttttttttttttttttgtgggagtctcactctctcgcccaggctggagtgcagtggcaccatctcggctcactgcagcctccatctcccaggctcaagcaatcctcccacctcagcctcccaagtagctgggtctacaggcatgtaccaacatgcctggctaatttttgtattttttgtaaagacgaggtttcgttatgttgcgcaggctgatgttgaacttctggcttcagtggatccacctgcctccgcctcccacagtgctggattacaggcgggagcccccgtgcctggcccagactgtttttatatatgaggaatgaggctcagagagtgactcagatgaagtcacgtgagtggcttagccgaggggcgacgttcagaccccggccactcagcctcagcgcaggctctcacccgcggtgtcctgccttccgtggccggttggggttgggctgcgtgccccagatgggagcgtctggagacgccgggctcctgcccgtcaggcatcagtgtggtgcccgtcctggcacgctgtgcatagcaacaggcaagacggttcttctcgacgacgccactgaacgtgagactcggagcaaggcaaggcctgggaggggccgctcagagctgacctgggccctggaattgctggagcccctcacgtccccggcagcaagctccatgcccagaaagtgttctgggcccgggcagggagggtgaagctggtatcagagaaggctgttgatgctgctttttttttttttttttttttttttgagatggagtctcgctctgtcgcccaggctggagtacaatggcacaatctcggctcaccgcaacctccgcctcctgggttcaagcggttctcctgcctcagccccctgagtagctgggtttacaggcatgtgccaccacgccggggtaatttttgtatttttagtagagacagggtttctccatgttggccaggctggtctcgaactcctgacctcaggtgatcctcccacctaggcctcccacagtgctgggattacaggtgtgaaccaccgcgcccagccctgttaatgtttcttaaccactccaggtccagctcgaggcttcagagcccatggaggtctgacaggtccttggccttcccgtggcctccagcgtgaagcttcctggtcaggaccacagaaggcctctcatcttggactttgacctctgagggcgcccctttcctttcaggacagggcctccgtgttgctttggccctggcctgttccttttctcaagagggccccactgcccctgcccttgccactctggcatcctcgacctgccctgggctggggcagggccggcttcctggctggtatttgtagcccagttctgagctgaagctgaagcctccaggctgcctgcacagggaggcagtggtggggtgggctggccctgaggaagacggagccctaggccgctgggggagatgtgcctggctgtggggcctccaagagcagcccaggtttggattttgtctgcttctcctcaaggtcagccatgcccagcccgggggctaaaagcaaagtgggtgccagggcaggcagaggctctggagtggacgtggggccggcagaggcgctggagtggacgtggggccggcagaggcgctggagtggacgtggggccggcagaggcgctgtagtggacgtggggccggcagaggctctgcagtggacgtggggccggcagaggcgctggagcggacgtggggcaggcagaggctctgcagtggacgtggggccggcagaggctctggagcggacgtggggcaggcagaggtgctagaatggacgctggggaaggcaggttgctgcgggtgctaagaggctagcctgccttggacaaaagcgtcgttcagagctgctaatccccttcctcccatgaggcttggggaacttcgaagttctctggtgttggaggggaagccagccgaggccctgggacacggcatcagcccgagcctatctgtggctggcctgggtatggcaggtgggcacaccttggctgcaggacaccttggctacaagggagcctggctgaccctgcagggtgagggctggagaggcggagcctgcctggcctagcagtgtggatgccaagccatgggaagatgtgtggagagtttatggagcctggcccggtgtccccaacccagctgctgagctggaagccaggggtaggtcctggcagcccctccctctctgccctgcctctctcggagtcgctcggagcagtcacgttgacggaatcctccggcgcctcctcgagggaggagaggcagggtcttggcaactcccgtctcccccgttgccagcttgccagccccgccgtgcctctcacgcctgtggtctgccccaatgacaggccggcttcggtgtcccaaggggacccagccctgagcgtggggctgcccttgggggagggcaggggaaagccagcccgggctgccaccgtggccgctggcctgggagccccaggaaacgtgcccaccctcagacccgatgcctggctcagggcctgggctccgcggcccctccagggcaggcgtgaaatgtgcccacacagctccaccttccacgtggttccctgtccgggggccacttgcactgaggtccttctggagtcattttctgtttttttttttttttttttgagacagagtcttgctctgttgcccaggctggagtgcagtggtgctatcttggctcactgcaacccctgcctcccgggttcaagtgatttccggctaattttgtatttttagtagagatggggtttcgtcaggttggccaggctggtctcgaactcctgagctcgagtgatccgcccgcctctgcctcccagagtgctgggattacaggcatgagccaccgcgcccggctgggagtcattttctagcgttcctgtcccacctctcaggaacagatttaccacctttgttgtgaagaagcattttttttttttttctgccgccaggctggagtgcagtggcacaatctcaactccggctcactgcaacctccgcctcccgggttcaagcgattctcctgcctcagcctccccagtagctgggattacaggcacccgccaccacgcctggctaatttttgtatttttagtagagacggggtttcgccacgttggtcaggttggtctcgatctcctgaccttgtgatccgcccgcctcggcctcccaaagtgctgggatgacaggcgtgagccaccgcacctggctgaagaagcacttttttttatgaacctctgcaaccccctctgagggaaaccctcccgcattctgggatgccggggctcagagggtggagggtagaagagcgccagccgtgagaggcaggatggggcggcccccgagggcagggctgtgcctggaggcagggctcctcggggggtcagctcctgggcggtgggagtgaccgagtgggctcctgagggaagcggctttcaggaaggaggcggaggcctgggagctcttggggccctggcaaatgtggtcttcagattcccgtcgtccagtgagcccctggatcacgtcctgagtggcgtccactgaaggctgcttgggacctctgctcccccctccactgagacccccagtggccagttctaagtcccacctgccttgggcagggccaccacaggccccttactgtggattaaagggccctgggtgagggcttgtgggaggggaggtggtggaaaccatctccgaagaccttggggcgagctgcgtgctggagtggagagtgtggcccagcaggcaggagcactgggttggaatgggggctctgccacctccgagggagcaggagtggagaccggagggagcgtgcccctgaatccgagcacggggagctggccgggagcagccctccgggcagaggcaggagaaatggggtcacctgccccagggggtgagaggtgagccgagaggaagggctgagaccctcaggggcatccccaggatgttcctgaaactcagccctggaggacgctcaggtgtgcgtggagcaccctctgccctggagcctcaaatcctctccccgctgcggggccactttgctgattcctgccccaaacatgaggtcacttcggtccagaaaggcgaggcgacctccaccagccacctacgggattcttggcagagaatccacgctcaccttcgggtcttcactcctgctccctcggaggtgacggagccccatttcaacccggtgcccctgcctgctgggttttcgccgcaggggacctggtcgtctcctggacatgagcccccagcgccagcgtttctctttgggagaggcctgaatgcgcagtcatgatttgaccaggcgaagtgcccagacaaagagaaaacagtcggccggatgcaggggctcacgcctggaatcccagcactttgggaggccgaggcgggtggatcacctgaggtcaggagttggagaccagcctggccaacacggtgaaaccccgtctctactaaaaatacaaaaattagccgggcgtggtggctcgtgcctgtagccccagctactcgggaggctgaggcaggagaatcgctcgaacccgaaggtggaggttgcagtgagctgagatcgcgccactgcactccagcctgggcgacagagtgcgactccgtctcaaaaaaaaaaaagaaggaaatagttgagctgctctcagtgaccatgtacggcccagtcgtcgacccctggcccagtcgttcgtccgccttttggctccacgatgttttgcagcctgtttctgtctcctgcctgtggcccaccttggggaggccccagtgctcgtgtgcccctggtggtcttcccagcctgacccttcacgagctccctctgtctccctgcttcaggtgatcagacatcccccaagtacctgctcccctgggcccatggaaggcacctgtctgctgggaccagagggtgagcagtcaggtgtcccatccaccaacgtcccaggggccagcccctccaccccggtgctaatctcatcaggaaatagcacagtccacatttcccaggagttataaatagccagcgcagttgcgggcagcagcgtttctctggaaaatgtacgctgtgcctctccctccctcctctgtgtttaaatgatatcctgaaatagacttggtttctggaggctgatagcctcctgggaaacagagcgtcgttgtcagggcaccgtggggccaggcaggcctctctgagcggataccagggccacacctgcagcaggcaccagggccacacctgcagcagataccagggccacacctgcagcaggcaccaggaagatgtcagggcttgaggggcttacagcttaggaaagtgcccctggcccaggcctggcctcagaaggggctggagtgtgtgagacagcagcaagtgtcgcctgggaggctgcagagggtagatcttagtggagcaggaaggcagagaggacccaaagtttcccactgtgacctggggctctccgagaaggctctctggaggaggcggggcgagaactgggccttagcatcaggaggtgcagtcctgggtcagatgtgcccaggttgaacctggcagctggagcggaagtgatgggcacgaggcagcgggagggctgtactgggggtggcctcccagcaccaggtctgcccaccgggtcgggacacacaccaggaggcccgatgttgcctttctgaggaagcagcagttacagcagctgcgggtcatggacttcacacattctgcagtttcagcagagagggtgctgggggccttgattttgaaccccagctctgacttcctaggtgtgcactgggtaaattcctcactctcgttaagctgcagcatcctcatctgtgagatgggagcggctatgagagcttaaaccgcatatgtctgctatcatgatcatgaacgcagatgctgtgtgtagaggattcatcagtgtcagacttgcaggaagagctcgagataagtccgttgctctcactcttccataacagccctgtgagtcaggtgtggatgcctccatgaggaaattgaagttcacggaggtgaaaggccttgcccgagtgcgcacggttgaatgggagactcagatcagcctgcctccaaatcctgcacactccccccgaccaggttgtgtccaggtccccctgagacttgggaagggaccattggctcagcttcctgcagaagctgccaggaggcacccagtcgtgggaagctggggcggaggaggggctgtgggtgaatcggaccaggggccatggaattggcctgaggcttatgctgatgtgtggagagacctgcctcaagaaggggtggtctcaaaacatcgaactgcgccccataaatacatacaactgcaatgtgtcaattaaaaaataagggcccgggccaggcgtggtggctcacgcccgtaatcccagcactttgggaggccgaggtgggcgaatcacgaggtcaggagatcaagaccatcctggctaacacggtgaaaccccgtctctactaaaaatacaaaaaattagccgggggtggtggcgggcgcctgtagtcccagctactcaggaggctgaggcaggagaatggcgtgaacccgggaggcggagcttgcagtgagccaggatcgcgccacagcactccagcctgggcgacagagcaagactccgtctcaaaaataaataaataaataaaaaataagggcccacacagtggtacatgcctgtaatgccagctcttcaggaggctgaggcaggaggatcactgaagcccagggcaacatagcagcctggacggcacagtgagaccctgtctctagaaaaataaatacaggccgagtgcggtggctcacgcctgtcatcccagcactttgggaggccaaggtgggcggaccacctgaggtctggagttcaagaccagcctgggcaacatggtgaaaccccatctctactaaaaataaaaaaattggccaggcatggtggctcacacttgtaatcccagcactttgggaggccaaggtgggtgggtcatttgaggtcaggagttcgagaccagcctggccaacatggtgaaaccctgtctctactaaaaatacaaaaattagccgggtgtgatggtgcgcacctgtagtcccagctaattgggaggctgaggcagaagaatcggttgaacctgggagacgggttgcagtcagccgagatcacaccactgcactccagcctgggcaacaagagtgaaactctgtctcaaaaaaaaaaaaaaaaaaaaaagagggcatggccgctccagaatgtttcttccaagggtagcatctcagttgacaaagagcatttgattcctccaccctgtgtggctactgctgggggacagagctggggacagacccaggcccggctccgtgtccagacgagatgaaggaactacgagggacagcctgtgtgatccaggagggtttgcaaagaacagaagcagcttagaggggagagaggtttcgggaaagtaaggccagagctggggcttcctttgagaccctgtaggacccctgcctccagccgggctggtgatggcctcacgcttcccgtgtgtgaagaggtgcccggagcagtggttctccctgaggggcacttggttctctgcacacacccaacttctgtctcctgttctgggttccatcccttctctgggcagggcgaacccagtgcagacccagaccccgtcggaggcttgggtaccacctgcccccagccggtgtgtgggtgatagatgtgggaaggacctacatcgagctgcaggaagcccaaggctgacccagatccagtttcccttccgtgatgacagtggcctgttatagcaactgcgttcaaaccgtggcacgcacacctcagagtgcacagagacgttctgagggcgacgtgggcaggagagttttcaggaaatcagtttgcagattctcagctgccataggtgctattgccagaaagccatctgcctgagagccagcatctcgccatcctgtcctctgcagaggagaggcctgaggctggctgtcggggcttggcccggggtgcgcagacctcctgggtggggaacagaggggcttttagaaatgttggggtaggggccaggcatggtgggtcacacctgtaatcccagcactttgggaggccgaggcaggtggatcgcctgaggtcaggagctcgagaccagcctggccaacatggtgaaaccccatctccactacaaataaaaaattagctgggcgtggtggcaggcacctgtaatcccagctactcgggaggctgaggcaggagaatcacttgaacccgggaggtggagcttgcagtgagccgagactgcaccactgcactccagcctgggcgacagagcgagactccgtctcaaaaaaaaaaaaaaaaagaaacgttggggtcagtgttcagaaagtaaaagactctagtggccacttagaacctttcaaaagtcaggtggtatccagttctttgccttccacaaaactgatggaggactcaattttcaactgagagatcatttcaagtaattttcagtaataggtatatatgcgatttaaggcggatagcatggagagaggttaaagaatggtgtaacgcggctgtgataaaactcttttcgacctcatctacttctttatgtgaacaaaatgtttcattgttcacatatttcttgttcattttagagacatggtcctacattgcccaggctggtctcgaactcctgggctcaagtggtcctgtggctgggagccacagcacctgcacatctttacaacaaaaccagaaacatgaaccaaattgatgctgagcctcgtttcactctagcaaaaaataataccctatagatacgcgaactaaagcaaaaaatgttccgcccatctcattgagagagcattccaccaaaaagttactctgctacttaatatttattaaaatgtataatgaggccaggcgcggtggctcacgcctgtaatcccagcactttgggagaccgaggcgggtggatcacctgaggtcgggagttcgagatcagcctgaccaacatggagaaaccccatctctactaaaaatacaaaaaattagccgggtgtggttgtgtgtgtctgtaattccagctactcgggaggctgaggcaggagaatcgcttgaacccaggaggcggaggttgctgtgagccaagatcgcaccattgcactccggcctggacaataagagcgaaactctgtctcaaaaaaataaataaaatgtatataatgtgtcggcttactttttttttttttttcttgagacagggtctcactctgtcgccaggctggagtgcagtggtgtgatcttggctcaatgcaacctccacctcctgggttcaagcgattcttccatctcagcctcccaagtagtagcttggactacagtgcccgccaccacacccggctcacttttgtatttttagtagagacagggttttgtcatgttggccaggctggtctcgaattcctgacctcaggtgatccaccagcctcagcctcccaaagtgctgggattacaggcgtgagccaccgtgcctggctgtctttttaattatgtactgccaatcatggtactaactaatcctgaatatattttgaatatttggagccttgtggtctctggaaatttttgttttcaatgtatacagattttttttgtggaagcaaaatgtaatggtgaataaaggacttgaaaatataaaaatataaactaggacaacattctttaggagaaatggaatagaaacaaattcaaggagagaagatccaggagctctgtgagggaaagaagagcttgtttgtgtagttttttgttgttgttgttttttttgagacggagtctcactctgtcgcccaggctggagtgcagtggtgtgatctccgctcactgcaacctccacctactgggttcatgccattctcctgcctcagcctccccagcagctgggactacaggcgcccaccaccgcgcccggctaattttttgtatttttttttttttagtagagacggggtttcaccgtgttagccaggatggtctcgatctcctgacctcgtgatccgcctccctcggcctcccaaagtgctgggattacaggcatgagccaccgtgcctggcctgttttcttaatattgaattttgagagttttatataataagccctgaaattgggtaatattagccctatagctgtgttctttttcaacattgtttagatgttttttctttttttttgagacggagtctcgctctgtcgcccaggctggagtgcagtggcgcgatctcggctcactgcaagctctgcctcccgggttcacgctattctcctgcctcagcctcccaagtagctgggactacaggcgcccgccaccacgcccggctaattttttgtatttttagtagagacggggtttcaccgtgttagccaggatggtctcgatctcctgagctcgtgatctgcctgccttggcctctcaaagtgctgggattacaggcgtgagccgccacgcctggcctcgtgtagtttttaaatggatgagtgtgggtatcacgtcgctggggtatttagatcccactgaatccatgagaaggaatgatgtcacacttttattttaggatggcaatattgacatgattttggaaatcatactctttgcaactatttaaacttggaaatgttcagattttgacttcagaaagtgccagggagcgcacagttgctcagaattagttcgcaggtgcacaggcagacgggcgcgaaggcccccgagttacagaaacagaacgtggaacagtcctgtgtgagggttgcctctgacctcccctggggtccgcacctccctgggctccagcccgagcctggggacttcccctgtggaggatttgcttatttgggagccaatggcttgacccaagttttctccctgaatcttcccagcaatcccagggaggcaggttctgttgcagatggaataactgaggcttagtgagtttaaaacttgccaggattcaaacccaggcagcctcctgtgcgcgggctcctgactcttcaacacctccacgtggatgggctggttccctcctgatggacttgagcgcctcctaatcaggtgcttaccttttgtgagcctcagtttctgcatctgtgaaatggggtaataatacccatgtcccgggctggcagccaggagtgcctaacagggtgtgccctgcctcccccacggtgggtaacagagtgtgccctgcctcccccacggcgggtaacagggtgtgccctgcctcccccacggcgggtaacagggtgtgccctgcctcccccacggcggccacaggggcctgggggctagggtccccccaaagggttgatttccaggtaaacatcagcttatcccagctgctcacttccgccttcctgactgtgtagctggctctgagcagtgctgacccacggggagatctctggcttggcctccgagctggcacctctctcacccacattctctctctgcagctggacccacaaaccgtggagaccaagaactggcacacggacgtgattgagatgaacggggtgagccggggatgggaatgatcagtggcgtgagccgggaggtggaacgtctgtgcagcaggtgggcagcccggccctgtggctgctcctggggccgctgtgccgcctcgacctccccgcagcccagccccctctcccctcctgcccacaccctgcccgctgctgtcctgcaggtgttgtgttgagggagacctgggtgtgagctagccctcatttgcagtcttggggaggggacccctgtgttttgggggcattcctcgggcactcacaccctggggaatctttacctgcctcaccccccaaccagatcaaagtggaattttccatgaaattcaccagccgagatatgagcctgaagaggaccccgtccaaaaagcagaccggcgtcttcggtgtgaagatcagcgtggtgacgaagtaggtgctgcctcgggtctcccagtcctggcgtcggtgccccgggtcccccccagcccgggccccccagccctccccgccggtgcccatcctggcacctaatcagttaccccccgctcggcggtggcagatggccggtgtggatctagagtggccgcagaggcgctcacaggacacttcagaagcacgcgagccagcacctaaacgctggaaggtctcttgtgagatcccagatcgtctgctcctcgtaacaagcgggaagctctgtcagccgggggcctacgtttgggctcggcaccaacggggactggcggcccctcgggaaagggcacgtgtcccccggttcaccaccaccctggccccttgtctcaggcctgacccacctcctcatgtgggctgcctgctgggcctcctacaagcatctgaatctgggggacgttctttccctagagtctcggccttaccttcccaagttcccaaggcttctcctgcccacgtccgtcgatgccccttcggcaggcctcgggtgggctggctggggtggggtgcggtggcctctttctctgccctgcccctgcccccgccccagctctccatcccaaatgctagaagctctccagggtgtgtgtgtgctgggtgggggttgctacgggagagctgtcgtgggggctgccctccacccatcctcacgctccaccccaggcgggagcgctccaaggtgccctacatcgtccggcagtgtgtggaggaggtggagaagaggggtatcgaggaggttggcatctacaggatatcgggcgtggccacggacatccaggcgctcaaggccgtcttcgatgccagtgagtctgggaggcccagccggggcaggtgtggctgtgtctgagcaggctggtgggatggacaggagagctcgggggaaccaggagcctccctggagaggaggcttgctctgcttcagagtccccgtggcaagtgctttctcttgtaatcccctcccctccaatctcttgtcccttgctgcaggtaagcaactgcagaaactcacaagggccgactcacttgcccaggatgacccaacttgtaggttttggttctggacttaaaactca

SEQ ID NO: 10476 - DNA, 617 bp, Homo sapiens
aactagcgggactggcagccgggactgagcgctccacaggcgccttctctccagcgccgcgtcccgtcccccccggcatgaccgacgtcctgccccagcccgactgcagcccgaaggcggggcgcgaacccctggcgctggaggagtcggggagcaagcgcccccccaacaccggcgcccggctctggggccgcgtgcgcaacaagctgctccgaaacaagctggacccacaaaccgtggagaccaagaactggcacacggacgtgattgagatgaacgggatcaaagtggaattttccatgaaattcaccagccgagatatgagcctgaagaggaccccgtccaaaaagcagaccggcgtcttcggtgtgaagatcagcgtggtgacgaagcgggagcgctccaaggtgccctacatcgtccggcagtgtgtggaggaggtggagaagaggggtatcgaggaggttggcatctacaggatatcgggcgtggccacggacatccaggcgctcaaggccgtcttcgatgccagtaagcaactgcagaaactcacaagggccgactcacttgcccaggatgacccaacttgtaggttttggttctggacttaaaactca

SEQ ID NO: 10477 - DNA, 2445 bp, Homo sapiens
atcagacgtgtgtgtgtccctgcggcgctaagaaggggagactgaggctgaggctggggaacatcgggcagcatgagcggctgcgggctcttcctgcgcaccacggctgcggctcgtgcctgccggggtctggtggtctctaccgcgaaccggcggctactgcgcaccagcccgcctgtacgagctttcgccaaagagcttttcctaggcaaaatcaagaagaaagaagttttcccatttccagaagttagccaagatgaacttaatgaaatcaatcagttcttgggacccgtggaaaaattcttcactgaagaggtggactcccgaaaaattgaccaggaagggaaaatcccagatgaaactttggagaaattgaagagcctagggctttttgggctgcaagtcccagaagaatatggtggcctgggcttctccaacaccatgtactcaagactaggggagatcatcagcatggatgggtccatcactgtgaccctggcagcgcaccaggctattggcctcaaggggatcatcttggctggcactgaggagcagaaagccaaatacttgcctaaactggcgtccggggagcacattgcagccttctgcctcacggagccagccagtgggagcgatgcagcctcaatccggagcagagccacactaagtgaagacaagaagcactacatcctcaatggctccaaggtctggattactaatggaggactggccaatatttttactgtgtttgcaaagactgaggtcgttgattctgatggatcagtgaaagacaaaatcacagcattcatagtagaaagagactttggtggagtcactaatgggaaacccgaagataaattaggcattcggggctccaacacttgtgaagtccattttgaaaacaccaagatacctgtggaaaacatccttggagaggtcggagatgggtttaaggtggccatgaacatcctcaacagcggccggttcagcatgggcagcgtcgtggctgggctgctcaagagattgattgaaatgactgctgagtacgcctgcacaaggaaacagtttaacaagaggctcagtgaatttggattgattcaggagaaatttgcactgatggctcagaaggcttacgtcatggagagtatgacctacctcacagcagggatgctggaccaacctggctttcccgactgctccatcgaggcagccatggtgaaggtgttcagctccgaggccgcctggcagtgtgtgagtgaggcgctgcagatcctcgggggcttgggctacacaagggactatccgtacgagcgcatactgcgtgacacccgcatcctcctcatcttcgagggaaccaatgagattctccggatgtacatcgccctgacgggtctgcagcatgccggccgcatcctgactaccaggatccatgagcttaaacaggccaaagtgagcacagtcatggataccgttggccggaggcttcgggactccctgggccgaactgtggacctggggctgacaggcaaccatggagttgtgcaccccagtcttgcggacagtgccaacaagtttgaggagaacacctactgcttcggccggaccgtggagacactgctgctccgctttggcaagaccatcatggaggagcagctggtactgaagcgggtggccaacatcctcatcaacctgtatggcatgacggccgtgctgtcgcgggccagccgctccatccgcattgggctccgcaaccacgaccacgaggttctcttggccaacaccttctgcgtggaagcttacttgcagaatctcttcagcctctctcagctggacaagtatgctccagaaaacctagatgagcagattaagaaagtgtcccagcagatccttgagaagcgagcctatatctgtgcccaccctctggacaggacatgctgaggcaggggacagtgtcccctgctaccgcccgcccctacccatggcccgttgctggatgactgttactcttttttcagaaggtgttgggattatcacaggttaagccttttgttccccgtctgcacctgaagggttgtcgcctggcctgggagagcctcttccaggttttgacctgcaggcagtgctctctaacaggaccatcacagcttctgaactgagccggagagagagaatggaattgctgacccctggaactggcgggtattctggtcattgaggagacaccatagtggaaactggggcttatgctgctgcctccagggtgtgaggtgggtggggacctgtgtcaggtgtggatagccatttctgctcaaccacacattctctaagaaacagcttgaaagctctgtctgggtcattcatttaaactagaagcagaggcacttaaaacatgtaccaggaaccatttaacaaagaatataaaatgtcacaatctgtgtactgtta

SEQ ID NO: 10478 - DNA, 29002 bp, Homo sapiens
agacgtgtgtgtgtccctgcggcgctaagaaggggagactgaggctgaggctggggaacatcgggcagcatgagcggctgcgggctcttcctgcgcaccacggctgcggctcgtgcctgccggggtctggtggtctctaccgcgaaccggcggctactgcgcaccagcccgcctgtacgagctttcgccaaagagcttttcctaggcaaaatcaagaaggtaacgcgagccctgggcgaacccttgctgtctggctcccgcttttcaccctcagctgcaagactggtgttgaactttgtgagattccccaaacctgccagagagatacaccctgcggccgaggcgtgttaacactccggattcctgagttccaggaaaaccttcccagagaaagggtgagacatttccaagacgggggacccttggaaatgtggtggtgacgtgttccagctaaattttgtcaggggaattcggaaaactctaggctaggtaattaacaaagcagccttcatctcagctggtctggtctggaaatgtgcggggcttcctctctgattcctaaacagcttacaccatgtccctcctcagtcaccttccagcgccctggggcttccttccccaggtgagcccagcgcctctccctgccattgaggttcctcagaaatctggctccaagatgcttcccaagggtggcacaacccagccaatagtaacagtttggttataaaacactcattgtcttcttagagttggaagacttgggtttggtcttggctcgttgactttgaaactcagttgttttttttgagacagagtcgcgctcttgtcgcccaggctggagtgctcactgcaacctccctcctgggttcaagcgattctcctgcctcagcctccggagtagctgggattacaggcgcctgcccggctttttttttttttgtatttttagcagagacggggtttcaccatgttggccaagctggtctagaactgacctcgggtgatccgcccacctcggcctcccacagtgctgggattacaggggtgagccaccgcgcccggccaagactcagttctttcagccttaaaatggagatagtgttgtgtctccttcacagatgtgttgtagagccccagtgagataaacggtgcatggagagtcttcttaaactgtagagtactgtgcagcagaagagagagctggcttcaacacttagtcttgtgaccttggagctgacggctgcacctccctgtgcctcagtgcattcatctacaaaataggaataaacacatttcttgctctttcctttgtatttcattttatcttctaaggaaaccaacagtatacttgctatttcgtcgaggtgccctactttgaacttggctgaatgttggctgatcctgtatcacagaagttattccctggcttctctttggaacgttcctctgaggttgtcaggctgatacctttatagcaagcaactttacagatgaagaagctaagactcagactaaaagcagtttgcccagctagaaagtgcggagctatgtcttgaacatattggaaaaccttttacccaggacctggggcagtgtggtgctctatcctgggacttcctgctatccagcagcatggtgaagaaagaacacagatctttcagatctgtttccatctttaaacctctggcactacctgccctgccctgcctttactctcagctgtcagctttgcttcccattccactgggaaaatccatgcagtcggatgagaagttcacaggcacagttaccccctcccgctgcatatgtgccggtattatctacattctgttactgtgaactgtctgctcctggcaaaaccaacctctcattagactccaggtcttctcacctactcaagggtaattctttcctttctctgcatcattaactgttctctctactggatcttgagcccttaccattcaggcatttgtccctaatggccatagaagtcagtaatgacctctctgttatcaaattgtgtgatctgttctcagacctcatcctacttgacccatcattggcatctgacaccgttcatccttccaccctgttgacgcactttcgtctctggtttctgaatcactgttctcgccattctctgaatgttctaaatacttcactggctgatacttctctgtgtccattgctggttcttattcagctccttgaccgctaaacagtgaccagtgtttccaactagccaagttggaatttactaaggctgggtctcgtttcatctacagccatctgctgggtgaccttatttagtgtcctggctttaaatatcatcaatatcctgatgcctcaagtttctttcttcagttcagatttctccctgaactccagattccttttgctttttcagagttgggggctttctctgtcacctgtgctggagtgcagtggtgccatcatagctcactgcaaccttgaactcctaaggctcaatagatcctcccacttcagcatccccagtagctgggactacaggcacgccctgccacacccagccaagattctttttttaatctacctttgtactcaaaagctgtactaagaggtctaacaggcatttgagattaatagatcccaaactgagttcctggttcccacccaatcctgctccttccaccagccttctttatcatagataatggtggctctgttgttccacctgttcaaacagaacacctggagtcaccttgtactcttattctcctagtccacttctaattccacagaagatctggttttctctacttttaggttcttagaatctgaccacttttaggcccttctgctgctactttggatcaggccagtgtcatctctcacagccttactgggattagagcagaaacatgggacatgatgcttagaatctcagattgtgtaggccagtggttgtcaccctgccctaagctggacccaagctattcatggagtgtcctggaactgctgcagggatgggtgggaagttgagtgggtgggatttgggtgcctgttttccctatcagcagtctcagtcagagccgcctgcttctgtctgttttacatatttggtttctgcactagatttctttgaataacaggttccacttttttagataatttacaaactgtttattgcaattgaactctcctcccctaaggcattgacctgatttgataacatcaggatctttctcccacgcccctgcaatctctcctgtgtggcaggttttctgtggttgtacctgaaggccaattagttgccaggcagtcttatctggcctgcccactggtaccagaatgatctctaacacagcccattgcacaagacccaagtgtcagtgagcctctgtgttcagtgaaggagactgagctttgatataaaaggctgcagagtgatggagccatcagcttgtttttttttttttttcttgttttttttttccttgagacagtgtcttactctgttgcccaccctggagtgcagtggtgcaatcacagctcactgcagcctcaacctccccaggctcaggggatcctcccacctcagcctcctgagtagctggaactacaggcgtgtgcaaccacgcccaggctggttttgaactcctgggctttaagcaatccccctgcgtcagcttcccaaaggactaggattacaggcagtagccactgcaaccagctaagcttgtttttttctttttcttttcttttttttttatggagtctcactctgtcacctaggctggagtgcaatggcgcaatctcggctcactgcaacctccacctcccgggttcaagcaattctcctgcctcagcctcctgagtagctgggattacaggcgcgtgctaccaagcccgtgtaatttttgtatttttagtagaaacggggtttcaccatgttggtcaggctggtctcaaactcctgacctcgtgatccgcccgcctcggcctcccaaagtgctgggattacaggcgtgagccaccgtgcctggcctccaacctttttttttttctataccaccttcagggtggttttggaatggatggaggcagggattcctttaagttggctgtcacttttagttagggactcacctataagcctgtggtcctgggcccagagaggagaaagcagtgcgagcatattgatagagtagagaaatctgttggctgattagctgtacaaggtctgaggagaaggttgaggtctccccaagacttctctagaacacttggtgagaggcgccatgaggacaggtgatgcttgggcttatagctctgactcaggacatcactgctcaacagcctgaagcccacatccaaagctcatgtcatgctggcaattgaaggggtagcagagcccaaaagtccagaggggctcagcacagggagcagatgtctgtgagcaggagagacagcggctgtagggatcgatgagacttggtaagcatgatgtgctcttgtcagcatagcatctttgagctcacacaataattgatgtagaattgtccatttcagtaaggagtttccacatccactatcttccacgattctcacaagggccttgagtaaatattacctgcatgttatgggtgagaaaggggtagtttagagagctgaagggatttggtgaaggccacataatgagtaagcctgaaatcaaggaccagacccccaggcttctaaatgttagtcttgggctccttgtttcatgggactattatcatcccttgtactgagaaggaaaactgatgaaaatcgggaagaacctatttgaacaggggagggagatggatgtgggtggtggagcctgcacatagtttctgtatctcaggaaccttgtgaggtttgctttccagttccttcagtacgtcatgtcccgctggccagggtggagtggagcacatgtttttccttcccttttaactgatatttccgtgatgggagtgtgctaaaaattaaattttttagaaaatatttactatttttagaaagaagttttcccatttccagaagttagccaagatgaacttaatgaaatcaatcagttcttgggacccgtggaaaaattcttcactgaagagggtatgtatggttttctttaccattgccgatttccattgtaagggctatttggttgatatttatattagaagtgacatacataggagaagtcttcttgagggagaaatggtttccactcataatattttgctttaggtttcatccctattgccatttaattaaaaaacatccagttaaatgcttctcattgtatttgtggttcaggagcactttaaacatttccatactgttccaggtcaacacttccataaagctataataaaaatgaataactaaaaaaattagatggcaaaaagccaaggccacacaccatacaagcccatggagcatgtgttggttgttgtggcagtgtacagttgctcttagtgtttctaaaggttgagtttcaatttctgtactttggtaattgtaaacaaagagtgatttgtggaccagccacagtttggcacctgcatggtgaggcagcatttgacctcaggtccctctctcagagctgttggccggtcctccagccagggccttggtggagagttcagtgatggtggatggacagcaggtcttccctaatagtaggatcctggagagcttttgtttatatgaattttatctatcaatatttgccatcttaggggttattttatttttattttactttatttttttgagaaagggcctagctctgttgctcagactggagtgtggtggtaccatctcatctcaccaccacctccatctttcaggctcaaacagtcccccaacttcagcctcctgagttgctggaactacaggtgcgcacccccatgcccagctaatttttttgtatttttcatagagacaggttctcactatattgcccaggctggtctctactcctaggctcaagtgatcctcccaccttggcctcccaaagggctgggattacaggtgtgagccaccatgcctagcccctcttagaaattaaaactgagaaatttaaaatatactgtggggctgggtgcagtggctcacgcctgtaatcccagcactttgggaggccaacggggacagatcacctgaggtctggagttcaagaccagcgtagccaacatggtgaaaccctgtctctactaaaaatacaaaaattggccgggcatggtggcgggtgcctgtaatcccggctattcaggaggctgaagcaggcgaattgcttgaacccaggaggcagagattgtagtgagccaacattgcaccactgcactccagcctgggtgacagagtgtgactttgtctaaaaaaaaaaaataaaatatactgtgttcatttgtttaaaaataataaatccattacatgttaacataatatttttaatgaaaaatattttgtttttgtttttccgagacagagtctcactctgtcacccaggctggagtgcagtggtgcaatctcgactcactgcaacctctacctcccaggttcaagtgattctcctgcctcagcctcccaagtatctgggactgcaggcatgcaccaccacgcccgggtaatttttgtatttttagtagagatggggtttcactatgttggccaggttggtcttgaactcctgacctcatgatctgccttcctcagcctccccaagtgctgggattacaggcgtgagccaccgcgccagctaatgaaaaatattttgaaaaataatcaggccaggcgcggtggctcacacctgtaatcccagcacttacggagactgaggtgggtggatcacctgaggtcgggagttcgataccagcctgaccaacatggagaaacctcatctctactaaaaatacaaaattagctgggcgtggtggtacatgcctgtaatcccagctactcaggaggctgaggcaggagaatcgctggaacctgggaggcggaggttgcggtgagccgagatcgcgccactgcactccagcatgggcaataagagtgaaactctgtctcaaaaagaaaaaaaaaagaaaagtaagttaaaaaaaaaaaaagaaaaaaattgatggaaagagtgacattggttgaaagttatgcaagtccttttaatgtttggcttattagaagacagctggattctcatacctgtttgtgcacgtaacctctggaaaagtccactgtgcagtctttttttttttttaactgtctttttttataatcttcagacatgctttttgtttgtttgtttctgagacagtcttgctcttgctttgtcacccaggctggagtgcagtggtacgacctcagctcactgcaacctctgcagttgaagtgattctcatgcctcagcttcctgagtagctggaattatagcacgcaccgccacgcctggctaatttttgtattttcagtagagatggggtttcaccatgttggccaggctggtcttgaactcctgacctcaaatgatctgcctgtaatccaaagtgctgggattacaggtgtcagccaccgcacctgtcctgacacgtgcatttaaagcaagaaacacacacttccaggacatagggctctgtcagcaataactgtcatctttgtatttgcagagatgtaaatatataagaaaccggctgggcacggtggctcacactggtaatcttagcactgtggaagactgaggggggcagattgcttgagtcccagagtttgagaccagcctaggcaatggagcgaaaccctgtctctactaaaaatttaaaatattagccgggcatggtggtgcgcgcccatagtcccagctacttgggagtctgaggtgggagaaggtacccaagcctgggaagtcaaggctgtagtcagctgtgttcatgccattgagctccagcctgggcgacaggagtgagaccctgtctcaaaaaaaaataaaaataaaaataaaaaaataaataaatatatatatatatatatatatatgcaagaaaccactgcaaaccaaacccactccctctcacaggaacaaaggtctcttggaataaatagcaaatgctggaataaaaactatgttcattcagctgccatgatgtgaattcaaaaaggaagttaaatccaagggcaaagcagagaaaagaacatacaaaaatacacctatttcatgtacattcaaagaggaggctaatcactgtggacaaagggccctctggaatgacagctgtaggcagccagcagtgccacggaaatagaggcactgtcatctggagacacagaaaaatcacatcctcccacaactggcctctatgaaaaccaaccaggacagacaacccttccccaaaagtaatggccaagaataaaagcacaaatattgctggaaatccaagtagcctgttttactgctttgagtgacttatatgcaaacctaagacttttttctgaatccttgatcaagatttattcatataaaggccgtacataaattctgggaacatggtactttggactatatattggactctgagccaaaacgttaaatacactacactgcgccccactgtacagtcttcagagaattagaatttaaaagcaagtaacatcttaagtagttttaggccaggtatggtggctcatgcctgcaatcccagcgctttgggaggccgacgtgggtggatcacttgaggtcaggagtttgagaccagcctggccaacatagtgaaaccctgtctctactaaaaatataaaaattaaccaggtgtgttggtgcccacctgtaatcccagctactggggaggccgaggcaggagaatcactggaacccgggaggtggaggttgtattgagctgggatggcgccactgcacttcagcctgggtgacagagtgagactccatctcaaaaaaaaataaaaactagttttgatcctgtgggaccccctagaagcagctcaggtcccccagaacctctttgagaagtgccaaattgtcagctgtcattacattgcttggtttttgtttgtttcttatttcacacctggtgatcacaaattatatgttgctagttttaaaagttgcttatttatatataaacataatttataatttagaaatacttatttctgctttttttcctagtgtttatcttcctatttgtatctttttttagctcccatagtctcttgttcttttatttaaacttttcctatgtggtttgtcaggtttttttttttttcaggtttaattaaggaataattgatttacaataaattgcacacactgtcatgtgacacataatgacattcaagtcaatgacagaccatatatacagtggtgatcccataagatcatcataccatatttctactgtatcttttctatgtttagctgtgttcatatacacaaatacttaccattgtgttacagttgcctacagtgttcagcacagtaatatgctgtacagcttttttgttttgttttgttttccttaaaaaaaaaaaaacaaaaaatatttaacagtgagatggggtttcactgtgttgcccaggctggtttccaactcctgggctcaagtgatcctcccgcctcagccttccaaagtgctgggattataggcatgagacaccacgcccggcctactgtacaggtttgcagcctaggagcaataagccataccatatagcctaggtgtgtagtaggctctgccacctaggttgtgtaagtccattctgatgttcatacagggagagaatcacctgacgcatgactgtatttagagagtacccctcaggagccatcagtgcaacagaggaagtgaacgtactcattacccgtcaaagtttccttgtgcctcttttatttcccccctgtttccaggcaactgctgatctgttttctctcactatagattagttcgtattttttggaattatattatgtgtgattttgtctggcttctttctgcataattttgaatttcatccatggtgcatgtattggtagtggcttcctttttaatgctgagtcatatttctttctatggatataccaagatttgtttatccattcaagtattcatcaacatagggtatgtatccagattttagctatcaccaaaaaagttgccataaacattccttttttcctctttttctttttttaagagacagggtctttctttgttgcctgggctggagtgcagtggtgtgatcatagctcactgcaacccttgaacttctgggctcaagccatcctctgcctcagcctcccgcatagctaagactacaggcacacgctaccatgcccagctaataattcttaaagttttttgtagaaatgggttctcactatgttattcaggctggtctcagactcctgggctcaggtgatcttcctacctcagcctcttaaagtgttgggattacaggtatgaaccactgcgcctggcctgtatttcctttttttttgagatgccatctcgactcactgcaacctccatctcccaggttcaagcgattctgcctcagcctcccgagtagctgagattataggtgcgtgccaccacatctggctaatttttggtattttgagtagagaaggggcttcaccatgttggccaggccaatctcgaactcctgacctcaggtgatctgcccgactcggcctcccatagtgctcggattacaggtgagagccacctcgcccagcctggcctgtattttattttagaaactttatagttttggctgggcgcagtggctcatgcctgtaatcccagcactttgggcggccgagatgggcggatcatgaggtcaggagatcgacaccatcctggctaacatggtgaaaccccgtctctactaaaaatacaaaaaattagccgggcgtggtggcaggtgcctgtagtcccagctactcgggaggctgaggcaggagaatggcgtgaacccgggaggcggagcttgcagtgagccaagatcgcaccactgcactccagcctgggcgacagaacaagactccatctcaaaagaaactgtatagttttaattcaggtttagaactatgattcattacaagttaatttgcatttctttatcaattttacaattttcaatgtctgcaaaaaggcctacaattcttaaatggttggtttatcttttagagcaattttttttttttttttgagacgaagtctcactgtgtcacccaggctgaagtgcagtggcgctatcttggcccactacaacctctgcctcccaggttcaagcgattctcctgcctcagcctcctgagtagctgggactataggtgcgcatcactatgcccggctaatttttatatttttttagtagagacagggtttcactatattggccaggctggtctcgaactcctgaccttgtgatccacccgcctcggcctaaagtgctgggattataggcttgagccaccgtgcccggccagcaatttttaaaataggaaaaaaggatcttgtagttacccatgtagttactgattccagggctcttcattctctcatgtagagtcagattcccttttgctaccattgctcttctgtgggaaggacttcctttcacttttcatgatgtgcagctctgcaggggatgcatattctcacttttgtatgtctagaaaagtttcagccaggcatggtggctcatgcccgtaatgccagcatttagggaagccgaggctgtcagatcacctgaggtcaggagttcgagaccagtctggccaacagggtgaaaccccgtctctaccaaaaatacaaaaattagccagatatggtggtgtgcacctgtaatcccagctacttgggaggctgaggcaggagaaccacttgaacccggcaggcagaggttgcagtgagctgagatcacatcactgtactccagcttgggcgacagagcgagactccatctcgaaaagaaaaagaaaaagaaaagtctgtttcatcagaacaggtttctgtgttgacaggatttacctttcaggccattaattgtgttgctctgctctcttcctgacttcatattgcttcagaagagatgtctgcttccattctttgttcctttgtacatagtgtttttttcatctctggctgcttttcagtggtttttaggaaaattgattatcacatttatttatgtagttttttgcacatttattttgcttggagttgtttgaacttcttggctctgtgtgtttatactgtttattgaatttggataaacagttgtacacccatacagtgaatactgaacaacaaaaagtaatgaagtatttatacacgcaacaacacgggtgaatctgtaaatcatgacctgagttaaagaagcccgggaaaataggtgccatatggattcatttatataaaacttgaagatgcaaactgatctacagacaaagatttgtggttgcctggggatggtggacagatggatcgatcacaaaggggcatagagacttttggtgaaaaaggaaatgtttttatctcgattgtcatgttttcactgacaaatatgtcagaactcaacaaattatatattataaatatgtgcaggttattcttcgccaattatgtatgtcaataaagttgttaaaggataaaaaatgaagggtttggcctgcacttttgggaatctgtagttctcttagtgacccatgtatacaaaaattcttaagtgtaggttatggtgtttttaacaatttataatactgatgaagtttaattagcaattcagaagtacactttaattaatttgatgcatacaaaagtgtgcaattataggtctaatgctatgctattgattgttcagttttgctgtagtgaatgtgaatttttattttagagatgagatctcactctgtcgctcaggctggagtgcagtggtgccatcagagcttactcaacctcccaggtcaagtgatccttccacctgagcctcccaagtagctgagactacaggctgaatgtgaatgttgaatgaatgaatgaattggtgttaaacaggctaaactgtctcagaacttgtggattgtgctgaaagcagtatggcctctggcagtgaagtaaaccttggcccagatactgccatgaggtggctatctagctgaacattttagtacaattctgagacttgcatatttattctctcatttcctagaaaataccggccaaaaaaagtatgaggtctataaggaggaggaaaaacatgaagtttaacatgcctatagaaaaatttacatcccatgaatgtatataatttgctgctgttttacacagcaaaagcacccctgtgactagcacccagatcaagaaatagaacaccacctagctctggcagcttttaacaattttattctggccgggcgtggtggctcacacctatgatcccagtactttgcgaggctgtggtgggaagattgcttgcgttcaggagttcaagaccagcctgggtaacatagcaagacctcgtctctactgaaaaaaaaaaaaaaaattagctgggtgtggtggtatatacctgtagtcccagcttctcatgaagctgaggcaggaggctcacttgagcctgggagattaaggttacgtgagctatgattgtgccactgcactccagcctggatatcagagtgagaccttgtctctaaataaatatataaaaataaaatttttcctgggctcattacataaaattgaacacaggccaaatgaccatgactacagaatttctagttttgaaaaagtttctactctgggattatatatgattaatatataaacactgtcctgtttacttatatttgtagaaacatagcttatatttgtttaatcaagattttcctcttggcagtggactcccgaaaaattgaccaggaagggaaaatcccagatgaaactttggagaaattgaagagcctagggctttttgggctgcaagtcccagaagaatatggtaagtcaagcaaacaagcacccagccagtttagctcttaagaaagcactctgtatttgtccataacaggtctagttgctggaatagatgacaccatccgtggtgggctacttggtaggggtggactgactgaaggacctgtagggaggaagtgttctcgggtcctgtgcttctcatcctagcacagaggaatgaggcatgtggtctggctggctgtagagtgcaaggcacatcgaggtgggagattggaccagtgggaacctttgagcagggtcctttgtcctatggactgtccctgtaattctttgagcatcctagtgatgtttttagcccccaagtggcggttctgccttattagagttggccagtcactacaacttgcctcccttacgctttttctcgagttggtcacctgaattctgcagaggttaaagggacaggcaagcagtgtgtagaaggcaaggtagaccttcaaggttcaaagggatagaccacacacatgtgtgccatttgtgtttaccctcaggcccttttgatataaaattataaaggccaaggatgctgctaagcatctgacaatccacaggacagacccccaaaacagaaaacaatccattccaaaatgttacagtgccacagtggaaaagctctgtcctggagtcctctggatactgggcagtgggtcacactatagttgttgcatttataaagacctacagctgtgatggaagattctcactacatgttaattgattcgatgtgtgtgtagatatcttcatatttaaagtatatatctacatatgcttgtatgcctagaaaaagtgtggatggaaggatatacacagaaatgcgctttctgaggcacaagattgcgagctttttttttttttttttttgagacagggtctcactctgtcatccaggctggagtgcagtggtgtggtcatagctcactgtagccctgaattcctcgggctcaaacaatcctcccacctaagccttccaagtagctgggactacaggcgtgcgccgccatgcctggtgaattttttttattttgtagagctggggtcctgctatgttgcccaggctagtcttgaattcttggaaccaagcaatcctcccacctcagcctcccaaagcgccgggattacaggcgtgagccactgtgcccagccctcgatttttgtttactttgtacctttctgtattgtgattttttttttttttttttttttgagacagagtctctctctgttgcccaagctagagtgcagtggtgcgatcttggctcactgcaatccctgcctcccaagttcaagtgattctcatgcctcagcctcctgagtagctgggaccacaggcacacaccaccacacctggctaatttttgtatttttagtagagacggggttttgccatgttggccaggctggtctcgaactgttgacctcaggtgatctgcctgcctcagcctcccaaagtactgggattacaggtgtgagccaccatgcccggcctgtattgtgatttttttttttaatatggtgatctggcattactttataatcagaagaaaaaaaaaagccaatgaagccttaatgggaggaatctagggctgggctgtgattgacgctggtccatctctcctaggtggcctgggcttctccaacaccatgtactcaagactaggggagatcatcagcatggatgggtccatcactgtgaccctggcagcgcaccaggctattggcctcaaggtcaggtatctggggattctgtgtggtgctctctgtaggtcttctggagtcacatggaggcatagaggccagaggcttgctccctctgaattgggcctgatatctgaccttcagccctgcccttcagttccctcactctggccacacctcatggtgctcaatcctcacacactgcccacatgcgcagtggcctttgggtcgcatgtcccttccttctgaatccacctcctgtccccattgcctctgatccacccttcaaggcccaggtagggtgccactgccttcgccttgggctggaagtggtctctcctgagccttcgtccttcagcctgagcatgcccccactctttatgcaagccaccttctccccactgggcttggagcaccttagggcaggcccagggtcaaccgcccttactggcaatctcattactcagattatttctgcttaatgttgacatcaaagagagctgaatgcacaccatgctcggctcccccaccccagagagcgcacacattcatgcagatgtttagtgaagagggggactgtctttgtggcactgggagggcagcaggtgggacagccctgacactgagcaccttctttaggataggcttggttccagcactcctgtgtcttcacattgcatcatccagaccctgtcagtgggtgggagtggcccagtttgtggatgacaagatggaggaggctttctttggaaagggatatcctttgcccaagaccactagtctgggaaatgaaggaactgatatgaaagttttggacacagactgcaaagcactgtgggttgcacaggctcacggcactggcatgtgcgccctgaccgtctcctcagcagcttggctccctgggctctgcctgtggccgcttgctctgagttcttgctgtcttctcttgcccgaagtaaatatttgcctcagaaaggaaatgtttcacaaacacctcatgctctcctttctccccacagctgacattagtctgtgtctgttttgtttaggggatcatcttggctggcactgaggagcagaaagccaaatacttgcctaaactggcgtccggggagcacattgcagccttctgcctcacggagccagccaggtctgtctctgcacaaaacgttatccctcagcagctgtgatgttgcccaagattcactggggcaaggggctgttggttttgttgagtagctgacttttccttctttccaaaatcttgcaaagaatcaactcagcaactgttcttgccattcctcttatcttgaccttatttctctgtcccagtgagacttgcaagtgagataccacgcttgacagcacttattaaataaatttttgtggtttacaacacaccttgacatacaatatagtaataacgttccggcttcaaagcacctttcagaatatatagcgtgggtggtactgctcccacttacacattaggagctgaggttcagtgaggctgtgtgatctgctggatggagcagggctgcggcagcactcgggactctgatgataagtccatcacctggaccatcctccatcctgcttcactttgcatgagaacctgggaacagtcatccttcctggggtgcccagaactcatcctcacaggacctcagatgagcccattgcaagcacccatttccatgtttaaacctaagcccaagttgttttcactgccgcttttttacgtgatgtattgaagcagaggtcggctaaatccagcctcctgcctgttttttataaataagttttgtttgtttgtttttgagacagggtcttgctgcgtcacccaggctggagtgcagtggctcaatctcatctcactgcaacctccgccttcaagcgattcttctgcctcagcctcccgagtagctgggactacaggcatgccccaccacacccagctaatttttgtatttttagtagagacggggtttcaccatgttggccagatctcaatctcttgacctcgtgaaccacctgcctcagcctcatgttctattaatagcagcagagttgaggaggtgagacagacatcctgcagcttggaaagctgaatatgttatctgacccttcattttaaaagtttgctgacctcttacaagtactaaaacctccattttcaggccctcaaaagcattcatatttattcccagtattctcccttgaccacatctttctgcatctgcagtgggagcgatgcagcctcaatccggagcagagccacactaagtgaagacaagaagcactacatcctcaatggctccaaggtagggttccttccccatggccacattagggtctcagtcacaaccttcactgccactgagtgagcactctccacacaccagggattgtacctgctgctgtagcaccgactaccttcttgagctgcttttatgtgtttgtttttaattttttttagttttttttatttgcgatggagtctctgtcacccaggctggagtgcagtggtgtaatctcagctcactgaaacttctgcctcccaggtttccaatgattctcctgccttagcctcctgggtagctgggattagaggtgcgtgtcaccactcctggctaatttttgtattttcagtagagatggagtttcaccatgttgtccagtcaggtcttgaactcctgacctcaagtgatctgcccacctcggcctcccaaagtgctgagtttacaggcaatgagccactgtgcccggcttgtaaacccaaaaaatctttaaattttttgttacacaaagtttcagacatattctgtgtgcctggctggccctaactccggcagtcacctgcttatggccactgtgcctcttccagcagcatcgccacctccagatcgcatggtaacaatctcagcatgcctctctaaaagacaggagttttttttgtttgtttttgttttttaataaacacaaagccgtaatacccttatcacattttaaaaattgataatttctcttttcttttgagacagggtcccgctctgtcacccaggctggagtgcagtggcacgatcttggctcactgcagcctcaacttcctgggctcaggtgattctcctacctcaacctcccaagcagctgggagtacaggcacacagctaactctttgtattttttttttggtagagatgggttttcaccgtgttgcccaggttggtctcaaactccggggctcaagtggtctgcccacctcggcctcccaaagtgctgggattacaggcgtgagccactgtgcccagctaataatttcttacttctatcagcattcaaatatccctgattgcctcatacctttttttggtttaactgtttgcttgaattaagatccacacaagtcccatctgttgctgtttgttaaggagtctgtttctgcctctgtctccctctgtttcctttcctcctcctcaccaccctcccgccttttttcatttctttgtagaattaacaaataaatgttgtgtgtatttacatctacaacatgatgtttttatatatgtataccttaagaaatgattaaaccctttctttcttgaagaaatgcagttgtctggcggtggagcctgagctgtctgacaactttgggtgttctttcccccgcccccgcctccacctggccatccatgtcccttgggaaaatccttgctctggggaaagtgggctgagccctgtcctctattcactcatgcttggttggcttctgcagagccaaggaccctgcatgtctggcctgaggtctgactggcagctggagcttgatggacaaagacagagctgaggtgggtcacataggggtttggttttctccaaagtccatctttctgtcctcaggtctggattactaatggaggactggccaatatttttactgtgtttgcaaagactgaggtcgttgattctgatggatcagtgaaagacaaaatcacagcattcatagtagaaagagactttggtggagtcactaatgggaaacccgaagataaattaggcattcggggctccaacagtaagtagctcctgtgcgcgcgtgcgcgtgtgtgtgtgtaagggggagactggcctttgacggtgtgtgtgtgtgtgtgtgtgtgtgtgtgtgtgtgtgtgtaagggggagactggcccttgactctgtccaaatagcaagataaaatgagatttaaacactttcagtttttgttaagcattttaaaaagatcaaattaagaatgccacttgggctttgtctttgttcctgcagctgagtgctgctcacttgaaggcctgctggtcatcccctgctgtagctgccctagcagacacaccaccttagagctcagcttacagtccccagcctttagttgtctcagtctgcagtgcctggcagcctgcttcaggctgtgagttgggttcaggtccatctgggttcaggtccatctggaggcttgttcttagagcagatcataagcacctaaggggccaagccaagccatataagtactatttttgccgtgggagacatagtctccctctgtcacccagcctggaatgcagtgctgtgatctcagctcactgcaacctctgcctcctgggttcgagtgattctcctgtctcagcctcccaagtaattgggactacaggcgtgcaccaccacacctggctaatttttgtattttttgtagagatggggtttcaacatgttgcccagacttgtcttgaactcctgagctcaggcagtctacctgcctcagcctcccaaagtgctaggattacacgtgtgagttaccatacctggccacttttttttggtttgttttttttgagacggagtctcgctctgtcgcccaggctggagtgcagtggcactatcttggctcactgcaagctccgcctcccgggttcacgccattctcctgcctcagcctcccgaatagctgggactacagctgcctgccaccacgtccggctaattttttctattttttagtggagatggggtttcaccatgttagccaggatggcctcgatctcctgacctcgtgatccgctcacctcggcctcccaaagtgcgtgagccaccgcacccggcctttttttttttttttttaaatagagatgaggtcttgctatgttgtcctggctggtctcgaactcctgggttcaagtgatcttcctgcctctgcctcccaaaatgctgggattataggcatgagccaccatacccgactgaccctaaaacacatttaaggtctctgttcatgttgggtcagctctttgtattggccacaggaagtcacatggtcatacctagcaggcagggaaagggagggaggtccatccctcctcacagtgggagagtgctacagttagattgcaggggtgtgattgtgttagagttaagaattgagaccagtggtcccagtctaccctaaggcttcaggaaatgctgttctttccctcactttgcttgttctggctctttatatgcctggttcttttcattcttaaacttctgctaaatgtcaccttagaaaagtctgacatagtccttaataaaaatattattatccacccccttgccaacctccatttctctttatcgtgatgccctatttatttcatccatagcactgatcacaatattacattgttttgtttatagcttttgtctcccaaatcaaagtatgagcctccacaaagataggaactttgtctttctatactgtcctaccaaacattggatggatggatggatggatggatggatgaattgcctgcttgcaggtcagatgcagagtggtttgcattgtcagatgatatcttaaatttcatgtgtttcagcttgtgaagtccattttgaaaacaccaagatacctgtggaaaacatccttggagaggtcggagatgggtttaaggtgagttgccagccacagccccttgtaccaggtagtgtcatgagtgcagtttgtcgcccccagcttttgccctatccctgctcgtagcagagtagcctgtgcatggcaggtgactttgcatggttatctgttgggaaattggcaaaatggacactggaaaattggctggctcctagaagaagtgtatggtaaggattaggaatttcccttcacctctgaggccctattcgcctcgagcggaggctaagattcccttctgcagtgggtatgagaaagcagcctgtgggctctggtgaatctcaagctctgtgtaccacaaccctggtctgcatcgctgccctactcttttctttttggactaagacttatttttatcaagagatgattcatatgacaaaggactcaccattttaaaatattatttcagtggtttttagtatattcactatgttgttcaaatatctcacacagaacatttcctcaccccaaaaagaaatgttgtaccatccagtatgacccttaccccatcccttggctgctactcttttactttatgtccctatggatttgcctgtttggaacatttcataaaaatgcagtcatatacaagatccagtctttggtgacaggcttctctcacattgcgtgatgttttcaaggttcatctctctcatagcatgaatgagtaattcattccttttatggctgaattctcttctgttgagtggagataccacattttgttcatccattcaccagctgatggacattggggttgttaccgcttttggctgctatcagtaatgctacttatgaacattcatgtcaagttttaatgtggaaataacgttttcaggtattttgatttatgcctaaaagtagaatttctgtttggcccaagttggtcttgaactcctgggctcaagcgatcctcttgccttggccttccaaaatgctggtactacaggtgggagccaccatgcccagctctggcatggtcctttggaataacgttcagtggtcttgtgtgtggggatgttggtagagctgcaacagtgactgaaccaccttgttctgaggcattaggatggtgctttctcccagcttgagggaaggcaagctgatccacctggcctggtttcgttgcggcctcctccctctgcctccttcagggcccctgggctctccctgttctccctgcaggtggccatgaacatcctcaacagcggccggttcagcatgggcagcgtcgtggctgggctgctcaagagattgattggtaggtaagttagggacaaggccctttgtgccccaccccctgctgccccggctccaaccctggaggctctgccattcccccggccccttccaggccagtgctgaaccaggctaccagcctgagctcagtccctgggcttttgtggagaccagagggtctcctcagcctgcccctgaggtttgttgtcttccgcattcctctgtttcacctccacccgggtgatgctgactgggggacaggctttctgtctggggtggggatggggattggggaatgggctgtctgtctggagtgagaggttgccactgaccagtaggagcagagctgcttggtgagcacacaccaagaaccaggcttccaggatacacggcctctggttcccaaggtccgtgcctcctgggtgactctgcatggtgggtggggagtaggatcgggtttggaacccaggtccctgggcccctggatcttacctttgttctattctgtcagaataccccaaacctccattttcctttgccagtgaacttagaacagccctgtaaccatcctggttgtggtggaagcatttgcggggaaatgggggtacccggggcagcacacccctaagtgctttatgaagctcctctttggtgccaggctctgggcctgttttggcttccctccattttagagatgagaagacagagactcagagagggcaagcgatttgttccagactgtgctcctggacccaaaatgaaagctgtcaggctccaggctcagggctcttcttactcaggcacaaggcctctggggagctcctctgctggggctctgagtggggctcggccctctacacctcctgagtgcaccacacctgggagagcctgtggaggacatggctatggcggggcgggggtgcttctgcctgggagaggcgccatgtcactcttgggcccttagagctcagcactttgtcacagccacacgcctggaagccccagcctgagtattcaagccaggcggccccacctgctttggtcactgcacggggtgtgagcctgcaccacctctgtctggggcctctgtgcctggctttgtgcgaggcgccctcccccttccacctggttgcatcttcacagcgactctgaggtgggggtggtgttcagggaggtgtcgcactcggcctgaggcacagcctgtaagaaccattgccaggattcaagtctgtatctgatgccaaactctgtgtgtgggtgccatgaggaggggtggttctcctctgacccacgggtgctggcaagtgggggtgccagcttctggggtatttgacctcagcagacacgcttctcacagtgcccacctgtgggaagggtaaggatgatggccataggaaatcatgtttgaaccacagaaatattccagttcattctaataactctgctcttcctcagaaatgactgctgagtacgcctgcacaaggaaacagtttaacaagaggctcagtgaatttggattgattcaggtaccaatggttgagtactgtatttgtgcatttcactgtgtgacatgaacggtgtgttcttttgatgtctctgtactggtgacttctgtggtgatttgggaagaagactagttaaggctttatttgacacgggtcactgggcttgcttctcttgggcattgaggcttctgacttaattactttctctcctgtttcacagatttggctctcagcacatgcaaattgtttcttgtgttttttctgaacactccaggagaaatttgcactgatggctcagaaggcttacgtcatggagagtatgacctacctcacagcagggatgctggaccaacctggctttcccgactgctccatcgaggcagccatggtgaaggtaaccctggcatagccagagagctggcgctggagggaggcttgggaaatctccctcactgtgacctttcaagcccatgctgttgcctgtcatcttcctcctgtcattgatccagtatttatgatgcacttgccctgtgtagcactccagggataggcaggcagcggggagcagcagtagggaagtgtccagtgggccagtggatcagtagtttatagcagaaggagaccgttatgataatatccttttagagtaataacattgcatctggcttgtgtgagaaagacttcttttttccttagtttatggccttcctactttctggtatcaaaactttatcttaaaaactaagcatatggcagggcgcggtggctcacacctgtaatcccagcactttggggggccgaggtggatggatcacctgaggtctggagttcgagaccagcctggccaacatggtaaaaccccatctctactaaaaacacaaaaaattagccgggcatagtggcgggcacctgtaaccccagctacttgggaagctgaggcaagagaatcacttgaacccggtgggggcggaggttgcagtgagccgaggttgtgccattgcacaccagcctaggcaacaagagcaaaactccatctcaaaaaaaaacaaaaaacaaaaaacatgtatgagcctgggcaacatggcgaaaccccatctctacaaaaaatacaaaaattagctggcatggtggcacacgcctatagtccctgctacctgggaggctgaggtgggaagagcatcttatttggttaaggtagatactagaatttgcttttgttttgttgagggtggagggtgtcattttttagctgtaataaaaaagatggccacacttggggggaccctactttgtgccccccacaattgtttttaagctggtctctggaattgagctcttgagagaaatagtgagaggtatggcagcttacagaagcaaacatcctggtgtcggcaggagagtctacctaaaaggttgggatcctgaagtggcaaggtccctaaaaaaataaaaaattaaaaacaaaaaggctgggcatcttggaccgtgtttgagtcttttctaggtgcagtctgtgtactgggtgcatttgcatgtgttttatcatctcgttttcttgtcacccttgaacagtgaccacagacattagtttgctgtaggccagcctcttccagatgctaagcctagggctaaacatggcagtatgtttgcccccaaggcacttatagtgtgcacagacagaaagaaatcacggccgctggggcttggcaggaacaggtcaggttttctcgggaaggggagatcttaggtgggttttaaaggaacaggagctcagccaggtgcagatagggtgaaggcaggcccagaggtacagaaggtcatggtggggtagggaacacaagctggccagtgtggtcacggaaggcaaaggacttgaccacatcacccctcaagttcctccctggccgatctcctccccaagcccgtgtgcctcccatgcctccccagccacccagctccctgcagcgtaggtcctccttttggaaaggattcagtgtgacaccccacaggtgttcagctccgaggccgcctggcagtgtgtgagtgaggcgctgcagatcctcgggggcttgggctacacaagggactatccgtacgagcgcatactgcgtgacacccgcatcctcctcatcttcgaggtgagtggccccgccaccagctaagctgtgctccacccccaccctgcctggtcctaaagatgctgctcagggcctcgcagaggcccccgcagcccagggctgggtcgcatgctctcaggggctctcctagccctggcacgtctccttcccgactgctgccctccatgaagtcacaagcctgaggagtcagttcagttagcatgtgccaggtggcaggggagggaactggggccacagagatgacttcggatgctgtgttctgattgtgcagcagggccgaccaagggagatgacagagtgtaaagaggcagggagcgggcatcctccagaggcagccagagttttgtgaagcatgcgctcctggcccctaggggcagaaagaaagggcttcaaccagggccgggtggagggcagtttgtccctaagggcagggtaatagagcgcgccaggcccagatgggactgatctgctggcacaaggtgaatgaagagagagtgaagggctttctgggagcagcagtcagccctgctaggtgggctggggcaggcagtgggtttgggggtgttgaagaaggtatatgggaaggctaaaaaagtagccagactgtggaggaccttgattgacagcagaggaatttggaagccacaaaacgtctttaagcagggcattatttggttgtatctgtgttgtgggaaatgcccccaggggctcagcaagtgctggacatgtggacggggctcatgtggagagtgagttgcagggatgaggccggagaccaggggctctcctgctgggagggaggggctggacctaagagagcacagcaggatgagtgggatatgatggtgggcatgggtatacaggaggcaggcctgagacagggagagggtttgggcctgagcagcaggtctggtgatgagaggcatcatcagcctctgggagtgtagtcttgtctcctgggccgtcctgcccagtgggaggcctccttggctgcttttgttcctggcctacccattgggttccagccatctccactgttgcagtggacatacggggcaagggccagcctgagggcactggagtggtctcagccctgcaaagggtcttctccaaaggcccttcccttagcctgggagggttggggttctccagggctggggtggtcagcagggttcaggaagccctcaaggccttggaagaacacagggctctcgatgtagggtgagagctcctgtctggagcctgctcggagctgggtggtcctgccaggaggcccctgcagtccccccttttcctgtagggagtcctgctgtccgtgatgtcagcctgactgcaggggacagtcctcagtccctagtgctggctgtgtagcctgggtcaggcccctgcacctgacacacagtaccattgtgcagagtgggcagaagcccactggcctctcactgatcagaatcatgggttgggggagtggggagcatgtggccctctgggtgtgttgacacctggcactgaggaggttctagctgccactcagcaatttctggcttccgtgaggaatctggcctccacctggagccagcaatgtctgtctggcactggctgagccccaggcatcagcacccctcaccacccggggaaagctggtttccattttacagaggacctggagacttggagaaaggcttgacacacgtgaggctggtcacggagaggtgggggggtcccagtgggagctcatggccatctggtcacctccctcctcatccctgtgcactccctgagccctggccagagccctgctcccagctacttcaggagcagtggcttttgtggcaatgggcaagcaggcagtggccggctctacccagcacacgtggcactaccatggctgcctggccggggggcagcctttgacctctacactactgaccacagggaaccaatgagattctccggatgtacatcgccctgacgggtctgcagcatgccggccgcatcctgactaccaggatccagtaggtgccattgtcaccgtgtgcttctcaggtcccatacctgcccagcaggggccagtccagggcagtgggaggaaagagctgccttgacctggagtgggggcatgggggtgtggcgcagccttgtggaggggaccttcccctgtggtagtggggggcttgctgcccagggaagccctcgctgccctgcccttatggccacagcaccctacagcttcagcataaataccgtatcccccatctggtccctcacactagaggcagctggtttttcagaacctgaagaatgagaggtgtccctttaaaggtgccaggcctcacagccaacataagccagtgtttctcttctctgcccttctt

SEQ ID NO: 10479 - DNA, 1693 bp, Homo sapiens
agacgtgtgtgtgtccctgcggcgctaagaaggggagactgaggctgaggctggggaacatcgggcagcatgagcggctgcgggctcttcctgcgcaccacggctgcggctcgtgcctgccggggtctggtggtctctaccgcgaaccggcggctactgcgcaccagcccgcctgtacgagctttcgccaaagagcttttcctaggcaaaatcaagaagtggactcccgaaaaattgaccaggaagggaaaatcccagatgaaactttggagaaattgaagagcctagggctttttgggctgcaagtcccagaagaatatggtggcctgggcttctccaacaccatgtactcaagactaggggagatcatcagcatggatgggtccatcactgtgaccctggcagcgcaccaggctattggcctcaaggggatcatcttggctggcactgaggagcagaaagccaaatacttgcctaaactggcgtccggggagcacattgcagccttctgcctcacggagccagccagtgggagcgatgcagcctcaatccggagcagagccacactaagtgaagacaagaagcactacatcctcaatggctccaaggtctggattactaatggaggactggccaatatttttactgtgtttgcaaagactgaggtcgttgattctgatggatcagtgaaagacaaaatcacagcattcatagtagaaagagactttggtggagtcactaatgggaaacccgaagataaattaggcattcggggctccaacacttgtgaagtccattttgaaaacaccaagatacctgtggaaaacatccttggagaggtcggagatgggtttaaggtggccatgaacatcctcaacagcggccggttcagcatgggcagcgtcgtggctgggctgctcaagagattgattgaaatgactgctgagtacgcctgcacaaggaaacagtttaacaagaggctcagtgaatttggattgattcaggagaaatttgcactgatggctcagaaggcttacgtcatggagagtatgacctacctcacagcagggatgctggaccaacctggctttcccgactgctccatcgaggcagccatggtgaaggtgttcagctccgaggccgcctggcagtgtgtgagtgaggcgctgcagatcctcgggggcttgggctacacaagggactatccgtacgagcgcatactgcgtgacacccgcatcctcctcatcttcgagggaaccaatgagattctccggatgtacatcgccctgacgggtctgcagcatgccggccgcatcctgactaccaggatccagtaggtgccattgtcaccgtgtgcttctcaggtcccatacctgcccagcaggggccagtccagggcagtgggaggaaagagctgccttgacctggagtgggggcatgggggtgtggcgcagccttgtggaggggaccttcccctgtggtagtggggggcttgctgcccagggaagccctcgctgccctgcccttatggccacagcaccctacagcttcagcataaataccgtatcccccatctggtccctcacactagaggcagctggtttttcagaacctgaagaatgagaggtgtccctttaaaggtgccaggcctcacagccaacataagccagtgtttctcttctctgcccttctt

SEQ ID NO: 10480 - DNA, 5094 bp, Homo sapiens
acgttgtcgcgggccagtaacgtcatcagacgtgtgtgtgtccctgcggcgctaagaaggggagactgaggctgaggctggggaacatcgggcagcatgagcggctgcgggctcttcctgcgcaccacggctgcggctcgtgcctgccggggtctggtggtctctaccgcgaaccggcggctactgcgcaccagcccgcctgtacgagctttcgccaaagagcttttcctaggcaaaatcaagaaggtaacgcgagccctgggcgaacccttgctgtctggctcccgcttttcaccctcagctgcaagactggtgttgaactttgtgagattccccaaacctgccagagagatacaccctgcggccgaggcgtgttaacactccggattcctgagttccaggaaaaccttcccagagaaagggtgagacatttccaagacgggggacccttggaaatgtggtggtgacgtgttccagctaaattttgtcaggggaattcggaaaactctaggctaggtaattaacaaagcagccttcatctcagctggtctggtctggaaatgtgcggggcttcctctctgattcctaaacagcttacaccatgtccctcctcagtcaccttccagcgccctggggcttccttccccaggtgagcccagcgcctctccctgccattgaggttcctcagaaatctggctccaagatgcttcccaagggtggcacaacccagccaatagtaacagtttggttataaaacactcattgtcttcttagagttggaagacttgggtttggtcttggctcgttgactttgaaactcagttgttttttttgagacagagtcgcgctcttgtcgcccaggctggagtgctcactgcaacctccctcctgggttcaagcgattctcctgcctcagcctccggagtagctgggattacaggcgcctgcccggctttttttttttttgtatttttagcagagacggggtttcaccatgttggccaagctggtctagaactgacctcgggtgatccgcccacctcggcctcccacagtgctgggattacaggggtgagccaccgcgcccggccaagactcagttctttcagccttaaaatggagatagtgttgtgtctccttcacagatgtgttgtagagccccagtgagataaacggtgcatggagagtcttcttaaactgtagagtactgtgcagcagaagagagagctggcttcaacacttagtcttgtgaccttggagctgacggctgcacctccctgtgcctcagtgcattcatctacaaaataggaataaacacatttcttgctctttcctttgtatttcattttatcttctaaggaaaccaacagtatacttgctatttcgtcgaggtgccctactttgaacttggctgaatgttggctgatcctgtatcacagaagttattccctggcttctctttggaacgttcctctgaggttgtcaggctgatacctttatagcaagcaactttacagatgaagaagctaagactcagactaaaagcagtttgcccagctagaaagtgcggagctatgtcttgaacatattggaaaaccttttacccaggacctggggcagtgtggtgctctatcctgggacttcctgctatccagcagcatggtgaagaaagaacacagatctttcagatctgtttccatctttaaacctctggcactacctgccctgccctgcctttactctcagctgtcagctttgcttcccattccactgggaaaatccatgcagtcggatgagaagttcacaggcacagttaccccctcccgctgcatatgtgccggtattatctacattctgttactgtgaactgtctgctcctggcaaaaccaacctctcattagactccaggtcttctcacctactcaagggtaattctttcctttctctgcatcattaactgttctctctactggatcttgagcccttaccattcaggcatttgtccctaatggccatagaagtcagtaatgacctctctgttatcaaattgtgtgatctgttctcagacctcatcctacttgacccatcattggcatctgacaccgttcatccttccaccctgttgacgcactttcgtctctggtttctgaatcactgttctcgccattctctgaatgttctaaatacttcactggctgatacttctctgtgtccattgctggttcttattcagctccttgaccgctaaacagtgaccagtgtttccaactagccaagttggaatttactaaggctgggtctcgtttcatctacagccatctgctgggtgaccttatttagtgtcctggctttaaatatcatcaatatcctgatgcctcaagtttctttcttcagttcagatttctccctgaactccagattccttttgctttttcagagttgggggctttctctgtcacctgtgctggagtgcagtggtgccatcatagctcactgcaaccttgaactcctaaggctcaatagatcctcccacttcagcatccccagtagctgggactacaggcacgccctgccacacccagccaagattctttttttaatctacctttgtactcaaaagctgtactaagaggtctaacaggcatttgagattaatagatcccaaactgagttcctggttcccacccaatcctgctccttccaccagccttctttatcatagataatggtggctctgttgttccacctgttcaaacagaacacctggagtcaccttgtactcttattctcctagtccacttctaattccacagaagatctggttttctctacttttaggttcttagaatctgaccacttttaggcccttctgctgctactttggatcaggccagtgtcatctctcacagccttactgggattagagcagaaacatgggacatgatgcttagaatctcagattgtgtaggccagtggttgtcaccctgccctaagctggacccaagctattcatggagtgtcctggaactgctgcagggatgggtgggaagttgagtgggtgggatttgggtgcctgttttccctatcagcagtctcagtcagagccgcctgcttctgtctgttttacatatttggtttctgcactagatttctttgaataacaggttccacttttttagataatttacaaactgtttattgcaattgaactctcctcccctaaggcattgacctgatttgataacatcaggatctttctcccacgcccctgcaatctctcctgtgtggcaggttttctgtggttgtacctgaaggccaattagttgccaggcagtcttatctggcctgcccactggtaccagaatgatctctaacacagcccattgcacaagacccaagtgtcagtgagcctctgtgttcagtgaaggagactgagctttgatataaaaggctgcagagtgatggagccatcagcttgtttttttttttttttcttgttttttttttccttgagacagtgtcttactctgttgcccaccctggagtgcagtggtgcaatcacagctcactgcagcctcaacctccccaggctcaggggatcctcccacctcagcctcctgagtagctggaactacaggcgtgtgcaaccacgcccaggctggttttgaactcctgggctttaagcaatccccctgcgtcagcttcccaaaggactaggattacaggcagtagccactgcaaccagctaagcttgtttttttctttttcttttcttttttttttatggagtctcactctgtcacctaggctggagtgcaatggcgcaatctcggctcactgcaacctccacctcccgggttcaagcaattctcctgcctcagcctcctgagtagctgggattacaggcgcgtgctaccaagcccgtgtaatttttgtatttttagtagaaacggggtttcaccatgttggtcaggctggtctcaaactcctgacctcgtgatccgcccgcctcggcctcccaaagtgctgggattacaggcgtgagccaccgtgcctggcctccaacctttttttttttctataccaccttcagggtggttttggaatggatggaggcagggattcctttaagttggctgtcacttttagttagggactcacctataagcctgtggtcctgggcccagagaggagaaagcagtgcgagcatattgatagagtagagaaatctgttggctgattagctgtacaaggtctgaggagaaggttgaggtctccccaagacttctctagaacacttggtgagaggcgccatgaggacaggtgatgcttgggcttatagctctgactcaggacatcactgctcaacagcctgaagcccacatccaaagctcatgtcatgctggcaattgaaggggtagcagagcccaaaagtccagaggggctcagcacagggagcagatgtctgtgagcaggagagacagcggctgtagggatcgatgagacttggtaagcatgatgtgctcttgtcagcatagcatctttgagctcacacaataattgatgtagaattgtccatttcagtaaggagtttccacatccactatcttccacgattctcacaagggccttgagtaaatattacctgcatgttatgggtgagaaaggggtagtttagagagctgaagggatttggtgaaggccacataatgagtaagcctgaaatcaaggaccagacccccaggcttctaaatgttagtcttgggctccttgtttcatgggactattatcatcccttgtactgagaaggaaaactgatgaaaatcgggaagaacctatttgaacaggggagggagatggatgtgggtggtggagcctgcacatagtttctgtatctcaggaaccttgtgaggtttgctttccagttccttcagtacgtcatgtcccgctggccagggtggagtggagcacatgtttttccttcccttttaactgatatttccgtgatgggagtgtgctaaaaattaaattttttagaaaatatttactatttttagaaagaagttttcccatttccagaagttagccaagatg

SEQ ID NO: 10481 - DNA, 553 bp, Homo sapiens
acgttgtcgcgggccagtaacgtcatcagacgtgtgtgtgtccctgcggcgctaagaaggggagactgaggctgaggctggggaacatcgggcagcatgagcggctgcgggctcttcctgcgcaccacggctgcggctcgtgcctgccggggtctggtggtctctaccgcgaaccggcggctactgcgcaccagcccgcctgtacgagctttcgccaaagagcttttcctaggcaaaatcaagaaggtaacgcgagccctgggcgaacccttgctgtctggctcccgcttttcaccctcagctgcaagactggtgttgaactttgtgagattccccaaacctgccagagagatacaccctgcggccgaggcgtgttaacactccggattcctgagttccaggaaaaccttcccagagaaagggtgagacatttccaagacgggggacccttggaaatgtggtggtgacgtgttccagctaaattttgtcaggggaattcggaaaactctaggctagaaagaagttttcccatttccagaagttagccaagatg

SEQ ID NO: 10482 - DNA, 2401 bp, Homo sapiens
gctaagaaggggagactgaggctgaggctggggaacatcgggcagcatgagcggctgcgggctcttcctgcgcaccacggctgcggctcgtgcctgccggggtctggtggtctctaccgcgaaccggcggctactgcgcaccagcccgcctgtacgagctttcgccaaagagcttttcctaggcaaaatcaagaaggtaacgcgagccctgggcgaacccttgctgtctggctcccgcttttcaccctcagctgcaagactggtgttgaactttgtgagattccccaaacctgccagagagatacaccctgcggccgaggcgtgttaacactccggattcctgagttccaggaaaaccttcccagagaaaggtggactcccgaaaaattgaccaggaagggaaaatcccagatgaaactttggagaaattgaagagcctagggctttttgggctgcaagtcccagaagaatatggtggcctgggcttctccaacaccatgtactcaagactaggggagatcatcagcatggatgggtccatcactgtgaccctggcagcgcaccaggctattggcctcaaggggatcatcttggctggcactgaggagcagaaagccaaatacttgcctaaactggcgtccggggagcacattgcagccttctgcctcacggagccagccagtgggagcgatgcagcctcaatccggagcagagccacactaagtgaagacaagaagcactacatcctcaatggctccaaggtctggattactaatggaggactggccaatatttttactgtgtttgcaaagactgaggtcgttgattctgatggatcagtgaaagacaaaatcacagcattcatagtagaaagagactttggtggagtcactaatgggaaacccgaagataaattaggcattcggggctccaacacttgtgaagtccattttgaaaacaccaagatacctgtggaaaacatccttggagaggtcggagatgggtttaaggtggccatgaacatcctcaacagcggccggttcagcatgggcagcgtcgtggctgggctgctcaagagattgattgaaatgactgctgagtacgcctgcacaaggaaacagtttaacaagaggctcagtgaatttggattgattcaggagaaatttgcactgatggctcagaaggcttacgtcatggagagtatgacctacctcacagcagggatgctggaccaacctggctttcccgactgctccatcgaggcagccatggtgaaggtgttcagctccgaggccgcctggcagtgtgtgagtgaggcgctgcagatcctcgggggcttgggctacacaagggactatccgtacgagcgcatactgcgtgacacccgcatcctcctcatcttcgagggaaccaatgagattctccggatgtacatcgccctgacgggtctgcagcatgccggccgcatcctgactaccaggatccatgagcttaaacaggccaaagtgagcacagtcatggataccgttggccggaggcttcgggactccctgggccgaactgtggacctggggctgacaggcaaccatggagttgtgcaccccagtcttgcggacagtgccaacaagtttgaggagaacacctactgcttcggccggaccgtggagacactgctgctccgctttggcaagaccatcatggaggagcagctggtactgaagcgggtggccaacatcctcatcaacctgtatggcatgacggccgtgctgtcgcgggccagccgctccatccgcattgggctccgcaaccacgaccacgaggttctcttggccaacaccttctgcgtggaagcttacttgcagaatctcttcagcctctctcagctggacaagtatgctccagaaaacctagatgagcagattaagaaagtgtcccagcagatccttgagaagcgagcctatatctgtgcccaccctctggacaggacatgctgaggcaggggacagtgtcccctgctaccgcccgcccctacccatggcccgttgctggatgactgttactcttttttcagaaggtgttgggattatcacaggttaagccttttgttccccgtctgcacctgaagggttgtcgcctggcctgggagagcctcttccaggttttgacctgcaggcagtgctctctaacaggaccatcacagcttctgaactgagccggagagagagaatggaattgctgacccctggaactggcgggtattctggtcattgaggagacaccatagtggaaactggggcttatgctgctgcctccagggtgtgaggtgggtggggacctgtgtcaggtgtggatagccatttctgctcaaccacacattctctaagaaacagcttgaaagctc

SEQ ID NO: 10483 - DNA, 16703 bp, Homo sapiens
gtgaaagacaaaatcacagcattcatagtagaaagagactttggtggagtcactaatgggaaacccgaagataaattaggcattcggggctccaacagtaagtagctcctgtgcgcgcgtgcgcgtgtgtgtgtgtaagggggagactggcctttgacggtgtgtgtgtgtgtgtgtgtgtgtgtgtgtgtgtgtgtgtaagggggagactggcccttgactctgtccaaatagcaagataaaatgagatttaaacactttcagtttttgttaagcattttaaaaagatcaaattaagaatgccacttgggctttgtctttgttcctgcagctgagtgctgctcacttgaaggcctgctggtcatcccctgctgtagctgccctagcagacacaccaccttagagctcagcttacagtccccagcctttagttgtctcagtctgcagtgcctggcagcctgcttcaggctgtgagttgggttcaggtccatctgggttcaggtccatctggaggcttgttcttagagcagatcataagcacctaaggggccaagccaagccatataagtactatttttgccgtgggagacatagtctccctctgtcacccagcctggaatgcagtgctgtgatctcagctcactgcaacctctgcctcctgggttcgagtgattctcctgtctcagcctcccaagtaattgggactacaggcgtgcaccaccacacctggctaatttttgtattttttgtagagatggggtttcaacatgttgcccagacttgtcttgaactcctgagctcaggcagtctacctgcctcagcctcccaaagtgctaggattacacgtgtgagttaccatacctggccacttttttttggtttgttttttttgagacggagtctcgctctgtcgcccaggctggagtgcagtggcactatcttggctcactgcaagctccgcctcccgggttcacgccattctcctgcctcagcctcccgaatagctgggactacagctgcctgccaccacgtccggctaattttttctattttttagtggagatggggtttcaccatgttagccaggatggcctcgatctcctgacctcgtgatccgctcacctcggcctcccaaagtgcgtgagccaccgcacccggcctttttttttttttttttaaatagagatgaggtcttgctatgttgtcctggctggtctcgaactcctgggttcaagtgatcttcctgcctctgcctcccaaaatgctgggattataggcatgagccaccatacccgactgaccctaaaacacatttaaggtctctgttcatgttgggtcagctctttgtattggccacaggaagtcacatggtcatacctagcaggcagggaaagggagggaggtccatccctcctcacagtgggagagtgctacagttagattgcaggggtgtgattgtgttagagttaagaattgagaccagtggtcccagtctaccctaaggcttcaggaaatgctgttctttccctcactttgcttgttctggctctttatatgcctggttcttttcattcttaaacttctgctaaatgtcaccttagaaaagtctgacatagtccttaataaaaatattattatccacccccttgccaacctccatttctctttatcgtgatgccctatttatttcatccatagcactgatcacaatattacattgttttgtttatagcttttgtctcccaaatcaaagtatgagcctccacaaagataggaactttgtctttctatactgtcctaccaaacattggatggatggatggatggatggatggatgaattgcctgcttgcaggtcagatgcagagtggtttgcattgtcagatgatatcttaaatttcatgtgtttcagcttgtgaagtccattttgaaaacaccaagatacctgtggaaaacatccttggagaggtcggagatgggtttaaggtgagttgccagccacagccccttgtaccaggtagtgtcatgagtgcagtttgtcgcccccagcttttgccctatccctgctcgtagcagagtagcctgtgcatggcaggtgactttgcatggttatctgttgggaaattggcaaaatggacactggaaaattggctggctcctagaagaagtgtatggtaaggattaggaatttcccttcacctctgaggccctattcgcctcgagcggaggctaagattcccttctgcagtgggtatgagaaagcagcctgtgggctctggtgaatctcaagctctgtgtaccacaaccctggtctgcatcgctgccctactcttttctttttggactaagacttatttttatcaagagatgattcatatgacaaaggactcaccattttaaaatattatttcagtggtttttagtatattcactatgttgttcaaatatctcacacagaacatttcctcaccccaaaaagaaatgttgtaccatccagtatgacccttaccccatcccttggctgctactcttttactttatgtccctatggatttgcctgtttggaacatttcataaaaatgcagtcatatacaagatccagtctttggtgacaggcttctctcacattgcgtgatgttttcaaggttcatctctctcatagcatgaatgagtaattcattccttttatggctgaattctcttctgttgagtggagataccacattttgttcatccattcaccagctgatggacattggggttgttaccgcttttggctgctatcagtaatgctacttatgaacattcatgtcaagttttaatgtggaaataacgttttcaggtattttgatttatgcctaaaagtagaatttctgtttggcccaagttggtcttgaactcctgggctcaagcgatcctcttgccttggccttccaaaatgctggtactacaggtgggagccaccatgcccagctctggcatggtcctttggaataacgttcagtggtcttgtgtgtggggatgttggtagagctgcaacagtgactgaaccaccttgttctgaggcattaggatggtgctttctcccagcttgagggaaggcaagctgatccacctggcctggtttcgttgcggcctcctccctctgcctccttcagggcccctgggctctccctgttctccctgcaggtggccatgaacatcctcaacagcggccggttcagcatgggcagcgtcgtggctgggctgctcaagagattgattggtaggtaagttagggacaaggccctttgtgccccaccccctgctgccccggctccaaccctggaggctctgccattcccccggccccttccaggccagtgctgaaccaggctaccagcctgagctcagtccctgggcttttgtggagaccagagggtctcctcagcctgcccctgaggtttgttgtcttccgcattcctctgtttcacctccacccgggtgatgctgactgggggacaggctttctgtctggggtggggatggggattggggaatgggctgtctgtctggagtgagaggttgccactgaccagtaggagcagagctgcttggtgagcacacaccaagaaccaggcttccaggatacacggcctctggttcccaaggtccgtgcctcctgggtgactctgcatggtgggtggggagtaggatcgggtttggaacccaggtccctgggcccctggatcttacctttgttctattctgtcagaataccccaaacctccattttcctttgccagtgaacttagaacagccctgtaaccatcctggttgtggtggaagcatttgcggggaaatgggggtacccggggcagcacacccctaagtgctttatgaagctcctctttggtgccaggctctgggcctgttttggcttccctccattttagagatgagaagacagagactcagagagggcaagcgatttgttccagactgtgctcctggacccaaaatgaaagctgtcaggctccaggctcagggctcttcttactcaggcacaaggcctctggggagctcctctgctggggctctgagtggggctcggccctctacacctcctgagtgcaccacacctgggagagcctgtggaggacatggctatggcggggcgggggtgcttctgcctgggagaggcgccatgtcactcttgggcccttagagctcagcactttgtcacagccacacgcctggaagccccagcctgagtattcaagccaggcggccccacctgctttggtcactgcacggggtgtgagcctgcaccacctctgtctggggcctctgtgcctggctttgtgcgaggcgccctcccccttccacctggttgcatcttcacagcgactctgaggtgggggtggtgttcagggaggtgtcgcactcggcctgaggcacagcctgtaagaaccattgccaggattcaagtctgtatctgatgccaaactctgtgtgtgggtgccatgaggaggggtggttctcctctgacccacgggtgctggcaagtgggggtgccagcttctggggtatttgacctcagcagacacgcttctcacagtgcccacctgtgggaagggtaaggatgatggccataggaaatcatgtttgaaccacagaaatattccagttcattctaataactctgctcttcctcagaaatgactgctgagtacgcctgcacaaggaaacagtttaacaagaggctcagtgaatttggattgattcaggtaccaatggttgagtactgtatttgtgcatttcactgtgtgacatgaacggtgtgttcttttgatgtctctgtactggtgacttctgtggtgatttgggaagaagactagttaaggctttatttgacacgggtcactgggcttgcttctcttgggcattgaggcttctgacttaattactttctctcctgtttcacagatttggctctcagcacatgcaaattgtttcttgtgttttttctgaacactccaggagaaatttgcactgatggctcagaaggcttacgtcatggagagtatgacctacctcacagcagggatgctggaccaacctggctttcccgactgctccatcgaggcagccatggtgaaggtaaccctggcatagccagagagctggcgctggagggaggcttgggaaatctccctcactgtgacctttcaagcccatgctgttgcctgtcatcttcctcctgtcattgatccagtatttatgatgcacttgccctgtgtagcactccagggataggcaggcagcggggagcagcagtagggaagtgtccagtgggccagtggatcagtagtttatagcagaaggagaccgttatgataatatccttttagagtaataacattgcatctggcttgtgtgagaaagacttcttttttccttagtttatggccttcctactttctggtatcaaaactttatcttaaaaactaagcatatggcagggcgcggtggctcacacctgtaatcccagcactttggggggccgaggtggatggatcacctgaggtctggagttcgagaccagcctggccaacatggtaaaaccccatctctactaaaaacacaaaaaattagccgggcatagtggcgggcacctgtaaccccagctacttgggaagctgaggcaagagaatcacttgaacccggtgggggcggaggttgcagtgagccgaggttgtgccattgcacaccagcctaggcaacaagagcaaaactccatctcaaaaaaaaacaaaaaacaaaaaacatgtatgagcctgggcaacatggcgaaaccccatctctacaaaaaatacaaaaattagctggcatggtggcacacgcctatagtccctgctacctgggaggctgaggtgggaagagcatcttatttggttaaggtagatactagaatttgcttttgttttgttgagggtggagggtgtcattttttagctgtaataaaaaagatggccacacttggggggaccctactttgtgccccccacaattgtttttaagctggtctctggaattgagctcttgagagaaatagtgagaggtatggcagcttacagaagcaaacatcctggtgtcggcaggagagtctacctaaaaggttgggatcctgaagtggcaaggtccctaaaaaaataaaaaattaaaaacaaaaaggctgggcatcttggaccgtgtttgagtcttttctaggtgcagtctgtgtactgggtgcatttgcatgtgttttatcatctcgttttcttgtcacccttgaacagtgaccacagacattagtttgctgtaggccagcctcttccagatgctaagcctagggctaaacatggcagtatgtttgcccccaaggcacttatagtgtgcacagacagaaagaaatcacggccgctggggcttggcaggaacaggtcaggttttctcgggaaggggagatcttaggtgggttttaaaggaacaggagctcagccaggtgcagatagggtgaaggcaggcccagaggtacagaaggtcatggtggggtagggaacacaagctggccagtgtggtcacggaaggcaaaggacttgaccacatcacccctcaagttcctccctggccgatctcctccccaagcccgtgtgcctcccatgcctccccagccacccagctccctgcagcgtaggtcctccttttggaaaggattcagtgtgacaccccacaggtgttcagctccgaggccgcctggcagtgtgtgagtgaggcgctgcagatcctcgggggcttgggctacacaagggactatccgtacgagcgcatactgcgtgacacccgcatcctcctcatcttcgaggtgagtggccccgccaccagctaagctgtgctccacccccaccctgcctggtcctaaagatgctgctcagggcctcgcagaggcccccgcagcccagggctgggtcgcatgctctcaggggctctcctagccctggcacgtctccttcccgactgctgccctccatgaagtcacaagcctgaggagtcagttcagttagcatgtgccaggtggcaggggagggaactggggccacagagatgacttcggatgctgtgttctgattgtgcagcagggccgaccaagggagatgacagagtgtaaagaggcagggagcgggcatcctccagaggcagccagagttttgtgaagcatgcgctcctggcccctaggggcagaaagaaagggcttcaaccagggccgggtggagggcagtttgtccctaagggcagggtaatagagcgcgccaggcccagatgggactgatctgctggcacaaggtgaatgaagagagagtgaagggctttctgggagcagcagtcagccctgctaggtgggctggggcaggcagtgggtttgggggtgttgaagaaggtatatgggaaggctaaaaaagtagccagactgtggaggaccttgattgacagcagaggaatttggaagccacaaaacgtctttaagcagggcattatttggttgtatctgtgttgtgggaaatgcccccaggggctcagcaagtgctggacatgtggacggggctcatgtggagagtgagttgcagggatgaggccggagaccaggggctctcctgctgggagggaggggctggacctaagagagcacagcaggatgagtgggatatgatggtgggcatgggtatacaggaggcaggcctgagacagggagagggtttgggcctgagcagcaggtctggtgatgagaggcatcatcagcctctgggagtgtagtcttgtctcctgggccgtcctgcccagtgggaggcctccttggctgcttttgttcctggcctacccattgggttccagccatctccactgttgcagtggacatacggggcaagggccagcctgagggcactggagtggtctcagccctgcaaagggtcttctccaaaggcccttcccttagcctgggagggttggggttctccagggctggggtggtcagcagggttcaggaagccctcaaggccttggaagaacacagggctctcgatgtagggtgagagctcctgtctggagcctgctcggagctgggtggtcctgccaggaggcccctgcagtccccccttttcctgtagggagtcctgctgtccgtgatgtcagcctgactgcaggggacagtcctcagtccctagtgctggctgtgtagcctgggtcaggcccctgcacctgacacacagtaccattgtgcagagtgggcagaagcccactggcctctcactgatcagaatcatgggttgggggagtggggagcatgtggccctctgggtgtgttgacacctggcactgaggaggttctagctgccactcagcaatttctggcttccgtgaggaatctggcctccacctggagccagcaatgtctgtctggcactggctgagccccaggcatcagcacccctcaccacccggggaaagctggtttccattttacagaggacctggagacttggagaaaggcttgacacacgtgaggctggtcacggagaggtgggggggtcccagtgggagctcatggccatctggtcacctccctcctcatccctgtgcactccctgagccctggccagagccctgctcccagctacttcaggagcagtggcttttgtggcaatgggcaagcaggcagtggccggctctacccagcacacgtggcactaccatggctgcctggccggggggcagcctttgacctctacactactgaccacagggaaccaatgagattctccggatgtacatcgccctgacgggtctgcagcatgccggccgcatcctgactaccaggatccagtaggtgccattgtcaccgtgtgcttctcaggtcccatacctgcccagcaggggccagtccagggcagtgggaggaaagagctgccttgacctggagtgggggcatgggggtgtggcgcagccttgtggaggggaccttcccctgtggtagtggggggcttgctgcccagggaagccctcgctgccctgcccttatggccacagcaccctacagcttcagcataaataccgtatcccccatctggtccctcacactagaggcagctggtttttcagaacctgaagaatgagaggtgtccctttaaaggtgccaggcctcacagccaacataagccagtgtttctcttctctgcccttcttcccctcatgctcccctccacccccaccctaggggcacagtaatccaaaatcactgctggaggccaagtacaggttgctagtagcattttgtctccttcacaggagacagctgctgggaagctggctgtgactccacccctcatgggggagcatatgtgtggctcccctgaggagactggctgctctctggcaggtggtgggtttgggggggttcaggctgtagccaggggcccagcatacccaggccagaggggggcacggagcttctgggtgccgaatgggccatgttgctggacagtgagcgccagcagcgaggcctccagtcacaggaccatggactttctgcagtgagcttaaacaggccaaagtgagcacagtcatggataccgttggccggaggcttcgggactccctgggccgaactgtggacctggggctgacaggcaaccatggagttgtgcaccccagtcttgcggtgagtgggcctaacaggcataccccctatttcaatgccctcctgccagatctccttgtggcagaaaagatctcactgtggggggtctgggcttctccaggggaagttggggaacaccagctagtccatgacaccctggattgcttcccccagatggggcatctctgcctggtacccgggctgtgagacaggacagggcactgtagggatgaggtgctgaactgagtcctgtcttggttaataggacagtgccaacaagtttgaggagaacacctactgcttcggccggaccgtggagacactgctgctccgctttggcaaggtaaccaggccctcccaggcctgggtcgcaagcggtcctccaatttggccagcattcatgagactactttttgtcaagcatcctttgggaccaggcctagaacagaaatgttgatcaccctggagggatggggtggtgaggtcaggctgactttgtcagcctggggcccacttagctactcggatgggtacccttgctgggtgagttttctgcagtgtttttctgtgcacctttcaggtagagaggctccctagaatcgggagggcagctccacctggggcctgaatctagggacctgattggtggggcccttgctgctgaaggtggcagtagcacagtaagcactggcttctggtctcagccaagcttctgggacctggtcttgccttaacccctccctgaatctagagctcaaagagaagggaaaacagaaggtggctgggagccgttctcccacaacctgaagagaaaggtgttattgactccactttctcaaggaacacaggagactaagacaggcaaagatgcagcccagggagggaccatgtgggggactggtctaggtagtgagtccccacttggagcctctgtgatcccagaccatcatggaggagcagctggtactgaagcgggtggccaacatcctcatcaacctgtatggcatgacggccgtgctgtcgcgggccagccgctccatccgcattgggctccgcaaccacgaccacgaggtgagcccagcccagcctcacacagggcctggctgctgccatctgtcctgctgcactttaatgaagttgattgttgaggagggtgtggtcgggtgtgggggaggctgtgcaggttcaccatgcggtggccgtgggagggtctgtgctgctcaggagatggggctgttccctttcttcttcctgactgagagaagagggggtgagtgacaggggttcctgatcccagtgcccctacccccagcaagggacagaccctgcacattgcccgctgtgctggagggaggcgggtgcagtctctgaggacccactgtataccaggatctctgcctgcactttccagagcacctgcagataccaggattgtgacatctgcctttcagaggaaacagggtcagagatgttgagtcacttgctgttggggaaaggctgttggatcagggctggaattagaacccaagacggggtgactcctgtgccaggccttgtgacccctgccatgctacccagtttggctgataggctgggtttttgaagctcagaggtctgattccaggaatttgggcatatcttttctgtcctcggttctggcaggttctcttggccaacaccttctgcgtggaagcttacttgcagaatctcttcagcctctctcagctggacaagtgtgagtggcatgtcttgggggagggaaggaagggcccacttctaggcccctattgatggtgagctgtttctggaccctgtcaagctcccagagcctgctagctactcacagacctctgccttgagcgagggcctgggtaggcctgggcttagctgcagcagtgcccaccaggcactgtaggtgcatacctgccccattcaccaaggcagttgtatgtatatatgtgtgtgtgtgtatgtatgtatgtatgtatttatttcgagatggagtttcgctcttgttgcccaagctggagtgtaatggcgcagtcttggctccctgcaaactccacctcttgggttcaagcgattcttctgccccagcctcccgagtagctgggattacaggcgcacgccaccacgcccggctaattttttgtatttttagtagaaacagggtttcaccatgttagccaggctggtctccaactcctgacctcaggtgatctgcctgcctcagcctccaaaaatgctgggattacaggcatgagccaccgcaccgggcctgccaaggcaattttagattgagcaagtgcagagccctttgcgcaggacccctggcatctgcccagcatgcctggctgtattctcttttttttggagacatagtctcactttgtcacccaggctggctggagtgcagtggcatgatcttggctcactgcaacctccacctcctgggttcaagcaactcctgtgcctcagcctcctgagtagttgggattataggcacgcaccaccatgcccagctaatatttgtatttttagtagaaacaaacagggtttcaccatgttggccaagctggtctccaacccctgacctcaggtgatccgcccaccttggcctcccaaagtgctgggattacaggcatgagccactgtgcccagccctggctgtattcttgaagctgcccggggaaggctcacgaagggaggagcatctggttgtacctgattctggagacagcattttacctgcccctttacccactgtactccatccaaaatgaccctgcagtgccctgcagaggtctcaggccttggcctagagaacagagggctttgctcgtgctccccgctctgtctgcagtgctcttcctcttctatagccactcgaccatatctaggaatgcccagctcagtctacctctgaccctcacagtcctgttgacctgaggttctggatcagtgtccccacaaagcccagtcgtgttgccaagtgatgggtgtaggcgccagcactgtggcacttgctgagagtggcatatgattttttgcaggtcctagccctgggggtagcccagacacccccccagtgctgacaggttatgtgctgtggagggtgctgaaatggtttctcctccagtgggctggaatcacagatgggctgtttacggagcaagtgccggctccaccccatgagatctgggggttagagatgagcaggatgagtcctttgtaactgagaatgaagctgtacccctttctctccctgcagccctgaatcacttgctgggggtctggaggaggggttcacccttagggctgcttcatggtgggtgggctgactttgtggaaaaatgcccccacttcagccatgtttgtcttatcacggtgcagaaagatcacccaccatctctccttttccttcccagatgctccagaaaacctagatgagcagattaagaaagtgtcccagcagatccttgagaagcgagcctatatctgtgcccaccctctggacaggacatgctgaggcaggggacagtgtcccctgctaccgcccgcccctacccatggcccgttgctggatgactgttactcttttttcagaaggtgttgggattatcacaggttaagccttttgttccccgtctgcacctgaagggttgtcgcctggcctgggagagcctcttccaggttttgacctgcaggcagtgctctctaacaggaccatcacagcttctgaactgagccggagagagagaatggaattgctgacccctggaactggcgggtattctggtcattgaggagacaccatagtggaaactggggcttatgctgctgcctccagggtgtgaggtgggtggggacctgtgtcaggtgtggatagccatttctgctcaaccacacattctctaagaaacagcttgaaagctctgtctgggtcattcatttaaactagaagcagaggcacttaaaacatgtaccaggaaccatttaacaaagaatataaaatgtcacaatctgtgtactgttagcctttgctgtacttgtcacactgttccttagaaccagcctttaatgggtgacagcaggaccctgagaaccaccctttggtgatggcctcgggtcccctttgtcctcaccctgcaaggagggcccagaatgctaaggagcagacacacagtgcaggccacaatcccttggggttatgagcccttagtttttatccttctcaggagatgatggggaggctgtctcagctgatgatgttcccacctagggactttagtttctttacaagaactggcttctactcttgaggagaggatgaatggtatctccaggccagcaggcctttgcatttctccagcctcccttctgctggcacttgaaagattacaccaggtcccagcgtgctcactgtggtgaactttaagctttgatgtggtccttgggtggtctggagctctaaaatgcctattgtggacactcccttgagcacagagaaggcagccgactctttttcctccaagtatattcccaatttactgtgatgctggaaataggcaaggaggagactgggaacttggagagctgagctggctgagtggggctggcctgagcattctgccaggggtttggtaactagtttttaaaatggggaaagtttgtaaatattgtgaccgtgtaaataacctctcagtgaaacctgaagttctgttagtgatagcagggcagcattttgcacaaaatgaagcatgcatacctctggacagaaggctgcttagagtttctttgcacaggagaagtttggggaggggctgtcagacccaccccccttctgtgcagccttctggaagggggcttcactctaggctggtggcgtgtaaggcctcagtcttacatgccaatggagaatggcaagttctccattcatccatctgggttgaaaaggcctagcgaccagttcaagcctctccctctcatctgtagttgctaacttttcttaaacatgttgtgggaagaggagaccccagcaagtgtttcttaagtgatttcaccagtgaaacccccaggagacttttgctgggaaggctggcagtggagctcactaggaagccttcttaccaaggaaaagccttgtgttcttaggctagacagctctcctagctggagcctccttgagagccacagcagtaactgtgggcctgggacatgcccacagagagcaggtctcttcaggcaacctgggagatctagggcctactggggagggagggagccaagtctaggcaaatggagaaagtgacatttcagcaaacttgttagcacttccatggagctgtgatcagttgtccttaggagtcgaggaggagaggaagccatcacgttcacctgacctagttttctgggagaagtttctctggcagaccttgtttttagataggctcatgtctctttctccctgaacaaaggttctggctctgttaaccaagtttgggttctatgttaacctccagatgatcctgagatcaattttcataaacagggataaagaggaagaggacttggagggactggtacagcaagacctacgtttcctgtctctgccttaccccaaagaaagaactgtcagtatctttgccgctggaaggtcccagtgaagcccagagcctctgcccccagctcttggctggacacctagagatcagtcatgggtaatagtgttgaagctcaggaagcctttagacctgtcttccaacttccccactttatagccaagaaaccagacccagggcatgaagggatttgcctcaagtcacacaaatgtcacacttggggctagaatcctggtctgagttccagcccagcattcaatctcttttttcagacccattctgcatcttgcttttcttagcatagaaagtttggttgatagtgtaaacaaaatggataccactgaagatgcagagtggcacagagctcctgcctgcccacggcatcaggaggcccagcttggcaaacccttgcctgttacctgttacaggctttggtgcgggcgaagggagcagctcgaggaaaggtggtggtttcttgtacagatcaaagtccacgtggtgcctgtcccagctccacctgtctcgatccaacacaggctccagtacattagcaaacagggagttttccttccactcctaaattgggggagtaagtaaatcaggaggagaaaggtccctatggacaccccacctgagaccctgctcttccctgtggacctcattcagctctttgatgggtggcagcttgagatcctgaaagctgctttcggtgtcgctctgaagacctgtcacttggaatcccctggctgtgagccaggcctggcgggatttcttctgggctttcttctcctcttccttcaagtccaggggctccaccatggctgagaggtaatcctgtgagtacgtgaatctctttcttggctcctagaaatgggggcagacaggttggggtggaagggctaatagcaatcttggatttatttccaagtaggaatcagaaacagctgggggcataatcatagttcctgacaatgtaaatagtgcattgagaggaaatgactgtgcagtagccctgtaagggacatattattgtcccctttgatgggagaagccgtttcctaaagttaatatgtgctggaagcctaaaccatggctttcccttctgttggtagctgccttgataagcagcaatcataaagtgttccccagaggtaaggatgctacagttgttctcctttatgtacatctgagcttacattgaggatcttgggcttaccctcaggtgtggaggattcacatttagtgtggaacagaacacctctcaacatctgagccttgtctacttcccctagctgattggctttcatctgtatagttgagatcccccactgacctccaggcaggcatggtcagaataaagaactcatg

SEQ ID NO: 10484 - DNA, 1872 bp, Homo sapiens
gtgaaagacaaaatcacagcattcatagtagaaagagactttggtggagtcactaatgggaaacccgaagataaattaggcattcggggctccaacacttgtgaagtccattttgaaaacaccaagatacctgtggaaaacatccttggagaggtcggagatgggtttaaggtggccatgaacatcctcaacagcggccggttcagcatgggcagcgtcgtggctgggctgctcaagagattgattgaaatgactgctgagtacgcctgcacaaggaaacagtttaacaagaggctcagtgaatttggattgattcaggagaaatttgcactgatggctcagaaggcttacgtcatggagagtatgacctacctcacagcagggatgctggaccaacctggctttcccgactgctccatcgaggcagccatggtgaaggtgttcagctccgaggccgcctggcagtgtgtgagtgaggcgctgcagatcctcgggggcttgggctacacaagggactatccgtacgagcgcatactgcgtgacacccgcatcctcctcatcttcgagggaaccaatgagattctccggatgtacatcgccctgacgggtctgcagcatgccggccgcatcctgactaccaggatccatgagcttaaacaggccaaagtgagcacagtcatggataccgttggccggaggcttcgggactccctgggccgaactgtggacctggggctgacaggcaaccatggagttgtgcaccccagtcttgcggacagtgccaacaagtttgaggagaacacctactgcttcggccggaccgtggagacactgctgctccgctttggcaagaccatcatggaggagcagctggtactgaagcgggtggccaacatcctcatcaacctgtatggcatgacggccgtgctgtcgcgggccagccgctccatccgcattgggctccgcaaccacgaccacgaggttctcttggccaacaccttctgcgtggaagcttacttgcagaatctcttcagcctctctcagctggacaagtatgctccagaaaacctagatgagcagattaagaaagtgtcccagcagatccttgagaagcgagcctatatctgtgcccaccctctggacaggacatgctgaggcaggggacagtgtcccctgctaccgcccgcccctacccatggcccgttgctggatgactgttactcttttttcagaaggtgttgggattatcacaggaccatcacagcttctgaactgagccggagagagagaatggaattgctgacccctggaactggcgggtattctggtcattgaggagacaccatagtggaaactggggcttatgctgctgcctccagggtgtgagggataaagaggaagaggacttggagggactggtacagcaagacctacgtttcctgtctctgccttaccccaaagaaagaactgtcagtatctttgccgctggaaggtcccagtgaagcccagagcctctgcccccagctcttggctggacacctagagatcagtcatggctctttgatgggtggcagcttgagatcctgaaagctgctttcggtgtcgctctgaagacctgtcacttggaatcccctggctgtgagccaggcctggcgggatttcttctgggctttcttctcctcttccttcaagtccaggggctccaccatggctgagaggtaatcctgtgtggaggattcacatttagtgtggaacagaacacctctcaacatctgagccttgtctacttcccctagctgattggctttcatctgtatagttgagatcccccactgacctccaggcaggcatggtcagaataaagaactcatg

SEQ ID NO: 10485 - DNA, 2431 bp, Homo sapiens
agacgtgtgtgtgtccctgcggcgctaagaaggggagactgaggctgaggctggggaacatcgggcagcatgagcggctgcgggctcttcctgcgcaccacggctgcggctcgtgcctgccggggtctggtggtctctaccgcgaaccggcggctactgcgcaccagcccgcctgtacgagctttcgccaaagagcttttcctaggcaaaatcaagaaggtaacgcgagccctgggcgaacccttgctgtctggctcccgcttttcaccctcagctgcaagactggtgttgaactttgtgagattccccaaacctgccagagagatacaccctgcggccgaggcgtgttaacactccggattcctgagttccaggaaaaccttcccagagaaaggaaagaagttttcccatttccagaagttagccaagatgaacttaatgaaatcaatcagttcttgggacccgtggaaaaattcttcactgaagaggtggactcccgaaaaattgaccaggaagggaaaatcccagatgaaactttggagaaattgaagagcctagggctttttgggctgcaagtcccagaagaatatggtggcctgggcttctccaacaccatgtactcaagactaggggagatcatcagcatggatgggtccatcactgtgaccctggcagcgcaccaggctattggcctcaaggggatcatcttggctggcactgaggagcagaaagccaaatacttgcctaaactggcgtccggggagcacattgcagccttctgcctcacggagccagccagtgggagcgatgcagcctcaatccggagcagagccacactaagtgaagacaagaagcactacatcctcaatggctccaaggtctggattactaatggaggactggccaatatttttactgtgtttgcaaagactgaggtcgttgattctgatggatcagtgaaagacaaaatcacagcattcatagtagaaagagactttggtggagtcactaatgggaaacccgaagataaattaggcattcggggctccaacacttgtgaagtccattttgaaaacaccaagatacctgtggaaaacatccttggagaggtcggagatgggtttaaggtggccatgaacatcctcaacagcggccggttcagcatgggcagcgtcgtggctgggctgctcaagagattgattgaaatgactgctgagtacgcctgcacaaggaaacagtttaacaagaggctcagtgaatttggattgattcaggagaaatttgcactgatggctcagaaggcttacgtcatggagagtatgacctacctcacagcagggatgctggaccaacctggctttcccgactgctccatcgaggcagccatggtgaaggtgttcagctccgaggccgcctggcagtgtgtgagtgaggcgctgcagatcctcgggggcttgggctacacaagggactatccgtacgagcgcatactgcgtgacacccgcatcctcctcatcttcgagggaaccaatgagattctccggatgtacatcgccctgacgggtctgcagcatgccggccgcatcctgactaccaggatccatgagcttaaacaggccaaagtgagcacagtcatggataccgttggccggaggcttcgggactccctgggccgaactgtggacctggggctgacaggcaaccatggagttgtgcaccccagtcttgcggacagtgccaacaagtttgaggagaacacctactgcttcggccggaccgtggagacactgctgctccgctttggcaagaccatcatggaggagcagctggtactgaagcgggtggccaacatcctcatcaacctgtatggcatgacggccgtgctgtcgcgggccagccgctccatccgcattgggctccgcaaccacgaccacgaggttctcttggccaacaccttctgcgtggaagcttacttgcagaatctcttcagcctctctcagctggacaagtatgctccagaaaacctagatgagcagattaagaaagtgtcccagcagatccttgagaagcgagcctatatctgtgcccaccctctggacaggacatgctgaggcaggggacagtgtcccctgctaccgcccgcccctacccatggcccgttgctggatgactgttactcttttttcagaaggtgttgggattatcacaggttaagccttttgttccccgtctgcacctgaagggttgtcgcctggcctgggagagcctcttccaggttttgacctgcaggcagtgctctctaacaggaccatcacagcttctgaactgagccggagagagagaatggaattgctgacccctggaactggcgggtattctggtcattgaggagacaccatagtggaaactggggcttatgctgctgcctcca

SEQ ID NO: 10486 - DNA, 8725 bp, Homo sapiens
aacactccaggagaaatttgcactgatggctcagaaggcttacgtcatggagagtatgacctacctcacagcagggatgctggaccaacctggctttcccgactgctccatcgaggcagccatggtgaaggtaaccctggcatagccagagagctggcgctggagggaggcttgggaaatctccctcactgtgacctttcaagcccatgctgttgcctgtcatcttcctcctgtcattgatccagtatttatgatgcacttgccctgtgtagcactccagggataggcaggcagcggggagcagcagtagggaagtgtccagtgggccagtggatcagtagtttatagcagaaggagaccgttatgataatatccttttagagtaataacattgcatctggcttgtgtgagaaagacttcttttttccttagtttatggccttcctactttctggtatcaaaactttatcttaaaaactaagcatatggcagggcgcggtggctcacacctgtaatcccagcactttggggggccgaggtggatggatcacctgaggtctggagttcgagaccagcctggccaacatggtaaaaccccatctctactaaaaacacaaaaaattagccgggcatagtggcgggcacctgtaaccccagctacttgggaagctgaggcaagagaatcacttgaacccggtgggggcggaggttgcagtgagccgaggttgtgccattgcacaccagcctaggcaacaagagcaaaactccatctcaaaaaaaaacaaaaaacaaaaaacatgtatgagcctgggcaacatggcgaaaccccatctctacaaaaaatacaaaaattagctggcatggtggcacacgcctatagtccctgctacctgggaggctgaggtgggaagagcatcttatttggttaaggtagatactagaatttgcttttgttttgttgagggtggagggtgtcattttttagctgtaataaaaaagatggccacacttggggggaccctactttgtgccccccacaattgtttttaagctggtctctggaattgagctcttgagagaaatagtgagaggtatggcagcttacagaagcaaacatcctggtgtcggcaggagagtctacctaaaaggttgggatcctgaagtggcaaggtccctaaaaaaataaaaaattaaaaacaaaaaggctgggcatcttggaccgtgtttgagtcttttctaggtgcagtctgtgtactgggtgcatttgcatgtgttttatcatctcgttttcttgtcacccttgaacagtgaccacagacattagtttgctgtaggccagcctcttccagatgctaagcctagggctaaacatggcagtatgtttgcccccaaggcacttatagtgtgcacagacagaaagaaatcacggccgctggggcttggcaggaacaggtcaggttttctcgggaaggggagatcttaggtgggttttaaaggaacaggagctcagccaggtgcagatagggtgaaggcaggcccagaggtacagaaggtcatggtggggtagggaacacaagctggccagtgtggtcacggaaggcaaaggacttgaccacatcacccctcaagttcctccctggccgatctcctccccaagcccgtgtgcctcccatgcctccccagccacccagctccctgcagcgtaggtcctccttttggaaaggattcagtgtgacaccccacaggtgttcagctccgaggccgcctggcagtgtgtgagtgaggcgctgcagatcctcgggggcttgggctacacaagggactatccgtacgagcgcatactgcgtgacacccgcatcctcctcatcttcgaggtgagtggccccgccaccagctaagctgtgctccacccccaccctgcctggtcctaaagatgctgctcagggcctcgcagaggcccccgcagcccagggctgggtcgcatgctctcaggggctctcctagccctggcacgtctccttcccgactgctgccctccatgaagtcacaagcctgaggagtcagttcagttagcatgtgccaggtggcaggggagggaactggggccacagagatgacttcggatgctgtgttctgattgtgcagcagggccgaccaagggagatgacagagtgtaaagaggcagggagcgggcatcctccagaggcagccagagttttgtgaagcatgcgctcctggcccctaggggcagaaagaaagggcttcaaccagggccgggtggagggcagtttgtccctaagggcagggtaatagagcgcgccaggcccagatgggactgatctgctggcacaaggtgaatgaagagagagtgaagggctttctgggagcagcagtcagccctgctaggtgggctggggcaggcagtgggtttgggggtgttgaagaaggtatatgggaaggctaaaaaagtagccagactgtggaggaccttgattgacagcagaggaatttggaagccacaaaacgtctttaagcagggcattatttggttgtatctgtgttgtgggaaatgcccccaggggctcagcaagtgctggacatgtggacggggctcatgtggagagtgagttgcagggatgaggccggagaccaggggctctcctgctgggagggaggggctggacctaagagagcacagcaggatgagtgggatatgatggtgggcatgggtatacaggaggcaggcctgagacagggagagggtttgggcctgagcagcaggtctggtgatgagaggcatcatcagcctctgggagtgtagtcttgtctcctgggccgtcctgcccagtgggaggcctccttggctgcttttgttcctggcctacccattgggttccagccatctccactgttgcagtggacatacggggcaagggccagcctgagggcactggagtggtctcagccctgcaaagggtcttctccaaaggcccttcccttagcctgggagggttggggttctccagggctggggtggtcagcagggttcaggaagccctcaaggccttggaagaacacagggctctcgatgtagggtgagagctcctgtctggagcctgctcggagctgggtggtcctgccaggaggcccctgcagtccccccttttcctgtagggagtcctgctgtccgtgatgtcagcctgactgcaggggacagtcctcagtccctagtgctggctgtgtagcctgggtcaggcccctgcacctgacacacagtaccattgtgcagagtgggcagaagcccactggcctctcactgatcagaatcatgggttgggggagtggggagcatgtggccctctgggtgtgttgacacctggcactgaggaggttctagctgccactcagcaatttctggcttccgtgaggaatctggcctccacctggagccagcaatgtctgtctggcactggctgagccccaggcatcagcacccctcaccacccggggaaagctggtttccattttacagaggacctggagacttggagaaaggcttgacacacgtgaggctggtcacggagaggtgggggggtcccagtgggagctcatggccatctggtcacctccctcctcatccctgtgcactccctgagccctggccagagccctgctcccagctacttcaggagcagtggcttttgtggcaatgggcaagcaggcagtggccggctctacccagcacacgtggcactaccatggctgcctggccggggggcagcctttgacctctacactactgaccacagggaaccaatgagattctccggatgtacatcgccctgacgggtctgcagcatgccggccgcatcctgactaccaggatccagtaggtgccattgtcaccgtgtgcttctcaggtcccatacctgcccagcaggggccagtccagggcagtgggaggaaagagctgccttgacctggagtgggggcatgggggtgtggcgcagccttgtggaggggaccttcccctgtggtagtggggggcttgctgcccagggaagccctcgctgccctgcccttatggccacagcaccctacagcttcagcataaataccgtatcccccatctggtccctcacactagaggcagctggtttttcagaacctgaagaatgagaggtgtccctttaaaggtgccaggcctcacagccaacataagccagtgtttctcttctctgcccttcttcccctcatgctcccctccacccccaccctaggggcacagtaatccaaaatcactgctggaggccaagtacaggttgctagtagcattttgtctccttcacaggagacagctgctgggaagctggctgtgactccacccctcatgggggagcatatgtgtggctcccctgaggagactggctgctctctggcaggtggtgggtttgggggggttcaggctgtagccaggggcccagcatacccaggccagaggggggcacggagcttctgggtgccgaatgggccatgttgctggacagtgagcgccagcagcgaggcctccagtcacaggaccatggactttctgcagtgagcttaaacaggccaaagtgagcacagtcatggataccgttggccggaggcttcgggactccctgggccgaactgtggacctggggctgacaggcaaccatggagttgtgcaccccagtcttgcggtgagtgggcctaacaggcataccccctatttcaatgccctcctgccagatctccttgtggcagaaaagatctcactgtggggggtctgggcttctccaggggaagttggggaacaccagctagtccatgacaccctggattgcttcccccagatggggcatctctgcctggtacccgggctgtgagacaggacagggcactgtagggatgaggtgctgaactgagtcctgtcttggttaataggacagtgccaacaagtttgaggagaacacctactgcttcggccggaccgtggagacactgctgctccgctttggcaaggtaaccaggccctcccaggcctgggtcgcaagcggtcctccaatttggccagcattcatgagactactttttgtcaagcatcctttgggaccaggcctagaacagaaatgttgatcaccctggagggatggggtggtgaggtcaggctgactttgtcagcctggggcccacttagctactcggatgggtacccttgctgggtgagttttctgcagtgtttttctgtgcacctttcaggtagagaggctccctagaatcgggagggcagctccacctggggcctgaatctagggacctgattggtggggcccttgctgctgaaggtggcagtagcacagtaagcactggcttctggtctcagccaagcttctgggacctggtcttgccttaacccctccctgaatctagagctcaaagagaagggaaaacagaaggtggctgggagccgttctcccacaacctgaagagaaaggtgttattgactccactttctcaaggaacacaggagactaagacaggcaaagatgcagcccagggagggaccatgtgggggactggtctaggtagtgagtccccacttggagcctctgtgatcccagaccatcatggaggagcagctggtactgaagcgggtggccaacatcctcatcaacctgtatggcatgacggccgtgctgtcgcgggccagccgctccatccgcattgggctccgcaaccacgaccacgaggtgagcccagcccagcctcacacagggcctggctgctgccatctgtcctgctgcactttaatgaagttgattgttgaggagggtgtggtcgggtgtgggggaggctgtgcaggttcaccatgcggtggccgtgggagggtctgtgctgctcaggagatggggctgttccctttcttcttcctgactgagagaagagggggtgagtgacaggggttcctgatcccagtgcccctacccccagcaagggacagaccctgcacattgcccgctgtgctggagggaggcgggtgcagtctctgaggacccactgtataccaggatctctgcctgcactttccagagcacctgcagataccaggattgtgacatctgcctttcagaggaaacagggtcagagatgttgagtcacttgctgttggggaaaggctgttggatcagggctggaattagaacccaagacggggtgactcctgtgccaggccttgtgacccctgccatgctacccagtttggctgataggctgggtttttgaagctcagaggtctgattccaggaatttgggcatatcttttctgtcctcggttctggcaggttctcttggccaacaccttctgcgtggaagcttacttgcagaatctcttcagcctctctcagctggacaagtgtgagtggcatgtcttgggggagggaaggaagggcccacttctaggcccctattgatggtgagctgtttctggaccctgtcaagctcccagagcctgctagctactcacagacctctgccttgagcgagggcctgggtaggcctgggcttagctgcagcagtgcccaccaggcactgtaggtgcatacctgccccattcaccaaggcagttgtatgtatatatgtgtgtgtgtgtatgtatgtatgtatgtatttatttcgagatggagtttcgctcttgttgcccaagctggagtgtaatggcgcagtcttggctccctgcaaactccacctcttgggttcaagcgattcttctgccccagcctcccgagtagctgggattacaggcgcacgccaccacgcccggctaattttttgtatttttagtagaaacagggtttcaccatgttagccaggctggtctccaactcctgacctcaggtgatctgcctgcctcagcctccaaaaatgctgggattacaggcatgagccaccgcaccgggcctgccaaggcaattttagattgagcaagtgcagagccctttgcgcaggacccctggcatctgcccagcatgcctggctgtattctcttttttttggagacatagtctcactttgtcacccaggctggctggagtgcagtggcatgatcttggctcactgcaacctccacctcctgggttcaagcaactcctgtgcctcagcctcctgagtagttgggattataggcacgcaccaccatgcccagctaatatttgtatttttagtagaaacaaacagggtttcaccatgttggccaagctggtctccaacccctgacctcaggtgatccgcccaccttggcctcccaaagtgctgggattacaggcatgagccactgtgcccagccctggctgtattcttgaagctgcccggggaaggctcacgaagggaggagcatctggttgtacctgattctggagacagcattttacctgcccctttacccactgtactccatccaaaatgaccctgcagtgccctgcagaggtctcaggccttggcctagagaacagagggctttgctcgtgctccccgctctgtctgcagtgctcttcctcttctatagccactcgaccatatctaggaatgcccagctcagtctacctctgaccctcacagtcctgttgacctgaggttctggatcagtgtccccacaaagcccagtcgtgttgccaagtgatgggtgtaggcgccagcactgtggcacttgctgagagtggcatatgattttttgcaggtcctagccctgggggtagcccagacacccccccagtgctgacaggttatgtgctgtggagggtgctgaaatggtttctcctccagtgggctggaatcacagatgggctgtttacggagcaagtgccggctccaccccatgagatctgggggttagagatgagcaggatgagtcctttgtaactgagaatgaagctgtacccctttctctccctgcagccctgaatcacttgctgggggtctggaggaggggttcacccttagggctgcttcatggtgggtgggctgactttgtggaaaaatgcccccacttcagccatgtttgtcttatcacggtgcagaaagatcacccaccatctctccttttccttcccagatgctccagaaaacctagatgagcagattaagaaagtgtcccagcagatccttgagaagcgagcctatatctgtgcccaccctctggacaggacatgctgaggcaggggacagtgtcccctgctaccgcccgcccctacccatggcccgttgctggatgactgttactcttttttcagaaggtgttgggattatcacaggttaagccttttgttccccgtctgcacctgaagggttgtcgcctggcctgggagagcctcttccaggttttgacctgcaggcagtgctctctaacaggaccatcacagcttctgaactgagccggagagagagaatggaattgctgacccctggaactggcgggtattctggtcattgaggagacaccatagtggaaactggggcttatgctgctgcctccagggtgtgaggtgggtggggacctgtgtcaggtgtggatagccatttctgctcaaccacacattctctaagaaacagcttgaaagctctgtctgggtcattcatttaaactagaagcagaggcacttaaaacatgtaccaggaaccatttaacaaagaatataaaatgtcacaa

SEQ ID NO: 10487 - DNA, 1939 bp, Homo sapiens
aacactccaggagaaatttgcactgatggctcagaaggcttacgtcatggagagtatgacctacctcacagcagggatgctggaccaacctggctttcccgactgctccatcgaggcagccatggtgaaggtgttcagctccgaggccgcctggcagtgtgtgagtgaggcgctgcagatcctcgggggcttgggctacacaagggactatccgtacgagcgcatactgcgtgacacccgcatcctcctcatcttcgagggaaccaatgagattctccggatgtacatcgccctgacgggtctgcagcatgccggccgcatcctgactaccaggatccatgagcttaaacaggccaaagtgagcacagtcatggataccgttggccggaggcttcgggactccctgggccgaactgtggacctggggctgacaggcaaccatggagttgtgcaccccagtcttgcggacagtgccaacaagtttgaggagaacacctactgcttcggccggaccgtggagacactgctgctccgctttggcaaggtaaccaggccctcccaggcctgggtcgcaagcggtcctccaatttggccagcattcatgagactactttttgtcaagcatcctttgggaccaggcctagaacagaaatgttgatcaccctggagggatggggtggtgaggtcaggctgactttgtcagcctggggcccacttagctactcggatgggtacccttgctgggtgagttttctgcagtgtttttctgtgcacctttcaggtagagaggctccctagaatcgggagggcagctccacctggggcctgaatctagggacctgattggtggggcccttgctgctgaaggtggcagtagcacagtaagcactggcttctggtctcagccaagcttctgggacctggtcttgccttaacccctccctgaatctagagctcaaagagaagggaaaacagaaggtggctgggagccgttctcccacaacctgaagagaaaggtgttattgactccactttctcaaggaacacaggagactaagacaggcaaagatgcagcccagggagggaccatgtgggggactggtctaggtagtgagtccccacttggagcctctgtgatcccagaccatcatggaggagcagctggtactgaagcgggtggccaacatcctcatcaacctgtatggcatgacggccgtgctgtcgcgggccagccgctccatccgcattgggctccgcaaccacgaccacgaggttctcttggccaacaccttctgcgtggaagcttacttgcagaatctcttcagcctctctcagctggacaagtatgctccagaaaacctagatgagcagattaagaaagtgtcccagcagatccttgagaagcgagcctatatctgtgcccaccctctggacaggacatgctgaggcaggggacagtgtcccctgctaccgcccgcccctacccatggcccgttgctggatgactgttactcttttttcagaaggtgttgggattatcacaggttaagccttttgttccccgtctgcacctgaagggttgtcgcctggcctgggagagcctcttccaggttttgacctgcaggcagtgctctctaacaggaccatcacagcttctgaactgagccggagagagagaatggaattgctgacccctggaactggcgggtattctggtcattgaggagacaccatagtggaaactggggcttatgctgctgcctccagggtgtgaggtgggtggggacctgtgtcaggtgtggatagccatttctgctcaaccacacattctctaagaaacagcttgaaagctctgtctgggtcattcatttaaactagaagcagaggcacttaaaacatgtaccaggaaccatttaacaaagaatataaaatgtcacaa

SEQ ID NO: 10488 - DNA, 15452 bp, Homo sapiens
ccggagcagagccacactaagtgaagacaagaagcactacatcctcaatggctccaaggtagggttccttccccatggccacattagggtctcagtcacaaccttcactgccactgagtgagcactctccacacaccagggattgtacctgctgctgtagcaccgactaccttcttgagctgcttttatgtgtttgtttttaattttttttagttttttttatttgcgatggagtctctgtcacccaggctggagtgcagtggtgtaatctcagctcactgaaacttctgcctcccaggtttccaatgattctcctgccttagcctcctgggtagctgggattagaggtgcgtgtcaccactcctggctaatttttgtattttcagtagagatggagtttcaccatgttgtccagtcaggtcttgaactcctgacctcaagtgatctgcccacctcggcctcccaaagtgctgagtttacaggcaatgagccactgtgcccggcttgtaaacccaaaaaatctttaaattttttgttacacaaagtttcagacatattctgtgtgcctggctggccctaactccggcagtcacctgcttatggccactgtgcctcttccagcagcatcgccacctccagatcgcatggtaacaatctcagcatgcctctctaaaagacaggagttttttttgtttgtttttgttttttaataaacacaaagccgtaatacccttatcacattttaaaaattgataatttctcttttcttttgagacagggtcccgctctgtcacccaggctggagtgcagtggcacgatcttggctcactgcagcctcaacttcctgggctcaggtgattctcctacctcaacctcccaagcagctgggagtacaggcacacagctaactctttgtattttttttttggtagagatgggttttcaccgtgttgcccaggttggtctcaaactccggggctcaagtggtctgcccacctcggcctcccaaagtgctgggattacaggcgtgagccactgtgcccagctaataatttcttacttctatcagcattcaaatatccctgattgcctcatacctttttttggtttaactgtttgcttgaattaagatccacacaagtcccatctgttgctgtttgttaaggagtctgtttctgcctctgtctccctctgtttcctttcctcctcctcaccaccctcccgccttttttcatttctttgtagaattaacaaataaatgttgtgtgtatttacatctacaacatgatgtttttatatatgtataccttaagaaatgattaaaccctttctttcttgaagaaatgcagttgtctggcggtggagcctgagctgtctgacaactttgggtgttctttcccccgcccccgcctccacctggccatccatgtcccttgggaaaatccttgctctggggaaagtgggctgagccctgtcctctattcactcatgcttggttggcttctgcagagccaaggaccctgcatgtctggcctgaggtctgactggcagctggagcttgatggacaaagacagagctgaggtgggtcacataggggtttggttttctccaaagtccatctttctgtcctcaggtctggattactaatggaggactggccaatatttttactgtgtttgcaaagactgaggtcgttgattctgatggatcagtgaaagacaaaatcacagcattcatagtagaaagagactttggtggagtcactaatgggaaacccgaagataaattaggcattcggggctccaacagtaagtagctcctgtgcgcgcgtgcgcgtgtgtgtgtgtaagggggagactggcctttgacggtgtgtgtgtgtgtgtgtgtgtgtgtgtgtgtgtgtgtgtaagggggagactggcccttgactctgtccaaatagcaagataaaatgagatttaaacactttcagtttttgttaagcattttaaaaagatcaaattaagaatgccacttgggctttgtctttgttcctgcagctgagtgctgctcacttgaaggcctgctggtcatcccctgctgtagctgccctagcagacacaccaccttagagctcagcttacagtccccagcctttagttgtctcagtctgcagtgcctggcagcctgcttcaggctgtgagttgggttcaggtccatctgggttcaggtccatctggaggcttgttcttagagcagatcataagcacctaaggggccaagccaagccatataagtactatttttgccgtgggagacatagtctccctctgtcacccagcctggaatgcagtgctgtgatctcagctcactgcaacctctgcctcctgggttcgagtgattctcctgtctcagcctcccaagtaattgggactacaggcgtgcaccaccacacctggctaatttttgtattttttgtagagatggggtttcaacatgttgcccagacttgtcttgaactcctgagctcaggcagtctacctgcctcagcctcccaaagtgctaggattacacgtgtgagttaccatacctggccacttttttttggtttgttttttttgagacggagtctcgctctgtcgcccaggctggagtgcagtggcactatcttggctcactgcaagctccgcctcccgggttcacgccattctcctgcctcagcctcccgaatagctgggactacagctgcctgccaccacgtccggctaattttttctattttttagtggagatggggtttcaccatgttagccaggatggcctcgatctcctgacctcgtgatccgctcacctcggcctcccaaagtgcgtgagccaccgcacccggcctttttttttttttttttaaatagagatgaggtcttgctatgttgtcctggctggtctcgaactcctgggttcaagtgatcttcctgcctctgcctcccaaaatgctgggattataggcatgagccaccatacccgactgaccctaaaacacatttaaggtctctgttcatgttgggtcagctctttgtattggccacaggaagtcacatggtcatacctagcaggcagggaaagggagggaggtccatccctcctcacagtgggagagtgctacagttagattgcaggggtgtgattgtgttagagttaagaattgagaccagtggtcccagtctaccctaaggcttcaggaaatgctgttctttccctcactttgcttgttctggctctttatatgcctggttcttttcattcttaaacttctgctaaatgtcaccttagaaaagtctgacatagtccttaataaaaatattattatccacccccttgccaacctccatttctctttatcgtgatgccctatttatttcatccatagcactgatcacaatattacattgttttgtttatagcttttgtctcccaaatcaaagtatgagcctccacaaagataggaactttgtctttctatactgtcctaccaaacattggatggatggatggatggatggatggatgaattgcctgcttgcaggtcagatgcagagtggtttgcattgtcagatgatatcttaaatttcatgtgtttcagcttgtgaagtccattttgaaaacaccaagatacctgtggaaaacatccttggagaggtcggagatgggtttaaggtgagttgccagccacagccccttgtaccaggtagtgtcatgagtgcagtttgtcgcccccagcttttgccctatccctgctcgtagcagagtagcctgtgcatggcaggtgactttgcatggttatctgttgggaaattggcaaaatggacactggaaaattggctggctcctagaagaagtgtatggtaaggattaggaatttcccttcacctctgaggccctattcgcctcgagcggaggctaagattcccttctgcagtgggtatgagaaagcagcctgtgggctctggtgaatctcaagctctgtgtaccacaaccctggtctgcatcgctgccctactcttttctttttggactaagacttatttttatcaagagatgattcatatgacaaaggactcaccattttaaaatattatttcagtggtttttagtatattcactatgttgttcaaatatctcacacagaacatttcctcaccccaaaaagaaatgttgtaccatccagtatgacccttaccccatcccttggctgctactcttttactttatgtccctatggatttgcctgtttggaacatttcataaaaatgcagtcatatacaagatccagtctttggtgacaggcttctctcacattgcgtgatgttttcaaggttcatctctctcatagcatgaatgagtaattcattccttttatggctgaattctcttctgttgagtggagataccacattttgttcatccattcaccagctgatggacattggggttgttaccgcttttggctgctatcagtaatgctacttatgaacattcatgtcaagttttaatgtggaaataacgttttcaggtattttgatttatgcctaaaagtagaatttctgtttggcccaagttggtcttgaactcctgggctcaagcgatcctcttgccttggccttccaaaatgctggtactacaggtgggagccaccatgcccagctctggcatggtcctttggaataacgttcagtggtcttgtgtgtggggatgttggtagagctgcaacagtgactgaaccaccttgttctgaggcattaggatggtgctttctcccagcttgagggaaggcaagctgatccacctggcctggtttcgttgcggcctcctccctctgcctccttcagggcccctgggctctccctgttctccctgcaggtggccatgaacatcctcaacagcggccggttcagcatgggcagcgtcgtggctgggctgctcaagagattgattggtaggtaagttagggacaaggccctttgtgccccaccccctgctgccccggctccaaccctggaggctctgccattcccccggccccttccaggccagtgctgaaccaggctaccagcctgagctcagtccctgggcttttgtggagaccagagggtctcctcagcctgcccctgaggtttgttgtcttccgcattcctctgtttcacctccacccgggtgatgctgactgggggacaggctttctgtctggggtggggatggggattggggaatgggctgtctgtctggagtgagaggttgccactgaccagtaggagcagagctgcttggtgagcacacaccaagaaccaggcttccaggatacacggcctctggttcccaaggtccgtgcctcctgggtgactctgcatggtgggtggggagtaggatcgggtttggaacccaggtccctgggcccctggatcttacctttgttctattctgtcagaataccccaaacctccattttcctttgccagtgaacttagaacagccctgtaaccatcctggttgtggtggaagcatttgcggggaaatgggggtacccggggcagcacacccctaagtgctttatgaagctcctctttggtgccaggctctgggcctgttttggcttccctccattttagagatgagaagacagagactcagagagggcaagcgatttgttccagactgtgctcctggacccaaaatgaaagctgtcaggctccaggctcagggctcttcttactcaggcacaaggcctctggggagctcctctgctggggctctgagtggggctcggccctctacacctcctgagtgcaccacacctgggagagcctgtggaggacatggctatggcggggcgggggtgcttctgcctgggagaggcgccatgtcactcttgggcccttagagctcagcactttgtcacagccacacgcctggaagccccagcctgagtattcaagccaggcggccccacctgctttggtcactgcacggggtgtgagcctgcaccacctctgtctggggcctctgtgcctggctttgtgcgaggcgccctcccccttccacctggttgcatcttcacagcgactctgaggtgggggtggtgttcagggaggtgtcgcactcggcctgaggcacagcctgtaagaaccattgccaggattcaagtctgtatctgatgccaaactctgtgtgtgggtgccatgaggaggggtggttctcctctgacccacgggtgctggcaagtgggggtgccagcttctggggtatttgacctcagcagacacgcttctcacagtgcccacctgtgggaagggtaaggatgatggccataggaaatcatgtttgaaccacagaaatattccagttcattctaataactctgctcttcctcagaaatgactgctgagtacgcctgcacaaggaaacagtttaacaagaggctcagtgaatttggattgattcaggtaccaatggttgagtactgtatttgtgcatttcactgtgtgacatgaacggtgtgttcttttgatgtctctgtactggtgacttctgtggtgatttgggaagaagactagttaaggctttatttgacacgggtcactgggcttgcttctcttgggcattgaggcttctgacttaattactttctctcctgtttcacagatttggctctcagcacatgcaaattgtttcttgtgttttttctgaacactccaggagaaatttgcactgatggctcagaaggcttacgtcatggagagtatgacctacctcacagcagggatgctggaccaacctggctttcccgactgctccatcgaggcagccatggtgaaggtaaccctggcatagccagagagctggcgctggagggaggcttgggaaatctccctcactgtgacctttcaagcccatgctgttgcctgtcatcttcctcctgtcattgatccagtatttatgatgcacttgccctgtgtagcactccagggataggcaggcagcggggagcagcagtagggaagtgtccagtgggccagtggatcagtagtttatagcagaaggagaccgttatgataatatccttttagagtaataacattgcatctggcttgtgtgagaaagacttcttttttccttagtttatggccttcctactttctggtatcaaaactttatcttaaaaactaagcatatggcagggcgcggtggctcacacctgtaatcccagcactttggggggccgaggtggatggatcacctgaggtctggagttcgagaccagcctggccaacatggtaaaaccccatctctactaaaaacacaaaaaattagccgggcatagtggcgggcacctgtaaccccagctacttgggaagctgaggcaagagaatcacttgaacccggtgggggcggaggttgcagtgagccgaggttgtgccattgcacaccagcctaggcaacaagagcaaaactccatctcaaaaaaaaacaaaaaacaaaaaacatgtatgagcctgggcaacatggcgaaaccccatctctacaaaaaatacaaaaattagctggcatggtggcacacgcctatagtccctgctacctgggaggctgaggtgggaagagcatcttatttggttaaggtagatactagaatttgcttttgttttgttgagggtggagggtgtcattttttagctgtaataaaaaagatggccacacttggggggaccctactttgtgccccccacaattgtttttaagctggtctctggaattgagctcttgagagaaatagtgagaggtatggcagcttacagaagcaaacatcctggtgtcggcaggagagtctacctaaaaggttgggatcctgaagtggcaaggtccctaaaaaaataaaaaattaaaaacaaaaaggctgggcatcttggaccgtgtttgagtcttttctaggtgcagtctgtgtactgggtgcatttgcatgtgttttatcatctcgttttcttgtcacccttgaacagtgaccacagacattagtttgctgtaggccagcctcttccagatgctaagcctagggctaaacatggcagtatgtttgcccccaaggcacttatagtgtgcacagacagaaagaaatcacggccgctggggcttggcaggaacaggtcaggttttctcgggaaggggagatcttaggtgggttttaaaggaacaggagctcagccaggtgcagatagggtgaaggcaggcccagaggtacagaaggtcatggtggggtagggaacacaagctggccagtgtggtcacggaaggcaaaggacttgaccacatcacccctcaagttcctccctggccgatctcctccccaagcccgtgtgcctcccatgcctccccagccacccagctccctgcagcgtaggtcctccttttggaaaggattcagtgtgacaccccacaggtgttcagctccgaggccgcctggcagtgtgtgagtgaggcgctgcagatcctcgggggcttgggctacacaagggactatccgtacgagcgcatactgcgtgacacccgcatcctcctcatcttcgaggtgagtggccccgccaccagctaagctgtgctccacccccaccctgcctggtcctaaagatgctgctcagggcctcgcagaggcccccgcagcccagggctgggtcgcatgctctcaggggctctcctagccctggcacgtctccttcccgactgctgccctccatgaagtcacaagcctgaggagtcagttcagttagcatgtgccaggtggcaggggagggaactggggccacagagatgacttcggatgctgtgttctgattgtgcagcagggccgaccaagggagatgacagagtgtaaagaggcagggagcgggcatcctccagaggcagccagagttttgtgaagcatgcgctcctggcccctaggggcagaaagaaagggcttcaaccagggccgggtggagggcagtttgtccctaagggcagggtaatagagcgcgccaggcccagatgggactgatctgctggcacaaggtgaatgaagagagagtgaagggctttctgggagcagcagtcagccctgctaggtgggctggggcaggcagtgggtttgggggtgttgaagaaggtatatgggaaggctaaaaaagtagccagactgtggaggaccttgattgacagcagaggaatttggaagccacaaaacgtctttaagcagggcattatttggttgtatctgtgttgtgggaaatgcccccaggggctcagcaagtgctggacatgtggacggggctcatgtggagagtgagttgcagggatgaggccggagaccaggggctctcctgctgggagggaggggctggacctaagagagcacagcaggatgagtgggatatgatggtgggcatgggtatacaggaggcaggcctgagacagggagagggtttgggcctgagcagcaggtctggtgatgagaggcatcatcagcctctgggagtgtagtcttgtctcctgggccgtcctgcccagtgggaggcctccttggctgcttttgttcctggcctacccattgggttccagccatctccactgttgcagtggacatacggggcaagggccagcctgagggcactggagtggtctcagccctgcaaagggtcttctccaaaggcccttcccttagcctgggagggttggggttctccagggctggggtggtcagcagggttcaggaagccctcaaggccttggaagaacacagggctctcgatgtagggtgagagctcctgtctggagcctgctcggagctgggtggtcctgccaggaggcccctgcagtccccccttttcctgtagggagtcctgctgtccgtgatgtcagcctgactgcaggggacagtcctcagtccctagtgctggctgtgtagcctgggtcaggcccctgcacctgacacacagtaccattgtgcagagtgggcagaagcccactggcctctcactgatcagaatcatgggttgggggagtggggagcatgtggccctctgggtgtgttgacacctggcactgaggaggttctagctgccactcagcaatttctggcttccgtgaggaatctggcctccacctggagccagcaatgtctgtctggcactggctgagccccaggcatcagcacccctcaccacccggggaaagctggtttccattttacagaggacctggagacttggagaaaggcttgacacacgtgaggctggtcacggagaggtgggggggtcccagtgggagctcatggccatctggtcacctccctcctcatccctgtgcactccctgagccctggccagagccctgctcccagctacttcaggagcagtggcttttgtggcaatgggcaagcaggcagtggccggctctacccagcacacgtggcactaccatggctgcctggccggggggcagcctttgacctctacactactgaccacagggaaccaatgagattctccggatgtacatcgccctgacgggtctgcagcatgccggccgcatcctgactaccaggatccagtaggtgccattgtcaccgtgtgcttctcaggtcccatacctgcccagcaggggccagtccagggcagtgggaggaaagagctgccttgacctggagtgggggcatgggggtgtggcgcagccttgtggaggggaccttcccctgtggtagtggggggcttgctgcccagggaagccctcgctgccctgcccttatggccacagcaccctacagcttcagcataaataccgtatcccccatctggtccctcacactagaggcagctggtttttcagaacctgaagaatgagaggtgtccctttaaaggtgccaggcctcacagccaacataagccagtgtttctcttctctgcccttcttcccctcatgctcccctccacccccaccctaggggcacagtaatccaaaatcactgctggaggccaagtacaggttgctagtagcattttgtctccttcacaggagacagctgctgggaagctggctgtgactccacccctcatgggggagcatatgtgtggctcccctgaggagactggctgctctctggcaggtggtgggtttgggggggttcaggctgtagccaggggcccagcatacccaggccagaggggggcacggagcttctgggtgccgaatgggccatgttgctggacagtgagcgccagcagcgaggcctccagtcacaggaccatggactttctgcagtgagcttaaacaggccaaagtgagcacagtcatggataccgttggccggaggcttcgggactccctgggccgaactgtggacctggggctgacaggcaaccatggagttgtgcaccccagtcttgcggtgagtgggcctaacaggcataccccctatttcaatgccctcctgccagatctccttgtggcagaaaagatctcactgtggggggtctgggcttctccaggggaagttggggaacaccagctagtccatgacaccctggattgcttcccccagatggggcatctctgcctggtacccgggctgtgagacaggacagggcactgtagggatgaggtgctgaactgagtcctgtcttggttaataggacagtgccaacaagtttgaggagaacacctactgcttcggccggaccgtggagacactgctgctccgctttggcaaggtaaccaggccctcccaggcctgggtcgcaagcggtcctccaatttggccagcattcatgagactactttttgtcaagcatcctttgggaccaggcctagaacagaaatgttgatcaccctggagggatggggtggtgaggtcaggctgactttgtcagcctggggcccacttagctactcggatgggtacccttgctgggtgagttttctgcagtgtttttctgtgcacctttcaggtagagaggctccctagaatcgggagggcagctccacctggggcctgaatctagggacctgattggtggggcccttgctgctgaaggtggcagtagcacagtaagcactggcttctggtctcagccaagcttctgggacctggtcttgccttaacccctccctgaatctagagctcaaagagaagggaaaacagaaggtggctgggagccgttctcccacaacctgaagagaaaggtgttattgactccactttctcaaggaacacaggagactaagacaggcaaagatgcagcccagggagggaccatgtgggggactggtctaggtagtgagtccccacttggagcctctgtgatcccagaccatcatggaggagcagctggtactgaagcgggtggccaacatcctcatcaacctgtatggcatgacggccgtgctgtcgcgggccagccgctccatccgcattgggctccgcaaccacgaccacgaggtgagcccagcccagcctcacacagggcctggctgctgccatctgtcctgctgcactttaatgaagttgattgttgaggagggtgtggtcgggtgtgggggaggctgtgcaggttcaccatgcggtggccgtgggagggtctgtgctgctcaggagatggggctgttccctttcttcttcctgactgagagaagagggggtgagtgacaggggttcctgatcccagtgcccctacccccagcaagggacagaccctgcacattgcccgctgtgctggagggaggcgggtgcagtctctgaggacccactgtataccaggatctctgcctgcactttccagagcacctgcagataccaggattgtgacatctgcctttcagaggaaacagggtcagagatgttgagtcacttgctgttggggaaaggctgttggatcagggctggaattagaacccaagacggggtgactcctgtgccaggccttgtgacccctgccatgctacccagtttggctgataggctgggtttttgaagctcagaggtctgattccaggaatttgggcatatcttttctgtcctcggttctggcaggttctcttggccaacaccttctgcgtggaagcttacttgcagaatctcttcagcctctctcagctggacaagtgtgagtggcatgtcttgggggagggaaggaagggcccacttctaggcccctattgatggtgagctgtttctggaccctgtcaagctcccagagcctgctagctactcacagacctctgccttgagcgagggcctgggtaggcctgggcttagctgcagcagtgcccaccaggcactgtaggtgcatacctgccccattcaccaaggcagttgtatgtatatatgtgtgtgtgtgtatgtatgtatgtatgtatttatttcgagatggagtttcgctcttgttgcccaagctggagtgtaatggcgcagtcttggctccctgcaaactccacctcttgggttcaagcgattcttctgccccagcctcccgagtagctgggattacaggcgcacgccaccacgcccggctaattttttgtatttttagtagaaacagggtttcaccatgttagccaggctggtctccaactcctgacctcaggtgatctgcctgcctcagcctccaaaaatgctgggattacaggcatgagccaccgcaccgggcctgccaaggcaattttagattgagcaagtgcagagccctttgcgcaggacccctggcatctgcccagcatgcctggctgtattctcttttttttggagacatagtctcactttgtcacccaggctggctggagtgcagtggcatgatcttggctcactgcaacctccacctcctgggttcaagcaactcctgtgcctcagcctcctgagtagttgggattataggcacgcaccaccatgcccagctaatatttgtatttttagtagaaacaaacagggtttcaccatgttggccaagctggtctccaacccctgacctcaggtgatccgcccaccttggcctcccaaagtgctgggattacaggcatgagccactgtgcccagccctggctgtattcttgaagctgcccggggaaggctcacgaagggaggagcatctggttgtacctgattctggagacagcattttacctgcccctttacccactgtactccatccaaaatgaccctgcagtgccctgcagaggtctcaggccttggcctagagaacagagggctttgctcgtgctccccgctctgtctgcagtgctcttcctcttctatagccactcgaccatatctaggaatgcccagctcagtctacctctgaccctcacagtcctgttgacctgaggttctggatcagtgtccccacaaagcccagtcgtgttgccaagtgatgggtgtaggcgccagcactgtggcacttgctgagagtggcatatgattttttgcaggtcctagccctgggggtagcccagacacccccccagtgctgacaggttatgtgctgtggagggtgctgaaatggtttctcctccagtgggctggaatcacagatgggctgtttacggagcaagtgccggctccaccccatgagatctgggggttagagatgagcaggatgagtcctttgtaactgagaatgaagctgtacccctttctctccctgcagccctgaatcacttgctgggggtctggaggaggggttcacccttagggctgcttcatggtgggtgggctgactttgtggaaaaatgcccccacttcagccatgtttgtcttatcacggtgcagaaagatcacccaccatctctccttttccttcccagatgctccagaaaacctagatgagcagattaagaaagtgtcccagcagatccttgagaagcgagcctatatctgtgcccaccctctggacaggacatgctgaggcaggggacagtgtcccctgctaccgcccgcccctacccatggcccgttgctggatgactgttactcttttttcagaaggtgttgggattatcacaggttaagccttttgttccccgtctgcacctgaagggttgtcgcctggcctgggagagcctcttccaggttttgacctgcaggcagtgctctctaacaggaccatcacagcttctgaactgagccggagagagagaatggaattgctgacccctggaactggcgggtattctggtcattgaggagacaccatagtggaaactggggcttatgctgctgcctccagggtgtgaggtgggtggggacctgtgtcaggtgtggatagccatttctgctcaaccacacattctctaagaaacagcttgaaagctctgtctgggtcattcatttaaactagaagcagaggcacttaaaacatgtaccaggaaccatttaacaaagaatataaaatgtcacaatctg

SEQ ID NO: 10489 - DNA, 1896 bp, Homo sapiens
ccggagcagagccacactaagtgaagacaagaagcactacatcctcaatggctccaagggtcccgctctgtcacccaggctggagtgcagtggcacgatcttggctcactgcagcctcaacttcctgggctcaggtctggattactaatggaggactggccaatatttttactgtgtttgcaaagactgaggtcgttgattctgatggatcagtgaaagacaaaatcacagcattcatagtagaaagagactttggtggagtcactaatgggaaacccgaagataaattaggcattcggggctccaacacttgtgaagtccattttgaaaacaccaagatacctgtggaaaacatccttggagaggtcggagatgggtttaaggtggccatgaacatcctcaacagcggccggttcagcatgggcagcgtcgtggctgggctgctcaagagattgattggtagaaatgactgctgagtacgcctgcacaaggaaacagtttaacaagaggctcagtgaatttggattgattcagtttcttgtgttttttctgaacactccaggagaaatttgcactgatggctcagaaggcttacgtcatggagagtatgacctacctcacagcagggatgctggaccaacctggctttcccgactgctccatcgaggcagccatggtgaaggtgttcagctccgaggccgcctggcagtgtgtgagtgaggcgctgcagatcctcgggggcttgggctacacaagggactatccgtacgagcgcatactgcgtgacacccgcatcctcctcatcttcgagggaaccaatgagattctccggatgtacatcgccctgacgggtctgcagcatgccggccgcatcctgactaccaggatccatgagcttaaacaggccaaagtgagcacagtcatggataccgttggccggaggcttcgggactccctgggccgaactgtggacctggggctgacaggcaaccatggagttgtgcaccccagtcttgcggacagtgccaacaagtttgaggagaacacctactgcttcggccggaccgtggagacactgctgctccgctttggcaagaccatcatggaggagcagctggtactgaagcgggtggccaacatcctcatcaacctgtatggcatgacggccgtgctgtcgcgggccagccgctccatccgcattgggctccgcaaccacgaccacgaggttctcttggccaacaccttctgcgtggaagcttacttgcagaatctcttcagcctctctcagctggacaagtatgctccagaaaacctagatgagcagattaagaaagtgtcccagcagatccttgagaagcgagcctatatctgtgcccaccctctggacaggacatgctgaggcaggggacagtgtcccctgctaccgcccgcccctacccatggcccgttgctggatgactgttactcttttttcagaaggtgttgggattatcacaggttaagccttttgttccccgtctgcacctgaagggttgtcgcctggcctgggagagcctcttccaggttttgacctgcaggcagtgctctctaacaggaccatcacagcttctgaactgagccggagagagagaatggaattgctgacccctggaactggcgggtattctggtcattgaggagacaccatagtggaaactggggcttatgctgctgcctccagggtgtgaggtgggtggggacctgtgtcaggtgtggatagccatttctgctcaaccacacattctctaagaaacagcttgaaagctctgtctgggtcattcatttaaactagaagcagaggcacttaaaacatgtaccaggaaccatttaacaaagaatataaaatgtcacaatctg

SEQ ID NO: 10490 - DNA, 19720 bp, Homo sapiens
atcagacgtgtgtgtgtccctgcggcgctaagaaggggagactgaggctgaggctggggaacatcgggcagcatgagcggctgcgggctcttcctgcgcaccacggctgcggctcgtgcctgccggggtctggtggtctctaccgcgaaccggcggctactgcgcaccagcccgcctgtacgagctttcgccaaagagcttttcctaggcaaaatcaagaaggtaacgcgagccctgggcgaacccttgctgtctggctcccgcttttcaccctcagctgcaagactggtgttgaactttgtgagattccccaaacctgccagagagatacaccctgcggccgaggcgtgttaacactccggattcctgagttccaggaaaaccttcccagagaaagggtgagacatttccaagacgggggacccttggaaatgtggtggtgacgtgttccagctaaattttgtcaggggaattcggaaaactctaggctaggtaattaacaaagcagccttcatctcagctggtctggtctggaaatgtgcggggcttcctctctgattcctaaacagcttacaccatgtccctcctcagtcaccttccagcgccctggggcttccttccccaggtgagcccagcgcctctccctgccattgaggttcctcagaaatctggctccaagatgcttcccaagggtggcacaacccagccaatagtaacagtttggttataaaacactcattgtcttcttagagttggaagacttgggtttggtcttggctcgttgactttgaaactcagttgttttttttgagacagagtcgcgctcttgtcgcccaggctggagtgctcactgcaacctccctcctgggttcaagcgattctcctgcctcagcctccggagtagctgggattacaggcgcctgcccggctttttttttttttgtatttttagcagagacggggtttcaccatgttggccaagctggtctagaactgacctcgggtgatccgcccacctcggcctcccacagtgctgggattacaggggtgagccaccgcgcccggccaagactcagttctttcagccttaaaatggagatagtgttgtgtctccttcacagatgtgttgtagagccccagtgagataaacggtgcatggagagtcttcttaaactgtagagtactgtgcagcagaagagagagctggcttcaacacttagtcttgtgaccttggagctgacggctgcacctccctgtgcctcagtgcattcatctacaaaataggaataaacacatttcttgctctttcctttgtatttcattttatcttctaaggaaaccaacagtatacttgctatttcgtcgaggtgccctactttgaacttggctgaatgttggctgatcctgtatcacagaagttattccctggcttctctttggaacgttcctctgaggttgtcaggctgatacctttatagcaagcaactttacagatgaagaagctaagactcagactaaaagcagtttgcccagctagaaagtgcggagctatgtcttgaacatattggaaaaccttttacccaggacctggggcagtgtggtgctctatcctgggacttcctgctatccagcagcatggtgaagaaagaacacagatctttcagatctgtttccatctttaaacctctggcactacctgccctgccctgcctttactctcagctgtcagctttgcttcccattccactgggaaaatccatgcagtcggatgagaagttcacaggcacagttaccccctcccgctgcatatgtgccggtattatctacattctgttactgtgaactgtctgctcctggcaaaaccaacctctcattagactccaggtcttctcacctactcaagggtaattctttcctttctctgcatcattaactgttctctctactggatcttgagcccttaccattcaggcatttgtccctaatggccatagaagtcagtaatgacctctctgttatcaaattgtgtgatctgttctcagacctcatcctacttgacccatcattggcatctgacaccgttcatccttccaccctgttgacgcactttcgtctctggtttctgaatcactgttctcgccattctctgaatgttctaaatacttcactggctgatacttctctgtgtccattgctggttcttattcagctccttgaccgctaaacagtgaccagtgtttccaactagccaagttggaatttactaaggctgggtctcgtttcatctacagccatctgctgggtgaccttatttagtgtcctggctttaaatatcatcaatatcctgatgcctcaagtttctttcttcagttcagatttctccctgaactccagattccttttgctttttcagagttgggggctttctctgtcacctgtgctggagtgcagtggtgccatcatagctcactgcaaccttgaactcctaaggctcaatagatcctcccacttcagcatccccagtagctgggactacaggcacgccctgccacacccagccaagattctttttttaatctacctttgtactcaaaagctgtactaagaggtctaacaggcatttgagattaatagatcccaaactgagttcctggttcccacccaatcctgctccttccaccagccttctttatcatagataatggtggctctgttgttccacctgttcaaacagaacacctggagtcaccttgtactcttattctcctagtccacttctaattccacagaagatctggttttctctacttttaggttcttagaatctgaccacttttaggcccttctgctgctactttggatcaggccagtgtcatctctcacagccttactgggattagagcagaaacatgggacatgatgcttagaatctcagattgtgtaggccagtggttgtcaccctgccctaagctggacccaagctattcatggagtgtcctggaactgctgcagggatgggtgggaagttgagtgggtgggatttgggtgcctgttttccctatcagcagtctcagtcagagccgcctgcttctgtctgttttacatatttggtttctgcactagatttctttgaataacaggttccacttttttagataatttacaaactgtttattgcaattgaactctcctcccctaaggcattgacctgatttgataacatcaggatctttctcccacgcccctgcaatctctcctgtgtggcaggttttctgtggttgtacctgaaggccaattagttgccaggcagtcttatctggcctgcccactggtaccagaatgatctctaacacagcccattgcacaagacccaagtgtcagtgagcctctgtgttcagtgaaggagactgagctttgatataaaaggctgcagagtgatggagccatcagcttgtttttttttttttttcttgttttttttttccttgagacagtgtcttactctgttgcccaccctggagtgcagtggtgcaatcacagctcactgcagcctcaacctccccaggctcaggggatcctcccacctcagcctcctgagtagctggaactacaggcgtgtgcaaccacgcccaggctggttttgaactcctgggctttaagcaatccccctgcgtcagcttcccaaaggactaggattacaggcagtagccactgcaaccagctaagcttgtttttttctttttcttttcttttttttttatggagtctcactctgtcacctaggctggagtgcaatggcgcaatctcggctcactgcaacctccacctcccgggttcaagcaattctcctgcctcagcctcctgagtagctgggattacaggcgcgtgctaccaagcccgtgtaatttttgtatttttagtagaaacggggtttcaccatgttggtcaggctggtctcaaactcctgacctcgtgatccgcccgcctcggcctcccaaagtgctgggattacaggcgtgagccaccgtgcctggcctccaacctttttttttttctataccaccttcagggtggttttggaatggatggaggcagggattcctttaagttggctgtcacttttagttagggactcacctataagcctgtggtcctgggcccagagaggagaaagcagtgcgagcatattgatagagtagagaaatctgttggctgattagctgtacaaggtctgaggagaaggttgaggtctccccaagacttctctagaacacttggtgagaggcgccatgaggacaggtgatgcttgggcttatagctctgactcaggacatcactgctcaacagcctgaagcccacatccaaagctcatgtcatgctggcaattgaaggggtagcagagcccaaaagtccagaggggctcagcacagggagcagatgtctgtgagcaggagagacagcggctgtagggatcgatgagacttggtaagcatgatgtgctcttgtcagcatagcatctttgagctcacacaataattgatgtagaattgtccatttcagtaaggagtttccacatccactatcttccacgattctcacaagggccttgagtaaatattacctgcatgttatgggtgagaaaggggtagtttagagagctgaagggatttggtgaaggccacataatgagtaagcctgaaatcaaggaccagacccccaggcttctaaatgttagtcttgggctccttgtttcatgggactattatcatcccttgtactgagaaggaaaactgatgaaaatcgggaagaacctatttgaacaggggagggagatggatgtgggtggtggagcctgcacatagtttctgtatctcaggaaccttgtgaggtttgctttccagttccttcagtacgtcatgtcccgctggccagggtggagtggagcacatgtttttccttcccttttaactgatatttccgtgatgggagtgtgctaaaaattaaattttttagaaaatatttactatttttagaaagaagttttcccatttccagaagttagccaagatgaacttaatgaaatcaatcagttcttgggacccgtggaaaaattcttcactgaagagggtatgtatggttttctttaccattgccgatttccattgtaagggctatttggttgatatttatattagaagtgacatacataggagaagtcttcttgagggagaaatggtttccactcataatattttgctttaggtttcatccctattgccatttaattaaaaaacatccagttaaatgcttctcattgtatttgtggttcaggagcactttaaacatttccatactgttccaggtcaacacttccataaagctataataaaaatgaataactaaaaaaattagatggcaaaaagccaaggccacacaccatacaagcccatggagcatgtgttggttgttgtggcagtgtacagttgctcttagtgtttctaaaggttgagtttcaatttctgtactttggtaattgtaaacaaagagtgatttgtggaccagccacagtttggcacctgcatggtgaggcagcatttgacctcaggtccctctctcagagctgttggccggtcctccagccagggccttggtggagagttcagtgatggtggatggacagcaggtcttccctaatagtaggatcctggagagcttttgtttatatgaattttatctatcaatatttgccatcttaggggttattttatttttattttactttatttttttgagaaagggcctagctctgttgctcagactggagtgtggtggtaccatctcatctcaccaccacctccatctttcaggctcaaacagtcccccaacttcagcctcctgagttgctggaactacaggtgcgcacccccatgcccagctaatttttttgtatttttcatagagacaggttctcactatattgcccaggctggtctctactcctaggctcaagtgatcctcccaccttggcctcccaaagggctgggattacaggtgtgagccaccatgcctagcccctcttagaaattaaaactgagaaatttaaaatatactgtggggctgggtgcagtggctcacgcctgtaatcccagcactttgggaggccaacggggacagatcacctgaggtctggagttcaagaccagcgtagccaacatggtgaaaccctgtctctactaaaaatacaaaaattggccgggcatggtggcgggtgcctgtaatcccggctattcaggaggctgaagcaggcgaattgcttgaacccaggaggcagagattgtagtgagccaacattgcaccactgcactccagcctgggtgacagagtgtgactttgtctaaaaaaaaaaaataaaatatactgtgttcatttgtttaaaaataataaatccattacatgttaacataatatttttaatgaaaaatattttgtttttgtttttccgagacagagtctcactctgtcacccaggctggagtgcagtggtgcaatctcgactcactgcaacctctacctcccaggttcaagtgattctcctgcctcagcctcccaagtatctgggactgcaggcatgcaccaccacgcccgggtaatttttgtatttttagtagagatggggtttcactatgttggccaggttggtcttgaactcctgacctcatgatctgccttcctcagcctccccaagtgctgggattacaggcgtgagccaccgcgccagctaatgaaaaatattttgaaaaataatcaggccaggcgcggtggctcacacctgtaatcccagcacttacggagactgaggtgggtggatcacctgaggtcgggagttcgataccagcctgaccaacatggagaaacctcatctctactaaaaatacaaaattagctgggcgtggtggtacatgcctgtaatcccagctactcaggaggctgaggcaggagaatcgctggaacctgggaggcggaggttgcggtgagccgagatcgcgccactgcactccagcatgggcaataagagtgaaactctgtctcaaaaagaaaaaaaaaagaaaagtaagttaaaaaaaaaaaaagaaaaaaattgatggaaagagtgacattggttgaaagttatgcaagtccttttaatgtttggcttattagaagacagctggattctcatacctgtttgtgcacgtaacctctggaaaagtccactgtgcagtctttttttttttttaactgtctttttttataatcttcagacatgctttttgtttgtttgtttctgagacagtcttgctcttgctttgtcacccaggctggagtgcagtggtacgacctcagctcactgcaacctctgcagttgaagtgattctcatgcctcagcttcctgagtagctggaattatagcacgcaccgccacgcctggctaatttttgtattttcagtagagatggggtttcaccatgttggccaggctggtcttgaactcctgacctcaaatgatctgcctgtaatccaaagtgctgggattacaggtgtcagccaccgcacctgtcctgacacgtgcatttaaagcaagaaacacacacttccaggacatagggctctgtcagcaataactgtcatctttgtatttgcagagatgtaaatatataagaaaccggctgggcacggtggctcacactggtaatcttagcactgtggaagactgaggggggcagattgcttgagtcccagagtttgagaccagcctaggcaatggagcgaaaccctgtctctactaaaaatttaaaatattagccgggcatggtggtgcgcgcccatagtcccagctacttgggagtctgaggtgggagaaggtacccaagcctgggaagtcaaggctgtagtcagctgtgttcatgccattgagctccagcctgggcgacaggagtgagaccctgtctcaaaaaaaaataaaaataaaaataaaaaaataaataaatatatatatatatatatatatatgcaagaaaccactgcaaaccaaacccactccctctcacaggaacaaaggtctcttggaataaatagcaaatgctggaataaaaactatgttcattcagctgccatgatgtgaattcaaaaaggaagttaaatccaagggcaaagcagagaaaagaacatacaaaaatacacctatttcatgtacattcaaagaggaggctaatcactgtggacaaagggccctctggaatgacagctgtaggcagccagcagtgccacggaaatagaggcactgtcatctggagacacagaaaaatcacatcctcccacaactggcctctatgaaaaccaaccaggacagacaacccttccccaaaagtaatggccaagaataaaagcacaaatattgctggaaatccaagtagcctgttttactgctttgagtgacttatatgcaaacctaagacttttttctgaatccttgatcaagatttattcatataaaggccgtacataaattctgggaacatggtactttggactatatattggactctgagccaaaacgttaaatacactacactgcgccccactgtacagtcttcagagaattagaatttaaaagcaagtaacatcttaagtagttttaggccaggtatggtggctcatgcctgcaatcccagcgctttgggaggccgacgtgggtggatcacttgaggtcaggagtttgagaccagcctggccaacatagtgaaaccctgtctctactaaaaatataaaaattaaccaggtgtgttggtgcccacctgtaatcccagctactggggaggccgaggcaggagaatcactggaacccgggaggtggaggttgtattgagctgggatggcgccactgcacttcagcctgggtgacagagtgagactccatctcaaaaaaaaataaaaactagttttgatcctgtgggaccccctagaagcagctcaggtcccccagaacctctttgagaagtgccaaattgtcagctgtcattacattgcttggtttttgtttgtttcttatttcacacctggtgatcacaaattatatgttgctagttttaaaagttgcttatttatatataaacataatttataatttagaaatacttatttctgctttttttcctagtgtttatcttcctatttgtatctttttttagctcccatagtctcttgttcttttatttaaacttttcctatgtggtttgtcaggtttttttttttttcaggtttaattaaggaataattgatttacaataaattgcacacactgtcatgtgacacataatgacattcaagtcaatgacagaccatatatacagtggtgatcccataagatcatcataccatatttctactgtatcttttctatgtttagctgtgttcatatacacaaatacttaccattgtgttacagttgcctacagtgttcagcacagtaatatgctgtacagcttttttgttttgttttgttttccttaaaaaaaaaaaaacaaaaaatatttaacagtgagatggggtttcactgtgttgcccaggctggtttccaactcctgggctcaagtgatcctcccgcctcagccttccaaagtgctgggattataggcatgagacaccacgcccggcctactgtacaggtttgcagcctaggagcaataagccataccatatagcctaggtgtgtagtaggctctgccacctaggttgtgtaagtccattctgatgttcatacagggagagaatcacctgacgcatgactgtatttagagagtacccctcaggagccatcagtgcaacagaggaagtgaacgtactcattacccgtcaaagtttccttgtgcctcttttatttcccccctgtttccaggcaactgctgatctgttttctctcactatagattagttcgtattttttggaattatattatgtgtgattttgtctggcttctttctgcataattttgaatttcatccatggtgcatgtattggtagtggcttcctttttaatgctgagtcatatttctttctatggatataccaagatttgtttatccattcaagtattcatcaacatagggtatgtatccagattttagctatcaccaaaaaagttgccataaacattccttttttcctctttttctttttttaagagacagggtctttctttgttgcctgggctggagtgcagtggtgtgatcatagctcactgcaacccttgaacttctgggctcaagccatcctctgcctcagcctcccgcatagctaagactacaggcacacgctaccatgcccagctaataattcttaaagttttttgtagaaatgggttctcactatgttattcaggctggtctcagactcctgggctcaggtgatcttcctacctcagcctcttaaagtgttgggattacaggtatgaaccactgcgcctggcctgtatttcctttttttttgagatgccatctcgactcactgcaacctccatctcccaggttcaagcgattctgcctcagcctcccgagtagctgagattataggtgcgtgccaccacatctggctaatttttggtattttgagtagagaaggggcttcaccatgttggccaggccaatctcgaactcctgacctcaggtgatctgcccgactcggcctcccatagtgctcggattacaggtgagagccacctcgcccagcctggcctgtattttattttagaaactttatagttttggctgggcgcagtggctcatgcctgtaatcccagcactttgggcggccgagatgggcggatcatgaggtcaggagatcgacaccatcctggctaacatggtgaaaccccgtctctactaaaaatacaaaaaattagccgggcgtggtggcaggtgcctgtagtcccagctactcgggaggctgaggcaggagaatggcgtgaacccgggaggcggagcttgcagtgagccaagatcgcaccactgcactccagcctgggcgacagaacaagactccatctcaaaagaaactgtatagttttaattcaggtttagaactatgattcattacaagttaatttgcatttctttatcaattttacaattttcaatgtctgcaaaaaggcctacaattcttaaatggttggtttatcttttagagcaattttttttttttttttgagacgaagtctcactgtgtcacccaggctgaagtgcagtggcgctatcttggcccactacaacctctgcctcccaggttcaagcgattctcctgcctcagcctcctgagtagctgggactataggtgcgcatcactatgcccggctaatttttatatttttttagtagagacagggtttcactatattggccaggctggtctcgaactcctgaccttgtgatccacccgcctcggcctaaagtgctgggattataggcttgagccaccgtgcccggccagcaatttttaaaataggaaaaaaggatcttgtagttacccatgtagttactgattccagggctcttcattctctcatgtagagtcagattcccttttgctaccattgctcttctgtgggaaggacttcctttcacttttcatgatgtgcagctctgcaggggatgcatattctcacttttgtatgtctagaaaagtttcagccaggcatggtggctcatgcccgtaatgccagcatttagggaagccgaggctgtcagatcacctgaggtcaggagttcgagaccagtctggccaacagggtgaaaccccgtctctaccaaaaatacaaaaattagccagatatggtggtgtgcacctgtaatcccagctacttgggaggctgaggcaggagaaccacttgaacccggcaggcagaggttgcagtgagctgagatcacatcactgtactccagcttgggcgacagagcgagactccatctcgaaaagaaaaagaaaaagaaaagtctgtttcatcagaacaggtttctgtgttgacaggatttacctttcaggccattaattgtgttgctctgctctcttcctgacttcatattgcttcagaagagatgtctgcttccattctttgttcctttgtacatagtgtttttttcatctctggctgcttttcagtggtttttaggaaaattgattatcacatttatttatgtagttttttgcacatttattttgcttggagttgtttgaacttcttggctctgtgtgtttatactgtttattgaatttggataaacagttgtacacccatacagtgaatactgaacaacaaaaagtaatgaagtatttatacacgcaacaacacgggtgaatctgtaaatcatgacctgagttaaagaagcccgggaaaataggtgccatatggattcatttatataaaacttgaagatgcaaactgatctacagacaaagatttgtggttgcctggggatggtggacagatggatcgatcacaaaggggcatagagacttttggtgaaaaaggaaatgtttttatctcgattgtcatgttttcactgacaaatatgtcagaactcaacaaattatatattataaatatgtgcaggttattcttcgccaattatgtatgtcaataaagttgttaaaggataaaaaatgaagggtttggcctgcacttttgggaatctgtagttctcttagtgacccatgtatacaaaaattcttaagtgtaggttatggtgtttttaacaatttataatactgatgaagtttaattagcaattcagaagtacactttaattaatttgatgcatacaaaagtgtgcaattataggtctaatgctatgctattgattgttcagttttgctgtagtgaatgtgaatttttattttagagatgagatctcactctgtcgctcaggctggagtgcagtggtgccatcagagcttactcaacctcccaggtcaagtgatccttccacctgagcctcccaagtagctgagactacaggctgaatgtgaatgttgaatgaatgaatgaattggtgttaaacaggctaaactgtctcagaacttgtggattgtgctgaaagcagtatggcctctggcagtgaagtaaaccttggcccagatactgccatgaggtggctatctagctgaacattttagtacaattctgagacttgcatatttattctctcatttcctagaaaataccggccaaaaaaagtatgaggtctataaggaggaggaaaaacatgaagtttaacatgcctatagaaaaatttacatcccatgaatgtatataatttgctgctgttttacacagcaaaagcacccctgtgactagcacccagatcaagaaatagaacaccacctagctctggcagcttttaacaattttattctggccgggcgtggtggctcacacctatgatcccagtactttgcgaggctgtggtgggaagattgcttgcgttcaggagttcaagaccagcctgggtaacatagcaagacctcgtctctactgaaaaaaaaaaaaaaaattagctgggtgtggtggtatatacctgtagtcccagcttctcatgaagctgaggcaggaggctcacttgagcctgggagattaaggttacgtgagctatgattgtgccactgcactccagcctggatatcagagtgagaccttgtctctaaataaatatataaaaataaaatttttcctgggctcattacataaaattgaacacaggccaaatgaccatgactacagaatttctagttttgaaaaagtttctactctgggattatatatgattaatatataaacactgtcctgtttacttatatttgtagaaacatagcttatatttgtttaatcaagattttcctcttggcagtggactcccgaaaaattgaccaggaagggaaaatcccagatgaaactttggagaaattgaagagcctagggctttttgggctgcaagtcccagaagaatatggtaagtcaagcaaacaagcacccagccagtttagctcttaagaaagcactctgtatttgtccataacaggtctagttgctggaatagatgacaccatccgtggtgggctacttggtaggggtggactgactgaaggacctgtagggaggaagtgttctcgggtcctgtgcttctcatcctagcacagaggaatgaggcatgtggtctggctggctgtagagtgcaaggcacatcgaggtgggagattggaccagtgggaacctttgagcagggtcctttgtcctatggactgtccctgtaattctttgagcatcctagtgatgtttttagcccccaagtggcggttctgccttattagagttggccagtcactacaacttgcctcccttacgctttttctcgagttggtcacctgaattctgcagaggttaaagggacaggcaagcagtgtgtagaaggcaaggtagaccttcaaggttcaaagggatagaccacacacatgtgtgccatttgtgtttaccctcaggcccttttgatataaaattataaaggccaaggatgctgctaagcatctgacaatccacaggacagacccccaaaacagaaaacaatccattccaaaatgttacagtgccacagtggaaaagctctgtcctggagtcctctggatactgggcagtgggtcacactatagttgttgcatttataaagacctacagctgtgatggaagattctcactacatgttaattgattcgatgtgtgtgtagatatcttcatatttaaagtatatatctacatatgcttgtatgcctagaaaaagtgtggatggaaggatatacacagaaatgcgctttctgaggcacaagattgcgagctttttttttttttttttttgagacagggtctcactctgtcatccaggctggagtgcagtggtgtggtcatagctcactgtagccctgaattcctcgggctcaaacaatcctcccacctaagccttccaagtagctgggactacaggcgtgcgccgccatgcctggtgaattttttttattttgtagagctggggtcctgctatgttgcccaggctagtcttgaattcttggaaccaagcaatcctcccacctcagcctcccaaagcgccgggattacaggcgtgagccactgtgcccagccctcgatttttgtttactttgtacctttctgtattgtgattttttttttttttttttttttgagacagagtctctctctgttgcccaagctagagtgcagtggtgcgatcttggctcactgcaatccctgcctcccaagttcaagtgattctcatgcctcagcctcctgagtagctgggaccacaggcacacaccaccacacctggctaatttttgtatttttagtagagacggggttttgccatgttggccaggctggtctcgaactgttgacctcaggtgatctgcctgcctcagcctcccaaagtactgggattacaggtgtgagccaccatgcccggcctgtattgtgatttttttttttaatatggtgatctggcattactttataatcagaagaaaaaaaaaagccaatgaagccttaatgggaggaatctagggctgggctgtgattgacgctggtccatctctcctaggtggcctgggcttctccaacaccatgtactcaagactaggggagatcatcagcatggatgggtccatcactgtgaccctggcagcgcaccaggctattggcctcaaggtcaggtatctggggattctgtgtggtgctctctgtaggtcttctggagtcacatggaggcatagaggccagaggcttgctccctctgaattgggcctgatatctgaccttcagccctgcccttcagttccctcactctggccacacctcatggtgctcaatcctcacacactgcccacatgcgcagtggcctttgggtcgcatgtcccttccttctgaatccacctcctgtccccattgcctctgatccacccttcaaggcccaggtagggtgccactgccttcgccttgggctggaagtggtctctcctgagccttcgtccttcagcctgagcatgcccccactctttatgcaagccaccttctccccactgggcttggagcaccttagggcaggcccagggtcaaccgcccttactggcaatctcattactcagattatttctgcttaatgttgacatcaaagagagctgaatgcacaccatgctcggctcccccaccccagagagcgcacacattcatgcagatgtttagtgaagagggggactgtctttgtggcactgggagggcagcaggtgggacagccctgacactgagcaccttctttaggataggcttggttccagcactcctgtgtcttcacattgcatcatccagaccctgtcagtgggtgggagtggcccagtttgtggatgacaagatggaggaggctttctttggaaagggatatcctttgcccaagaccactagtctgggaaatgaaggaactgatatgaaagttttggacacagactgcaaagcactgtgggttgcacaggctcacggcactggcatgtgcgccctgaccgtctcctcagcagcttggctccctgggctctgcctgtggccgcttgctctgagttcttgctgtcttctcttgcccgaagtaaatatttgcctcagaaaggaaatgtttcacaaacacctcatgctctcctttctccccacagctgacattagtctgtgtctgttttgtttaggggatcatcttggctggcactgaggagcagaaagccaaatacttgcctaaactggcgtccggggagcacattgcagccttctgcctcacggagccagccaggtctgtctctgcacaaaacgttatccctcagcagctgtgatgttgcccaagattcactggggcaaggggctgttggttttgttgagtagctgacttttccttctttccaaaatcttgcaaagaatcaactcagcaactgttcttgccattcctcttatcttgaccttatttctctgtcccagtgagacttgcaagtgagataccacgcttgacagcacttattaaataaatttttgtggtttacaacacaccttgacatacaatatagtaataacgttccggcttcaaagcacctttcagaatatatagcgtgggtggtactgctcccacttacacattaggagctgaggttcagtgaggctgtgtgatctgctggatggagcagggctgcggcagcactcgggactctgatgataagtccatcacctggaccatcctccatcctgcttcactttgcatgagaacctgggaacagtcatccttcctggggtgcccagaactcatcctcacaggacctcagatgagcccattgcaagcacccatttccatgtttaaacctaagcccaagttgttttcactgccgcttttttacgtgatgtattgaagcagaggtcggctaaatccagcctcctgcctgttttttataaataagttttgtttgtttgtttttgagacagggtcttgctgcgtcacccaggctggagtgcagtggctcaatctcatctcactgcaacctccgccttcaagcgattcttctgcctcagcctcccgagtagctgggactacaggcatgccccaccacacccagctaatttttgtatttttagtagagacggggtttcaccatgttggccagatctcaatctcttgacctcgtgaaccacctgcctcagcctcatgttctattaatagcagcagagttgaggaggtgagacagacatcctgcagcttggaaagctgaatatgttatctgacccttcattttaaaagtttgctgacctcttacaagtactaaaacctccattttcaggccctcaaaagcattcatatttattcccagtattctcccttgaccacatctttctgcatctgcagtgggagcgatgcagcctcaatccggagcagagccacactaagtgaagacaagaagcactacatcctcaatggctccaaggtagggttccttccccatggccacattagggtctcagtcacaaccttcactgccactgagtgagcactctccacacaccagggattgtacctgctgctgtagcaccgactaccttcttgagctgcttttatgtgtttgtttttaattttttttagttttttttatttgcgatggagtctctgtcacccaggctggagtgcagtggtgtaatctcagctcactgaaacttctgcctcccaggtttccaatgattctcctgccttagcctcctgggtagctgggattagaggtgcgtgtcaccactcctggctaatttttgtattttcagtagagatggagtttcaccatgttgtccagtcaggtcttgaactcctgacctcaagtgatctgcccacctcggcctcccaaagtgctgagtttacaggcaatgagccactgtgcccggcttgtaaacccaaaaaatctttaaattttttgttacacaaagtttcagacatattctgtgtgcctggctggccctaactccggcagtcacctgcttatggccactgtgcctcttccagcagcatcgccacctccagatcgcatggtaacaatctcagcatgcctctctaaaagacaggagttttttttgtttgtttttgttttttaataaacacaaagccgtaatacccttatcacattttaaaaattgataatttctcttttcttttgagacagggtcccgctctgtcacccaggctggagtgcagtggcacgatcttggctcactgcagcctcaacttcctgggctcaggtgattctcctacctcaacctcccaagcagctgggagtacaggcacacagctaactctttgtattttttttttggtagagatgggttttcaccgtgttgcccaggttggtctcaaactccggggctcaagtggtctgcccacctcggcctcccaaagtgctgggattacaggcgtgagccactgtgcccagctaataatttcttacttctatcagcattcaaatatccctgattgcctcatacctttttttggtttaactgtttgcttgaattaagatccacacaagtcccatctgttgctgtttgttaaggagtctgtttctgcctctgtctccctctgtttcctttcctcctcctcaccaccctcccgccttttttcatttctttgtagaattaacaaataaatgttgtgtgtatttacatctacaacatgatgtttttatatatgtataccttaagaaatgattaaaccctttctttcttgaagaaatgcagttgtctggcggtggagcctgagctgtctgacaactttgggtgttctttcccccgcccccgcctccacctggccatccatgtcccttgggaaaatccttgctctggggaaagtgggctgagccctgtcctctattcactcatgcttggttggcttctgcagagccaaggaccctgcatgtctggcctgaggtctgactggcagctggagcttgatggacaaagacagagctgaggtgggtcacataggggtttggttttctccaaagtccatctttctgtcctcaggtctggattactaatggaggactggccaatatttttactgtgtttgcaaagac

SEQ ID NO: 10491 - DNA, 736 bp, Homo sapiens
atcagacgtgtgtgtgtccctgcggcgctaagaaggggagactgaggctgaggctggggaacatcgggcagcatgagcggctgcgggctcttcctgcgcaccacggctgcggctcgtgcctgccggggtctggtggtctctaccgcgaaccggcggctactgcgcaccagcccgcctgtacgagctttcgccaaagagcttttcctaggcaaaatcaagaagaagttagccaagatgaacttaatgaaatcaatcagttcttgggacccgtggaaaaattcttcactgaagaggtggactcccgaaaaattgaccaggaagggaaaatcccagatgaaactttggagaaattgaagagcctagggctttttgggctgcaagtcccagaagaatatggtggcctgggcttctccaacaccatgtactcaagactaggggagatcatcagcatggatgggtccatcactgtgaccctggcagcgcaccaggctattggcctcaaggggatcatcttggctggcactgaggagcagaaagccaaatacttgcctaaactggcgtccggggagcacattgcagccttctgcctcacggagccagccagtgggagcgatgcagcctcaatccggagcagagccacactaagtgaagacaagaagcactacatcctcaatggctccaaggtctggattactaatggaggactggccaatatttttactgtgtttgcaaagac

SEQ ID NO: 10492 - DNA, 16838 bp, Homo sapiens
gtgtgtgtccctgcggcgctaagaaggggagactgaggctgaggctggggaacatcgggcagcatgagcggctgcgggctcttcctgcgcaccacggctgcggctcgtgcctgccggggtctggtggtctctaccgcgaaccggcggctactgcgcaccagcccgcctgtacgagctttcgccaaagagcttttcctaggcaaaatcaagaaggtaacgcgagccctgggcgaacccttgctgtctggctcccgcttttcaccctcagctgcaagactggtgttgaactttgtgagattccccaaacctgccagagagatacaccctgcggccgaggcgtgttaacactccggattcctgagttccaggaaaaccttcccagagaaagggtgagacatttccaagacgggggacccttggaaatgtggtggtgacgtgttccagctaaattttgtcaggggaattcggaaaactctaggctaggtaattaacaaagcagccttcatctcagctggtctggtctggaaatgtgcggggcttcctctctgattcctaaacagcttacaccatgtccctcctcagtcaccttccagcgccctggggcttccttccccaggtgagcccagcgcctctccctgccattgaggttcctcagaaatctggctccaagatgcttcccaagggtggcacaacccagccaatagtaacagtttggttataaaacactcattgtcttcttagagttggaagacttgggtttggtcttggctcgttgactttgaaactcagttgttttttttgagacagagtcgcgctcttgtcgcccaggctggagtgctcactgcaacctccctcctgggttcaagcgattctcctgcctcagcctccggagtagctgggattacaggcgcctgcccggctttttttttttttgtatttttagcagagacggggtttcaccatgttggccaagctggtctagaactgacctcgggtgatccgcccacctcggcctcccacagtgctgggattacaggggtgagccaccgcgcccggccaagactcagttctttcagccttaaaatggagatagtgttgtgtctccttcacagatgtgttgtagagccccagtgagataaacggtgcatggagagtcttcttaaactgtagagtactgtgcagcagaagagagagctggcttcaacacttagtcttgtgaccttggagctgacggctgcacctccctgtgcctcagtgcattcatctacaaaataggaataaacacatttcttgctctttcctttgtatttcattttatcttctaaggaaaccaacagtatacttgctatttcgtcgaggtgccctactttgaacttggctgaatgttggctgatcctgtatcacagaagttattccctggcttctctttggaacgttcctctgaggttgtcaggctgatacctttatagcaagcaactttacagatgaagaagctaagactcagactaaaagcagtttgcccagctagaaagtgcggagctatgtcttgaacatattggaaaaccttttacccaggacctggggcagtgtggtgctctatcctgggacttcctgctatccagcagcatggtgaagaaagaacacagatctttcagatctgtttccatctttaaacctctggcactacctgccctgccctgcctttactctcagctgtcagctttgcttcccattccactgggaaaatccatgcagtcggatgagaagttcacaggcacagttaccccctcccgctgcatatgtgccggtattatctacattctgttactgtgaactgtctgctcctggcaaaaccaacctctcattagactccaggtcttctcacctactcaagggtaattctttcctttctctgcatcattaactgttctctctactggatcttgagcccttaccattcaggcatttgtccctaatggccatagaagtcagtaatgacctctctgttatcaaattgtgtgatctgttctcagacctcatcctacttgacccatcattggcatctgacaccgttcatccttccaccctgttgacgcactttcgtctctggtttctgaatcactgttctcgccattctctgaatgttctaaatacttcactggctgatacttctctgtgtccattgctggttcttattcagctccttgaccgctaaacagtgaccagtgtttccaactagccaagttggaatttactaaggctgggtctcgtttcatctacagccatctgctgggtgaccttatttagtgtcctggctttaaatatcatcaatatcctgatgcctcaagtttctttcttcagttcagatttctccctgaactccagattccttttgctttttcagagttgggggctttctctgtcacctgtgctggagtgcagtggtgccatcatagctcactgcaaccttgaactcctaaggctcaatagatcctcccacttcagcatccccagtagctgggactacaggcacgccctgccacacccagccaagattctttttttaatctacctttgtactcaaaagctgtactaagaggtctaacaggcatttgagattaatagatcccaaactgagttcctggttcccacccaatcctgctccttccaccagccttctttatcatagataatggtggctctgttgttccacctgttcaaacagaacacctggagtcaccttgtactcttattctcctagtccacttctaattccacagaagatctggttttctctacttttaggttcttagaatctgaccacttttaggcccttctgctgctactttggatcaggccagtgtcatctctcacagccttactgggattagagcagaaacatgggacatgatgcttagaatctcagattgtgtaggccagtggttgtcaccctgccctaagctggacccaagctattcatggagtgtcctggaactgctgcagggatgggtgggaagttgagtgggtgggatttgggtgcctgttttccctatcagcagtctcagtcagagccgcctgcttctgtctgttttacatatttggtttctgcactagatttctttgaataacaggttccacttttttagataatttacaaactgtttattgcaattgaactctcctcccctaaggcattgacctgatttgataacatcaggatctttctcccacgcccctgcaatctctcctgtgtggcaggttttctgtggttgtacctgaaggccaattagttgccaggcagtcttatctggcctgcccactggtaccagaatgatctctaacacagcccattgcacaagacccaagtgtcagtgagcctctgtgttcagtgaaggagactgagctttgatataaaaggctgcagagtgatggagccatcagcttgtttttttttttttttcttgttttttttttccttgagacagtgtcttactctgttgcccaccctggagtgcagtggtgcaatcacagctcactgcagcctcaacctccccaggctcaggggatcctcccacctcagcctcctgagtagctggaactacaggcgtgtgcaaccacgcccaggctggttttgaactcctgggctttaagcaatccccctgcgtcagcttcccaaaggactaggattacaggcagtagccactgcaaccagctaagcttgtttttttctttttcttttcttttttttttatggagtctcactctgtcacctaggctggagtgcaatggcgcaatctcggctcactgcaacctccacctcccgggttcaagcaattctcctgcctcagcctcctgagtagctgggattacaggcgcgtgctaccaagcccgtgtaatttttgtatttttagtagaaacggggtttcaccatgttggtcaggctggtctcaaactcctgacctcgtgatccgcccgcctcggcctcccaaagtgctgggattacaggcgtgagccaccgtgcctggcctccaacctttttttttttctataccaccttcagggtggttttggaatggatggaggcagggattcctttaagttggctgtcacttttagttagggactcacctataagcctgtggtcctgggcccagagaggagaaagcagtgcgagcatattgatagagtagagaaatctgttggctgattagctgtacaaggtctgaggagaaggttgaggtctccccaagacttctctagaacacttggtgagaggcgccatgaggacaggtgatgcttgggcttatagctctgactcaggacatcactgctcaacagcctgaagcccacatccaaagctcatgtcatgctggcaattgaaggggtagcagagcccaaaagtccagaggggctcagcacagggagcagatgtctgtgagcaggagagacagcggctgtagggatcgatgagacttggtaagcatgatgtgctcttgtcagcatagcatctttgagctcacacaataattgatgtagaattgtccatttcagtaaggagtttccacatccactatcttccacgattctcacaagggccttgagtaaatattacctgcatgttatgggtgagaaaggggtagtttagagagctgaagggatttggtgaaggccacataatgagtaagcctgaaatcaaggaccagacccccaggcttctaaatgttagtcttgggctccttgtttcatgggactattatcatcccttgtactgagaaggaaaactgatgaaaatcgggaagaacctatttgaacaggggagggagatggatgtgggtggtggagcctgcacatagtttctgtatctcaggaaccttgtgaggtttgctttccagttccttcagtacgtcatgtcccgctggccagggtggagtggagcacatgtttttccttcccttttaactgatatttccgtgatgggagtgtgctaaaaattaaattttttagaaaatatttactatttttagaaagaagttttcccatttccagaagttagccaagatgaacttaatgaaatcaatcagttcttgggacccgtggaaaaattcttcactgaagagggtatgtatggttttctttaccattgccgatttccattgtaagggctatttggttgatatttatattagaagtgacatacataggagaagtcttcttgagggagaaatggtttccactcataatattttgctttaggtttcatccctattgccatttaattaaaaaacatccagttaaatgcttctcattgtatttgtggttcaggagcactttaaacatttccatactgttccaggtcaacacttccataaagctataataaaaatgaataactaaaaaaattagatggcaaaaagccaaggccacacaccatacaagcccatggagcatgtgttggttgttgtggcagtgtacagttgctcttagtgtttctaaaggttgagtttcaatttctgtactttggtaattgtaaacaaagagtgatttgtggaccagccacagtttggcacctgcatggtgaggcagcatttgacctcaggtccctctctcagagctgttggccggtcctccagccagggccttggtggagagttcagtgatggtggatggacagcaggtcttccctaatagtaggatcctggagagcttttgtttatatgaattttatctatcaatatttgccatcttaggggttattttatttttattttactttatttttttgagaaagggcctagctctgttgctcagactggagtgtggtggtaccatctcatctcaccaccacctccatctttcaggctcaaacagtcccccaacttcagcctcctgagttgctggaactacaggtgcgcacccccatgcccagctaatttttttgtatttttcatagagacaggttctcactatattgcccaggctggtctctactcctaggctcaagtgatcctcccaccttggcctcccaaagggctgggattacaggtgtgagccaccatgcctagcccctcttagaaattaaaactgagaaatttaaaatatactgtggggctgggtgcagtggctcacgcctgtaatcccagcactttgggaggccaacggggacagatcacctgaggtctggagttcaagaccagcgtagccaacatggtgaaaccctgtctctactaaaaatacaaaaattggccgggcatggtggcgggtgcctgtaatcccggctattcaggaggctgaagcaggcgaattgcttgaacccaggaggcagagattgtagtgagccaacattgcaccactgcactccagcctgggtgacagagtgtgactttgtctaaaaaaaaaaaataaaatatactgtgttcatttgtttaaaaataataaatccattacatgttaacataatatttttaatgaaaaatattttgtttttgtttttccgagacagagtctcactctgtcacccaggctggagtgcagtggtgcaatctcgactcactgcaacctctacctcccaggttcaagtgattctcctgcctcagcctcccaagtatctgggactgcaggcatgcaccaccacgcccgggtaatttttgtatttttagtagagatggggtttcactatgttggccaggttggtcttgaactcctgacctcatgatctgccttcctcagcctccccaagtgctgggattacaggcgtgagccaccgcgccagctaatgaaaaatattttgaaaaataatcaggccaggcgcggtggctcacacctgtaatcccagcacttacggagactgaggtgggtggatcacctgaggtcgggagttcgataccagcctgaccaacatggagaaacctcatctctactaaaaatacaaaattagctgggcgtggtggtacatgcctgtaatcccagctactcaggaggctgaggcaggagaatcgctggaacctgggaggcggaggttgcggtgagccgagatcgcgccactgcactccagcatgggcaataagagtgaaactctgtctcaaaaagaaaaaaaaaagaaaagtaagttaaaaaaaaaaaaagaaaaaaattgatggaaagagtgacattggttgaaagttatgcaagtccttttaatgtttggcttattagaagacagctggattctcatacctgtttgtgcacgtaacctctggaaaagtccactgtgcagtctttttttttttttaactgtctttttttataatcttcagacatgctttttgtttgtttgtttctgagacagtcttgctcttgctttgtcacccaggctggagtgcagtggtacgacctcagctcactgcaacctctgcagttgaagtgattctcatgcctcagcttcctgagtagctggaattatagcacgcaccgccacgcctggctaatttttgtattttcagtagagatggggtttcaccatgttggccaggctggtcttgaactcctgacctcaaatgatctgcctgtaatccaaagtgctgggattacaggtgtcagccaccgcacctgtcctgacacgtgcatttaaagcaagaaacacacacttccaggacatagggctctgtcagcaataactgtcatctttgtatttgcagagatgtaaatatataagaaaccggctgggcacggtggctcacactggtaatcttagcactgtggaagactgaggggggcagattgcttgagtcccagagtttgagaccagcctaggcaatggagcgaaaccctgtctctactaaaaatttaaaatattagccgggcatggtggtgcgcgcccatagtcccagctacttgggagtctgaggtgggagaaggtacccaagcctgggaagtcaaggctgtagtcagctgtgttcatgccattgagctccagcctgggcgacaggagtgagaccctgtctcaaaaaaaaataaaaataaaaataaaaaaataaataaatatatatatatatatatatatatgcaagaaaccactgcaaaccaaacccactccctctcacaggaacaaaggtctcttggaataaatagcaaatgctggaataaaaactatgttcattcagctgccatgatgtgaattcaaaaaggaagttaaatccaagggcaaagcagagaaaagaacatacaaaaatacacctatttcatgtacattcaaagaggaggctaatcactgtggacaaagggccctctggaatgacagctgtaggcagccagcagtgccacggaaatagaggcactgtcatctggagacacagaaaaatcacatcctcccacaactggcctctatgaaaaccaaccaggacagacaacccttccccaaaagtaatggccaagaataaaagcacaaatattgctggaaatccaagtagcctgttttactgctttgagtgacttatatgcaaacctaagacttttttctgaatccttgatcaagatttattcatataaaggccgtacataaattctgggaacatggtactttggactatatattggactctgagccaaaacgttaaatacactacactgcgccccactgtacagtcttcagagaattagaatttaaaagcaagtaacatcttaagtagttttaggccaggtatggtggctcatgcctgcaatcccagcgctttgggaggccgacgtgggtggatcacttgaggtcaggagtttgagaccagcctggccaacatagtgaaaccctgtctctactaaaaatataaaaattaaccaggtgtgttggtgcccacctgtaatcccagctactggggaggccgaggcaggagaatcactggaacccgggaggtggaggttgtattgagctgggatggcgccactgcacttcagcctgggtgacagagtgagactccatctcaaaaaaaaataaaaactagttttgatcctgtgggaccccctagaagcagctcaggtcccccagaacctctttgagaagtgccaaattgtcagctgtcattacattgcttggtttttgtttgtttcttatttcacacctggtgatcacaaattatatgttgctagttttaaaagttgcttatttatatataaacataatttataatttagaaatacttatttctgctttttttcctagtgtttatcttcctatttgtatctttttttagctcccatagtctcttgttcttttatttaaacttttcctatgtggtttgtcaggtttttttttttttcaggtttaattaaggaataattgatttacaataaattgcacacactgtcatgtgacacataatgacattcaagtcaatgacagaccatatatacagtggtgatcccataagatcatcataccatatttctactgtatcttttctatgtttagctgtgttcatatacacaaatacttaccattgtgttacagttgcctacagtgttcagcacagtaatatgctgtacagcttttttgttttgttttgttttccttaaaaaaaaaaaaacaaaaaatatttaacagtgagatggggtttcactgtgttgcccaggctggtttccaactcctgggctcaagtgatcctcccgcctcagccttccaaagtgctgggattataggcatgagacaccacgcccggcctactgtacaggtttgcagcctaggagcaataagccataccatatagcctaggtgtgtagtaggctctgccacctaggttgtgtaagtccattctgatgttcatacagggagagaatcacctgacgcatgactgtatttagagagtacccctcaggagccatcagtgcaacagaggaagtgaacgtactcattacccgtcaaagtttccttgtgcctcttttatttcccccctgtttccaggcaactgctgatctgttttctctcactatagattagttcgtattttttggaattatattatgtgtgattttgtctggcttctttctgcataattttgaatttcatccatggtgcatgtattggtagtggcttcctttttaatgctgagtcatatttctttctatggatataccaagatttgtttatccattcaagtattcatcaacatagggtatgtatccagattttagctatcaccaaaaaagttgccataaacattccttttttcctctttttctttttttaagagacagggtctttctttgttgcctgggctggagtgcagtggtgtgatcatagctcactgcaacccttgaacttctgggctcaagccatcctctgcctcagcctcccgcatagctaagactacaggcacacgctaccatgcccagctaataattcttaaagttttttgtagaaatgggttctcactatgttattcaggctggtctcagactcctgggctcaggtgatcttcctacctcagcctcttaaagtgttgggattacaggtatgaaccactgcgcctggcctgtatttcctttttttttgagatgccatctcgactcactgcaacctccatctcccaggttcaagcgattctgcctcagcctcccgagtagctgagattataggtgcgtgccaccacatctggctaatttttggtattttgagtagagaaggggcttcaccatgttggccaggccaatctcgaactcctgacctcaggtgatctgcccgactcggcctcccatagtgctcggattacaggtgagagccacctcgcccagcctggcctgtattttattttagaaactttatagttttggctgggcgcagtggctcatgcctgtaatcccagcactttgggcggccgagatgggcggatcatgaggtcaggagatcgacaccatcctggctaacatggtgaaaccccgtctctactaaaaatacaaaaaattagccgggcgtggtggcaggtgcctgtagtcccagctactcgggaggctgaggcaggagaatggcgtgaacccgggaggcggagcttgcagtgagccaagatcgcaccactgcactccagcctgggcgacagaacaagactccatctcaaaagaaactgtatagttttaattcaggtttagaactatgattcattacaagttaatttgcatttctttatcaattttacaattttcaatgtctgcaaaaaggcctacaattcttaaatggttggtttatcttttagagcaattttttttttttttttgagacgaagtctcactgtgtcacccaggctgaagtgcagtggcgctatcttggcccactacaacctctgcctcccaggttcaagcgattctcctgcctcagcctcctgagtagctgggactataggtgcgcatcactatgcccggctaatttttatatttttttagtagagacagggtttcactatattggccaggctggtctcgaactcctgaccttgtgatccacccgcctcggcctaaagtgctgggattataggcttgagccaccgtgcccggccagcaatttttaaaataggaaaaaaggatcttgtagttacccatgtagttactgattccagggctcttcattctctcatgtagagtcagattcccttttgctaccattgctcttctgtgggaaggacttcctttcacttttcatgatgtgcagctctgcaggggatgcatattctcacttttgtatgtctagaaaagtttcagccaggcatggtggctcatgcccgtaatgccagcatttagggaagccgaggctgtcagatcacctgaggtcaggagttcgagaccagtctggccaacagggtgaaaccccgtctctaccaaaaatacaaaaattagccagatatggtggtgtgcacctgtaatcccagctacttgggaggctgaggcaggagaaccacttgaacccggcaggcagaggttgcagtgagctgagatcacatcactgtactccagcttgggcgacagagcgagactccatctcgaaaagaaaaagaaaaagaaaagtctgtttcatcagaacaggtttctgtgttgacaggatttacctttcaggccattaattgtgttgctctgctctcttcctgacttcatattgcttcagaagagatgtctgcttccattctttgttcctttgtacatagtgtttttttcatctctggctgcttttcagtggtttttaggaaaattgattatcacatttatttatgtagttttttgcacatttattttgcttggagttgtttgaacttcttggctctgtgtgtttatactgtttattgaatttggataaacagttgtacacccatacagtgaatactgaacaacaaaaagtaatgaagtatttatacacgcaacaacacgggtgaatctgtaaatcatgacctgagttaaagaagcccgggaaaataggtgccatatggattcatttatataaaacttgaagatgcaaactgatctacagacaaagatttgtggttgcctggggatggtggacagatggatcgatcacaaaggggcatagagacttttggtgaaaaaggaaatgtttttatctcgattgtcatgttttcactgacaaatatgtcagaactcaacaaattatatattataaatatgtgcaggttattcttcgccaattatgtatgtcaataaagttgttaaaggataaaaaatgaagggtttggcctgcacttttgggaatctgtagttctcttagtgacccatgtatacaaaaattcttaagtgtaggttatggtgtttttaacaatttataatactgatgaagtttaattagcaattcagaagtacactttaattaatttgatgcatacaaaagtgtgcaattataggtctaatgctatgctattgattgttcagttttgctgtagtgaatgtgaatttttattttagagatgagatctcactctgtcgctcaggctggagtgcagtggtgccatcagagcttactcaacctcccaggtcaagtgatccttccacctgagcctcccaagtagctgagactacaggctgaatgtgaatgttgaatgaatgaatgaattggtgttaaacaggctaaactgtctcagaacttgtggattgtgctgaaagcagtatggcctctggcagtgaagtaaaccttggcccagatactgccatgaggtggctatctagctgaacattttagtacaattctgagacttgcatatttattctctcatttcctagaaaataccggccaaaaaaagtatgaggtctataaggaggaggaaaaacatgaagtttaacatgcctatagaaaaatttacatcccatgaatgtatataatttgctgctgttttacacagcaaaagcacccctgtgactagcacccagatcaagaaatagaacaccacctagctctggcagcttttaacaattttattctggccgggcgtggtggctcacacctatgatcccagtactttgcgaggctgtggtgggaagattgcttgcgttcaggagttcaagaccagcctgggtaacatagcaagacctcgtctctactgaaaaaaaaaaaaaaaattagctgggtgtggtggtatatacctgtagtcccagcttctcatgaagctgaggcaggaggctcacttgagcctgggagattaaggttacgtgagctatgattgtgccactgcactccagcctggatatcagagtgagaccttgtctctaaataaatatataaaaataaaatttttcctgggctcattacataaaattgaacacaggccaaatgaccatgactacagaatttctagttttgaaaaagtttctactctgggattatatatgattaatatataaacactgtcctgtttacttatatttgtagaaacatagcttatatttgtttaatcaagattttcctcttggcagtggactcccgaaaaattgaccaggaagggaaaatcccagatgaaactttggagaaattgaagagcctagggctttttgggctgcaagtcccagaagaatatggtaagtcaagcaaacaagcacccagccagtttagctcttaagaaagcactctgtatttgtccataacaggtctagttgctggaatagatgacaccatccgtggtgggctacttggtaggggtggactgactgaaggacctgtagggaggaagtgttctcgggtcctgtgcttctcatcctagcacagaggaatgaggcatgtggtctggctggctgtagagtgcaaggcacatcgaggtgggagattggaccagtgggaacctttgagcagggtcctttgtcctatggactgtccctgtaattctttgagcatcctagtgatgtttttagcccccaagtggcggttctgccttattagagttggccagtcactacaacttgcctcccttacgctttttctcgagttggtcacctgaattctgcagaggttaaagggacaggcaagcagtgtgtagaaggcaaggtagaccttcaaggttcaaagggatagaccacacacatgtgtgccatttgtgtttaccctcaggcccttttgatataaaattataaaggccaaggatgctgctaagcatctgacaatccacaggacagacccccaaaacagaaaacaatccattccaaaatgttacagtgccacagtggaaaagctctgtcctggagtcctctggatactgggcagtgggtcacactatagttgttgcatttataaagacctacagctgtgatggaagattctcactacatgttaattgattcgatgtgtgtgtagatatcttcatatttaaagtatatatctacatatgcttgtatgcctagaaaaagtgtggatggaaggatatacacagaaatgcgctttctgaggcacaagattgcgagctttttttttttttttttttgagacagggtctcactctgtcatccaggctggagtgcagtggtgtggtcatagctcactgtagccctgaattcctcgggctcaaacaatcctcccacctaagccttccaagtagctgggactacaggcgtgcgccgccatgcctggtgaattttttttattttgtagagctggggtcctgctatgttgcccaggctagtcttgaattcttggaaccaagcaatcctcccacctcagcctcccaaagcgccgggattacaggcgtgagccactgtgcccagccctcgatttttgtttactttgtacctttctgtattgtgattttttttttttttttttttttgagacagagtctctctctgttgcccaagctagagtgcagtggtgcgatcttggctcactgcaatccctgcctcccaagttcaagtgattctcatgcctcagcctcctgagtagctgggaccacaggcacacaccaccacacctggctaatttttgtatttttagtagagacggggttttgccatgttggccaggctggtctcgaactgttgacctcaggtgatctgcctgcctcagcctcccaaagtactgggattacaggtgtgagccaccatgcccggcctgtattgtgatttttttttttaatatggtgatctggcattactttataatcagaagaaaaaaaaaagccaatgaagccttaatgggaggaatctagggctgggctgtgattgacgctggtccatctctcctaggtggcctgggcttctccaacaccatgtactcaagactaggggagatcatcagcatggatgggtccatcactgtgaccctggcagcgcaccaggctattggcctcaaggtcaggtatctggggattctgtgtggtgctctctgtaggtcttctggagtcacatggaggcatagaggccagaggcttgctccctctgaattgggcctgatatctgaccttcagccctgcccttcagttccctcactctggccacacctcatggtgctcaatcctcacacactgcccacatgcgcagtggcctttgggtcgcatgtcccttccttctgaatccacctcctgtccccattgcctctgatccacccttcaaggcccaggtagggtgccactgccttcgccttgggctggaagtggtctctcctgagccttcgtccttcagcctgagcatgcccccactctttatgcaagccaccttctccccactgggcttggagcaccttagggcaggcccagggtcaaccgcccttactggcaatctcattactcagattatttctgcttaatgttgacatcaaagagagctgaatgcacaccatgctcggctcccccaccccagagagcgcacacattcatgcagatgtttagtgaagagggggactgtctttgtggcactgggagggcagcaggtgggacagccctgacactgagcaccttctttaggataggcttggttccagcactcctgtgtcttcacattgcatcatccagaccctgtcagtgggtgggagtggcccagtttgtggatgacaagatggaggaggctttctttggaaagggatatcctttgcccaagaccactagtctgggaaatgaaggaactgatatgaaagttttggacacagactgcaaagcactgtgggttgcacaggctcacggcactggcatgtgcgccctgaccgtctcctcagcagcttggctccctgggctctgcctgtggccgcttgctctgagttcttgctgtcttctcttgcccgaagtaaatatttgcctcagaaaggaaatgtttcacaaacacctcatgctctcctttctccccacagctgacattagtctgtgtctgttttgtttaggggatcatcttggctggcactgaggagcaga

SEQ ID NO: 10493 - DNA, 583 bp, Homo sapiens
gtgtgtgtccctgcggcgctaagaaggggagactgaggctgaggctggggaacatcgggcagcatgagcggctgcgggctcttcctgcgcaccacggctgcggctcgtgcctgccggggtctggtggtctctaccgcgaaccggcggctactgcgcaccagcccgcctgtacgagctttcgccaaagagcttttcctaggcaaaatcaagaagaaagaagttttcccatttccagaagttagccaagatgaacttaatgaaatcaatcagttcttgggacccgtggaaaaattcttcactgaagaggcttatatttgtttaatcaagattttcctcttggcagtggactcccgaaaaattgaccaggaagggaaaatcccagatgaaactttggagaaattgaagagcctagggctttttgggctgcaagtcccagaagaatatggtggcctgggcttctccaacaccatgtactcaagactaggggagatcatcagcatggatgggtccatcactgtgaccctggcagcgcaccaggctattggcctcaaggggatcatcttggctggcactgaggagcaga

SEQ ID NO: 10494 - DNA, 19797 bp, Homo sapiens
gcgggccagtaacgtcatcagacgtgtgtgtgtccctgcggcgctaagaaggggagactgaggctgaggctggggaacatcgggcagcatgagcggctgcgggctcttcctgcgcaccacggctgcggctcgtgcctgccggggtctggtggtctctaccgcgaaccggcggctactgcgcaccagcccgcctgtacgagctttcgccaaagagcttttcctaggcaaaatcaagaaggtaacgcgagccctgggcgaacccttgctgtctggctcccgcttttcaccctcagctgcaagactggtgttgaactttgtgagattccccaaacctgccagagagatacaccctgcggccgaggcgtgttaacactccggattcctgagttccaggaaaaccttcccagagaaagggtgagacatttccaagacgggggacccttggaaatgtggtggtgacgtgttccagctaaattttgtcaggggaattcggaaaactctaggctaggtaattaacaaagcagccttcatctcagctggtctggtctggaaatgtgcggggcttcctctctgattcctaaacagcttacaccatgtccctcctcagtcaccttccagcgccctggggcttccttccccaggtgagcccagcgcctctccctgccattgaggttcctcagaaatctggctccaagatgcttcccaagggtggcacaacccagccaatagtaacagtttggttataaaacactcattgtcttcttagagttggaagacttgggtttggtcttggctcgttgactttgaaactcagttgttttttttgagacagagtcgcgctcttgtcgcccaggctggagtgctcactgcaacctccctcctgggttcaagcgattctcctgcctcagcctccggagtagctgggattacaggcgcctgcccggctttttttttttttgtatttttagcagagacggggtttcaccatgttggccaagctggtctagaactgacctcgggtgatccgcccacctcggcctcccacagtgctgggattacaggggtgagccaccgcgcccggccaagactcagttctttcagccttaaaatggagatagtgttgtgtctccttcacagatgtgttgtagagccccagtgagataaacggtgcatggagagtcttcttaaactgtagagtactgtgcagcagaagagagagctggcttcaacacttagtcttgtgaccttggagctgacggctgcacctccctgtgcctcagtgcattcatctacaaaataggaataaacacatttcttgctctttcctttgtatttcattttatcttctaaggaaaccaacagtatacttgctatttcgtcgaggtgccctactttgaacttggctgaatgttggctgatcctgtatcacagaagttattccctggcttctctttggaacgttcctctgaggttgtcaggctgatacctttatagcaagcaactttacagatgaagaagctaagactcagactaaaagcagtttgcccagctagaaagtgcggagctatgtcttgaacatattggaaaaccttttacccaggacctggggcagtgtggtgctctatcctgggacttcctgctatccagcagcatggtgaagaaagaacacagatctttcagatctgtttccatctttaaacctctggcactacctgccctgccctgcctttactctcagctgtcagctttgcttcccattccactgggaaaatccatgcagtcggatgagaagttcacaggcacagttaccccctcccgctgcatatgtgccggtattatctacattctgttactgtgaactgtctgctcctggcaaaaccaacctctcattagactccaggtcttctcacctactcaagggtaattctttcctttctctgcatcattaactgttctctctactggatcttgagcccttaccattcaggcatttgtccctaatggccatagaagtcagtaatgacctctctgttatcaaattgtgtgatctgttctcagacctcatcctacttgacccatcattggcatctgacaccgttcatccttccaccctgttgacgcactttcgtctctggtttctgaatcactgttctcgccattctctgaatgttctaaatacttcactggctgatacttctctgtgtccattgctggttcttattcagctccttgaccgctaaacagtgaccagtgtttccaactagccaagttggaatttactaaggctgggtctcgtttcatctacagccatctgctgggtgaccttatttagtgtcctggctttaaatatcatcaatatcctgatgcctcaagtttctttcttcagttcagatttctccctgaactccagattccttttgctttttcagagttgggggctttctctgtcacctgtgctggagtgcagtggtgccatcatagctcactgcaaccttgaactcctaaggctcaatagatcctcccacttcagcatccccagtagctgggactacaggcacgccctgccacacccagccaagattctttttttaatctacctttgtactcaaaagctgtactaagaggtctaacaggcatttgagattaatagatcccaaactgagttcctggttcccacccaatcctgctccttccaccagccttctttatcatagataatggtggctctgttgttccacctgttcaaacagaacacctggagtcaccttgtactcttattctcctagtccacttctaattccacagaagatctggttttctctacttttaggttcttagaatctgaccacttttaggcccttctgctgctactttggatcaggccagtgtcatctctcacagccttactgggattagagcagaaacatgggacatgatgcttagaatctcagattgtgtaggccagtggttgtcaccctgccctaagctggacccaagctattcatggagtgtcctggaactgctgcagggatgggtgggaagttgagtgggtgggatttgggtgcctgttttccctatcagcagtctcagtcagagccgcctgcttctgtctgttttacatatttggtttctgcactagatttctttgaataacaggttccacttttttagataatttacaaactgtttattgcaattgaactctcctcccctaaggcattgacctgatttgataacatcaggatctttctcccacgcccctgcaatctctcctgtgtggcaggttttctgtggttgtacctgaaggccaattagttgccaggcagtcttatctggcctgcccactggtaccagaatgatctctaacacagcccattgcacaagacccaagtgtcagtgagcctctgtgttcagtgaaggagactgagctttgatataaaaggctgcagagtgatggagccatcagcttgtttttttttttttttcttgttttttttttccttgagacagtgtcttactctgttgcccaccctggagtgcagtggtgcaatcacagctcactgcagcctcaacctccccaggctcaggggatcctcccacctcagcctcctgagtagctggaactacaggcgtgtgcaaccacgcccaggctggttttgaactcctgggctttaagcaatccccctgcgtcagcttcccaaaggactaggattacaggcagtagccactgcaaccagctaagcttgtttttttctttttcttttcttttttttttatggagtctcactctgtcacctaggctggagtgcaatggcgcaatctcggctcactgcaacctccacctcccgggttcaagcaattctcctgcctcagcctcctgagtagctgggattacaggcgcgtgctaccaagcccgtgtaatttttgtatttttagtagaaacggggtttcaccatgttggtcaggctggtctcaaactcctgacctcgtgatccgcccgcctcggcctcccaaagtgctgggattacaggcgtgagccaccgtgcctggcctccaacctttttttttttctataccaccttcagggtggttttggaatggatggaggcagggattcctttaagttggctgtcacttttagttagggactcacctataagcctgtggtcctgggcccagagaggagaaagcagtgcgagcatattgatagagtagagaaatctgttggctgattagctgtacaaggtctgaggagaaggttgaggtctccccaagacttctctagaacacttggtgagaggcgccatgaggacaggtgatgcttgggcttatagctctgactcaggacatcactgctcaacagcctgaagcccacatccaaagctcatgtcatgctggcaattgaaggggtagcagagcccaaaagtccagaggggctcagcacagggagcagatgtctgtgagcaggagagacagcggctgtagggatcgatgagacttggtaagcatgatgtgctcttgtcagcatagcatctttgagctcacacaataattgatgtagaattgtccatttcagtaaggagtttccacatccactatcttccacgattctcacaagggccttgagtaaatattacctgcatgttatgggtgagaaaggggtagtttagagagctgaagggatttggtgaaggccacataatgagtaagcctgaaatcaaggaccagacccccaggcttctaaatgttagtcttgggctccttgtttcatgggactattatcatcccttgtactgagaaggaaaactgatgaaaatcgggaagaacctatttgaacaggggagggagatggatgtgggtggtggagcctgcacatagtttctgtatctcaggaaccttgtgaggtttgctttccagttccttcagtacgtcatgtcccgctggccagggtggagtggagcacatgtttttccttcccttttaactgatatttccgtgatgggagtgtgctaaaaattaaattttttagaaaatatttactatttttagaaagaagttttcccatttccagaagttagccaagatgaacttaatgaaatcaatcagttcttgggacccgtggaaaaattcttcactgaagagggtatgtatggttttctttaccattgccgatttccattgtaagggctatttggttgatatttatattagaagtgacatacataggagaagtcttcttgagggagaaatggtttccactcataatattttgctttaggtttcatccctattgccatttaattaaaaaacatccagttaaatgcttctcattgtatttgtggttcaggagcactttaaacatttccatactgttccaggtcaacacttccataaagctataataaaaatgaataactaaaaaaattagatggcaaaaagccaaggccacacaccatacaagcccatggagcatgtgttggttgttgtggcagtgtacagttgctcttagtgtttctaaaggttgagtttcaatttctgtactttggtaattgtaaacaaagagtgatttgtggaccagccacagtttggcacctgcatggtgaggcagcatttgacctcaggtccctctctcagagctgttggccggtcctccagccagggccttggtggagagttcagtgatggtggatggacagcaggtcttccctaatagtaggatcctggagagcttttgtttatatgaattttatctatcaatatttgccatcttaggggttattttatttttattttactttatttttttgagaaagggcctagctctgttgctcagactggagtgtggtggtaccatctcatctcaccaccacctccatctttcaggctcaaacagtcccccaacttcagcctcctgagttgctggaactacaggtgcgcacccccatgcccagctaatttttttgtatttttcatagagacaggttctcactatattgcccaggctggtctctactcctaggctcaagtgatcctcccaccttggcctcccaaagggctgggattacaggtgtgagccaccatgcctagcccctcttagaaattaaaactgagaaatttaaaatatactgtggggctgggtgcagtggctcacgcctgtaatcccagcactttgggaggccaacggggacagatcacctgaggtctggagttcaagaccagcgtagccaacatggtgaaaccctgtctctactaaaaatacaaaaattggccgggcatggtggcgggtgcctgtaatcccggctattcaggaggctgaagcaggcgaattgcttgaacccaggaggcagagattgtagtgagccaacattgcaccactgcactccagcctgggtgacagagtgtgactttgtctaaaaaaaaaaaataaaatatactgtgttcatttgtttaaaaataataaatccattacatgttaacataatatttttaatgaaaaatattttgtttttgtttttccgagacagagtctcactctgtcacccaggctggagtgcagtggtgcaatctcgactcactgcaacctctacctcccaggttcaagtgattctcctgcctcagcctcccaagtatctgggactgcaggcatgcaccaccacgcccgggtaatttttgtatttttagtagagatggggtttcactatgttggccaggttggtcttgaactcctgacctcatgatctgccttcctcagcctccccaagtgctgggattacaggcgtgagccaccgcgccagctaatgaaaaatattttgaaaaataatcaggccaggcgcggtggctcacacctgtaatcccagcacttacggagactgaggtgggtggatcacctgaggtcgggagttcgataccagcctgaccaacatggagaaacctcatctctactaaaaatacaaaattagctgggcgtggtggtacatgcctgtaatcccagctactcaggaggctgaggcaggagaatcgctggaacctgggaggcggaggttgcggtgagccgagatcgcgccactgcactccagcatgggcaataagagtgaaactctgtctcaaaaagaaaaaaaaaagaaaagtaagttaaaaaaaaaaaaagaaaaaaattgatggaaagagtgacattggttgaaagttatgcaagtccttttaatgtttggcttattagaagacagctggattctcatacctgtttgtgcacgtaacctctggaaaagtccactgtgcagtctttttttttttttaactgtctttttttataatcttcagacatgctttttgtttgtttgtttctgagacagtcttgctcttgctttgtcacccaggctggagtgcagtggtacgacctcagctcactgcaacctctgcagttgaagtgattctcatgcctcagcttcctgagtagctggaattatagcacgcaccgccacgcctggctaatttttgtattttcagtagagatggggtttcaccatgttggccaggctggtcttgaactcctgacctcaaatgatctgcctgtaatccaaagtgctgggattacaggtgtcagccaccgcacctgtcctgacacgtgcatttaaagcaagaaacacacacttccaggacatagggctctgtcagcaataactgtcatctttgtatttgcagagatgtaaatatataagaaaccggctgggcacggtggctcacactggtaatcttagcactgtggaagactgaggggggcagattgcttgagtcccagagtttgagaccagcctaggcaatggagcgaaaccctgtctctactaaaaatttaaaatattagccgggcatggtggtgcgcgcccatagtcccagctacttgggagtctgaggtgggagaaggtacccaagcctgggaagtcaaggctgtagtcagctgtgttcatgccattgagctccagcctgggcgacaggagtgagaccctgtctcaaaaaaaaataaaaataaaaataaaaaaataaataaatatatatatatatatatatatatgcaagaaaccactgcaaaccaaacccactccctctcacaggaacaaaggtctcttggaataaatagcaaatgctggaataaaaactatgttcattcagctgccatgatgtgaattcaaaaaggaagttaaatccaagggcaaagcagagaaaagaacatacaaaaatacacctatttcatgtacattcaaagaggaggctaatcactgtggacaaagggccctctggaatgacagctgtaggcagccagcagtgccacggaaatagaggcactgtcatctggagacacagaaaaatcacatcctcccacaactggcctctatgaaaaccaaccaggacagacaacccttccccaaaagtaatggccaagaataaaagcacaaatattgctggaaatccaagtagcctgttttactgctttgagtgacttatatgcaaacctaagacttttttctgaatccttgatcaagatttattcatataaaggccgtacataaattctgggaacatggtactttggactatatattggactctgagccaaaacgttaaatacactacactgcgccccactgtacagtcttcagagaattagaatttaaaagcaagtaacatcttaagtagttttaggccaggtatggtggctcatgcctgcaatcccagcgctttgggaggccgacgtgggtggatcacttgaggtcaggagtttgagaccagcctggccaacatagtgaaaccctgtctctactaaaaatataaaaattaaccaggtgtgttggtgcccacctgtaatcccagctactggggaggccgaggcaggagaatcactggaacccgggaggtggaggttgtattgagctgggatggcgccactgcacttcagcctgggtgacagagtgagactccatctcaaaaaaaaataaaaactagttttgatcctgtgggaccccctagaagcagctcaggtcccccagaacctctttgagaagtgccaaattgtcagctgtcattacattgcttggtttttgtttgtttcttatttcacacctggtgatcacaaattatatgttgctagttttaaaagttgcttatttatatataaacataatttataatttagaaatacttatttctgctttttttcctagtgtttatcttcctatttgtatctttttttagctcccatagtctcttgttcttttatttaaacttttcctatgtggtttgtcaggtttttttttttttcaggtttaattaaggaataattgatttacaataaattgcacacactgtcatgtgacacataatgacattcaagtcaatgacagaccatatatacagtggtgatcccataagatcatcataccatatttctactgtatcttttctatgtttagctgtgttcatatacacaaatacttaccattgtgttacagttgcctacagtgttcagcacagtaatatgctgtacagcttttttgttttgttttgttttccttaaaaaaaaaaaaacaaaaaatatttaacagtgagatggggtttcactgtgttgcccaggctggtttccaactcctgggctcaagtgatcctcccgcctcagccttccaaagtgctgggattataggcatgagacaccacgcccggcctactgtacaggtttgcagcctaggagcaataagccataccatatagcctaggtgtgtagtaggctctgccacctaggttgtgtaagtccattctgatgttcatacagggagagaatcacctgacgcatgactgtatttagagagtacccctcaggagccatcagtgcaacagaggaagtgaacgtactcattacccgtcaaagtttccttgtgcctcttttatttcccccctgtttccaggcaactgctgatctgttttctctcactatagattagttcgtattttttggaattatattatgtgtgattttgtctggcttctttctgcataattttgaatttcatccatggtgcatgtattggtagtggcttcctttttaatgctgagtcatatttctttctatggatataccaagatttgtttatccattcaagtattcatcaacatagggtatgtatccagattttagctatcaccaaaaaagttgccataaacattccttttttcctctttttctttttttaagagacagggtctttctttgttgcctgggctggagtgcagtggtgtgatcatagctcactgcaacccttgaacttctgggctcaagccatcctctgcctcagcctcccgcatagctaagactacaggcacacgctaccatgcccagctaataattcttaaagttttttgtagaaatgggttctcactatgttattcaggctggtctcagactcctgggctcaggtgatcttcctacctcagcctcttaaagtgttgggattacaggtatgaaccactgcgcctggcctgtatttcctttttttttgagatgccatctcgactcactgcaacctccatctcccaggttcaagcgattctgcctcagcctcccgagtagctgagattataggtgcgtgccaccacatctggctaatttttggtattttgagtagagaaggggcttcaccatgttggccaggccaatctcgaactcctgacctcaggtgatctgcccgactcggcctcccatagtgctcggattacaggtgagagccacctcgcccagcctggcctgtattttattttagaaactttatagttttggctgggcgcagtggctcatgcctgtaatcccagcactttgggcggccgagatgggcggatcatgaggtcaggagatcgacaccatcctggctaacatggtgaaaccccgtctctactaaaaatacaaaaaattagccgggcgtggtggcaggtgcctgtagtcccagctactcgggaggctgaggcaggagaatggcgtgaacccgggaggcggagcttgcagtgagccaagatcgcaccactgcactccagcctgggcgacagaacaagactccatctcaaaagaaactgtatagttttaattcaggtttagaactatgattcattacaagttaatttgcatttctttatcaattttacaattttcaatgtctgcaaaaaggcctacaattcttaaatggttggtttatcttttagagcaattttttttttttttttgagacgaagtctcactgtgtcacccaggctgaagtgcagtggcgctatcttggcccactacaacctctgcctcccaggttcaagcgattctcctgcctcagcctcctgagtagctgggactataggtgcgcatcactatgcccggctaatttttatatttttttagtagagacagggtttcactatattggccaggctggtctcgaactcctgaccttgtgatccacccgcctcggcctaaagtgctgggattataggcttgagccaccgtgcccggccagcaatttttaaaataggaaaaaaggatcttgtagttacccatgtagttactgattccagggctcttcattctctcatgtagagtcagattcccttttgctaccattgctcttctgtgggaaggacttcctttcacttttcatgatgtgcagctctgcaggggatgcatattctcacttttgtatgtctagaaaagtttcagccaggcatggtggctcatgcccgtaatgccagcatttagggaagccgaggctgtcagatcacctgaggtcaggagttcgagaccagtctggccaacagggtgaaaccccgtctctaccaaaaatacaaaaattagccagatatggtggtgtgcacctgtaatcccagctacttgggaggctgaggcaggagaaccacttgaacccggcaggcagaggttgcagtgagctgagatcacatcactgtactccagcttgggcgacagagcgagactccatctcgaaaagaaaaagaaaaagaaaagtctgtttcatcagaacaggtttctgtgttgacaggatttacctttcaggccattaattgtgttgctctgctctcttcctgacttcatattgcttcagaagagatgtctgcttccattctttgttcctttgtacatagtgtttttttcatctctggctgcttttcagtggtttttaggaaaattgattatcacatttatttatgtagttttttgcacatttattttgcttggagttgtttgaacttcttggctctgtgtgtttatactgtttattgaatttggataaacagttgtacacccatacagtgaatactgaacaacaaaaagtaatgaagtatttatacacgcaacaacacgggtgaatctgtaaatcatgacctgagttaaagaagcccgggaaaataggtgccatatggattcatttatataaaacttgaagatgcaaactgatctacagacaaagatttgtggttgcctggggatggtggacagatggatcgatcacaaaggggcatagagacttttggtgaaaaaggaaatgtttttatctcgattgtcatgttttcactgacaaatatgtcagaactcaacaaattatatattataaatatgtgcaggttattcttcgccaattatgtatgtcaataaagttgttaaaggataaaaaatgaagggtttggcctgcacttttgggaatctgtagttctcttagtgacccatgtatacaaaaattcttaagtgtaggttatggtgtttttaacaatttataatactgatgaagtttaattagcaattcagaagtacactttaattaatttgatgcatacaaaagtgtgcaattataggtctaatgctatgctattgattgttcagttttgctgtagtgaatgtgaatttttattttagagatgagatctcactctgtcgctcaggctggagtgcagtggtgccatcagagcttactcaacctcccaggtcaagtgatccttccacctgagcctcccaagtagctgagactacaggctgaatgtgaatgttgaatgaatgaatgaattggtgttaaacaggctaaactgtctcagaacttgtggattgtgctgaaagcagtatggcctctggcagtgaagtaaaccttggcccagatactgccatgaggtggctatctagctgaacattttagtacaattctgagacttgcatatttattctctcatttcctagaaaataccggccaaaaaaagtatgaggtctataaggaggaggaaaaacatgaagtttaacatgcctatagaaaaatttacatcccatgaatgtatataatttgctgctgttttacacagcaaaagcacccctgtgactagcacccagatcaagaaatagaacaccacctagctctggcagcttttaacaattttattctggccgggcgtggtggctcacacctatgatcccagtactttgcgaggctgtggtgggaagattgcttgcgttcaggagttcaagaccagcctgggtaacatagcaagacctcgtctctactgaaaaaaaaaaaaaaaattagctgggtgtggtggtatatacctgtagtcccagcttctcatgaagctgaggcaggaggctcacttgagcctgggagattaaggttacgtgagctatgattgtgccactgcactccagcctggatatcagagtgagaccttgtctctaaataaatatataaaaataaaatttttcctgggctcattacataaaattgaacacaggccaaatgaccatgactacagaatttctagttttgaaaaagtttctactctgggattatatatgattaatatataaacactgtcctgtttacttatatttgtagaaacatagcttatatttgtttaatcaagattttcctcttggcagtggactcccgaaaaattgaccaggaagggaaaatcccagatgaaactttggagaaattgaagagcctagggctttttgggctgcaagtcccagaagaatatggtaagtcaagcaaacaagcacccagccagtttagctcttaagaaagcactctgtatttgtccataacaggtctagttgctggaatagatgacaccatccgtggtgggctacttggtaggggtggactgactgaaggacctgtagggaggaagtgttctcgggtcctgtgcttctcatcctagcacagaggaatgaggcatgtggtctggctggctgtagagtgcaaggcacatcgaggtgggagattggaccagtgggaacctttgagcagggtcctttgtcctatggactgtccctgtaattctttgagcatcctagtgatgtttttagcccccaagtggcggttctgccttattagagttggccagtcactacaacttgcctcccttacgctttttctcgagttggtcacctgaattctgcagaggttaaagggacaggcaagcagtgtgtagaaggcaaggtagaccttcaaggttcaaagggatagaccacacacatgtgtgccatttgtgtttaccctcaggcccttttgatataaaattataaaggccaaggatgctgctaagcatctgacaatccacaggacagacccccaaaacagaaaacaatccattccaaaatgttacagtgccacagtggaaaagctctgtcctggagtcctctggatactgggcagtgggtcacactatagttgttgcatttataaagacctacagctgtgatggaagattctcactacatgttaattgattcgatgtgtgtgtagatatcttcatatttaaagtatatatctacatatgcttgtatgcctagaaaaagtgtggatggaaggatatacacagaaatgcgctttctgaggcacaagattgcgagctttttttttttttttttttgagacagggtctcactctgtcatccaggctggagtgcagtggtgtggtcatagctcactgtagccctgaattcctcgggctcaaacaatcctcccacctaagccttccaagtagctgggactacaggcgtgcgccgccatgcctggtgaattttttttattttgtagagctggggtcctgctatgttgcccaggctagtcttgaattcttggaaccaagcaatcctcccacctcagcctcccaaagcgccgggattacaggcgtgagccactgtgcccagccctcgatttttgtttactttgtacctttctgtattgtgattttttttttttttttttttttgagacagagtctctctctgttgcccaagctagagtgcagtggtgcgatcttggctcactgcaatccctgcctcccaagttcaagtgattctcatgcctcagcctcctgagtagctgggaccacaggcacacaccaccacacctggctaatttttgtatttttagtagagacggggttttgccatgttggccaggctggtctcgaactgttgacctcaggtgatctgcctgcctcagcctcccaaagtactgggattacaggtgtgagccaccatgcccggcctgtattgtgatttttttttttaatatggtgatctggcattactttataatcagaagaaaaaaaaaagccaatgaagccttaatgggaggaatctagggctgggctgtgattgacgctggtccatctctcctaggtggcctgggcttctccaacaccatgtactcaagactaggggagatcatcagcatggatgggtccatcactgtgaccctggcagcgcaccaggctattggcctcaaggtcaggtatctggggattctgtgtggtgctctctgtaggtcttctggagtcacatggaggcatagaggccagaggcttgctccctctgaattgggcctgatatctgaccttcagccctgcccttcagttccctcactctggccacacctcatggtgctcaatcctcacacactgcccacatgcgcagtggcctttgggtcgcatgtcccttccttctgaatccacctcctgtccccattgcctctgatccacccttcaaggcccaggtagggtgccactgccttcgccttgggctggaagtggtctctcctgagccttcgtccttcagcctgagcatgcccccactctttatgcaagccaccttctccccactgggcttggagcaccttagggcaggcccagggtcaaccgcccttactggcaatctcattactcagattatttctgcttaatgttgacatcaaagagagctgaatgcacaccatgctcggctcccccaccccagagagcgcacacattcatgcagatgtttagtgaagagggggactgtctttgtggcactgggagggcagcaggtgggacagccctgacactgagcaccttctttaggataggcttggttccagcactcctgtgtcttcacattgcatcatccagaccctgtcagtgggtgggagtggcccagtttgtggatgacaagatggaggaggctttctttggaaagggatatcctttgcccaagaccactagtctgggaaatgaaggaactgatatgaaagttttggacacagactgcaaagcactgtgggttgcacaggctcacggcactggcatgtgcgccctgaccgtctcctcagcagcttggctccctgggctctgcctgtggccgcttgctctgagttcttgctgtcttctcttgcccgaagtaaatatttgcctcagaaaggaaatgtttcacaaacacctcatgctctcctttctccccacagctgacattagtctgtgtctgttttgtttaggggatcatcttggctggcactgaggagcagaaagccaaatacttgcctaaactggcgtccggggagcacattgcagccttctgcctcacggagccagccaggtctgtctctgcacaaaacgttatccctcagcagctgtgatgttgcccaagattcactggggcaaggggctgttggttttgttgagtagctgacttttccttctttccaaaatcttgcaaagaatcaactcagcaactgttcttgccattcctcttatcttgaccttatttctctgtcccagtgagacttgcaagtgagataccacgcttgacagcacttattaaataaatttttgtggtttacaacacaccttgacatacaatatagtaataacgttccggcttcaaagcacctttcagaatatatagcgtgggtggtactgctcccacttacacattaggagctgaggttcagtgaggctgtgtgatctgctggatggagcagggctgcggcagcactcgggactctgatgataagtccatcacctggaccatcctccatcctgcttcactttgcatgagaacctgggaacagtcatccttcctggggtgcccagaactcatcctcacaggacctcagatgagcccattgcaagcacccatttccatgtttaaacctaagcccaagttgttttcactgccgcttttttacgtgatgtattgaagcagaggtcggctaaatccagcctcctgcctgttttttataaataagttttgtttgtttgtttttgagacagggtcttgctgcgtcacccaggctggagtgcagtggctcaatctcatctcactgcaacctccgccttcaagcgattcttctgcctcagcctcccgagtagctgggactacaggcatgccccaccacacccagctaatttttgtatttttagtagagacggggtttcaccatgttggccagatctcaatctcttgacctcgtgaaccacctgcctcagcctcatgttctattaatagcagcagagttgaggaggtgagacagacatcctgcagcttggaaagctgaatatgttatctgacccttcattttaaaagtttgctgacctcttacaagtactaaaacctccattttcaggccctcaaaagcattcatatttattcccagtattctcccttgaccacatctttctgcatctgcagtgggagcgatgcagcctcaatccggagcagagccacactaagtgaagacaagaagcactacatcctcaatggctccaaggtagggttccttccccatggccacattagggtctcagtcacaaccttcactgccactgagtgagcactctccacacaccagggattgtacctgctgctgtagcaccgactaccttcttgagctgcttttatgtgtttgtttttaattttttttagttttttttatttgcgatggagtctctgtcacccaggctggagtgcagtggtgtaatctcagctcactgaaacttctgcctcccaggtttccaatgattctcctgccttagcctcctgggtagctgggattagaggtgcgtgtcaccactcctggctaatttttgtattttcagtagagatggagtttcaccatgttgtccagtcaggtcttgaactcctgacctcaagtgatctgcccacctcggcctcccaaagtgctgagtttacaggcaatgagccactgtgcccggcttgtaaacccaaaaaatctttaaattttttgttacacaaagtttcagacatattctgtgtgcctggctggccctaactccggcagtcacctgcttatggccactgtgcctcttccagcagcatcgccacctccagatcgcatggtaacaatctcagcatgcctctctaaaagacaggagttttttttgtttgtttttgttttttaataaacacaaagccgtaatacccttatcacattttaaaaattgataatttctcttttcttttgagacagggtcccgctctgtcacccaggctggagtgcagtggcacgatcttggctcactgcagcctcaacttcctgggctcaggtgattctcctacctcaacctcccaagcagctgggagtacaggcacacagctaactctttgtattttttttttggtagagatgggttttcaccgtgttgcccaggttggtctcaaactccggggctcaagtggtctgcccacctcggcctcccaaagtgctgggattacaggcgtgagccactgtgcccagctaataatttcttacttctatcagcattcaaatatccctgattgcctcatacctttttttggtttaactgtttgcttgaattaagatccacacaagtcccatctgttgctgtttgttaaggagtctgtttctgcctctgtctccctctgtttcctttcctcctcctcaccaccctcccgccttttttcatttctttgtagaattaacaaataaatgttgtgtgtatttacatctacaacatgatgtttttatatatgtataccttaagaaatgattaaaccctttctttcttgaagaaatgcagttgtctggcggtggagcctgagctgtctgacaactttgggtgttctttcccccgcccccgcctccacctggccatccatgtcccttgggaaaatccttgctctggggaaagtgggctgagccctgtcctctattcactcatgcttggttggcttctgcagagccaaggaccctgcatgtctggcctgaggtctgactggcagctggagcttgatggacaaagacagagctgaggtgggtcacataggggtttggttttctccaaagtccatctttctgtcctcaggtctggattactaatggaggactggccaatatttttactgtgtttgcaaagactgaggtcgttgattctgatggatcagtgaaagacaaaatcacagcattcatagtagaaaga

SEQ ID NO: 10495 - DNA, 831 bp, Homo sapiens
gcgggccagtaacgtcatcagacgtgtgtgtgtccctgcggcgctaagaaggggagactgaggctgaggctggggaacatcgggcagcatgagcggctgcgggctcttcctgcgcaccacggctgcggctcgtgcctgccggggtctggtggtctctaccgcgaaccggcggctactgcgcaccagcccgcctgtacgagctttcgccaaagagcttttcctaggcaaaatcaagaagaagttttcccatttccagaagttagccaagatgaacttaatgaaatcaatcagttcttgggacccgtggaaaaattcttcactgaagaggtggactcccgaaaaattgaccaggaagggaaaatcccagatgaaactttggagaaattgaagagcctagggctttttgggctgcaagtcccagaagaatatggtggcctgggcttctccaacaccatgtactcaagactaggggagatcatcagcatggatgggtccatcactgtgaccctggcagcgcaccaggctattggcctcaaggggatcatcttggctggcactgaggagcagaaagccaaatacttgcctaaactggcgtccggggagcacattgcagccttctgcctcacggagccagccagtgggagcgatgcagcctcaatccggagcagagccacactaagtgaagacaagaagcactacatcctcaatggctccaaggtctggattactaatggaggactggccaatatttttactgtgtttgcaaagactgaggtcgttgattctgatggatcagtgaaagacaaaatcacagcattcatagtagaaaga

SEQ ID NO: 10496 - DNA, 13973 bp, Homo sapiens
gtgtgtgtccctgcggcgctaagaaggggagactgaggctgaggctggggaacatcgggcagcatgagcggctgcgggctcttcctgcgcaccacggctgcggctcgtgcctgccggggtctggtggtctctaccgcgaaccggcggctactgcgcaccagcccgcctgtacgagctttcgccaaagagcttttcctaggcaaaatcaagaaggtaacgcgagccctgggcgaacccttgctgtctggctcccgcttttcaccctcagctgcaagactggtgttgaactttgtgagattccccaaacctgccagagagatacaccctgcggccgaggcgtgttaacactccggattcctgagttccaggaaaaccttcccagagaaagggtgagacatttccaagacgggggacccttggaaatgtggtggtgacgtgttccagctaaattttgtcaggggaattcggaaaactctaggctaggtaattaacaaagcagccttcatctcagctggtctggtctggaaatgtgcggggcttcctctctgattcctaaacagcttacaccatgtccctcctcagtcaccttccagcgccctggggcttccttccccaggtgagcccagcgcctctccctgccattgaggttcctcagaaatctggctccaagatgcttcccaagggtggcacaacccagccaatagtaacagtttggttataaaacactcattgtcttcttagagttggaagacttgggtttggtcttggctcgttgactttgaaactcagttgttttttttgagacagagtcgcgctcttgtcgcccaggctggagtgctcactgcaacctccctcctgggttcaagcgattctcctgcctcagcctccggagtagctgggattacaggcgcctgcccggctttttttttttttgtatttttagcagagacggggtttcaccatgttggccaagctggtctagaactgacctcgggtgatccgcccacctcggcctcccacagtgctgggattacaggggtgagccaccgcgcccggccaagactcagttctttcagccttaaaatggagatagtgttgtgtctccttcacagatgtgttgtagagccccagtgagataaacggtgcatggagagtcttcttaaactgtagagtactgtgcagcagaagagagagctggcttcaacacttagtcttgtgaccttggagctgacggctgcacctccctgtgcctcagtgcattcatctacaaaataggaataaacacatttcttgctctttcctttgtatttcattttatcttctaaggaaaccaacagtatacttgctatttcgtcgaggtgccctactttgaacttggctgaatgttggctgatcctgtatcacagaagttattccctggcttctctttggaacgttcctctgaggttgtcaggctgatacctttatagcaagcaactttacagatgaagaagctaagactcagactaaaagcagtttgcccagctagaaagtgcggagctatgtcttgaacatattggaaaaccttttacccaggacctggggcagtgtggtgctctatcctgggacttcctgctatccagcagcatggtgaagaaagaacacagatctttcagatctgtttccatctttaaacctctggcactacctgccctgccctgcctttactctcagctgtcagctttgcttcccattccactgggaaaatccatgcagtcggatgagaagttcacaggcacagttaccccctcccgctgcatatgtgccggtattatctacattctgttactgtgaactgtctgctcctggcaaaaccaacctctcattagactccaggtcttctcacctactcaagggtaattctttcctttctctgcatcattaactgttctctctactggatcttgagcccttaccattcaggcatttgtccctaatggccatagaagtcagtaatgacctctctgttatcaaattgtgtgatctgttctcagacctcatcctacttgacccatcattggcatctgacaccgttcatccttccaccctgttgacgcactttcgtctctggtttctgaatcactgttctcgccattctctgaatgttctaaatacttcactggctgatacttctctgtgtccattgctggttcttattcagctccttgaccgctaaacagtgaccagtgtttccaactagccaagttggaatttactaaggctgggtctcgtttcatctacagccatctgctgggtgaccttatttagtgtcctggctttaaatatcatcaatatcctgatgcctcaagtttctttcttcagttcagatttctccctgaactccagattccttttgctttttcagagttgggggctttctctgtcacctgtgctggagtgcagtggtgccatcatagctcactgcaaccttgaactcctaaggctcaatagatcctcccacttcagcatccccagtagctgggactacaggcacgccctgccacacccagccaagattctttttttaatctacctttgtactcaaaagctgtactaagaggtctaacaggcatttgagattaatagatcccaaactgagttcctggttcccacccaatcctgctccttccaccagccttctttatcatagataatggtggctctgttgttccacctgttcaaacagaacacctggagtcaccttgtactcttattctcctagtccacttctaattccacagaagatctggttttctctacttttaggttcttagaatctgaccacttttaggcccttctgctgctactttggatcaggccagtgtcatctctcacagccttactgggattagagcagaaacatgggacatgatgcttagaatctcagattgtgtaggccagtggttgtcaccctgccctaagctggacccaagctattcatggagtgtcctggaactgctgcagggatgggtgggaagttgagtgggtgggatttgggtgcctgttttccctatcagcagtctcagtcagagccgcctgcttctgtctgttttacatatttggtttctgcactagatttctttgaataacaggttccacttttttagataatttacaaactgtttattgcaattgaactctcctcccctaaggcattgacctgatttgataacatcaggatctttctcccacgcccctgcaatctctcctgtgtggcaggttttctgtggttgtacctgaaggccaattagttgccaggcagtcttatctggcctgcccactggtaccagaatgatctctaacacagcccattgcacaagacccaagtgtcagtgagcctctgtgttcagtgaaggagactgagctttgatataaaaggctgcagagtgatggagccatcagcttgtttttttttttttttcttgttttttttttccttgagacagtgtcttactctgttgcccaccctggagtgcagtggtgcaatcacagctcactgcagcctcaacctccccaggctcaggggatcctcccacctcagcctcctgagtagctggaactacaggcgtgtgcaaccacgcccaggctggttttgaactcctgggctttaagcaatccccctgcgtcagcttcccaaaggactaggattacaggcagtagccactgcaaccagctaagcttgtttttttctttttcttttcttttttttttatggagtctcactctgtcacctaggctggagtgcaatggcgcaatctcggctcactgcaacctccacctcccgggttcaagcaattctcctgcctcagcctcctgagtagctgggattacaggcgcgtgctaccaagcccgtgtaatttttgtatttttagtagaaacggggtttcaccatgttggtcaggctggtctcaaactcctgacctcgtgatccgcccgcctcggcctcccaaagtgctgggattacaggcgtgagccaccgtgcctggcctccaacctttttttttttctataccaccttcagggtggttttggaatggatggaggcagggattcctttaagttggctgtcacttttagttagggactcacctataagcctgtggtcctgggcccagagaggagaaagcagtgcgagcatattgatagagtagagaaatctgttggctgattagctgtacaaggtctgaggagaaggttgaggtctccccaagacttctctagaacacttggtgagaggcgccatgaggacaggtgatgcttgggcttatagctctgactcaggacatcactgctcaacagcctgaagcccacatccaaagctcatgtcatgctggcaattgaaggggtagcagagcccaaaagtccagaggggctcagcacagggagcagatgtctgtgagcaggagagacagcggctgtagggatcgatgagacttggtaagcatgatgtgctcttgtcagcatagcatctttgagctcacacaataattgatgtagaattgtccatttcagtaaggagtttccacatccactatcttccacgattctcacaagggccttgagtaaatattacctgcatgttatgggtgagaaaggggtagtttagagagctgaagggatttggtgaaggccacataatgagtaagcctgaaatcaaggaccagacccccaggcttctaaatgttagtcttgggctccttgtttcatgggactattatcatcccttgtactgagaaggaaaactgatgaaaatcgggaagaacctatttgaacaggggagggagatggatgtgggtggtggagcctgcacatagtttctgtatctcaggaaccttgtgaggtttgctttccagttccttcagtacgtcatgtcccgctggccagggtggagtggagcacatgtttttccttcccttttaactgatatttccgtgatgggagtgtgctaaaaattaaattttttagaaaatatttactatttttagaaagaagttttcccatttccagaagttagccaagatgaacttaatgaaatcaatcagttcttgggacccgtggaaaaattcttcactgaagagggtatgtatggttttctttaccattgccgatttccattgtaagggctatttggttgatatttatattagaagtgacatacataggagaagtcttcttgagggagaaatggtttccactcataatattttgctttaggtttcatccctattgccatttaattaaaaaacatccagttaaatgcttctcattgtatttgtggttcaggagcactttaaacatttccatactgttccaggtcaacacttccataaagctataataaaaatgaataactaaaaaaattagatggcaaaaagccaaggccacacaccatacaagcccatggagcatgtgttggttgttgtggcagtgtacagttgctcttagtgtttctaaaggttgagtttcaatttctgtactttggtaattgtaaacaaagagtgatttgtggaccagccacagtttggcacctgcatggtgaggcagcatttgacctcaggtccctctctcagagctgttggccggtcctccagccagggccttggtggagagttcagtgatggtggatggacagcaggtcttccctaatagtaggatcctggagagcttttgtttatatgaattttatctatcaatatttgccatcttaggggttattttatttttattttactttatttttttgagaaagggcctagctctgttgctcagactggagtgtggtggtaccatctcatctcaccaccacctccatctttcaggctcaaacagtcccccaacttcagcctcctgagttgctggaactacaggtgcgcacccccatgcccagctaatttttttgtatttttcatagagacaggttctcactatattgcccaggctggtctctactcctaggctcaagtgatcctcccaccttggcctcccaaagggctgggattacaggtgtgagccaccatgcctagcccctcttagaaattaaaactgagaaatttaaaatatactgtggggctgggtgcagtggctcacgcctgtaatcccagcactttgggaggccaacggggacagatcacctgaggtctggagttcaagaccagcgtagccaacatggtgaaaccctgtctctactaaaaatacaaaaattggccgggcatggtggcgggtgcctgtaatcccggctattcaggaggctgaagcaggcgaattgcttgaacccaggaggcagagattgtagtgagccaacattgcaccactgcactccagcctgggtgacagagtgtgactttgtctaaaaaaaaaaaataaaatatactgtgttcatttgtttaaaaataataaatccattacatgttaacataatatttttaatgaaaaatattttgtttttgtttttccgagacagagtctcactctgtcacccaggctggagtgcagtggtgcaatctcgactcactgcaacctctacctcccaggttcaagtgattctcctgcctcagcctcccaagtatctgggactgcaggcatgcaccaccacgcccgggtaatttttgtatttttagtagagatggggtttcactatgttggccaggttggtcttgaactcctgacctcatgatctgccttcctcagcctccccaagtgctgggattacaggcgtgagccaccgcgccagctaatgaaaaatattttgaaaaataatcaggccaggcgcggtggctcacacctgtaatcccagcacttacggagactgaggtgggtggatcacctgaggtcgggagttcgataccagcctgaccaacatggagaaacctcatctctactaaaaatacaaaattagctgggcgtggtggtacatgcctgtaatcccagctactcaggaggctgaggcaggagaatcgctggaacctgggaggcggaggttgcggtgagccgagatcgcgccactgcactccagcatgggcaataagagtgaaactctgtctcaaaaagaaaaaaaaaagaaaagtaagttaaaaaaaaaaaaagaaaaaaattgatggaaagagtgacattggttgaaagttatgcaagtccttttaatgtttggcttattagaagacagctggattctcatacctgtttgtgcacgtaacctctggaaaagtccactgtgcagtctttttttttttttaactgtctttttttataatcttcagacatgctttttgtttgtttgtttctgagacagtcttgctcttgctttgtcacccaggctggagtgcagtggtacgacctcagctcactgcaacctctgcagttgaagtgattctcatgcctcagcttcctgagtagctggaattatagcacgcaccgccacgcctggctaatttttgtattttcagtagagatggggtttcaccatgttggccaggctggtcttgaactcctgacctcaaatgatctgcctgtaatccaaagtgctgggattacaggtgtcagccaccgcacctgtcctgacacgtgcatttaaagcaagaaacacacacttccaggacatagggctctgtcagcaataactgtcatctttgtatttgcagagatgtaaatatataagaaaccggctgggcacggtggctcacactggtaatcttagcactgtggaagactgaggggggcagattgcttgagtcccagagtttgagaccagcctaggcaatggagcgaaaccctgtctctactaaaaatttaaaatattagccgggcatggtggtgcgcgcccatagtcccagctacttgggagtctgaggtgggagaaggtacccaagcctgggaagtcaaggctgtagtcagctgtgttcatgccattgagctccagcctgggcgacaggagtgagaccctgtctcaaaaaaaaataaaaataaaaataaaaaaataaataaatatatatatatatatatatatatgcaagaaaccactgcaaaccaaacccactccctctcacaggaacaaaggtctcttggaataaatagcaaatgctggaataaaaactatgttcattcagctgccatgatgtgaattcaaaaaggaagttaaatccaagggcaaagcagagaaaagaacatacaaaaatacacctatttcatgtacattcaaagaggaggctaatcactgtggacaaagggccctctggaatgacagctgtaggcagccagcagtgccacggaaatagaggcactgtcatctggagacacagaaaaatcacatcctcccacaactggcctctatgaaaaccaaccaggacagacaacccttccccaaaagtaatggccaagaataaaagcacaaatattgctggaaatccaagtagcctgttttactgctttgagtgacttatatgcaaacctaagacttttttctgaatccttgatcaagatttattcatataaaggccgtacataaattctgggaacatggtactttggactatatattggactctgagccaaaacgttaaatacactacactgcgccccactgtacagtcttcagagaattagaatttaaaagcaagtaacatcttaagtagttttaggccaggtatggtggctcatgcctgcaatcccagcgctttgggaggccgacgtgggtggatcacttgaggtcaggagtttgagaccagcctggccaacatagtgaaaccctgtctctactaaaaatataaaaattaaccaggtgtgttggtgcccacctgtaatcccagctactggggaggccgaggcaggagaatcactggaacccgggaggtggaggttgtattgagctgggatggcgccactgcacttcagcctgggtgacagagtgagactccatctcaaaaaaaaataaaaactagttttgatcctgtgggaccccctagaagcagctcaggtcccccagaacctctttgagaagtgccaaattgtcagctgtcattacattgcttggtttttgtttgtttcttatttcacacctggtgatcacaaattatatgttgctagttttaaaagttgcttatttatatataaacataatttataatttagaaatacttatttctgctttttttcctagtgtttatcttcctatttgtatctttttttagctcccatagtctcttgttcttttatttaaacttttcctatgtggtttgtcaggtttttttttttttcaggtttaattaaggaataattgatttacaataaattgcacacactgtcatgtgacacataatgacattcaagtcaatgacagaccatatatacagtggtgatcccataagatcatcataccatatttctactgtatcttttctatgtttagctgtgttcatatacacaaatacttaccattgtgttacagttgcctacagtgttcagcacagtaatatgctgtacagcttttttgttttgttttgttttccttaaaaaaaaaaaaacaaaaaatatttaacagtgagatggggtttcactgtgttgcccaggctggtttccaactcctgggctcaagtgatcctcccgcctcagccttccaaagtgctgggattataggcatgagacaccacgcccggcctactgtacaggtttgcagcctaggagcaataagccataccatatagcctaggtgtgtagtaggctctgccacctaggttgtgtaagtccattctgatgttcatacagggagagaatcacctgacgcatgactgtatttagagagtacccctcaggagccatcagtgcaacagaggaagtgaacgtactcattacccgtcaaagtttccttgtgcctcttttatttcccccctgtttccaggcaactgctgatctgttttctctcactatagattagttcgtattttttggaattatattatgtgtgattttgtctggcttctttctgcataattttgaatttcatccatggtgcatgtattggtagtggcttcctttttaatgctgagtcatatttctttctatggatataccaagatttgtttatccattcaagtattcatcaacatagggtatgtatccagattttagctatcaccaaaaaagttgccataaacattccttttttcctctttttctttttttaagagacagggtctttctttgttgcctgggctggagtgcagtggtgtgatcatagctcactgcaacccttgaacttctgggctcaagccatcctctgcctcagcctcccgcatagctaagactacaggcacacgctaccatgcccagctaataattcttaaagttttttgtagaaatgggttctcactatgttattcaggctggtctcagactcctgggctcaggtgatcttcctacctcagcctcttaaagtgttgggattacaggtatgaaccactgcgcctggcctgtatttcctttttttttgagatgccatctcgactcactgcaacctccatctcccaggttcaagcgattctgcctcagcctcccgagtagctgagattataggtgcgtgccaccacatctggctaatttttggtattttgagtagagaaggggcttcaccatgttggccaggccaatctcgaactcctgacctcaggtgatctgcccgactcggcctcccatagtgctcggattacaggtgagagccacctcgcccagcctggcctgtattttattttagaaactttatagttttggctgggcgcagtggctcatgcctgtaatcccagcactttgggcggccgagatgggcggatcatgaggtcaggagatcgacaccatcctggctaacatggtgaaaccccgtctctactaaaaatacaaaaaattagccgggcgtggtggcaggtgcctgtagtcccagctactcgggaggctgaggcaggagaatggcgtgaacccgggaggcggagcttgcagtgagccaagatcgcaccactgcactccagcctgggcgacagaacaagactccatctcaaaagaaactgtatagttttaattcaggtttagaactatgattcattacaagttaatttgcatttctttatcaattttacaattttcaatgtctgcaaaaaggcctacaattcttaaatggttggtttatcttttagagcaattttttttttttttttgagacgaagtctcactgtgtcacccaggctgaagtgcagtggcgctatcttggcccactacaacctctgcctcccaggttcaagcgattctcctgcctcagcctcctgagtagctgggactataggtgcgcatcactatgcccggctaatttttatatttttttagtagagacagggtttcactatattggccaggctggtctcgaactcctgaccttgtgatccacccgcctcggcctaaagtgctgggattataggcttgagccaccgtgcccggccagcaatttttaaaataggaaaaaaggatcttgtagttacccatgtagttactgattccagggctcttcattctctcatgtagagtcagattcccttttgctaccattgctcttctgtgggaaggacttcctttcacttttcatgatgtgcagctctgcaggggatgcatattctcacttttgtatgtctagaaaagtttcagccaggcatggtggctcatgcccgtaatgccagcatttagggaagccgaggctgtcagatcacctgaggtcaggagttcgagaccagtctggccaacagggtgaaaccccgtctctaccaaaaatacaaaaattagccagatatggtggtgtgcacctgtaatcccagctacttgggaggctgaggcaggagaaccacttgaacccggcaggcagaggttgcagtgagctgagatcacatcactgtactccagcttgggcgacagagcgagactccatctcgaaaagaaaaagaaaaagaaaagtctgtttcatcagaacaggtttctgtgttgacaggatttacctttcaggccattaattgtgttgctctgctctcttcctgacttcatattgcttcagaagagatgtctgcttccattctttgttcctttgtacatagtgtttttttcatctctggctgcttttcagtggtttttaggaaaattgattatcacatttatttatgtagttttttgcacatttattttgcttggagttgtttgaacttcttggctctgtgtgtttatactgtttattgaatttggataaacagttgtacacccatacagtgaatactgaacaacaaaaagtaatgaagtatttatacacgcaacaacacgggtgaatctgtaaatcatgacctgagttaaagaagcccgggaaaataggtgccatatggattcatttatataaaacttgaagatgcaaactgatctacagacaaagatttgtggttgcctggggatggtggacagatggatcgatcacaaaggggcatagagacttttggtgaaaaaggaaatgtttttatctcgattgtcatgttttcactgacaaatatgtcagaactcaacaaattatatattataaatatgtgcaggttattcttcgccaattatgtatgtcaataaagttgttaaaggataaaaaatgaagggtttggcctgcacttttgggaatctgtagttctcttagtgacccatgtatacaaaaattcttaagtgtaggttatggtgtttttaacaatttataatactgatgaagtttaattagcaattcagaagtacactttaattaatttgatgcatacaaaagtgtgcaattataggtctaatgctatgctattgattgttcagttttgctgtagtgaatgtgaatttttattttagagatgagatctcactctgtcgctcaggctggagtgcagtggtgccatcagagcttactcaacctcccaggtcaagtgatccttccacctgagcctcccaagtagctgagactacaggctgaatgtgaatgttgaatgaatgaatgaattggtgttaaacaggctaaactgtctcagaacttgtggattgtgctgaaagcagtatggcctctggcagtgaagtaaaccttggcccagatactgccatgaggtggctatctagctgaacattttagtacaattctgagacttgcatatttattctctcatttcctagaaaataccggccaaaaaaagtatgaggtctataaggaggaggaaaaacatgaagtttaacatgcctatagaaaaatttacatcccatgaatgtatataatttgctgctgttttacacagcaaaagcacccctgtgactagcacccagatcaagaaatagaacaccacctagctctggcagcttttaacaattttattctggccgggcgtggtggctcacacctatgatcccagtactttgcgaggctgtggtgggaagattgcttgcgttcaggagttcaagaccagcctgggtaacatagcaagacctcgtctctactgaaaaaaaaaaaaaaaattagctgggtgtggtggtatatacctgtagtcccagcttctcatgaagctgaggcaggaggctcacttgagcctgggagattaaggttacgtgagctatgattgtgccactgcactccagcctggatatcagagtgagaccttgtctctaaataaatatataaaaataaaatttttcctgggctcattacataaaattgaacacaggccaaatgaccatgactacagaatttctagttttgaaaaagtttctactctgggattatatatgattaatatataaacactgtcctgtttacttatatttgtagaaacatagcttatatttgtttaatcaagattttcctcttggcagtggactcccgaaaaattgaccaggaagggaaaatcccagatgaaact

SEQ ID NO: 10497 - DNA, 546 bp, Homo sapiens
gtgtgtgtccctgcggcgctaagaaggggagactgaggctgaggctggggaacatcgggcagcatgagcggctgcgggctcttcctgcgcaccacggctgcggctcgtgcctgccggggtctggtggtctctaccgcgaaccggcggctactgcgcaccagcccgcctgtacgagctttcgccaaagagcttttcctaggcaaaatcaagaaggtaacgcgagccctgggcgaacccttgctgtctggctcccgcttttcaccctcagctgcaagactggtgttgaactttgtgagattccccaaacctgccagagagatacaccctgcggccgaggcgtgttaacactccggattcctgagttccaggaaaaccttcccagagaaaggaaagaagttttcccatttccagaagttagccaagatgaacttaatgaaatcaatcagttcttgggacccgtggaaaaattcttcactgaagaggattttcctcttggcagtggactcccgaaaaattgaccaggaagggaaaatcccagatgaaact

SEQ ID NO: 10498 - DNA, 2297 bp, Homo sapiens
agaggctgcggcctacagccggggagaggccagcccggcctacagtgcggacacaggacagaggggagccaggttctttgcactgaccaatgctgagagcagaccctcggagcagccgggttggaagtgtctctccatagtcaccagacagatccaggataggatgggcagcccagtgcaccgagtgtcattgggggatacctggagcaggcaaatgcaccccgacatagagagcgagaggtatatgcagtcctttgacgtggaacggctcaccaacatccttgatggaggtgcccagaacactgcactccgcaggaaagttgagagcatcatccacagttacccggagtttagctgtaaggacaattatttcatgacccagaatgagcgttataaggctgccatgcggagggcattccacatccggttgatagctcggcgcctgggttggttagaagatggtcgtgaattaggctacgcttacagagccctttctggagacgtggccttaaatatacacagagtcttcgtgagagccctcaggagcctgggctcagaggagcagattgccaaatgggacccactctgcaaaaacatccagatcatcgcaacgtatgcacagacagagttgggacatgggacatatcttcagggcctggagactgaagccacctatgacgcagccacccaggagtttgtgatacacagccccacgctgactgccaccaaatggtggcctggagacttgggacggtcagccacccatgccctggtccaggcccagctgatctgctcaggagccaggcggggcatgcacgcttttattgtgccaatccggagtcttcaggaccacaccccactgccaggaatcatcattggggacatcggacccaagatggactttgatcaaacagacaatggcttcctgcagctgaaccatgtgcgggtccccagggagaacatgctgagtcgctttgcacaggtcttgccagatggcacctacgtcaaactcggtacagcacagagcaactaccttcccatggtggtggtgcgggtggagctgctgtcaggggagatcctccctatactgcagaaggcctgtgtcatcgccatgcgctactcggtcatccgccgccaatcccggctccggcccagtgacccagaggcaaaggtcctggactaccagacacaacagcagaaactctttcctcagctggccatcagttatgccttccatttcctggcagtcagcctcttggagttcttccagcactcctacactgccattctgaaccaagacttcagcttcctgcctgagctccacgcactgagcacgggcatgaaggccatgatgtcagaattctgcacccagggagctgagatgtgccgcagggcctgtggcggacatggctactcaaagctgagtggcctgccatcactggtcaccaaattgtcggcctcctgtacctacgagggtgagaacacagtgctctacctgcaggtggccaggttcctggtgaagagctacctgcagactcagatgtcccctggctccacgccacagagatctctctctccatctgtcgcatatctcaccgcacctgacctggccaggtgtccagcccagagggcagccgacttcctctgcccggagctctacaccacggcctgggcacatgtggcagtaaggctcataaaggactcagtgcagcatttacagaccctgacgcaatccggagctgaccagcacgaggcttggaaccagaccactgtcatacacctccaggctgctaaggtgcactgctactatgtcactgtgaagggttttacagaagctctggagaaactagaaaatgaaccagcgattcagcaggtgctcaagcgcctctgtgacctccatgccatacatggaatcttgactaactcgggtgactttctccatgacgccttcctgtctggtgcccaagtggacatggcaagaacagcctacctggacctgctccgcctgatccggaaggatgccatcctgttaactgatgcttttgacttcaccgatcagtgtttaaattcagcacttggctgttatgatggaaacgtctacgaacgcctgttccagtgggctcagaagtcaccaaccaatactcaggagaaccctgcctatgaggaatatataagaccacttttacaaagttggagatccaagctatgaaataaccaacagtattcaagaagcaaccagcaccatcatgtgataatggtactatggcatatatgcaacattaaaattttaaattaga

SEQ ID NO: 10499 - DNA, 2348 bp, Homo sapiens
acaagggcttgagagctggccaagcagtttctctcagcttctgtgttccagcccctatgtgggaggagagaagggcaggaccacaagcctgccagaggctgcggcctacagccggggagaggccagcccggcctacagtgcggacacaggacagaggggagccaggttctttgcactgaccaatgctgagagcagaccctcggagcagccgggttggaagtgtctctccatagtcaccagacagatccaggataggatgggcagcccagtgcaccgagtgtcattgggggatacctggagcaggcaaatgcaccccgacatagagagcgagaggtatatgcagtcctttgacgtggaacggctcaccaacatccttgatggaggtgcccagaacactgcactccgcaggaaagttgagagcatcatccacagttacccggagtttagctgtaaggacaattatttcatgacccagaatgagcgttataaggctgccatgcggagggcattccacatccggttgatagctcggcgcctgggttggttagaagatggtcgtgaattaggctacgcttacagagccctttctggagacgtggccttaaatatacacagagtcttcgtgagagccctcaggagcctgggctcagaggagcagattgccaaatgggacccactctgcaaaaacatccagatcatcgcaacgtatgcacagacagagttgggacatgggacatatcttcagggcctggagactgaagccacctatgacgcagccacccaggagtttgtgatacacagccccacgctgactgccaccaaatggtggcctggagacttgggacggtcagccacccatgccctggtccaggcccagctgatctgctcaggagccaggcggggcatgcacgcttttattgtgccaatccggagtcttcaggaccacaccccactgccaggaatcatcattggggacatcggacccaagatggactttgatcaaacagacaatggcttcctgcagctgaaccatgtcttgccagatggcacctacgtcaaactcggtacagcacagagcaactaccttcccatggtggtggtgcgggtggagctgctgtcaggggagatcctccctatactgcagaaggcctgtgtcatcgccatgcgctactcggtcatccgccgccaatcccggctccggcccagtgacccagaggcaaaggtcctggactaccagacacaacagcagaaactctttcctcagctggccatcagttatgccttccatttcctggcagtcagcctcttggagttcttccagcactcctacactgccattctgaaccaagacttcagcttcctgcctgagctccacgcactgagcacgggcatgaaggccatgatgtcagaattctgcacccagggagctgagatgtgccgcagggcctgtggcggacatggctactcaaagctgagtggcctgccatcactggtcaccaaattgtcggcctcctgtacctacgagggtgagaacacagtgctctacctgcaggtggccaggttcctggtgaagagctacctgcagactcagatgtcccctggctccacgccacagagatctctctctccatctgtcgcatatctcaccgcacctgacctggccaggtgtccagcccagagggcagccgacttcctctgcccggagctctacaccacggcctgggcacatgtggcagtaaggctcataaaggactcagtgcagcatttacagaccctgacgcaatccggagctgaccagcacgaggcttggaaccagaccactgtcatacacctccaggctgctaaggtgcactgctactatgtcactgtgaagggttttacagaagctctggagaaactagaaaatgaaccagcgattcagcaggtgctcaagcgcctctgtgacctccatgccatacatggaatcttgactaactcgggtgactttctccatgacgccttcctgtctggtgcccaagtggacatggcaagaacagcctacctggacctgctccgcctgatccggaaggatgccatcctgttaactgatgcttttgacttcaccgatcagtgtttaaattcagcacttggctgttatgatggaaacgtctacgaacgcctgttccagtgggctcagaagtcaccaaccaatactcaggagaaccctgcctatgaggaatatataagaccacttttacaaagttggagatccaagctatgaaataaccaacagtattcaagaagcaaccagcaccatcatgtgataatggtactatggcatatatgcaacattaaaattttaaattaga

SEQ ID NO: 10500 - DNA, 2702 bp, Homo sapiens
tggaattctataagcctcccttaacaaggggcagtacccaccaacaaatgtgtcagtattcctgcagtgaaatgtgtggatgttcatgttagatgggatttttaaaggattatcaatggcctcatgtcagttcaagttttgcaatgagttctaaggaactgtctgtttttaaggtttttatggtgtcggggataggggaaggtggacacaacaggtagtgatctaaatcttctggttcttttcccttcagtgacccagaggcaaaggtcctggactaccagacacaacagcagaaactctttcctcagctggccatcagttatgccttccatttcctggcagtcagcctcttggagttcttccagcactcctacactgccattctgaaccaagacttcagcttcctgcctgaggtacctgctgtctgcggaggggcaggcgctggcaggcgctgggagctaagattgttccactcactggggagcagccacagccccatccccatgggcactccccacccccacctctcccagctttcagcatcccagggcgtctgggtgaacggcaccctggtatataaatttacccacaaccagcccccagagagctacaaacatactaagagaaaacaatcacacctagcgtagagaacacaggtccacaacccctgatgtgtatttgaaacctgaaaagctccgaaaaacagttgtttggaactcatttggtggcatagtttgacctgaactgacctgatttatccctctgagtgtgaatacattttgcagtaaaattattaatgtgtttaatcactaaagctgccccaaaccccactggggctattatataaaatgcactttaaatgccacttggcctctctataatccaaaagttactctgattcctaaacacatctggctcacaggtctcaggtaaagcattgtggacttacatatatagtaaaattcagtctgtccaggctaccatgctttataagcactgctcattaacccttccaactgcaatgaggcacagagagatcaagggacataactttcctcccaaggacttgaaagctccaaagataggcagggtcttcaagaaccaaaatctgaaagcagtcctgctgcccagcagcctctgtcctgttggggccactgtaacaaaataccataaagcagtggtttataaacaacagaaattggcctggcatggtgacttacacctgtaatctcagcactttgggaggccagggcaggaggattgcttgagcccaggagttcaagacaagaccagcctgagcaagatggtgagacccccgtctccacaaaaaaaaaaaaaaatgaaaaattagtcaggtgtggtagcacacacctgtagtcccaactactactttggaggctgaggtgggaggattccttgagcccaggagtgcaaggatgcagtgagctgtgattgtgccactgcactccagtccagcctgagcagcagagtgagacgctgtctcaaaaaagaaaaacaaacaaatttattgctcacagttctggaggctgggaagtccaaggtcaaggcactagtgcatttggtgtcaggtgagggcctgcttcctgaacggctttttgctgtgtcctcaaatggtagaagcagcctctttctttcttttttttttttttcctgagacagtctcactctgtcacccaggctggagtgcagtggtacaatcttggctcactgcaacctccgcctcccaggttcaagagattctcctgcctcagcctcctgtgtagctgggactacaagtgcacgccaccacgcccagctaatttttgtatttttagtagagacggggtttcactatgttggccaggatggcctcgatctcctgacctcgtgatccacctgccttggcctcccaaagtgctgggattgcaggtgtgagccaccacacccagccagaagcagcctctttcatgagggcactgatcccattcatgaggcctccaccctcatgacttaattacctcctgaaggccccaactcctactaccatcataatacctcctaatcctagtcctaatcatcaatacctcctaatcctagccctaacccttgagggttaggatttctacataagaattttaggtggacacattcagaccctgtcaccctcctacaacccagtaagtgggcttacagtggacacccatcctcataagctagctttctaaaacccaggccagcaaaatccgtaactcctggaggtttgtgggcccaatccaggcagcaccctcttcccaatcctggagacactggccaggccaggttttccttcactcttatgcccctacagctacattgcctaattgtgtgcctctgggtgagtcacataagctgagtacccgccttctcattcataaagttgtgagcagaggaaacacttcttacctcagagctgagctgggcatgagtagatgctcagtaagtggtgcacagggttggtccctatggtggaggccccctaacaccgcccaacccccctccatgttctcacagctccacgcactgagcacgggcatgaaggccatgatgtcagaattctgcacccagggagctgagatgtgccgcagggcctgtggcggacatggctactcaaagctgagtggcctgccatcactggtcaccaaattgtcggcctcctgtaccta

SEQ ID NO: 10501 - DNA, 565 bp, Homo sapiens
tggaattctataagcctcccttaacaaggggcagtacccaccaacaaatgtgtcagtattcctgcagtgaaatgtgtggatgttcatgttagatgggatttttaaaggattatcaatggcctcatgtcagttcaagttttgcaatgagttctaaggaactgtctgtttttaaggtttttatggtgtcggggataggggaaggtggacacaacaggtagtgatctaaatcttctggttcttttcccttcagtgacccagaggcaaaggtcctggactaccagacacaacagcagaaactctttcctcagctggccatcagttatgccttccatttcctggcagtcagcctcttggagttcttccagcactcctacactgccattctgaaccaagacttcagcttcctgcctgagctccacgcactgagcacgggcatgaaggccatgatgtcagaattctgcacccagggagctgagatgtgccgcagggcctgtggcggacatggctactcaaagctgagtggcctgccatcactggtcaccaaattgtcggcctcctgtaccta

SEQ ID NO: 10502 - DNA, 12250 bp, Homo sapiens
gaagctctggagaaactagaaaatgaaccagcgattcagcaggtgctcaagcgcctctgtgacctccatgccatacatggaatcttgactaactcgggtgactttctccatgacgccttcctgtctggtgcccaagtggacatggcaagaacagcctacctggacctgctccgcctgatccggtgagtggcagagacttcaaaccatgttagtcttcagagaataaccctaccccttgttcacaggtcacttccaactccaaaaccttgctaatgggcagagcagcaacagccctggagaggtctacaccctattatcattacaccagcataaagcattatgaattaatgaaagaaaaaaatgggaaaaaatgggaaaaatactgaagaataaatgagctacctcagttgaactctttacattgtcaaggaaataggaatagtatctaaggaaaatcaataaaatgaagcatgctacatatgaatgatatgtgctaatgtgctaataatagtctcaaccatagctaactttttttttcttttctttttttttagacagggactggctctgtcacccaggctaaagtgcagtagtacaatcttgtctcattgcaacctctgcctctgggttcaagtgattctcctgcttcagcctcccaagtagctgggattacaggtgcccacccccatgcccagctaatttttgtatttttagtagagatggggtttcgccatgttgaccaggctggtctccaactcctgacctcaagtgatccacctgccttggcctcccaaagtgctgggattacaggtgtgaaccaacgtgcccaggcatagccaacctttaaagagcacttatgtgacaggccctgtgccaaaagcttttacatacatctcatttaatccttacagccctttgaaatgggtactattaatctcctcattttattggaaaggaaattcaggctgatgggagttgcccagtatcacacaatcagccagaggaggggctgggtacaatctcaggtctggcccctgggcatgagctcttaacctgtatgttaaggttaaggttgaggtattatatactttgaacacatcctagtctttgttgaatgtgcttaagcaaattcttaccaagtttagtaaacttaccttaatcttccctcagcttcaagatgaaaaattttttttaactctgtaattcatatattgatttataaaataataacacaaagttttttaatgcagcattaatgcagtgccatgtatggtgaatgaaatactaatgcagtgctttcacactattattctataatctaaacgattgctttaaaaacatatcaaaaccaaagcccaacctgatcagagtcctagaaaaaaatagaaataaaaacaataaagaaaaaaaaaagcctgggcaacatggcaaaaccccacctctacaaaaaatgaatcaggcacacacctgtagtctcagctactcgggaggctgaggtaggaggattgattgatcccaggaggttgaggttgcagtaagctatgatcacaccactgcactccagcctgggcaacaaagtgagaccttgtctcaaaaaaaggaaagaaaagaaaacattgcaaattatttaccattgtccataagattaaaaaaaatggactaatttgagaatataatctttttgagacctcactgggcagaaaatatgatacctattgcatggggttagaggcgactcctagaatctccaacaattcttatatcaacaagactaataaaaagaaaaaaagaggctgggagcagtggctcacacctgtaatcccagcactttgggaggccaaggtgggaggatcacttgaggcaaagagtttaagactagcttgggcaacatagtgagaccctgtctctaaaagatttgtaattttttaaaaataagattttaagacaggtttttaaaaaactagaccaaattccttttatttctcacaatatgcaatatgttacatgccctttatgactactcatagcatgtaacagatagctggtggtcaaaaaaatgtttgttcaggccaggcgcggtggctaatacctgcaatcccagcactttgggaggccaaggtgggtggatcacctgaggtcaggagttcgaggccagcctggccaacatggtgaaacccggtctctactaaaaatacaaaaattagctgggtgtgatggcacatgcctgtaatcccagttacttgggaggctgaggcagaatcgcttgaacccgggaggcagaggctgccgtgagccaagatcgtaccactgcactccagccttggcgacaagagtgagactccatctcaagaaaaaaaaaaaagtttgttcagttaaatcatcaaaaactgtcaaaaatacgtttgacacaattatgtcccaggtataaaactttccctaatacagggaatccagtggtgaaaactattaagagcataattaagtactgcacagttcaagcccaagggtgtccatctttttgaaactctcagaatttaaaagcacttgaaaataatgttctagccccggttgtcagtgatgataaaatacaaaagattaccttaacaccctataagcatgttttttaaatttgcaaacagcatttctaagtgcttgccttggctccagaaacttacaattcaagacaagacagacagcccagatgcaatctgccaacttactcatgcgtcaaacccagaaattgatttacttccatgatggttcctaagtagccttactactgcagggtaattaggcacataacagattctatgcatatcactgtttggtgtcacagttccctgccttgattagtcactatctccctaagatttctgagatgaaaactgaagggcggcatagtatgctatggatgccaagaacaagctctctgcaatgttaactgacccaaacagtttttagttgtttaagcggtcataaaacctcagctggggggacttccaggtaaagatgacagattaaactatgcatttacttctgttctttcccgaaaccctactaaaacatcagtgaatggactgaaattttttaaaaggcataaacccacaaagagaaagagatgttgtctctgtgttgtccaggctgctcttgaactcctgggctcaagggatcctcctaccttagcctcccaaagtgctgggattacatgcatgagctaacacacctagcctctgtgagtaattttaagactttccttgactctgccctggcagaagggtaaatagaggatctgtggactagggagcatcaggtatagttgataataaggctacccttcagaaaacacagggttctttataggccaaatactgacacctccctcccccagaccttttttcccactggttcctaaaaaactggcagccagactagtaccctgcaagaagatggtaagatgatccttctctggagaatctgaccagcccaaggagaaggagctaaagacactgacatcagagtcccccaatggtccacccaattcactccatagtgaaccccatactagcaagcatagccacaagtttgtaatcagctagttaaggctttgcttttagctatgatcagacactcagggatcaccaaacacctgaagaatgcccctaacataaaagatggagaccaaaacaagcaagaacaaggcaattcagaggacataagagaatccacagggagaagaaaacttaaaaaaaaaaaacagtgatatctcagagttaagagacggtattgcaaccacaaaataaaaacctgaatgccattatttaaaactaatattcagagaacctaaaaaaagagctccttgaagttaaaaaatgataatggaaatgaaaaactcaatgtaaggactggaagataaagttgcagaaatctcacagcaagaaagcaaaaagacaaaaaaaaggaggacttttaaaaagtaagaggaccaatcttagctgttcatcatctgaagaacaggtctagaaagaagacagagaaaacagaaggaagcgaatcattaataaaataattcaagaaaacattcctcaaatgaaggatacgagtttcagatgaaaaagggtcacagatgcctacagactagaggagaggagacaggcacacacatgcacaaaataagtcacactgtataccatgtgaaatggtaatacctaccatgaaagaaaggatagcaggaagtggaggaaagaatgctgggggtcagtagggaggagggggagctacaattttaagtaggccagagaaggcctccctgggagggtgacatttaaggaaagacctgaggagaaggtagggagaagctgttgtggctgctagggaaagagcattacaggcagaacataagtacagtcatgcatcacttaatgactggaggatccgttctgagaaatgtgtcttcaggtgagtctgtcatcatgtgaacatcacagagtgtacttacacaagcctaaatggtatagcctattgctcgtacagtcacacctgcaaagcatgttgctgttctgaatactgcagccaattctaacatcaatcactaagcaataggaatttttcagctctatcataatgtcatgggaccgccatcatatacatggtccatcattgaccaaaacatcattatgcagtgcatgacagtacaaatgttggagaccagagtgtgcttggcatatccatccagagaacacagaagaggccacaggggcaggaatggcatgactgcggtggaaaatgacggcagagggcagagagttaagggagtacagtagggggtgggaagagacggtaaggtagatcattgcaaagacttaagagaatgcgagggttttgagcatgggatagaatgggagggttttgagcattggatagacacaacctaaaagaatctgatgtgtatttttaaaggcttgctccagctgccatattaagaactaagagtgaaaagcagggagatcagctggatcgctaatgcaatcatccaagtgagtgatgatagtggattggagcagtgacagtgctggaggtggtgggaatggttgaagtttgaatatatcttgaaggcagaacaggatttgctgacagattagatgtatggtgagaaagaagagaagaatcaaggtttttggtcagaagggcagagctgccatttactataaatgcggaagactacaggaggcccaggtttgggcagggtggacgggaaggagtttgggttcagatacattacttttgaagagcctatcagaaatccaagtacagatgttggtaagcaggggacactggagggataagtttggaagtcattggcgtatggttgatatttaaagccttgagaagaacatcacaaggagtgcatgaagagaagaggtccaagtactcagtcttgagaccctcgcaagataataaggaagtaaccgtggcaagagctatttctgtggagtggtgggagtaaaaacatgaacagatccagttcaggagagaatgtgaaaattggaaatcataagcataaacacacataacactttcagggagttttgtcctaaacgggagccaaggtgatggagaaggaaatagagtcaaaagcttgtgtttaagatgggagaaatgattgtctgtttgtatactgatggaaatgatccagtagagaggggatttttttttcttgtacctttctttgaacttgatcttggcctcccatcacgccttgtgtttaagagcaaggtctttgaggagatccttgttgatgacagtttgtccaagaggatatctacagagtaccttgtgggcatgaggtgattgcagttataagcttttgcaaaagacttgatccttgacctcttggagatcttcttgcctatggcagctgtcactttgtgaggatagcagtcaattccagctaccaaagcatgactgtaagaatggactgaggtgccatcatcaatgtccttcatgataatggctttgcgtccagagtagcatccagccaggaccagcaccactttcccactttttcatgaacttgcccattttgacagcaaccagccaggcctacagtaaaaagaaagaagggcatttccactaactttttacccctgaggggaattttgatgttgttggagaaaggcaggagaatgttgttctccagtatgcaagaggaaaagacatctagtagacaaggagggactgaggcctgagctgagagcctgaagagagaaagcattgtatgtataaatgcaagggtgggaacttacacagattctcttactgcttccacttcattagtgaaatacgatgtaaagccatccaggcaaaagagatgggaaaggtggatagtgtcaatctgaggatcaaagagatggtaagaaataactgcctaagaaaaagaaacagtaaatgaacaatgagtaaatatagcaatgtaatacgattgctgagctgcaatcagggcccacttgagcccttattacaccagttatgattgttttttccagccatgtatagttacaaaggtggtggcacaaagtgggtggaaaactaaagacaaagaggtatgcgttttgctaaacaggtatgacaaagcaagaaaaatcgttgagtgtgtgtgtgtgtgtgtgtgtgtgtgtgtgtatatatatatatatatatatatatatatatatatatatatatatattttttttttttttttttttttttttttttttgagcgggagtcttgctctgttgcccaagctggagtgcagcggcacgatctcagctcactgcaacctctgactcccaggttcaagcgattctcccacctcagccttcccagtagctgagactacaggcacacaccaccacacctggctaatttttgtatttttagtagagacagggttccgccatgttggccaggctggtctcgaactcctgacctcagctgatccatctgcctcggtctcccaaattgctgggattacaggtgtgagccatcgcgcccggcctgttgaatgtatttttgagagagtaatagaacatggaatttcagctggataaggaatgaagtgagaccacaagggggcagggggacattaaattggcggtagggctcatatgatgttggggatcatcaagaaacgattacattggatacagtatcccagttaccaccaatgctttaatgacacacaatcatcataatgtcaatactaaatattggtctggccaaaattataactatattgggaggcccgaaggccaggaggaagaagaatgggaacaaggggaggtaggagtgaagagagggggtgataaatataaatctttaccttttgaatgaagattcaacagataatatctcaaactgaaccatcaacaagcagcaatataaacaagatattttgacattcagataaatactgaaatatcaactaaaagattgaaattgccagccgggcatggtggctcatgcttgtaatctcagcactttgggaggccgaggtgggcagatcacctgaggtcaggaattcgagaccaacctggccaacatggtgaaaccccatctctactaaaaatacaaaaatcagccaggcatggtggcaggcgcctgtaatcccaactactcgggaggttgaggcaggagaatggcttgagcccgggaggtagaggttgcagtgagctgagattgtgccactgcactccagcctgggcaactgagactctgtatcaaaaaaaaaaaaaaaaacagattgaaattgcttctgaggaaaaagaagtggaaatcagacaggtatatgctcgttatttatttatttatttatttattttgggacaggagtctcactctgtcgcccaggctggagtgcagtggcataatctccactcactgcaacctccgcctcctaggttcaagtgattctcctgcctcagcctcccaagtagttgggactacaggcatgtgccaccatacctggctaattttttgtatttttagtagagacggggtttcaccatgttacccaggatggtcttgatctcctgacctcatgatccacctacttcggcctcccaaagtgccgggattacaggcgtgagccaccacgcatggccggatatgctgtttttttaaacaagccttacggaaccctttgactcattatactatgcacatataactgattaaaaaataaaaactaaaaaaaaatgctgaattgtttgaaaagcgaataatcatgcaacctctaattaggtattgttattcaccatccaagactagtttgattcataagagcaatctaaaatacttacaaactcttgtttcctatcccaggaaggatgccatcctgttaactgatgcttttgacttcaccgatcagtgtttaaattcagcacttggctgttatgatggaaacgtctacgaacgcctgttccagtgggctcagaagtcaccaaccaatactcaggtagttgagtggaacacattataaattatgtaagaaagcagagaacaggcagtgaatacaccttcatgttctcccattttaattgattcccgttaggttggcaatcacttggcgtagcacgtctgtttaaaatattcttagagaacacataaaagaaacaaggagtggcagtatggcctggcaggaactctgagcctggattgtaatcagcaaaatgcactgctcggaacttagtaaagggaattaagaggaaggcccaagctctaaatcatggcttgacagacccaagtgcatacacacagagtggtaaaccggcttttaagtaacaaaaagaaggagataaatcactgcggtaattgaaccaccttattttcagccttttaactttcagttttgtgtagataaaagtaggtattcagaagtggtaggaagcttgagggatgtctctcttagacctgattgcctgctagagatgataccctctcctcttcactctaaggaatacaatccaaggagcaaagaaagctgctgcactgccattagtagcccaggaaagccatatgagtgacaattaaaagggtcatgccaaaaaaatccccagccatcctaggagagcacaccagaactctacatcattaacagcgagaagacggggaggactcataaggtcccaacactcaagggccagggtatgctcgcagctctatgcttatgagcctctttgggaaaagttgtaaatgtcaatgaatatgttaacaggagtgaggtaataaaccctgtagttagaatatgaggaaccaatatttaatagcagattttacatagatgatcaaaacaaaaagtctataggtacaaaacagattattttaaattttatagtgcaaatacatgattcaggtggtgaagctttcttttttacctctttggtccaatttcagaaaaggtgtcttaacaccacatcaaattggcaactctcaggctttcattcacacccagcatggtgttagacttgctcttaacaatttgcagcctgtcataccacatggcttaatttaacatgattatctaaagttacaacacaactaacccatcttggtcactccctgtccccagaaagacatccttttaactcaaggaaatataaacaatatatgttcactgctttagtacagttaacctacttccagtgtgttactttttctaatgattagatctaacatttcaatcttggcataaaaatacagcagtcctcccactccagactagcttccatggtctaaagataaatgtgtgccctttggtgctccacagaaaaacccgccctgctataacacctgtcagaaatgctgacatatatagcccaaacctgttatactggcaacacaggaaacattctggtttctctagagagaatggagggggctttcttgtgttttagttggttttaatatttattttaaaagactttaatctggatactacatgagaacatgtttatctaaacgagaggaatgactgacccagagggtcaacacatttgggaaaacattgatgcacttcatcccattcacttctatctccttccacttgactgtgaacaacgaaggagtcttcaccttcccaactccaagatctatcacagagtagacactccacgtctatggaataaatgaacatggttttacaacctgcatagtgagacaaaggaatctgctgcatacacagtgccacacactcttgtcatcctagcttatattaccttcctaaaaaggtgacaggtatagcattgtggatctttcacgcatgataatttgggaatgtgaagttacaaatgaccttagtgaactgtttccagtcagttaaaatgacatgaggctgcctgctaatgtacatgatcttacatttctggctccttttagagatcaccaaaatagcacttttaaagtgtattttttaatgtgctgtggataattttttaaccctactcttaagatataatgctataattttgaagctgcaataagagacattttcctcatttgcactaatagaaaaaggcacactacagatattttatgtatttttatttattattatttttgagacagagtctcgctctgtcatccaggctgaaatgcagtggcacaaccgcggctcactgcaaccctctgcctcccaggttcaagcaattctcctgcctcccaagtagctggcattacaggcacaagccaccaaacccagctaatttttgtattttgtattagtagagatggggtttcaccatgttggccaggctggtctcaaactcctaacctcaaatgatccgtctgcctcagcctcccaaagtgctgggattataggtgtgagccaccatgcctggcagatattttaaataaaacagcagctatgttgaaacacaccctgtagacataaaagtacagacaggaatatatttcactgacatttttctaccaaaagaaaagtgctatgctaaggtaaacatcttagaatcataggagaagctctcttctgtctggggcagcgttgagctttattcctggacaggatgatgtgctttcttggtttaagggaagaatcattggggataatttcaaaacaaaaatcctgtttttccccaattattctattgtaaaaatgtgtccaagtaggagttagatgcattaaatacatctactgattcattcattcaacaattcaacaaatatttactaagtacatactttgtgccaaaaactattctagatactgaagatacactggagaacaagagtcataaacccagactgagtgcagtggctcaagcctgtaatcccagcactttgggaggctgaggcgggtggatcacttgaggttaggagtttgagaccaacctggccaacatggcaaaactccgtctctattaaaaatacaaaaattagccaggtgtggtggtgcacccctgtaatccaaggtactcgggaggctgaggcacaagaatcgcttgaacccaggaggcggaagttgcagtgagccaaaatcgcaccactgcactccagcctgggcaacagagcaatactgtctccaaaaaaaaacagtcaaaagcccagtgttcgaggagcttacagttttagtgtagacaggcacacacacacacacaaagtaaatattataaaagatgagactagaactaagaaacaaagaatcaagacactgaattacagcataatgaggataacctagtcggacctagaatactgcttatatgatccctatctggttccttgctttgtgattaatgttcagtttcagagagcctcaaagagtcaagccttttatttgtatgaaattccaaaagcaagtgataagctgtgtttttaattggccacctgcatccacaatttaaaatctgcatgagaaaaggaaggatgccctttggaaaaaatgtttctccatatgttcacacaaaatgagtcttagaaataatttttaaaattaagaatcttacgtaatgttactttttgaagctagagacttaatttgaaagtgaaagtcattaatcctggcagaaatgtactgtgttaataatgcgtttctttctacaaacaggagaaccctgcctatgaggaatatataagaccacttttacaaagttggagatccaagctatgaaataaccaacagtattcaagaagcaaccagcaccatcatgtgataatggtactatggcatatatgcaacattaaaattttaaatta

SEQ ID NO: 10503 - DNA, 540 bp, Homo sapiens
gaagctctggagaaactagaaaatgaaccagcgattcagcaggtgctcaagcgcctctgtgacctccatgccatacatggaatcttgactaactcgggtgactttctccatgacgccttcctgtctggtgcccaagtggacatggcaagaacagcctacctggacctgctccgcctgatccgtgaaatacgatgtaaagccatccaggcaaaagagatgggaaaggtggatagtgtcaatctgaggatcaaagagatggaaggatgccatcctgttaactgatgcttttgacttcaccgatcagtgtttaaattcagcacttggctgttatgatggaaacgtctacgaacgcctgttccagtgggctcagaagtcaccaaccaatactcaggagaaccctgcctatgaggaatatataagaccacttttacaaagttggagatccaagctatgaaataaccaacagtattcaagaagcaaccagcaccatcatgtgataatggtactatggcatatatgcaacattaaaattttaaatta

SEQ ID NO: 10504 - DNA, 3058 bp, Homo sapiens
cagccggggagaggccagcccggcctacagtgcggacacaggacagaggggagccaggtgagccaggtttttgggcagggagggactgggagaccccagaggagagggctgcccccatgatgaccctgtccgcagctccgagagaccctgagcaaggctttcttcactgggcacctcctgcaaatcaggccctgcactaagtgttagggtcacggcatgacagtgacaaagatcccggccctcttgcagtttctgtgttagtagcagggagatggaagtaaacaaaaacatatgaaatgagtaaatgatctcaaatgtcagaaggggataagtgaaaagagaaaaaggagagcagagtgaggaggacagggaatgccgggggagggggcttggggttttaaagagggtggcctctttaaggttaaatgaggttcaatgcaaaaagccctagtgacatttgaagaaagggtgttctgggcagatggagatgccctagcaaatgctggcagtggcagggaggcctggagcattcagaacagcaaggaggcagtggcagcagagcaaggaaaagaggtaaggcaggacgagaggagccgcactaggggcacttgcaggactccggggggcagaggatggggccccttgccagcacccccacagccctgctgggggtattggtttgaaagcctcatatgaatcatttgctacatgtggttgcatgacccttataaagtctcctccctttccaaggcccacatcctctccataaaatggtaataacagcagtgcatctgtcaggttgaggtcaggaaggaaggggatcaaaagcatggcagcctgccggagagatttacaacatacctgctgcaagctaggaaatgcagagctggcctcccaggccttgtgggaggaacatgtaagcaaataagaacttgtccctaaccctagagcacccagggaacgagggagctgaactttgttcagagagaacagcaggggcaaagggtaggaagagaatgagtggaggccagggatgagggcagtaagttgacataggagagaggtgagtggagtagggttgggtagacacagcaaggactccattccacaaacagtgggccccaaggagcagattccaagcaggagaggaaaacaatgtgatttgcagttcaagagttcacctggcagctgggagaacaaataagaggaacactgaggccaagtaagagataacagtggcctggatgctagccaaagagatagcaaggagcagatggactcaagagacttgtgaaataggatggactgcacctcatggttgcctcactgtggaggaataggggcttctcagaggccaagcacttgccatgaaggagacagggtccaacctgggtatgaaagacactcaggggctccaggggaacacttcacaggcaggaagaaggcttcctcccttcagttccacaatatacctgcagggctcatagaaatggagctgagtgatcctagaacttatgagcagtttaatgagaccaaggtgcccccagcaatcctccacagtggagctgtagtatggacaagtcatgtgctttgtggtcagaccccatccaactcctggccatctccagctgtgtggctaggggccactcaacctctccaggattattttcttcaggtgtaagcttcactgacttttttgtgaagatttccctaggcaattcatgtaactcaaactgcagtggatagagcccaatctttggggtcaggccctgtccaattttggctaacaagtattgaacaaacatgtaccaagcaatggctgcataccatgcctaccatgcacacagtgcctggtccacagccagtgtccacagggggagtggggaggtggagtggcattcaggtacttagggatgtctttcttctaccaaccagccctggctgacacccagccctaggcagttcctcttgcacacaggttctttgcactgaccaatgctgagagcagaccctcggagcagccgggttggaagtgtctctccatagtcaccagacagatccaggataggatgggcagcccagtgcaccgagtgtcattgggggatacctggagcaggcaaatgcaccccgacatagagagcgagaggtatatgcagtcctttgacgtggaacggctcaccaacatccttgatggaggtgcccagaacactgcactccgcaggaaagttggtaaggggaagctggggaatgggacatctgttttatgccccatgcttctcttgtaagaagagtccttcattagcagttctgcttccaaataacaaactttgcccttgaaattccactgttagagattcattccttcgaactgtaaagacaatcttcacatgtcaatattgcctgagcccacctaggggatagaagagtcctaggcagcagaagacctggattctggtcctaaaattctgccactgcatagctttgtaaccttgggcaattcactttcccaccttggtcctcagttttgtcatctgtaaaataacaataatgtctgacttcctttccagatccatgaagcaagtgggtgagaagatttcaaggtgccagaaacctcacccaggtccctaagccctctgttctctgtcctctgcagagagcatcatccacagttacccggagtttagctgtaaggacaattatttcatgacccagaatgagcgttataaggctgccatgcggagggcattccacatccggttgatagctcggcgcctgggttggttagaagatggtcgtgaattaggctacgcttacaggtgctcactcctcgagcagccccactagagagggatctacctgggatcacctggaaaccccctagccccatgagccatttcccccaacaaagggaagacttgttgggaaaccaggatgctaggtgccctttatctcctgtactctgctcaggcagggggtacctgggcccctgtctccaataagctactcaactacagcatctctccccaacagagccctttctggagacgtggccttaaat
